United States Patent Application Publication US 2008/0034453 A1 - sequence listing, part 31

SEQ ID NO: 248736 - DNA, 530 bp, Glycine max
  unsure (1)..(530): unsure at all n locations
cgataatgcttnctgaacatgcaactgacgtcatcgcataccggtccggaattcccgggtcgacccacgcgtccgcccacgcgtccgaaactagtagtattattcttccattccgttctacatataatcattcataatgggtgttttcacattcgaggatgaaatcaactcccctgtggctcctgctactctttacaaggccctagttacagatgccgacaacgtcatcccaaaggctcttgattccttcaagagtgttgaaaacgttgagggaaatggtggcccaggaaccatcaagaagatcactttccttgaggatggagaaaccaagtttgtgctgcacaaaatagaaagcattgatgaggcgaacttgggatacagctacagcgtggttgggggtgctgcattgccagacacggcggagaagatcacattcgactccaaattggttgctggtcccaatgganggtctgctgggaagctcactgtcaaatacgaaacaaaaagagatgctgagcccaacaagacan

SEQ ID NO: 248737 - DNA, 441 bp, Glycine max
gaattcccggatcgacccacgcgtccgcccacgcgtccggtggatacatggctggtatattgtgtgccactgtctctcatcccgctgataagctcgtctctttcctgaacaattccaaaggggcaacggttggtgatgctgtaaagaagcttggattatggggtctgtttacccgtggtcttcctcttcgtattcttatggttggaactctcactggagcacaatggggaatatatgattcattcaaagtttttgtggggctgccaaccactggtggtgttgctcctgctgctgttcttgctcccgcttctgctgcttagcttgcaaaagtgtaaaatctccaatggattagcatgataacacttcgataattgtgtttcataaacacataaaaccaacgaatgtatggaccataaatattcagagaacttctgaagttga

SEQ ID NO: 248738 - DNA, 542 bp, Glycine max
  unsure (1)..(542): unsure at all n locations
gttgatgtaggtgcntntgngatgataagagtctcatcgcactgctgtaccggtccggaattcccgggtcgacccacgcgtccgcccacgcgtccgaggagaatgccgaagaacaagggaaagggaggaaagaaccggaagcgcgggaagaacgaggcggacgacgagaagcgggagcttgtgttcaaggaggacggccaggagtacgcgcaggtgctccggatgctggggaacggccgctgcgaggcgatgtgcatcgacggcaccaagcgcctctgccacatccgcggcaagatgcacaagaaggtctggatcgccgccggcgacatcatcctcgtcggcctccgcgactaccaggacgacaaggccgacgtcatcctcaagtacatgcccgacgaggccaggctcctcaaggcctacggcgagcttcctgacagcaccaggctcaacgagggcatcggcgctggccttgatgaggaggaggatggggccggaaatgattatatcgagttcgaggatgaggatattgataagatttgaan

SEQ ID NO: 248739 - DNA, 529 bp, Glycine max
  unsure (1)..(529): unsure at all n locations
tgtagccgtntgngactagaactacactcatagtactgccgtaccggtccggaattcccgggtcgacccacgcgtccgcccacgcgtccggatttttaccctcgtgatcctgcttcccataccatccatatgtcttgtgttgcatacaactcactattccttggagaattcatgcaacctgactgggacatgtttcatagtttacacccagcagcagattatcatgctgcagctcgtgcaattggtggatgtcctatttatgttagtgacaagccaggcaatcacaattttgatcttcttaagaagctggttctcccggatggttcggttctccgtgctcagttacctggcaggccaactcgtgattctctatttgtggatccagccagagataggactagcttgctcaaaatatggaacctgaacaaatgctctggagttgttggtgtatttaactgccaaggtgctggatggtgcaagatagagaagaaaacccgcatccatgatacatctcctggtacactcaccg

SEQ ID NO: 248740 - DNA, 531 bp, Glycine max
  unsure (1)..(531): unsure at all n locations
tgattatgctttactgttaacgatcgcacgctactgccgtaccggtccggaattcccgggtgcgacgccacgcgtccgcttcttatagcttcatcccaaaaagctcttttccttctaaatttgattccttagttcagcatgctattattatatatggcttcttcaccttcctcagaaaacaaaaacctagagggagtagctggtggtgccggagagaaacccattccacttggtgagaacgttctgcagaagcatgctgcattctttgacttgaataaagatggtgtcatctacccatgggagacttttaaagggttgcgtgaaatcgggactggggttttgctgtccgttggaggtgctattttcatcaatgtgtttctcagtcagagtactcgtcccggaaagtttccatctatactttttccaattgaaattaaaaatatccaacgcggcaaacacggcagtgacactggagtctacgatactgaaggaaggtttgtaccttcaaaatttgaagaaatttttaacaan

SEQ ID NO: 248741 - DNA, 534 bp, Glycine max
tgcttttggttgatgttgctgcatcgatgctatggcgataccggtccggaattcccgggtcgacccacgcgtccgcccacgcgtacgctttagtcattctaactgtcttgatcagtacaagaaagcttatactggagtgatttcacctaataggcaacctatgcaaggcactccaggtgtgctacaagattcaaacttgcctcttgagaagagtgaagccacatagcttgcatgtgctctatgcaggggtcaggtgaaaggttggactgttgtggaacctgttcgggactatctgaatgcaaagaaaagatgctgcatgcatgatgactgcttgtatgttgagagctataaggagttgaataatcctgtgctgacagagcattcgtcggcacggccacggattgaggatcctgctgatgaacagaaatggacatggctctagtgggagcgtgaaagaaaagatgatatgagcacagttacattatctatgcctgatgcaacattttttggagattatgttatagaatgccatcc

SEQ ID NO: 248742 - DNA, 535 bp, Glycine max
gctgatgcgttgagtgttgctagggatcatagcactgtcagtaccggtccggaattcccgggtcgacgcacgcgtccgacgcaatgtgagaacccccacgggcaagtgtggaattacaatggaggcctcctacccagggaagaatggtttaaactctgctaattcagtttatgaaagcactgaggtgtatgttagcagtgcttgatataacaaccttcatcgttatttatgatctttggaattgggaagaggaacaagtgctcaagttgcaaatgtttctgttatctttgatgcttctattgaatatgtctgttgggctattcttgtacatatatttcttcaagttaaaaaactgaacctgattatcaatttgtactggttttcactcattgttattccatttgaatgttttatctgaaatccttaatgatatggatgcgctagttatatttctgaaaaaaaaaaatattattttaaaattaaaaaaaaaagggcggccgctctaaaggatccaagcttacgtacgcgtgcattc

SEQ ID NO: 248743 - DNA, 539 bp, Glycine max
gttagagtcgtctgtagccgcatggacaatcactgccgtaccggtccggaattcccgggtcgacccacgcgtccgggaatgtggaagaggacatttgaaaatttggtgacataaatacttctaacatgctagggtgtaggatttaaattaagtttcttgaattctgtgtgcaggttttggctcattgggtctcatgacttctgtgctgttatcttctgatggcaagacattagaagctgaggcagctcatggaactgtaactcgacattttcggtttcatcagaagggacaagaaactagtacaaacagtattgcttccatatttgcatggacaagaggactggaacatagagcgaagctggataataatgaaaaattacgggattttactcaaaatttggaggctgcatgtgttgagacagtggaatcaggaaagatgactaaagatcttgcaattctgattcatggacctaaggtatcaagggaattttacttgaacacggaggaatttattgatgctgtggcacataattcttaag

SEQ ID NO: 248744 - DNA, 527 bp, Glycine max
  unsure (1)..(527): unsure at all n locations
tgaggcgtttnctcgtaatctattcttctgcactgccgtaccggttcggaattcccgggtcgacgcacgcgtccgtgccagcttagtctctgctctgctttatgagaaaaggtttggtccatacttttgtgagcctgtaattgctggattaggggatgaagacaaaccattcatctgcacaatggattgtcttggggcaaaggagcttgcaaaagattttgttgtttctgggactgcatctgagtctctgtatggtgcttgtgaggcgatgtttaagcctgacatggaaccagaggaattgtttgagaccatctcccaagcactgctatcatctgtagatcgtgattgtttgagtggctggggaggacatgtctatgttgtcacgccaaccgaagtgaatgaaaggattttgaagggaaagatggattaacttgtaagccacctgagttttctgttaagtttggaattgaatggcatgacatttacaatccctttgttaaagggacctttgttattgcggctcttta

SEQ ID NO: 248745 - DNA, 536 bp, Glycine max
  unsure (1)..(536): unsure at all n locations
gttagtagccgtntatcatgagatcgattacgctagtacctgccgtaccggtccggaattcccgggtcgacccacgcgtccgatggttatggcggtcccttgtatgcaggaactggttgctttcacaagagagaggctctgggtgggatgaaattcagtgatcaatattgcaatgactggaatagtgaagatgatcagtttaaagaagcaaacctgcaagaactagaacaacaatcaaaggttcttgcaagctgcaactatgaggaaaacacactatggggaaaagagatgggtttaaaatatgggtgtccagtggaggatgtgataacaggattgtctatacagtgccaagggtggaaatcagtgtactacaacccaccaaggaaggctttcttaggtttagctccaactaccttgcctcaaacacttgttcagcacaagagatggtctgaaggagacttgcaaattttgctttctaaatacagccctgcatggtatggttttggaaggatcaattttgggctccaaatgggatn

SEQ ID NO: 248746 - DNA, 532 bp, Glycine max
  unsure (1)..(532): unsure at all n locations
cggtggtgggtatcgtgattgccggatcgcacacgatcgacagtaccggtccggaattcccgggtcgacccacgcgtccgcccacgcgttcgnccacgcgtacggcataataatctaccgtttcatgattaaggtttcgacggggcagtgaaacatgggagaaccaaaacgaatctatctgcgtatctttgcgctgctcctcttcatttacgcctattcatttcagcttctccgcgctttcgatgacgcgatcttttacgagtcgttcgacgaggatttcgaagaccgttggattgtgtctcacatagatgagtacaatggtgtctggaaacatgccaagagtgagggacatgatgattatgggcttcctgtcagtgaaaaagttaagaaatatgctataggtaaagaacttgatgaagccgtgggtcttaatgatgaaacagttgttcctcaggttgaaacttggctttacaatggccttgaatgtgaggtgcatatctaaaatatcttctaccacaagaagctggatgga

SEQ ID NO: 248747 - DNA, 528 bp, Glycine max
  unsure (1)..(528): unsure at all n locations
agtttatggttctgtatcgaactacactatngctgtaccggtccggaattcccgggtcgacccacgcgtccgatcctgcttcccataccatccatatttcttctgttgcatacaactcactattccttggagaattcatgcaacctgactgggacatgtttcatgtaagtggaagtgtgaatttctctcctccatttataatttattaaagtgcctgatcttttctcaagagttataaatttgcttcatgttaacaaaagatctttgtaatttcagagtttacacccagcagcagattatcatgctgcagctcgtgcaattggtggatgtcctatttatgttaagtacagtgatgttttatgtcacatctttttcttagatgaaattggcacaaattgtaatgtgtgattctgtatttatgatggtttttaacagttgacagccaagcaatcacaattttgatcttcttaagaagcttgttctcccggatggttccggtcttcgtgctcagttacctggcangccaaa

SEQ ID NO: 248748 - DNA, 472 bp, Glycine max
cggaattcccgggtcgacccacgcgtccggacagaccaaagcaaacaaacaaaacagccaccgccattccaattcgaagaagaatagtggttcaagagtttgttggcaaccatggcgatgcgcgacctcgtttctggtgccgcggcatgtggcgactcttcttcttcttcctcaaaccctctcgcttccctcgccaacgcccttattggctcttcgtccaaaactcaggagaggctgaaggagattcccacatccactcctactgaccctgcttcccaattttactccacagctctccccgccaatcagcttcccggctccgaattcgataagcctctattgaatttaaactcccaggcttcggagtttttgcataggttccgtggctccactggccttgaggagacatgggatgagatacagcgtgatggggcggctgcccaaatgcgccaactgccaccggggattcaac

SEQ ID NO: 248749 - DNA, 467 bp, Glycine max
ggaattcccgggtcgacccacgcgtccgcccacgcgtccgaaaaaaacaaaagcaaaacacaataaaaaaaaaaaaaaaaaaaaaaaaaggaaatgagttaattcattcgagcaacaacaataattaagttaattatacaaaattttactgaattatatattctgcagtaatgtatgaaaattctgatatcattaaaaaattgtttcaattcttgttttcttctaatgggatttataattttgtgtttaaaggtactaaattttaacatatggtattgcctcatttaatgtttgaatgatttaacttatttggcttaatgctttattgatgatattgttctacttcattgatcaccacgatgagcaatttcaattatgggcaagaatttatagtctttgcaatttatataaatcatattatgttattttttattcaacttacaatccaatatttgcatattgattct

SEQ ID NO: 248750 - DNA, 356 bp, Glycine max
gaattcccgggtcgacccacgcgtccgcccacgcgtccggtagattactatatccgaccggtcccaacaaccccatgtgatgggcgtgggccgtgtgtggttggaagtggctatgttctcatagcaaggtcattcaaccacacttgccctcttaatgttgcggtggtggagggtttccgtggcctaacaatcacattcaaactagttaaccctaaaaaaggggtcattagggtttctactgacttgaacatcaaaacctccctaactaacacaagttgtagtgagtccacggtctggaagctagatgcctttgatgattcaacttggcaactgtttgtgaccacttgtggtgtgtt

SEQ ID NO: 248751 - DNA, 537 bp, Glycine max
gtagagtagccgtatgtctactcggcttttatcttctgactgccgtaccggtctcggaattcccgggtcgacgcacgcgtccgcccacgcgtccggtctgttatccccgtgaggagggggtactgggggaacaagagcggggggccccacaccgtcccgtgcaaggttacggggaagtgcggctccgttaccgttaggatggttcccgcgccgagaggttcggggatcgtggcggctagggttcccaagaaggtgctgcagttcgcggggattgatgatgttttcacctcctccagaggatccaccaagaccctcggcaacttcgttaaggctacttttgattgcttgatgaaaacctatggattcctgacaccagaattctggaaggagactcgcttctccaaatctccattccaagagtacacagatctactggcaaaaccaacaggaaagactctaatcttggaggaggaaagggtggatgcttgatttgctagttttgctttatggatgttttaagaactttattactttaca

SEQ ID NO: 248752 - DNA, 539 bp, Glycine max
  unsure (1)..(539): unsure at all n locations
gctggctgtgtgtngctgcagtcgactacagtcgcactgcggtaccggtccggaattcccgggtcgacccacgcgtccgattttgtcgtagagggatccctctggtgtaggattgtgtgtatcttcagcgatggaaggtgtttcggatcaagacagtagtatatgcactcactgtgatcgggctattcctgctgcaaatattgacttgcattatgctcattgctctcggaagcttgaaaaatgcaaagtttgtggtgatatggttcccagaaaaaatgcggaggatcactatctaagcacccatgcaccggtttcttgttcattatgcagtgagacaatggagcgtgatattttagatatccataaaggtgaaaattgccctcaaaggattgtcacttgtcagttctgagagtttccattgccagcaattgatctggccgagcatcaagaagtatgcgggaatcgaacagagctttggcacctttgttacatatatggtagactgcgtgaaagattcagccttgaagctcgatgcaatn

SEQ ID NO: 248753 - DNA, 403 bp, Glycine max
aattccaggcgggcgtacgctagaacagcctcccataaatagccccgcagcaaaatgaatagtactacctacttggctctctggtactttgtgccctaacgtcatcatatcagccttcagccaccgctgatattgtattcgacaccgaaagcaatcctattcgaaacggcggcacatactatgtgtcgccagttataagaggaaagggcagcggaatagaatttgccaaaaccgaaacagaaacatgccctctcactgtcgtgcaatctccctttgaggtctcaaacggtctaccactgataatttcatccccatttaaaatccttgacatcaccgaatgacttattttgagcctcagtttcacttatgtacccccctgagcctcaactccttctcggtggac

SEQ ID NO: 248754 - DNA, 379 bp, Glycine max
gtcaaaattacatttaccattattttcaaatattaattttctaattaatcattattcttaattcatacaattcttccaatcccttacattaaaaaaacatataaattcaaatccaatattatatatctttcttctttccttttaaacctataattctaatacattcttaatttactttcctaccctttactttttaactttttataaaataatacattttattctttatattaattaactcatactctctaacaataactaactaacttattaatatttatatttatttttaatattttcaacttaacattattttatatcactttttactaaacctctaatttcatatatatttattttttataatactttattctaa

SEQ ID NO: 248755 - DNA, 543 bp, Glycine max
  unsure (1)..(543): unsure at all n locations
gtcatggtntnnntngatccccacnctagactcgactgacgctccggtccggaattcccgggtcgacccacgcgtccgaattttaaaaaattacttttgaagaataacattaattattacaagtgttaccaacaacggtttaaaaacaatgtatgtatttgggggaaaaatatatcttttgaaataattaatatttttaatgaaatatgaatttcttttgtctctattttttgtaatatctttatttttaaaaataaatctagatatttaatattataatacttgatagaacttaaaatctttcaagattaatataatatttttttaatccatctccttccaaagttttcaattattcaatcaatacaattttaaaactatagtcctactaataaaaataataatatataatatcatataataattcaaattaataacaaataatagtatatttttaaaaagtgtgaaatttatttggggccttagatgaattgttgacctaaggtaacaacctaacttgccttngaattgccacggtcctgt

SEQ ID NO: 248756 - DNA, 535 bp, Glycine max
  unsure (1)..(535): unsure at all n locations
ggatagatgtgttcgngactgactgactgcagtagcactgccgtaccggtccggaattcccgggtcgacccacgcgtccgcggacgcgtgggttttttcactggaagaaaggaactccatttgcggaggaccaggggatgtacaatagattgacttggtgggagcaggtagacaatggaaagcagcttactcggaacaggaagtttctcacagttgttcctttggtgctgtacttgatagcctcacacacaacagactatcagaatccaatgttcttattcaacactgttgcagtgattgtgctggttgttgcaaagttcccccacatgcacaaggtcaggatatttggaatcaatgctgataagtgaaatgttgctgtggccatgacacttggttaccactccttacctgctcaagagcctcttgtccttttgttctggaaaaaaaggtcacacctttgtatagaaggcagaactggaaggatactcaagtaatgttntgttgccaactgctttttaagctgcttctaaaagan

SEQ ID NO: 248757 - DNA, 536 bp, Glycine max
  unsure (1)..(536): unsure at all n locations
tggttatatgggtnctnttccatgaatcgtatctcatggcataccggtccggaattcccgggtcgacccacgcgtccgcccacgcgtccgggttaaccatgaagtttatgtatcttgcattcctacttctatttgggttctctagccaattcttgcttggaggagcagatgcttcccccagacaagtgattgacacagaaggcaagaaagttcgagctggcgtagattactatatccgaccggtcccaacaaccccatgtgatgggcgtgggccgtgtgtggttggaagtggctatgttctcatagcaaggtcatccaaccacacttgccctcttagtgttgcggtggtggaaggtttccgtggcctagcagtcacattcaaactagttaaccctaaaaaaagggtcattagggtttctactgacttgaacatcaaaaccttcctaactaacacaagttgtagtgagtccacggtctggaagctagatgcctttgatgattcaactggacagtgttttgtgaccactggtggtgtg

SEQ ID NO: 248758 - DNA, 548 bp, Glycine max
  unsure (1)..(548): unsure at all n locations
ggatgattactgatagtactgtcgtaccggtccggaattcccgggtcgacccacgcgtccgcccacgcgtccgggaatcatccattgttgagtggaatgaaagtgaaggagctgttaaaaggacttaccaaggatttcgtaagcgatctttgggtgtcgtgcaatttgatactaccaaaaatcgatttttggctgctggtgatgatttctccatcaaattctgggatatggataatgttcagcttttgacaactgttgatgctgatgggggtcttcctgcaagcccgcgtattcgcttcaacaaggatggaactcttttagctgtctctgcaaatgagaatggaattaaaattttagccaatggggatggtattcgcttgtcgcgcacactagagaantctttatatgatgcatcaagagcatcttgaagccttgacaaagcctattattaatccaatttctgctgcttccgcttttgaaaccagtgcttgactggcanatagggcttatctgtagtagctaatgctggaatgaatgggattaccgaa

SEQ ID NO: 248759 - DNA, 477 bp, Glycine max
ggaattcccgggtcgacccacgcgtccgcccacgcgtccggcagattgtttttgtctgttctaattggggaatcctatctgcttcagtttgatcaggggttccactaatccggccctaccaatggcaaagcttgcttatgccagttttaccaaatggcatgctcgagtttctggatgcacctgtcccctacatagttggtatcaagaacaagaccaatgaagttcagtcaaagttaactaataatgttatcctgattgacgtcagcagaaaccaggtgaagtcatcaacagtacctcaactgccaaggcagaaagagttaatctcttctttacgtccttatcatgaaactcttgtgggagaaagttacttgggtaggagaaggccagtgtatgaatgcacggaagtgcagacagaagctgctaaggggttcctatcggagttaaggtcttatttggattctctttgctataacattc

SEQ ID NO: 248760 - DNA, 571 bp, Glycine max
  unsure (1)..(571): unsure at all n locations
gtnttttgcagtagcgaatatgagactcagctcatgattgaactgctctaccggtccggaattcccgggtcgacccacgcgtccgcccacgcgtccgcccacgcgtccgaaaaaaaaaaaaaaaaaaaaaaaaaaaaaaaaaaaaaaggaaaaaaaaaaaaaaaaaaaaaaaaaaaaaaaaaaaaaaaaaaaaaaaaaaaaaaaaaaaaaaaaaaaaaaaaaaaaaaaaaaaaaaaataaataaaaaggaaagaatataaaaaacaaaaaagagggaaaaaaaaagaaatataacaaatgaaaataaaatgaaaaacaaaagtcgtataacgaaaaaggagataatagaaaaaacccgggcaaagatcactttatacaatttgggcacactaaatatggaaaaggagacgcacagtgtaagggggcttaaagcgaagggattgcagaatatacgcaaagtgtaaaggaaactttgaacagccctatagcgcggtgataatgcactttgaacttgaaagtttatagacaagctaaacggttttacccgaaaaagctataaatgggggattta

SEQ ID NO: 248761 - DNA, 572 bp, Glycine max
  unsure (1)..(572): unsure at all n locations
ggatagtctgaggtatgccgtacatgaaatcaaggagaaccgataggaatgtccgtaccggtccggaattcccgggtcgacccacgcgtccggaatttaatgggttggtgttgatttctttctgcaggagtcaagcaagagcatacagattgaagcatttcatgttttcaagctatttgctgccaaccaacataagccagctgatatcgtcagtatatttgttgcgaacaaaagtaagatgctgagactattggaagagcatgatcagagggaaaagaaaaagagtggccattgccgtgggaggcgaaaaactcatcaaagagcaaagtcacccgtgaacgtggtttctcacaccccagtaattccagattttcttttgtagcattaaaggaagctggttagagggaagcatcgagttaagttctccattctttttcggaaaatctgaagttttggctttcactcccccctcgtatgtcgggtgaatccatgactngctattatattatgttcaatcccgggatggagatgattcagatggtcgattgtagatgcttctttcaggtgtctct

SEQ ID NO: 248762 - DNA, 503 bp, Glycine max
gtaccggtccggaattcccgggaattgattgccgaatttgtggtgatccacattcagttctccgttttgcttttgttgagtttgcagatgagtatggtgcaaggactgctctaaatcttgggggtaccgtgcttggatactatccggtcagggttcttccttcaaaaactgccattcttccggtgaatcctacattcctccctaggtcggatgatgagcgtgaaatgtgtgcccggactatctattgtacaaatattgataaaaaggtttctcaagctgaagtgaagaatttttttgaatcagcttgtggcgaggttatgcgccttaggcttttaggggaccaagtgcattcaactcgaattgcttttgtggaatttgcaatggtaagtcttgactatactagttgccattaattggctgcactacactttcatagtttatgagaataactgcatcatgaacaacttattcaacctatgttgattattttatggattctatgt

SEQ ID NO: 248763 - DNA, 561 bp, Glycine max
  unsure (1)..(561): unsure at all n locations
gtttttatggcgttgactatttcagtnaccatgcaggacgctcgtaccggtccggaattcccgggtcgacccacgcgtccggttttacttctccatgctgcccaggctgctgcccttgaccttggacttgttccacaatctgagaaaagccttgagtctgcaaaatttgtatatttgatgggtgctgatgatgtaaacttagacaagatcccagatgatgcttttgttgtttatcaaggtcaccatggtgacaagagtgtttatcgagcaaattttattttgccagcagcagcattcagtgagaaggaaggaacctatgaaaataccgacggatgcacgcaacaaacattgcctgcagttccaacagttggtgactccagagatgattggaagataattcgagctctatctgaggtggcaggagtgcctttgccctatgatacaattggggccgttcgtgcccgaatcagtactgtagccccaaaccttgtgaacatggatgagagagaaccggccacattgccatcttcactcagaccaaccttctctgagaaggtggac

SEQ ID NO: 248764 - DNA, 571 bp, Glycine max
  unsure (1)..(571): unsure at all n locations
gtnntctgccagtatgtccgataaatgaaatccattgattaccgatagtaatgacgtaccggtccggaattcccgggtcgacccacgcgtccggttagttcacacactaagttctgaaaaatgagttccaaagtttttcttattctacttatgtgcatggccactatacttttgatctcctctgaggttgcacccgatgatgcataccagaattttgacaaaacagatgggaagcgtagtgcaaatggggtagatgaaagcaaatattggcgtggtggctatggcgactatggtggttggcgtggtggtggttggcgtggtggctatggaggctggcgtggtggctatggtggtgggcgtggtggctatggtggctggcgtggtggctatggtggtgggcgtggtggctacggaggttggggtggtggctttggccctaacgaacataatgaggctgggattgatgctagccctcacaactaagaaggaaacttgctaaagcttatataggatttaagttatcgtaataaataaaacttcattggaagggtagttataatagatgtggaga

SEQ ID NO: 248765 - DNA, 576 bp, Glycine max
aggttttatgtagtttgccgaataatgaatagtccagttactcgatagtactgacgtaccggtccggaattcccgggtcgacccacgcgtccgaaattagccatcattagaccttttctaaaaaaaaaaaaaaaaaaaaaaaaaaaaaaaaaaaaggaaaaaaaaaaaaaaaaaaaaaaaaaaaaaaaaaaaaaaaaaaaaaaaaaaaaaaaaaaaaaaaaaaaaaaaaaaaaaaaaacaaaaaaaaaaaagaaaaaaaaaaaaaaaaaaaataggggaagtggatatagaagaataaggtgtacgtcgcggaggtgaaaaccatagagtttattaaaggattacgcaatgtatataaagggggccgaggttaaaaaagtagctaactagtaaaacctatgggatccccatagtaaaatactgagcataacttacggtttttgggaatggggataattctgaaggattcatgcaaatggtccctttaaaaagttggagggcaccaattttattttgataggctttttggaatgggaataaaattatctttcgttgataagatataatattaaaaac

SEQ ID NO: 248766 - DNA, 571 bp, Glycine max
  unsure (1)..(571): unsure at all n locations
agtttcgccgaggtgcctnaagctgagtattttgagaactngtnagtactgtccgtaccggtccggaattcccgggtcgacccacgcgtccgtagatatatagaagagccttccatatatagcctcccaaaaaaatgaagagtactacctcttgggctctctttctactttgtgccctaacttcatcatatcagccttcagccaccgctgatattgtattcgacaccgaaggcaatcctattcgaaacggcggcacatactatgtgttgccagttataagaggaaagggcggcggaatagaatttgccaaaaccgaaacagaaacatgccctctcactgttgtgcaatctccctttgaggtctcaaagggtctaccactgataatttcatccccatttaaaatccttgacatcaccgaaggacttattttgagcctcagtttcacttatgtacccccctgtgcctcaactccttctcggtggaccgttattctcaagggtctgccagaagaactccatgtcaaactcactggctacaaaaacacaatagatggttggtttaggattcaaag

SEQ ID NO: 248767 - DNA, 565 bp, Glycine max
  unsure (1)..(565): unsure at all n locations
agttnntagtnagtttgccgaatgctgaaaactcagctactcgatggactgacgtaccggtccggaattcccgggtcgacccacgcgtccggttatggcaggacagaacttgtgcgcatactattgcagattgctgaaagaaacagctaggatgttgatgatgacttggcgttgggttttgcctcccattatggcaagatatgaactatggattgcttggtggaagatggaaatgccatacactttatgggccctttgatgagagctgctgagaggcgttgcatgcaagtagttgagtggtttgtgcagaggggttgtcgagacatgctactatgccttgaacttacagctgccacttatagctgccatgttcacattgcagctgatcttctgacgcacgtacctcatgatgtcctagcagcactgagtgttgaaattcttaatgcgcgtgctgagcgcaacagaggatctcttgatggtgtagcattatttctccaatctgacttcttaagtgatcctgcagctacttatgctgttgcagatattattgctaaatcagaggatg

SEQ ID NO: 248768 - DNA, 410 bp, Glycine max
ggtcctgaattcccgggtcgacccactcgtccgaaaaaaaaaaaaaaaaaaaaaaaaaaaaaaaaaaaaaaaaaaaaaaaaaaaaaaaaaaaaaaagaaaaaaaaaaaaaaaaaaaaaaaaaaaaaaaaaaaaaaaaaaaaaaaaaaaaaaaaaaaaaaaaaaaaaaaaaaaaaaaaaaaacaaaaaaaaaaaaaaaaaaaaaaaaaaaaaaaaaaaaaaaaaaaaaaaaaccccaaaaattaaattaaatgaaccaaacttaaaaaacaaaacccctggaaaaacccattttttccccaaccaaaaaacctataaaaaaacacccttttaaaaaactaacataataccaaaaaagcccgatccaaaagcctttccaaaaatattcccaaactaaatggccaatgaaacc

SEQ ID NO: 248769 - DNA, 568 bp, Glycine max
  unsure (1)..(568): unsure at all n locations
agcntagtggcagtatgactcgatgttgggagcatacagtancgctcgtaccggtccggaattcccgggtcgacccactcgtccggtggcactgctgctcttgggtttgcccaatatgttcccaatgagaaccttctcatgacaaaggagcagctttttgatatgacttgtatgacacttggcggtcgggctgctgagcaggttcttatagggagaatctcaacaggagcacaaaatgacttggaaaaagtgaccaagctgacgtatgcccaagtagcagtttatggttttagcgacaaagtaggcctcctctccttccctccaactgagggctcatatgagttttccaaaccatacagcagcaaaactgctgcaatcattgatagcgaagtgcgtgattgggtggacaaagcatacaaacatacgattcagcttatcgaggaacacaaggagcaagttactcaaattgcagagttgctgcttgaaaaagaagtacttcaccaggacgacttgcttcgagttttgggcgagcggccgttcaaggcttctgaactcaccaattatgatg

SEQ ID NO: 248770 - DNA, 463 bp, Glycine max
gaattcccgggtcgacccacgcgtccgctaagtgtaatgatgagactgtagacgaatcttcaaatgatgtcaacggttctatcaacttgctaccagtgacatacatgcctactattaactcaagcgacaatacgtctatgcacaccactcaaactcaaggatacattccaactgctgccaaaggccataaagattctgatcatgcactggctatgaatgaaagtggaacaattcttgactctggtggcacacaaaacgttgtgcgtatctgggacacatgatcatgatcaaagactctcaagctaagagggcatacagataacatcagggctctgcttctggattctagcggcagatactgactatcaggatcattagactctatgatcaggcttcgggatataggtcatcaaaaatgtgtgcattcttatgcagttcatacacattctgactgggcactcgc

SEQ ID NO: 248771 - DNA, 572 bp, Glycine max
  unsure (1)..(572): unsure at all n locations
ggtntctgccgagttgcctaaagtcgatnactatgtagactcgatcggacctgctcgtaccggtccggaattcccgggtcgacccacgcgtccggttggcattactgtgagctcccgcaggcagcagcagcactcatagagcttgcgagcgagtggtcacttggccacagttatcgccgtttccccgccgagatctctcaatctccgacgactcagatacctctattaatttttgttcctccggttaggttaggctataatacgtagtttttccttatttatggcttcggagaatgtgaagaccggggattcggccgtgacgacgatcgtcaatctcgccgaggaggccaagctcgccagggaaggcgtcgtcaaggctcccagctacgccctcgccagcatctgcaagtcgctcgtcgccggtggcgtcgccggaggagtgtcacgtactgcagttgctcctctggaacgattgaaaattttgctgcaagtccagaatcctcataacattaaatacaacggaacagtacaaggccctaaatatatatggagaacttgaggattccgtggac

SEQ ID NO: 248772 - DNA, 566 bp, Glycine max
gatttttgttgagtatgccgattcctgaatcctcagctgctcatcgtactgacgtaccggtccggaattcccgggtcgacccacgcgtccggaacagtgctcatgaatgttacaggaatcaagaagggctgaagagcatgatactggtacaagataatatcgaaggatgagtccattgtaaaatcacgatctatgcactacaaatttgctgctagtgactctccagaagctccgtaggtggtggcaactcctatgaaagtcagctcaatcagcatgtctggaaagcgacatggttaaacctctgtgtacattatctctttaaaggtttcaaatttctagtgttaggagtgtctatgaagtttgaacaatatacttgcttgtatccaagtttgaaatgctactatccctctgtaaagcacttattaggttgccctgtatgtattaccttctgtgttgcgattagtctgggattgctgactgaattgtcctttttgattacaaataatacaataattgcttatgaagaagatgcacttgcaccgatataaatcggtggctccctttaa

SEQ ID NO: 248773 - DNA, 572 bp, Glycine max
  unsure (1)..(572): unsure at all n locations
gtnnaatgcccnaggtagctnantaatgatnnctcgcgggatattattgtatcgctctaccggtccggaattcccgggtcgacccacgcgtccgctgaaccctaatttacacacactccctttattcgatccctctctccaaccatggcgatcaactcttccaagaatccagatggttctgtccaaaatgcaatgccttcgtatttttattctccaccactagatgtttctgctgcatttccacaagcaacaccagcatcaacgtttcctccttgtgcttcagattattttcaattggacaacttattgacagcagaggagcaagccattaggaagaaagtaagagagtgtatggaaaaagaaattgctccaataatgactgagtactgggagaaggccaaatttccatttcatgttattccaaagcttggtgcattgcgcattgctggtggcacaatcaaggattatggttgtcctggtctttctatcactggaagtgctatagctgtggcagaaagtgcaagagttgatgcaagttgttcaacttttattttggtccattcatcctggct

SEQ ID NO: 248774 - DNA, 564 bp, Glycine max
  unsure (1)..(564): unsure at all n locations
gganttagcccaggagtctgatgatcgaaactcagctactcatcgtactgacgtaccggtccggaattcccgggtcgacccacgcgttcgagagagagagagagagcattgcattggcgagaccaccgcggtggagcgagcgagcgagcaagcgacgacgaaaattgaattgctcgtgcgcgtgcgtgcgtgatcgtttgattgtttggatcttgtggtcgatcgaggacgatgtcggagatggcgagcccagatcccgagggactcgacggagtccggatgacgtggaacgtgtggccgcggacgaaggtggaatcaagcaagtgcgtgatccctctggcggcgactgtggctctgatccgtccccaccctgacatcccccgcctaccgtacgcccctctccgttgtaagacctgctcctccgtcctcaaccccttctgccgcgtcgacttcaccgtcaagatctggatctgccccttctgctaccagcgcaaccacttccnccctcactaccacgccatctccgaaaccaacttacccggcgaactctacccccaatacacc

SEQ ID NO: 248775 - DNA, 297 bp, Glycine max
aattcccgggtcgacccacgcgttcgcacgtgcattagcccacgctatcggttggatcatacagcaatggccaacaggtttaattctaaggcccttgttaacaagtatcatccggtagacattcttcactcgtgatgccgctctcggttatcatgactacctcaacaccgacgacgtgcactacaatgacagccgatcctacgaccacagctccgtcattgatcgccacttctaacgctgtatacctataactgcactccgggacgatctattctcatatcgcgtggatccacatgc

SEQ ID NO: 248776 - DNA, 437 bp, Glycine max
cggaattcccgggtcgacccacgcgttcgcccacgcgttcgggatgacgaggacgaagacgatgaagaggaggatgacactaagactaaagggaagaagagtggtaaggcacaggctggtgatggtgatggtgagcgacctccagagtgcaagcagcagtaattgtttgtttcttcggagtatcatgtggctgatgggtgtttttgaggtcctatggtgcctgacgggaaagtgggtttcaatttcatgcaatttttcatagtccttgattcattttcctccctagatccgatagtctgaatttattgagtcaatttctcctttttcccatattttgggagaatgtggttatatatttgtagtcagggatgctgtgaaaaaaaaatatcactggaaagcaataagagtaggactaaagggatacagatgatgctatg

SEQ ID NO: 248777 - DNA, 575 bp, Glycine max
  unsure (1)..(575): unsure at all n locations
ggatttggcaggtgcgaattcgagttaccgaancatctattgtactgctctaccggtccggaattcccgggtcgacccacgcgtccgcccacgcgtccgggttgatgctaaccctcacaactaagaaggcaactttctaaagcttatatatgggtttaagttatcgcaataaataaaacttcatgagaaggttagttgtaatagaagtggaaaactttgtaaaggaataatacctttcatgaatttccttaaaaaaaaaaaaaaaaaaaaaaaaaaaaaaaaaaaaaaaaaaaaaaaaaaaaaaaaaaaaaaaaaaaaaaaaaaaaaaaaaaaaaaaaaaataaaaaaaaaaaaaaaaaaaaaaaaaaaaaaaaaaatacaaaaaaaaaaaacaaatacacaaaaaaaacaccctaacacaacactactttaaactaatataaattacttccttctacaaattctccctctttctcccatcaaccttctaaatctatctcttccttttaatattccccaattattacttcactttaccttctttcccaaaaaaactaattttatataatctttcc

SEQ ID NO: 248778 - DNA, 560 bp, Glycine max
  unsure (1)..(560): unsure at all n locations
gantaagccgaggtgcgaatgctgatactaccgatactcctcgtactgacgtaccggtccggaattcccgggtcgacccacgcgtccgcccacgcgtccgcccacgcgtccgcccacgcgtccgcttagtcccaattttctagggttttattcattttccgatggcttctgcagatgttgagtaccgttgctttgtcggtgggctcgcttgggccactgacgaccatgccctcgagagagccttctctcagtacggcgaaatcgttgaaacgaaggtctgtttgttgcaggcatcacatctgatctcacacgattcggattcggaattttctcgatcccgttctgatctgtgatctctgatctgtttgcgttacttgatcttatgatacttgtgttactatatgattcttttattactcacgccaatagattatcaacgatcgtgagactggcagatccaggggttttggatttgtgaccttcgcctcggagcagtccatgaaagatgcgatcggagcgatgaatggacagaacttggacggccgtaacatcactgtcan

SEQ ID NO: 248779 - DNA, 556 bp, Glycine max
  unsure (1)..(556): unsure at all n locations
aggtttgcnagtgctgttaagatctcagagactgatctaccggtccggaattcccgggtcgacccacgcgttcgtccacgcgtccggatcttcgcaatctcagaagtccctggtgggtactggctgggccatcgtaagctgtgagctatgtcaaattcttggactctgaaacacttgtttctgcttctactgataatacattgaagatctgggatctcaataaaacctctcctgtgggtgcatccattaatgcttgcagcctaactctgtcaggacatactaatgagaagaattttgtgggtctatcggtggctgatggatatattgcatgcggttcagaaacaaatgagatttacacctactatagatcgcttcccatgccaatcacttcacacaaatttgggtccattgatcccatttctggtaaagacactgatgatgacaatggtcagtttgtttcaagtgtatgctggagagggaaatcagacatgcttattgcggccaattcaagtgggtgtgtaaaagtgttacagatggtttaaggaaagggtcctgt

SEQ ID NO: 248780 - DNA, 563 bp, Glycine max
  unsure (1)..(563): unsure at all n locations
agttntagtcnaggttgctgataaagcatctatgagagatcgctctaccggtccggaattcccgggtcgacccacgcgtccgagaggctgtacagaatgctatggacacgctctatggcatgtagatcgatgatcagcatgtctatgaatgccattatgtgcaaaagcactatacagagaatgctctcagtaggacaaaatcgagtaacgtacatgagaaaaacctatcacagtcaaccaccgatgaacgagatgatgaaaatgtatggagaatatggcaccattactagtgctagtataatgagggacgcagacggggaatcaaagtgtgctggctatgccaattttgaaaacccagatgatgctgccaaagctgttgaaggacttaatgggaagaaagttgatgatcaggagtggtatgttggaaaagcccagaaaaaatctgatcgtgaacatgaactgaaaggactggttgagcagagtataaaggaatctgctgacaaatatcaacgtgtgaacctgtatctcaagaacttggatgatactatcagtgatgaaaaact

SEQ ID NO: 248781 - DNA, 553 bp, Glycine max
  unsure (1)..(553): unsure at all n locations
gtnttgcagtgctgttacgatctacgtgtatcgctctaccggtccggaattcccgggtcgacccacgcgtccgtgtagcagtactaagctcaggtggaaggagaagcatgttgaaactggcgcatcgcatgacggacaatatgtgttacagtgtgtgtgcctgcacagtgcacaagtggaacaagctgaacgccaggcacgtcgcagaagacgtgagggtgatcaccaggaagagtgcggacgacactgtcgagcacgccggcatcgtgctaagcactgtcacctgagcgtggattcccgtctcgttgcacatgctgtttgacttgctccgcgactagctgctccaaaaccagtgggatatcctgtgcaacagtggacccatgcatgagatggctcacattgcagatggacatgaccatgctcactgcgactccctccgtagagccagtgctataaacgcgaaccagaacaccatgctgatcttgcaggagacgttcaccgacacgtgcagctagcctgtggtgtacgctccggtggacattccggcgatgcc

SEQ ID NO: 248782 - DNA, 569 bp, Glycine max
  unsure (1)..(569): unsure at all n locations
aggggtatggcnaggtgctnatgatgattactaccgcatctctatggacctgctctaccggtccggaattcccgggtcgacccacgcgtccgcccacgcgtccgcccacgcgtccgtcttagttgtgataatatgagagtgagcgcagagtttgagcgtgttctcaagtatttcgatgaagatggggatggtaagatttccccatctgagcttaggaaccggctatgcatgatgggtggtgagttattgttcaaagacgctgaaaagttgattgaggaattggattctgacggtgatgggtttttgagtttggaagattttgtgaagataatggaggcagcaggggaagatgagaagttgaaggatttggcggaagcttttgagatgtaccatgacactgaaatgtttgggtttattacacccaaaagcttgcaaaggatgctgaataggttgggagaatcaaaatccatggagcaatgcatagcaatgattggccattttgatttgaatggagatggcgtgcttagctttgatgaatttggagtgatgatgcagtgatgaattctttt

SEQ ID NO: 248783 - DNA, 563 bp, Glycine max
  unsure (1)..(563): unsure at all n locations
gtntaagtcnaggtgcgaatatgatatatagaatctctatgtactgctgtaccggtccggaattcccgggtcgacccacgcgtccgggcactcttaagacctattatgaaactatggtggagtctgatttgaagaagtacctggcggatatattgtcggttttggcactcacaatgtctgctgaaggagaacgagaaagcctcaagtacagattattgggttccgagggtgacattggttcctggggccacgagtatgttaggaatctagctggagaaattgctcaggaatacacaaaacgacagagtgaagaggcccccatagatgatctcatggaacttgtgcaacaaattgttgcttttcacatgaagcataatgcagaacctgaagctgttgatcttttgatggaggttgaagatctggatatgttgagtggacatgttgacaaaacaaattttaaaaggacttgcctatatctcaccagttctgcaagatacctnccaggaccagatgatatgctagttttggacattgcatattcaatttacaaacaatttgaagaa

SEQ ID NO: 248784 - DNA, 551 bp, Glycine max
ggggagtcaggtgctgtaaagatctataagaatgctctaccggtccggaattcccgggtcgacccacgcgtccgcgtctttgaagtttctaagatgacttctccctacattaaatgtacagtctctttcttcatagcatttggaaatttggctgatgacaccatcaattttgaggcttttccccacaagctggtgcaatttggagagattcaggaaaaagttgtattgaagttttcacaagaggaatttcttacagcttggtcaactcaggtgcgtcctgcaacaactctgttggctgatgggtgtccatatttgtatgctatggtgcatgatagttcagtgtctacaataccaggtgattttgtcattggtgttaagttgacaaccataaacaatatgtgtgcatatgggctcaatcctggtatttcaggttctcgtcttttgggcaccattcctcagtccatttcacagcaaactgtttggaatcaaatggcaacagtgagaacaccattgaattttgattctagcaagcagagcttttgtcaattctc

SEQ ID NO: 248785 - DNA, 568 bp, Glycine max
  unsure (1)..(568): unsure at all n locations
aggttncgggcnaggtgctnntcactggggtacagaanctctactgaactgctctaccggtccggaattcccgggtcgacccacgcgtccggtctgagcatcggttaacccaactgcacaggtagtctccaaataatggagcctcatgatgagactggatgccaggctcctgaacgccccattctttgcattaataattgtggcttctttggaagagcagctaccatgaacatgtgttccaagtgttacaaggacatgctgttgaagcaggagcaggacaaatttgcagcatcatccgttgaaaacattgtgaatggcagttccaatggcaatggaaagcaggctgtggctactggtgctgttgctgtacaagttgaagctgtggaggtcaagattgtctgtgctcagagttctgtggattcgtcctccggtgatagtttggagatgaaagccaagactggtcccagtagatgtgctacatgccgganacgtgttggtttaactggtttcagctgcaaatgtggcaacctcttctgtgcaatgcatcgctattctgataaacatgatt

SEQ ID NO: 248786 - DNA, 565 bp, Glycine max
ggattaagttaaggatgcgaatgctgagtctcagctcatcatcgtactgacgtaccggtccggaattcccgggtcgacccacgcgtccgaagcaagcaaaaccctagcggcgcctgctttctttgttcgtgttttgcatcaggatggagtctcaggtgaagcacgcacttgttgtcaaagttatgggtcgtactggatccagaggacaagtgacccaggttagagtgaagtttttggatgatcagaaccgtcacatcatgaggaatgtgaaaggacctgtgagagaaggagacattctcaccctactcgagtctgaaagggaagcaagaagattgcgctagatggtctcttttttttggcttgcctccaaattcgaacaaaagcaatatttttcttgatatttatggtagttagtcggtgctaaaggggttatagcaccctatcttattgttttggatctattttcattcgaattattgcttgaattttgtatgtttaaacttcgagattgaggtatgctttggtttaatatatgatttgaattatggcttaaaaaaaaaaaaaa

SEQ ID NO: 248787 - DNA, 561 bp, Glycine max
  unsure (1)..(561): unsure at all n locations
aggttttgcnagttggctgtttcagctactaccgaatactgatcgtactgccgtaccggtccggaattcccgggtcgacccacgcgtccgggttgcctgaacagcctcaagcatatatgatttggaaatccattcaacaatggactgagaaatctgcttcaagagctggggttatattgcctgatcttacttctggggctgaaaatgtacctgtttgtcttgtgaatgatgttgataacgagaagggccctgcatatttcacttacatcccaactctcaagaatttgaggccaactgctcctgtggaatcttctactggatgcccttgtgttggtggatgtcaatctaaaaattttaactgcccttgcattcaaaagaatggaggctatcttccatattcttcagctttgctacttgcggacctaaaatctgtgatatatgagtgtggcccttcttgtcaatgtccttctaattgccgaaatcgggtttctcaaagtggcttgaaatttcgtttggaggttttcagaaccaagaataaaggttggggtcttagatcatggg

SEQ ID NO: 248788 - DNA, 502 bp, Glycine max
  unsure (1)..(502): unsure at all n locations
ggaattcccgggtcgacccacgcgtccgaaaaaagaaaaaagaaaaaaggagttagggtataaaaaagagaagaaagatggtacaccagtggtattgcgtgttggtgtgaatcaagaaccgctctgctatggctgctctgcaatacttggaatcgctgcgtaattcgcaccctgagctctccgattggtacaattcgctggcggatctgtaccagaagaagctctggcaccagctcactctcaagctcgagcagtttgtggctctcgccgtcttccaggctggtgatgctttaatacaattatatcacaatttcatcacagactttgagacgaaaatcaaccttctcaagcttgcacattttgctgttatagtttctcggcagtattctgaaaaagaagctgctgttggttatcttggaggggtcattcagaaacttcaagacactagggagcagcgcatagaagaacctattctntacattaagatgcatatagcaatatt

SEQ ID NO: 248789 - DNA, 565 bp, Glycine max
  unsure (1)..(565): unsure at all n locations
aggtttatgcnagtatgctgatgccgggactctctagttctccatagtacggtcctgaattcccgggtcgacccactcgtccgaggctacctaggcacctttagactaggaaggtcgtcataggcgacaaattgcttcggggagtggaaattgggcgttaatccgggaattcccgttttaggtcaactctttaaactgctgctaaatccactaacaggctgaaaaaacccctggaagactaaacattttatccactatggaatcagaacccttcgacgtttccttgtacacccggaagcaaacctgttggacctctaacgcgagaacacgcgcctgatgtgagcgctatacaactattgttctgtttggcaaaacctcagagtgtgctgcactctacatcgcgagagtccattttcgcgagcctatctctagcttacgctctcacccgtatcacatggcacacgtagtatcccgtgaaacatcactgagcacactttgcggcgctatactctcctgtgacccctagtgaaatagttccccgtagaggaaagggttgagaacaccc

SEQ ID NO: 248790 - DNA, 570 bp, Glycine max
  unsure (1)..(570): unsure at all n locations
agggtnnatggtaggatgctaatcctgaaaatacgcgaactcgtactggactgctcgtaccggtccggaattcccgggtcgacccacgcgtccgcccacgcgtccggctgttcaccattttcaattttctaagtggtttggcttggtttgacatacataaacctttcaagatctcagaggggcagaagatcaaagccaagacatcctctcgtatataaagagtgtctctgatttgatctttgtttcttctctttctctcgtttgagatttttcagtactccaccaaggttttgtcagaaaagcttgaatttttcgcctaccctttacaatgatctcttcgttgagacagcctgttgtagggatcagtggttctgatcttcttttgaggcaaagacatgcaactccaattaaggcaaggtcgtttttaccctctttgtcaagagaaaagggtcaaggatctcttgtttcagttcaaaagccactccacattggtgcttctcttggtgttggaaattttgtgtcagtgaagagtgatgctaaaagggggtgattggtgaagtgtgaggcctt

SEQ ID NO: 248791 - DNA, 558 bp, Glycine max
  unsure (1)..(558): unsure at all n locations
gtnnnatgcagtagcgaatatgagttaacgcacatcactgactgctcgtaccggtccggaattcccgggtcgacccacgcgtccgtttttattgtttctgttcagccctcgtctactaattgcaatgtctaaaccatgaaactttgcactttgcattatgcttttatccttttgttattttgaactcttgaatgagtttatttggtgttggttattgtgtgaactcatgaaacttttttagtttagttgaatgcaatccattgttttttttaattttttaatttatatttattttttatctattgttttgttgatatatatatatatatatatatatatatatatatatatatatatatatatatatatatatttgtccgccatttgccgttacgccatccgccatatttttatggcagatttttggctttccgccatgaaccgccatccaccatatttttatggcagatttttggctttccgccatgaaccgccatccgccattaacaacattggttgctaaggactgatgttaacaaaactgctaattttatgcat

SEQ ID NO: 248792 - DNA, 424 bp, Glycine max
cgtccgatgcgttcgattcggatctagagtcttcagtttctcctcgttgttcttcgctttcctgttttgaatttcgattctttcgttaatgtaataagatgtttgggagggcaccgaagaagagcgataatacgaggtactacgaaatcctcggcgtctccaagaacgcttcgcaggatgatctgaagaaggcttacaagaaagccgccattaagaatcaccccgacaagggcggtgatcccgagaagtttaaagagctggcgcaagcttatgaggttctgagtgaccctgagaagcgtgagatatatgatcagtatggtgaagatgcgcttaaggaaggaatgggtggtggcggtggccatgatccatttgatatcttttcatctttctttggcggtgggagtccctttggatcaggtggaag

SEQ ID NO: 248793 - DNA, 457 bp, Glycine max
ccggaacgaccgactcgtcccacgcattctacaaaaaagccttcacatgttcaccttttaattggatgattggggtgttccacaggattacaggcatatggatggttttggagttaacacatatacgctgatcaacaaggctgggaaagcagtgtatgtgaaatttcactggaagaccactagtggtataaagtgtctattggaggaagaggccattaaggtgggaggagccaaccacagccatgccactcaagacctccatgattcaattgctgctggtaactatcctgagtggaaactggttgttcagacaatagatcctgagcacgaagacaaatttgactttgaccctcttgatgttactaagacttggcctgaggacattatacccttgcagcctgttggtcgcttggtcctgaataagaacatagataatttctttgctgagaatgaacaa

SEQ ID NO: 248794 - DNA, 563 bp, Glycine max
  unsure (1)..(563): unsure at all n locations
aggttnaggggaggatgcgatttatgaaatacagacactctattgactgctctaccggtccggaattcccgggtcgacccacgcgtccgctttaccatgacccttggtatgtggaagtgaatatggattctgctgctattgtctggccattatttaacagcctgcaggcattttggcctggccttcatgttttagctggagatatcaatcccgcaattcgcacccatgctgccttcttgagtgtctggagaagatatggttttactcctgagggctttaatcttgctagtctcagtgttcagcatgggcagaagagttacccgttgcggccagagctaatcgagagcacctatcggctatacatagctaccagagatcctagatatctcgatgctgggagggacatggttgctagtttacagtatggaactcgatgcccttgtggatattggcacatttctgatgtcgagaatcaccaaccagaagatcacatggagagcttcttcttagctgagacagtcaagtatctgtggcttcaaggtgatcggcatgtgggtcctgac

SEQ ID NO: 248795 - DNA, 562 bp, Glycine max
gttttagttaggtgcgattgtgaaagctcagctcatctatgtactgacgtaccggtccggaattcccgggtcgacccacgcgtccggtttgagtcaaacagcacagaggataggtatctctcaccaaagcttgggaaaataacaacaggaagctttccagcattttctggtctttttgctatcttaatggcagctgcagctgcagctccagatgatattccaacaaataggccttcttgaagtgcaagaagctttgcagtttctattgcttcatcacttgatatttgaactacttcatctacaaggctaacttccaatactccagggacaaaaccagcaccaatcccttgaatcttgtgtggaccaggttttcctccagagagtactggactttcaactggttccacaccatagagctttatattaggattcttctctttaagaaatttccctgcacctgttatggtaccaccagtgcctataccactaacaagtgcatcaactttccctcttgtgccttaccatatctctggaccagtggtttcataatgtaccttatgat

SEQ ID NO: 248796 - DNA, 458 bp, Glycine max
ggaattcccgggtcgacccacgcgtccgctaattcagtttttttctcccatcataaaaaaccgaccctctcctttccctcttcaccggccaatggctcccccaaaggccgagaagaagcccgcggagaaaaagcccgcagagaaggctccggcggagaagaagcccaaggccgagaagaagatatcgaaggaaggaggaagcgagaagaagaagaagagaacaaagaagagcgtggagacctacaagatttacatcttcaaggtgctgaagcaggttcaccccgacatcggaatctcaagcaaggccatggggatcatgaacagtttcataaacgacatcttcgagaagctcgcccaagagtcgtcgcgattggctaagtataacaagaagcctaccattactttcaggggatccatacggcggtgcgtttggtcctccctgggaggtggccaaacac

SEQ ID NO: 248797 - DNA, 569 bp, Glycine max
  unsure (1)..(569): unsure at all n locations
attatatnagtatggatattataaactgaaactaagccgttcgactgccgtaccggtccggaattcccgggtcgacccacgcgtccggaagaagatggcgtccgagtgcaaaggtaagagctcatggcctgagttggttggagtggaaggaacggtggcggtggctacaattgagagggagaatcctttggtggatgctaacactgtgcttaaaggatccatcgtcaccgctgattttcgatgtgatagggttcgggtttgggtcaccaaacatggaattgtttatcaggctccaagaattggataagaagtgtttacactaaagcacttcatatatatgttatgagtcatgaatataatagtatntaaataaggagttattcttccaattatgttatttgattgaaaataaaaacatgactataagaaaaaaaaaaaaaaaagggcggccgctctaaatgatccaagcttacgtacgcgtgcatgcgacgtcataacttttctatagtgtacctaaattcaatttacttggccgcgtttacaacgtcttacttgggaaaccctgggtt

SEQ ID NO: 248798 - DNA, 569 bp, Glycine max
  unsure (1)..(569): unsure at all n locations
tatatgcnnnngaggaggtgcgtatncctgaacctagctctcatccgactgcctgtccggttcggaattcccgggtcgacccacgcgtccgcgaggactcgtgataacaatttgcttggcaaatttgagttatctggaattcctcctgctccgagaggtgttcctcagatcaccgtttgctttgacattgacgccaacggtatattgaacgtgtctgcggaggacaaaaccactggacagaagaacaagattacaattaccaacgacaaaggaaggctttctaaggaggagattgagaagatggtgcaggaagctgagaagtacaaggctgaggatgaggagcataagaagaaagtggaggccaaaaatacattggagaattacgcctataacatgaggaacacaattaaagatgataagattgcttccaagctgtctgctgatgataagaagaaaattgatgatgcaattgagcaggctatccaatggctcgatggaaaccaacttgctgaagctgacgaattcgaggaccagatgaaggagttgagaagcatttgaacccccatcat

SEQ ID NO: 248799 - DNA, 569 bp, Glycine max
  unsure (1)..(569): unsure at all n locations
tattatanaagtntgatgcgtgtgactagcatgatactcatcgactgcctgtccggtccggaattcccgggtcgacccacgcgtccgaagtcttccatagccccccaaaaatgaagagcaccatcttctttgctctctttctcttttgtgccttcaccacctcatacctaccttcagccatcgctgatttcgtgctcgataatgaaggtaaccctcttgaaaatggtggcacatattatatcttgtcagacataacagcatttggtggaataagagcagccccaacgggaaatgaaagatgccctctcactgtggtgcaatctcgcaatgagctcgacaaagggattggaacaatcatctcgtccccatatcgaatccgttttatcgccgaaggccatcctttgagccttaagttcgattcatttgcagttataatgctgtgtgttggaattcctaccgagtggtctggtgtggaggatctaccagaaggacctgctgttaaattggtggagaccaagatgcaatggattggtggttaaacttgagagaattctggtgatgaattcaag

SEQ ID NO: 248800 - DNA, 580 bp, Glycine max
  unsure (1)..(580): unsure at all n locations
tgtatatgatnntagggagcggtgcctatcttcactgaagccaccagtcatacgactgccgtaccggttcggaattcccgggtcgacccacgcgtccgcaacaatattcaatctcatacacagaaaaatgggtgctttggatcacatctctgagctctttgactgctcccacgccagctccaagctcaagaagaaacgcaaacaattccagacggtggaggtggaagtgaagatggactgcgaagggtgtgaaagaaaggtgaagaaatcggtggaaggggtgacagaagtggaggtggatcgacagggtagcaaggtgagtgtttcggggtacgtggaaccctcaaaggtggtttcacgcatcgctcaccggaccggccttacgtgaaatcgttatgtgaatctgatgtgaacaccacaccacaccacaccttatcctgtcttattggttagtttctctttccctttggtgttctttttcttggatcatatcgtagtaaccaaaaagaaaaaaccacataaaatttaaaataggtcacctggttcatgaaggggaaccctttgggcaatgggacatgtt

SEQ ID NO: 248801 - DNA, 509 bp, Glycine max
gactgagctaggcatcgcactgctgtaccggttcggaattccggtcgacccacgcgtccgtctgctcgtgcctctagggttatcatatctccatttccatttcctctctctggggttcgaagaatcttaagctatgggaaagtcttacccaaccgtgagcgctgattaccagaaggccgttgagaaggcgaagaagaagctcagaggcttcatcgctgagaagagatgcgctcctctaatgctccgtttggcatggcactctgctggaacttacgacgtgagctcgaagaccggtggtcccttcggaaccataaagcaccccttcgaactcgctcacggcgctaacaacggtcttgacatcgctgttaagcttttggagccactcaaagcggagtttcctattttgagcttcgccgatttcttacaagttggctggcgttgttgcccttgaagtcaccgggtgaccttgaagttcccttccattctggaagaaaggccaaacctgaccc

SEQ ID NO: 248802 - DNA, 528 bp, Glycine max
  unsure (1)..(528): unsure at all n locations
gtttatggctgtcgctttcgctgggactgaactctcgcactgccgtaccggtccggaattcccgggtcgacccacgcgtccgcactatcacacacatagttctcttatctggtgcaagtgcaacaatcaagtactgatcggcatgggaatgttgttgttgttgttgtcttattctctccttttcctggttctattccttacactgaaatcccttttccaaagcagaaaattgagaaacctaccaccaggtcctcctcctcttcccataataggtaaccttaacctcctcgaacaacctattcaccgtttcttccaacgcatgtccaaagaatatggaaacatcgtttccctttggttcggttcacgtctcgccgttgtcatttcctcaccaactgcataccaagaatgcttcaccaaacacgacgttgccttggccaaccggctaccttctctctcgggaaaatacatattctacaacaacaccaccgtanggtcctgctcccacgggcagcactggcggaacctccn

SEQ ID NO: 248803 - DNA, 526 bp, Glycine max
  unsure (1)..(526): unsure at all n locations
agaggccttgtcctgaatgcagctcatcgcaatgcggtaccggtccggaattcccgggtcgacccacgcgtccgcccacgcgtccgtagagaaataaaaagagaaagccgacagcacatagatagagagaggaaaacgacttaatattctttttccttgagacctgaaggggctaaggaaaattagaaggacacacaagtataaaggcggtgaaataaaagagaaagacaagaagaagacatgggaagaccaccttgttgtgacaaagaaggggtcaagaaagggccttggactcctgaagaagacatcatattggtgtcttatattcaggaacatggtcctggaaattggagggcagttcctgccaaaacagggttgtcaagatgcagcaagagttgcagacttagatggactaattacctgaggccaggaatcaaacggngcaacttcacagaacangaggagaagatgataatccatcttcaagatcttttaggaaacagatgggctgcaatagcttcatacc

SEQ ID NO: 248804 - DNA, 374 bp, Glycine max
cggaattcccgggtcgacccacgcgttcgaatacaccaaaacccaacatgaaaacccttaacaaagcctcacttattttattccctctgttgttgctttccctattcaagcattcccatgctgcaggaatcgctatctactggggccaaaacggtggagaaggcaccttagcagaagcttgcaacactagaaactaccaatatgtgaacatagccttcttgtccacttttggcaacggccaaactccacaactcaaccttgcaggtcattgtgaccccaacaacaatggctgcactgggttgagcagtgacatcaaaacttgccaagaccttggcatcaaagtgttgctctcccttggtggtggtgctggaagc

SEQ ID NO: 248805 - DNA, 358 bp, Glycine max
aattcccgggtggacgcacgcgttcgcccacgcgttcggtgatttcagtgagtgatcggtgttcacttgatctcatcataatcgtcagcgggaattgaagaagatgccgatcagaaacatcgcctgcggaaggcctgaagaggcgactcaccccgacacgttgaaggcggctttggctgagttcatctcaaccttcatcttcgtgttcgccggctcaggctccggcatcgcctacaacaagctcaccgacaacggcgctgccacccctgccggccttatctacgacttcatcgcccatgcattcgccctcttcgtcgccgtcttcgtcggcgccaacatcttcggcggccacgttaac

SEQ ID NO: 248806 - DNA, 410 bp, Glycine max
ggaatttccgggtcgacccacgcgttcgctgaactattatccagaggtcctggaatgactgttcccggaggttggtgcatagggaagggggagaatggcaccgatccctgctctgaagtcggtgatactaacgttctgaggcctggcccaggttccaagagacttgaaacattaatcaactcattgttgtcgaatgaaaagttccggccaagacagtgcatgtgaggtgaaaaacaagaatcaactggctaaggccaaagacagttctggaggattattttccactggctttagtttacatgtgcacatttagttagcatgatcagtaaattagtttttcttttcagtaggagaagaaatagtgaaagcatacacactcttcaatattgagaagaaaaaagtgtgagaca

SEQ ID NO: 248807 - DNA, 580 bp, Glycine max
  unsure (1)..(580): unsure at all n locations
tatatatgtgaagttatggtgcatattaactgaagnaagggagctcatcggactgtcggtaccggtccggaattcccgggtcgacccacgcgtccggtgagttctatatggcttataaggactacaatgacttaatggatctaacagagcaaatgttgagtggtatggttaaggagcttacgaaaggcagctataaaatcaagtatcatgcagatgggattgataaggaacctattgaaattgactttactacaccttttagaaggattgacatgattgaagagttagagaagatggcaggtctaagtattcccaaagacttgtcaagtgaggaagccaatcaatatttgaaggatgcatgcgtgaagtatgagatcaaatgtcctccccctgagacaactgctcgtttgttggataaacttgtgggtcactttttggaagaaacgtgtgtaaatcctacattcatcaaaaaccatcctgagatcatgagtcctttagcaaagtggcacagatcaaaaccaggcctgactgaacgttttggattgttggtaaataacgttgaccttgcaatgcatattcc

SEQ ID NO: 248808 - DNA, 566 bp, Glycine max
  unsure (1)..(566): unsure at all n locations
aggaatgggttggtcgcggtcgtattgctgaggccagcngctcatccgactgccgtaccggtccggaattcccgggtcgacccacgcgtccggggaaggctcctaggaagcaactcgccaccaaggctgcaagaaaatctgcacctaccagcggtggagtcaagaagcctcatcgctatcgtcctggaactgttgctcttcgtgagatccgaaaataccaaaagagcacagagcttctgatccgcaagctcccctttcagcgtcttgttcgtgaaatcgcgcaagacttcaagactgatttgaggttccagagtcacgcggttcttgcgcttcaggaagctgcggaggcttacttggtgggtttgtttgaagacaccaacctttgtgcgatccacgccaagagagtgaccatcatgcccaaggacattcaactcgcacgccgcattcgtggagaacgtgcttaggcttaatataatggatatagcatagttgtcgccttttcgttttcaatacatttcttgttcctagggtttaagtgttatttccagttggtatgtttggataan

SEQ ID NO: 248809 - DNA, 580 bp, Glycine max
  unsure (1)..(580): unsure at all n locations
tataatattagtnaggagtctttaaatgaggnccaaatctacatagtactgtctgtaccggtctggaattcccgggtcgacccacgcgtccggcagccccaatcgggcggtaaattccgtccaaggctaaatactggcgagagaccgatagggaacaagtaccgcgaaaaaagaaaaaaaaaaagagaaaaaaaaaaataaaaaaaaaaaaaaaaaaaaaaagaagaaaaaaaaaaaaaaaaaaagggcggccgttctaaaggatccaagcttacgtacgcgtgcatgcgacgtcatagctcttctatagtgtcacctaaattcaattcactggccgtcgttttacaacgtcgtgactgggaaaaccctggcgttacccaacttaatcgccttgcagcacatccccttttcgccagctggcgtaatagcgaaaaaggcccgaccgatcgccctttccaacagttgcgcaaactgaatggcgaatgggacgcgccctttaacggggcatataacgcgggtgttgttgtggttacagccaaagtaaccggttaaatttgcaaagccctaaaggccagttttt

SEQ ID NO: 248810 - DNA, 435 bp, Glycine max
acccacgcgtccggaaaaagtcggttgagaaagaaagcttatgttcaacagcttgaaagtagtcgggtaaaggtaacccaactggagcaagagcttcagcgagctaggcagcagggaatcattatatcaaactcaggtgatcaagcacattcaatgagtggaaatggggctatggcatttgatgtagagtatgcaagatggctggaagagcagaatcgacaagttaatgagctaagagcagctgtaaattcccatgcaggtgatacagaacttcgcatgattatcgatggtataatggcacattatgatgagatatttaggctgaaggccgatgcagctaaagctgatgtcttccatttgttgtctggaatgtggaagacaccagcagagaggtgttttctaatgcttgggggtttttcggtcatctgaactcct

SEQ ID NO: 248811 - DNA, 321 bp, Glycine max
accggttcggaatacggggctcgacccacgcgtgcgcccacgcgtccgcccacgcgtccgggaaatgcttccacccattcctgtatctagtgcggcttgcactcggggctttgaagccatgtctgccacaagagagtcatttgcatcacttcaaaaactgagagttggccattttgattcccctctacctagaacaccagcctgagatccttcccaaaaagtaccaagagtttctgattgtctaacaccacctgcatggaaaactgaaacaaacttttatgacttacgcatcaaaaaccaatgaaagcaacatttagatca

SEQ ID NO: 248812 - DNA, 528 bp, Glycine max
  unsure (1)..(528): unsure at all n locations
tgtttagggttgnttatcatggcatgtatcgtacgccatgctgtaccggttcggaattcccgggtcgacccacgcgtccgcccacgcgtccgcccacgcgtccgcccacgcgtccgcccacgcgtccgggttggtggggccacgagtatgttaggaatctagctggagaaattgctcaggaatacacaaaacgacagagtgaagaggcccccatagatgatctcatggaacttgtgcaacaaattgttgcttttcacatgaagcataatgcagaacctgaagctgttgatcttttgatggaggttgaagatctggatatgttgagtggacatgttgacaaaacaaattttaaaaggacttgcctatatctcaccagttctgcaagatacctcccaggaccagatgatatgctagttttggacattgcatattcaatttacaaacaatttgaagaatatccaaatgcactccaaattgcattgttcatggataattcgcagcatgtgagggaggtgttcacctctggtn

SEQ ID NO: 248813 - DNA, 530 bp, Glycine max
  unsure (1)..(530): unsure at all n locations
gtaggggccatgtcctgaatcgaactcctagcactgcggtaccggtccggaattcccgggtcgacccacgcgtccggaagcacgcatgtgtggcggagcaatcatcgcagatttcatacctcggcagcgggccggcaccctcacagcctccgaactctggcccaagcgcagcgaacctcaacctcaacctcctcctcctccagttaagaggcagaggaaaaacctctacagagggatcaggcagcggccctggggcaaatgggccgcggagattcgcgatccacgtaaaggagttcgtgtctggcttggcaccttcaacaccgccgaagaagccgccagagcctacgacaaagaagcccgaaaaatccgcggcaagaaagccaaagtcaatttccccaacgaggacgaccctctgccgcaatacggatcttgcaagagcctcaacttggagttcggttacgatctcaaccaaacagggcttttcccttcttctaacgctgatgagaattgcgggtcccacgtggcttacn

SEQ ID NO: 248814 - DNA, 430 bp, Glycine max
gaattcccgggtcgacccacgcgttcgcccacgcgtccgcaaaccttgctctatactacacagtacacacactagaagaataatggcttccatcctccactactttttagccctctctctttcttgctcttttcttttcttcttatccgactcagtcacccttacaaaaccaataaaccttgttgttctacccgttcaaaatgatggttccacagggctccattgggccaacctccaaaaaagaacccctctaatgcaagtaccagtcctggtggacctcaatggaaatcacttgtgggttaactgtgagcagcagtactcatccaaaacgtaccaagcacccttctgccactccacccaatgctctagagccaacacccaccaatgccttaattgccccgcggcattaagggccaggtgccacaaaaac

SEQ ID NO: 248815 - DNA, 445 bp, Glycine max
gaatttccgggtcgacccacgcgtccgaaacgatgcgccactgctagcgcatactctgaactctcaccatatatatataatgcgcgggcggtgcgcatggagataacctacgcatcccctagcttctccgacctccgcgccatgccgtcgacggcgaccgccgcgcgtcccgtcaggatcattcccctgcagcacccgaccgccacgacgtcgtcgccgcagccgaacgccgccttctcgcgctggacggcgaagctccggcgaatgacgtggctggagtggattgaattcttcctcccttgcctccgctggattcgcatctacaactggcgcgagtatttccaggtcgatctcatggccggaatcaccgtcggcgtcatgctcgttcctcagtcgatgtcgtatgcgaaatttggctggacttcaaccgatatatggactctac

SEQ ID NO: 248816 - DNA, 576 bp, Glycine max
  unsure (1)..(576): unsure at all n locations
tttattgntnatgtnagtgtggtntcaatgaagcctttgctcatacgactgctgtaccggttcggaattcccgggtcgacccacgcgtccggtgagatttgcgaatctgagaaatggcggattcttctcgggaggagaacgtgtacatggcgaaattggcggagcaggccgagcgttacgaggagatggttgagttcatggagaaggttgcaaagactgtggaggttgaggagttgacggtggaggagaggaatctcctctctgtggcttacaagaacgtgattggtgcgaggagggcttcgtggaggatcatatcctccattgagcagaaggaggagagcaggggcaatgaggaccacgtggccattataaaggagtacaggggcaaaattgaggctgaactcagcaagatctgtgatgggattttgaaccttcttgagtccaacctcatttctttcgctggattttccgatagcaaagtcttttaccttaaaatgaatggttattaccaacaggtcccttggttagattaacaccggtgcatatgaggaagtagctttaataaatttctttttt

SEQ ID NO: 248817 - DNA, 574 bp, Glycine max
  unsure (1)..(574): unsure at all n locations
tatatattnttaggatgttgccgtntgaactgatgcctgcnactcatagtactgtctgtaccggtccggaattcccgggtcgacccacgcgtccgggttgctgcatggaaagacaaggatggagactggtacgagacaggcctacacgtcttggttggggcttaccctaatgtgcagaacctttttggagaacttggcattaatgatcggttacaatggaaagagcattctatgatttttgctatgccaaataagcctggagagtttagtcgatttgattttcctgaagttcttccctccccattgaatggaatatgggcaatattgaggaacaatgagatgcttacatggccagagaaagtaaaatttgcaattgggcttctcccagctatgcttggcggacagccatatgttgaggctcaagatggtctttctgttcaagaatggatgaaaaaagcaggcgtacctgaacgggtaactgatgaggtgttcatagcaatgtctaaggcacttaactttatcaatcctggatgaactttcatgcaatggatattgattgctttaaccggattct

SEQ ID NO: 248818 - DNA, 574 bp, Glycine max
  unsure (1)..(574): unsure at all n locations
tattatttgnggnnggggtgggntncctgaattcagctactcatccgactgctgtaccggtccggaattcccgggtcgacccacgcgtccggaaaatcctcacccattttcttcgtagccaaacactctgaaattctcagttatgtcgtggcaagcgtatgtggatgatcacctactgtgtgaaatcgaaggtaaccacctcactcacgccgctatcatcggccaagacggaagcgtttgggctcagagcaccaacttccctcagttcaaacctgaggaaataactgccatcaataatgactttaatgagcctggatcacttgctccaactggattgtatatcggtggcaccaaatacatggtcatccagggtgagcctggtgctgtcattcgagggaagaagggtcctggtggtgttactgtgaagaagaccggtgcggccttgatcattggcatttatgatgaaccaatgactccaggtcaatgcaacatggtaagtgaaaggctttggcgatatctcattgatcagggtctctaatctttgctttatgtcctggtatcgtgcatatttcat

SEQ ID NO: 248819 - DNA, 527 bp, Glycine max
  unsure (1)..(527): unsure at all n locations
ggtgtcctctgtcactgaatcgatctatcgccatgccgtaccggtccggaattcccgggtcgacccacgcgtccgctccttcatattttctctctcaccattctcttcttcttctccctttcttagaggctcgctcttttctctctgccctccgccatgactgaggataaggagatgtcttcctctgtcaccaatggcgatgattccctcactggtcacatcatatctacaactattggaggcaaaaatggggaacccaaacagactattagttacatggcagaacgggttgtaggaactggatcatttggaattgttttccaggcaaaatgcttggaaactggggaagcagtggctattaaaaaggttttacaggacagaagatacaagaatcgcgaactacagttaatgcgtgttttggatcatccaaatgtgatctctttgaagcattgtttcttttcaactacaagtacagatgagctttttcttaatttggtgatggaatatgttccagagtctatgtatan

SEQ ID NO: 248820 - DNA, 374 bp, Glycine max
gaatatccggccgacccacgcgtccgaccactcgtccgaagaatgattaccagtctgtggtttgacctttatggccgtggtggcggttctggttcctcttatgcttttgaacatgtttttgttggataaaccaaacaatgtggtgaagtttctggctttcataactggctgcagttttaccttgaagaagcaaatggtagagttgattatcaaggatatatttttccccatcgactgggagaaactcctgactctgaagctcagcttctgactattcaatttgaatggaatggtgtcctaaaatctgtatccagcactttggtttgagtgagccctgaatttgaaatcgctttgtataccctgtgtttctatgt

SEQ ID NO: 248821 - DNA, 573 bp, Glycine max
  unsure (1)..(573): unsure at all n locations
taatatttntagagcagtgctattgccagggactgaagncnatacgaaccgctctcggaattcccgggtcgacccacgcgtacgcccacgcccggtcgtactcataaccgcatcaggtctccaaggtgaacagcctctggtcgatggaacaatgtatgcaagggaagtcggcaaaatggatccgtaacctcgggaaaaggattggctctgagggctgggcacgggggtcccagtcccgaacccgtcggctgtcggtggactgctcgagctgcttccgcggcgagagcgggtcgtcgcgtgccggtcgggggacggattgggaacgggcccttcggggcctcttccccgggcgtcgaacagtcaactcagaactggtacggacaaggggaatccgactgtttaattaaaacaaagcattgcgatggtccctgcggatgttgacgcaatgtgaattctgcccattgctcttaattgtcaaagggaagaaatttaaccaagcgcgggtaaacgcgggaggtactatgactttttttaaggtacccaaatgcctctgtattttaattagtggcgcgc

SEQ ID NO: 248822 - DNA, 575 bp, Glycine max
  unsure (1)..(575): unsure at all n locations
taatatttntagtagcgatgctgttgcctcnaccctcagtccctcctgtaccgctccggaattcccgggtcgacccacgcgtccgcacaagataagaaaaaagaaaaaatgtttgcagggaaaggggctgtttggttctccagagcggtggcgttggcagcaatcgcggtggtagcttgcgttgggcttacacaggcccaacccgaggccaggttcaagtgcaacagcgcgaacatccccacgtgtcgcgcgctcataagctactctcacccgaacaccaccaccctcggcgacatccaaaagctcttcaacgtgaaacacatcctcgacatcgtgggagcgaacaacctcccaagcaacgccacaaaaacatacgcggtgggccccaacgaggttgtgaaggtccctttcccgtgcaggtgcagcaacaacacgggactctcggaccgggtttcgctgtacaggatcaagaatggggacacgctgtactacattgcgacgacgacgttctgcggtctgattaaatggcccgaaatcaagtgggcaataacataacccacgcgaattatttacct

SEQ ID NO: 248823 - DNA, 571 bp, Glycine max
  unsure (1)..(571): unsure at all n locations
tataatgattgaggagcgttggctgaatgttggggccctcagtacttccgtaccggtccggaattcccgggtcgacccacgcgtccgggcagcagcaacccgcacttctctgcggttccttctctctctctctctagaacttcgtggtccctctgcttctttctttcttagttgcagcgcgattgctgcatcgtcctccaataagagctcgctgctagtgaaccctaacacggcggcaacgagaggtgttcggttgaagctcagatcagcgatggcagcagcaacccgcacttctctgcggttcctcctctcagtctccgtaaccctaactctcgctcacctcgccgcctcaaattccgaaggcgacgctctctacacgctgaaacggagcctctcggaccctgacaacgttctccagagctgggatcccactctcngtagcccctgtacttgttccacgttacctgcaaccaggacaaccgagtcactcgagtggatcttggtactctaacctatctggacattgggacctgaacttgggaagcttgagcctttacggtttcttgagtgg

SEQ ID NO: 248824 - DNA, 529 bp, Glycine max
  unsure (1)..(529): unsure at all n locations
ggcttagaggtcctaatcctgaactgcanctcatagcactgctgtaccggtccggaattcccgggtcgacccacgcgtccgtttcttgcagattcgatgctgtcatacattttgctggactgaaagcagtaggagaaagtgtgcaaaaacctttactatactataacaacaacttgactgggacaatcactctattggaagtcatggctgcccatggatgcaagaagctcgtgttttcatcttcagcaactgtatatggttggccaaaggaggttccatgcacagaagagttccctctgtcagcaatgaacccatatggacgaactaagcttatcattgaagaaatttgccgtgatgtccactgtgcagagccagattgtaaaataattttgttaagatacttcaacccagttggtgcacaccccagtggttatattggggaggatcctcgtggaattccaaacaatctcatgccatttgttcagcaagtagcaattggccgacggcctgcactgacagtttttgaaan

SEQ ID NO: 248825 - DNA, 534 bp, Glycine max
gttagttgtcctttctcgtgatgaaatcactgctatgtccgtaccggtctcggaattcccgggtcgacccacgcgtccgattttatataaaaaaaaaaaattaaaatataaaaaaaaacatataaaaaaaagagaaaggatatattaaacgataaaaaataaaatcaactaaaacaatttatccttcttctattttacaaatccctagttacatataccgactacttcatcccaaaagctcttgattccttcaatattgtttaaatcatttaagcaaatggtctcccatgaaccatcattaagatcactttccttcatgatggagaaaccaaatttgttcttcacaaaatatatagcattgtttaggctatcttcatattcatctacaacattctatattcgtgcttcattttcatactctttcgataatatcacattctacttcaaattttttcttgtccccaattaaggtttctttcatactcactttcaaattctatacacaattttaatcttaactctaacaatacaatg

SEQ ID NO: 248826 - DNA, 574 bp, Glycine max
  unsure (1)..(574): unsure at all n locations
tataatgatatagcgtgcgggtagtgttgctgagngactgnaggcnctacgtaccgctccggaattcccgggtcgacccacgcgtccgcccacgcgtccgcccacgcgtccgggaagctgttgattgagactccgagtaagtctatgacggtgattgaggacattgattgctcactcgatcttaccggccagaggaagaagaaaaaggaagagaatgaggatgaagaacaaaaagatcctatgaggagaaatgaggaggagagtagcaagagtagtaaggtgactctgtctgggttgttgaattttatagatgggatttggtctgcttgtggaggtgagaggatcattgttttcacgacgaattatgtggagaaacttgaccctgctttgattaggagagggaggatggataagcacatagagatgtcttattgttgctatgatgcattcaaggtgctggccaagaactacttggatgttgagtctcatcatttggttggtgcaattgggggattgttggagaaaccgatttggtccccgctgatgttgctgagaatctgagcccaaagctggg

SEQ ID NO: 248827 - DNA, 375 bp, Glycine max
aattcccgggtcgacccacgcgtccggttatttcctggaacgacgacgggtcaacgtttatcgtctggaaccctaccgttttcggcagaggcttgcttcctaaatttttcaaacacaataatttctctagcttcgttcgccaactcaacacttacggattcaggaaagttgtgcctgatcggtgggagttctcgaacgattatttccgccgaggcgagaagcggcttctttgcgaaattcagcggcggaagatctcatcgccggcgccgtcttcgactgctccgacgacggttacggtgccgatgccgttgaccgcgataccgatcatatcgccgtcgaactctggcgaggagcatgtgatattcgtcaactcgt

SEQ ID NO: 248828 - DNA, 455 bp, Glycine max
cggaattcccgggtcgacccacgcgtccgtgatctggtaccttactattaggtctggtttaagtcgattatagtgctccatatatgcggtaatttattgtctttgactttgttatcttttattcacattcttgtatttccttttatgcaggaaaatgcagatatcaggggccactgatctagcttctaagggacagggtgcatcagatagcagtagtgtaaaggttaaaagtgaatttgatgatgcctttcaaccagatgtgaagattcgctgtctatgtggaagtagattggaaacagagaatttggtcaagtgtgatgatgcaagatgccatgtgtggcaacacatcagttgcgttattattccagagaaacctacttgaaagcatccactagtttctgataaaatttattgggaactctgtcggcttactcgtgcagattcattttgggttc

SEQ ID NO: 248829 - DNA, 577 bp, Glycine max
  unsure (1)..(577): unsure at all n locations
tagtatggtatagtngaggagccgtatgcaatgaagcatccagcgctagcactgccgtaccggtccggaattcccgggtcgacccacgcgtccggaacaaagcaatggttcctgttgcaaggttgttcgggccagccatatttgaagcctcagaactgaaggttttgttcttaggagtggacgaaaataaacacccaggaaatctcccaaggacttatacgctaacccatagtgatataaccgctaagctcaccttggcaatctctcaaaccataaataattctcagctgcaggggtggtacaacagatttcaaagggacgaagtggtggcacagtggaaaaaggtgaagggaaggatgtctctgcacgttcactgccacattagtggaggtcattttctcttggatatattagcaaggttaagatacttcatcttctgcaaggagctaccagtggtgttgaaggccgtcgttcacggcgatgaaaacctattcaacagctacccagaattgcaagatgccttggtttgggtctactttcacttaaacatttcggaattaaccatgtggaatgtggg

SEQ ID NO: 248830 - DNA, 220 bp, Glycine max
accggtccggaatacccggctcgacccacgcgtacgaaaaaaaaaaaaaaaaaaaaaaaaaaaaaaaaaaaaaaaaaaaaaaaaaaaagggaaaaagaaaaaaaaaaaaaaaaagaaagaaaaaaaaaaaaaaaaaaaaaaaagaaaaaaaaaaaaaaaaaaaaaaaaagaaaaaaaaaaaaaaggggagtgggataaaacatggcaaaaccaaaaacaa

SEQ ID NO: 248831 - DNA, 535 bp, Glycine max
  unsure (1)..(535): unsure at all n locations
nggtgtgcgcttgtngactgcgatgnatagcaatcgccactgtcggtaccggtccggaattgccgggtcgacccacgcgtccgcccacgcgtccgattagggtttgcagagttgcactttccctttcttccaatggatgcgttttgttttcgagtccctttctctatcacgccaaatcccaccgaatcgtgcgacgcggtatattggaatctcacttgggctctaattgatgcattcacaccgttagcggttgggctccaattctccaagatgagcaattctcactctgaaaatcatgatgaagtaactgtggcgggatttgaagttccaaaatctcctgattctagttataacaatgtctaccctggaaatgaagatgacgcaagggatccacctatggtcccttcacatttacagcatactttgctaaattatcctgctaatagagacactgcatgaactgttccattgcctcagaatgtgattctaaatcatctgtacatcgagaatagagaatcaccaagatctgtggtgn

SEQ ID NO: 248832 - DNA, 522 bp, Glycine max
  unsure (1)..(522): unsure at all n locations
gaggccttgctctggacgaaactcatagcactgccgtaccggtccggaattcccgggtcgacccacgcgtccggattactttaggcatttgcgagaaattgggggacaggatgctgatagagaagatgaaggggacagaaatggtgctcgaattgctagaaggcctcctggacaagttaatcgtaacatcaacaatggtgaggggaatggtgaagatgctggtggagtgcaaggaattgctggggcaggtcaagtaattagaagaaatgctgaaaatgttgctgcaaggtgggagatgcaagcagcacgacttgaggcacatgtcgagcagatgttcgatggtctggatgatgctgatggagcagaagatgttccctttgatgaacttgttggcatgcatggtccagtttttcatttggttgaaaatgcatttactgtgctggcaagcaatatgattttccttggtgttgtaatctntgtgccattttcattgngccgatcatactccattatctatcctgg

SEQ ID NO: 248833 - DNA, 532 bp, Glycine max
  unsure (1)..(532): unsure at all n locations
gtttatggttcctttcatcgcatgcanctcatagtactgctgtaccggtccggaattcccgggtcgacccacgcgtccggtctcattactatagtttctctagatggaagctaaaactaagtcatgcgtaggtctagcttttcttctattggttgcaattttcatgcaacaatgtgtccatggagaatcgcaagtgccctgcctttttgtctttggggactctctgtctgataacggaaataataacaaccttccaagcactacaaagtccaattacaaaccatatggcatcgacttcccaaccggcccaacaggacgatttacgaatggacaaacatctattgacctaattgctcaactactgggatttgagaatttcatcccaccctttgcaaacactagtggctcagacacacttaagggtgtgaactatgcatccggagcagctgggattctaccagagagtggtacacatatgggtgccaacatcaatttgagggtacanatgttaaatcacctattcatgtactcn

SEQ ID NO: 248834 - DNA, 393 bp, Glycine max
aattcccgggtcgacccacgcgtccgattgatctctcctggaagttgattttatctgtccttcagtatacaccagcaattgataggtggagcattggatgcatttttgcgaaggtgttgccaggaaagccacttgtttcctggtaaaagtgtcgtgcatcaattagatttgattactgatcttcttgggacaccaccacctgaaactattgcaggagttcgaaatgacaaggcaaggaagtacttgatggaaatgcggaagaaatctcctgtgccatttgaacagaaatttccgaatgcggatccattggcacttcgcctattgcaaagacttttagcatttgatccaaaggatcgaccaactgctcaagaggcactagctgatcccttcttt

SEQ ID NO: 248835 - DNA, 452 bp, Glycine max
ggaattcccgggtcgacccacgcgtccgcccacgcgtccgcttcatccttctctgttctcctagaacttgattacttgaacattccgtatgacagatgaggtggttcttctggatttctggccaagtccatttgggatgagggtcaggattgcacttgctgaaaagggtatcgaatatgagtacaaagaagaggacttgaggaacaagagtcctcttctcttacaaatgaacccggttcacaagaagattccggttctcatccacaatggcaaacccatttccgaatccctcattgctgttcagtacattgaagaggtttggaatgacagaaatcccttgttgccttcagacccttaccagagagctcatgctaaattctgggctgattatgttgacatttagatacatgatcttggaaagaaaatttggacatcaaagggagaagaaaaag

SEQ ID NO: 248836 - DNA, 582 bp, Glycine max
  unsure (1)..(582): unsure at all n locations
tgtatatatataggatgcggtggtgttgctgcngacgttagacngtcgataccgctccggaattcccgggtcgacccacgcgtccgcccacgcgtccggtccagatgttcattggagatggagcaaaacttgttcgtgacgcctgtcaactagcaaaagaaaagtcaccatgcattatttttatagatgaaattgatgcaattggaaccaagcgttttgatagtgaagtaagtggagacagagaggtccaacggacaatgttagaattgcttaatcagcttgatggttttagcagtgatgaccggattaaggtgatagcagcaacaaaccgtgcagatattcttgaccctgcccttatgcgttctggtcgattagatcgtaaaattgagtttccacacccaagtgaagaagcaagagctcgaattctacagatccattcgagggagatgaatgttcacccagatgtcaaattttgaagaacttggttggtccacagatgatttcaatgggagcttaactgaagggctggttggtgttaaagctggcattgttggcattttagaccctggaggaaacttaagg

SEQ ID NO: 248837 - DNA, 579 bp, Glycine max
tatattgatgatggagatgccggattccctgaggccagcctagcagctagcactgccgtaccggttcggaattcccgggtcgacccacgcgtccgatgaacttgagacaaaggcttcaactactttagttaaatgcaaatttggatcagttgaggctgcagcaaaggtgcgtactttggaagagcaggggagttcggcagacaaaattaaaaacttcgaatataattgtttgggagaaattagaattcttggtgctttaaaacacccttgcatagtggaaatgtacggacaccaaatttcatgtcaatggtctgtctcagctgatggtaatcctgaacaccgtgtattaagatctgcaatttttatggagtatgtggaagggggctccttaaaaaattatctggagaagctgtcagaagctggtgaaaagcatgttcctgtggagttggctttgcatatcgccaaagatgtcttatgtgccttgtcagagctgcacttcaagcacataattcatcgtgacatataaaggggaaacatactgtttaattttggatggaaagagaagataatggaccttct

SEQ ID NO: 248838 - DNA, 571 bp, Glycine max
  unsure (1)..(571): unsure at all n locations
tattatatnatgnagcgtgagtgttgctagggactgaangcnatacgactgccgtaccggttcggaattcccgggtcgacccacgcgttcgcccacgcgtccgctaaacctctctgctttcaagaatttagaatggcttgagggctcaagctgtggactacaagggactatcccatctgatattggtgcctatgggagcgtttatagggcacaattaccaagcggcaaaattgttgccgtgaaaaaactccaccgatttgaagcagaggtgccagcttttgatgagagtttcagaaatgaggtcaaagtattatcagaaataaagcatcgacatgttgtgaagctccatggattctgcttgcacagaagaatcatgtttttgatatatgagtacatggagagaggcagcttgttttcagtgttgtttgatgatgtggaagccatggaattggattggaaaaagagggttaacattgtgaaaggcactgcacatgctctggcctatctttatcatgacttcactcctgcaattgtgcatagagacatttaagcatcaatggcttgcttaact

SEQ ID NO: 248839 - DNA, 535 bp, Glycine max
  unsure (1)..(535): unsure at all n locations
ngtattagcgttgctgtcaatgcgatcganctcatagcactgcggtaccggtccggaattgccgggtcgacccacgcgtccgaagaaatctccatttcataggaaatcttttcccagtgcttccttttccaggagtggggatggtattaagggaggttttagagatgatgacgaaaactttttaaggtgcaaaaagttttgcacgaagccaaaggcttttaggtctccacgacgcattgcacaccgaagaatcaggaatttgatgtcttccaaatactggaagacagctccaaagttgaaggactctgaactttctagatctgatctaggagtacctcgttatcataagaggaagacttgttacggttttgaaagatctcagcacaatgccattgttaaaaagaggaaattcgttgaccgggtttcaggagtaacttctgatggaggattcagtagtgagagtgtgtccaattcaccacagaaagggatggatggagacaagcctagctcatctgcaaaattgcatgtacctaag

SEQ ID NO: 248840 - DNA, 535 bp, Glycine max
ggtataggatggcgcttgtcactgaactgcaactcatagtcactgcggtaccggtccggaattcccgggtcgacccacgcgtccgcccacgcgtccgcgacttttggagagcatggtatgggaaaagggttcttcaaggtatagactctttggcagttgccagaccttccctttctgcagagataaatcgtcttggactgttagctgaaccaatgccatcattggatgaaattgcaatgcatattaacttctcttgtggaggactgccaccagtgcctaccttgcccaagcttgaaagttctccaactcagaatggggatatcagatcaccaaagcgaaatgttttaatggaaagaaattctttcacttcaccagtgaaagatcgccttcttcccttcaacagccttaagtcaaaactacccccacctcctttgcagtcagcatttgccagccccacaaagccaaatccaggaggtggaggggaaacatgtgcagaaactgggatcaacatcttttttggcaagatcattaagtg

SEQ ID NO: 248841 - DNA, 541 bp, Glycine max
gtttgagatgtctttcactggccatccgccctacgcactgctgtaccggtctcggaattcccgggtcgacccacgcgtccgaaaaaaaaaaaaaaaaaaaaaaaaaataaaaaaaaaaaaaaaaaaaaaaaaagggaaagggaaaaaaaaaaaaaaaaaaaaaaaaaaaaaaatgggcggacgttttaaaggatccaggcttacttacccgtgcttgcaacgtcatatttcttctatggggactcctaaatccagttcattgcccgtctttttacaacgtttggactggaaaaaccctggcgtaacccaacttaatcaccttgcatcacatcccctttttgccagctggctaaatagcgatgaggccttaaccgatcgcctttccaaacatttgctcatcctgaatggcaaatgggacgccccttgtattggcccattaagcgcggcggctgtgctggttccgcgcaacgtgaccgttacactggcccagggccttagtgccatgtccttccgatttttttcactatcctttatgcgccac

SEQ ID NO: 248842 - DNA, 358 bp, Glycine max
gaattcccgggtgcgacgcacgcgtccgcccacgcgtccgttcacgcgtccgaacatcttcacaaactagtaaatagtaatattatgcttcgaatccattttatgattcataatgggtgttttcacatttgatgatgaaaccacctcccctgtggctcctgctaccctttacaaagctctagttacagatgccgacaacgtcatcccaaaggctgttgatgccttcaggagttgtgaaaaccttgaggggaacggtggccctggaaccatcaagaagatcactttctgtgatgatggagaaagcaagtttgtgttgcacaaaatataatcagttgatgaggcaaacttgggatacagc

SEQ ID NO: 248843 - DNA, 349 bp, Glycine max
cggaattcccgggtcgacccacgcgtccgcggacgcgtggggtgctgctggagctgctgctggtgtagtggttcttctaatagttttggggtttgtgatgctgaggcgcagaaggaggcatgttgggaccggaacatcagtggagggctcattgatggcatttagctacagggatttgcaaaatgccacaaagaatttctcggataaacttggaggagggggctttggttctgtcttcaaaggaacattggctgattctagtatcatagcagtgaagaagcttgaaagcattagccaaggtgagaagcagtttagaacagaagtgagtacaattgggacagtttaacat

SEQ ID NO: 248844 - DNA, 576 bp, Glycine max
  unsure (1)..(576): unsure at all n locations
tataatganntgtngggagccgtatggatgatngcagccactcgctagnactgcccgtaccggtccggaattcccgggtcgacccacgcgtccgagacttttagggtgctaagatccaaagtcgagagggaaacagcccagatcgtacgctaaggtccctaagcaatcacttagtggaaaaggaagtgatcgagcgatgacaaccaggaggtgggcttggaagcagccatcctttgaagaaagcgtaatagctcactggtctagctccatggcaccgaaaatgtatcagggctcaagtgattcaccgaagcgacgagaccttgaaagttgctttttcaagtgtcagtagcgggacgttctgtcaatcggggaaggtttttggtgacaacacctggagatatcagaagtgagaatgctgacatgagtaacgataaatcctgtgaaaaacacgatcgcctgccagtggaaggctttctgcgttcagtcaatctacgcagagtgaatcggtccctaaggaagccccgaaccccgaatggcttgcgtncgatgggtacacgaaaatgacgaagttgcttt

SEQ ID NO: 248845 - DNA, 569 bp, Glycine max
  unsure (1)..(569): unsure at all n locations
tttatagtagtagagccatntccctgaggctgagagccgtagcaccgcggtaccggtccggaattcccgggtcgacccacgcgtccgccatgacccttcaagctgattcagcaccagtaccaccaccgccaccggattgcgcagcgaccaacggcatctcccccaccgcagaggaagccccacaaccaccgtcaccaccaccgccgcatccaaccccacctccagaactgcgcgtcccaatatggtggccggaagacgggaacctcagcatggattgggtggacaacctgatgcggtgcttcgattggtcctctcggaacgtcccaccctcggagctcccttcggttctccccgtcggagtcttcgattcgctcatcctcgtcgcctccaagatgctccacaaggagcccaattgcgtcaccgtagaccccttccgccctagctccgatgatgataacactcccttcgctgcctcctctgttgtcgtcgtcggcgatgttcacggccaactgcatgatctgctcttacnctncaagatgccgggttccccttcgcggaatcgaattttt

SEQ ID NO: 248846 - DNA, 568 bp, Glycine max
  unsure (1)..(568): unsure at all n locations
ttaatgannnagtgaggtgcgtatgaatgacccctgcnactcatacgaccgccgtaccggtccggaattcccgggtcgacccacgcgtccgatcttcacatatctctacctccctcaaacagtttatgctagctcttgttccaatggcttgctcagttaaactcttatttttgtgctttctctcattgttcatctctttctccatagctcaaccctctttcagaccaaaggcacttgttcttcctgtcaccaaagatgtttctgcctcagttcctcagtatgttacacagatcaaacaaagaaccccacttgtgccagtgaaactaacagttgatcttggtggtggctacttttgggtgaactgtgaaaaaggctatgtctcatcaacctcaaaaccagctcgttgtggctctgctcagtgctcacttttccggttatatgggtgcaatggtgaggacaaaatctgtagtcgttctttaagcaacactgntactggtgtcttcacattttgtgaattcatggcagatgtgtgctatcaatgccactgatggaaccattctcgtatggg

SEQ ID NO: 248847 - DNA, 574 bp, Glycine max
  unsure (1)..(574): unsure at all n locations
tataatgagnagtgagagtcagtgttgctgagaaactacgcccatcgaactgccgtaccggttcggaattcccgggtcgacccacgcgtccgaaaatttaaaaacttataataaattttactggtggcttaaatccatcaatattcataagtaaaaaaaaaaaaaaaaaaaaaaaaaaaaaaaaaaaaaaaaaaaaaaaaaaaaaaaaaaaaaaaaaaaaaaaaaaaaaaaaaaaaaaaaaaaaaaaaaaaaaacaaataaaaaaatccaatcattaaatcaaaatgcaacaaaaaaaaaaacaaataaaaaaactaagggaaatgaaactaacaggccaacgtttaacaaaaccaatactggaaaaactgttgattttagcaatgtaacataaatttcaaaacaagctcgttttacataaggtcatactcacaaaaacccttaaatgatcgccttttcaaagattaaacaacctgaatgttaaaaggaacactccatttaaagggtcaaaaacggtgtagttaaagaaaattccccaatttaaatggaaatgttaaaacgcttaaagacggtt

SEQ ID NO: 248848 - DNA, 535 bp, Glycine max
  unsure (1)..(535): unsure at all n locations
cgctctaggagcgntngtggctgaaccagtcacgcatcgcactgccgtaccggtccggaattcccgggtcgacccacgcgtccggaggaaattcttcctcttggtcccctgaatgattatgagagggagagtttggggaaggccaagaaagagttagcagcaagcattgagaagggcatttctttcatcagaaaatgagtagttgatgatagtacgtcccgaaaataaatggttagattgtgctgtgtccattgtgagatcatatagatttataattagttatgtgatatgtatgaatatcgagttctatctagaaacatgtaaatgtaataattggaataccgaattccatttattattccgtctcgagttatccccgtgaagtttgagtttgagtctaaaaatcaattcagatttttgtattatctatagacgaatattaaccttactcaatttagcatgcaatttaatttgaagtatttcatggctctcattattattaatggccatgttaaaatccggtctcacatttctc

SEQ ID NO: 248849 - DNA, 540 bp, Glycine max
  unsure (1)..(540): unsure at all n locations
gttttagtatggcgctttgtcgactggaactgcatacgtcatagcactgtctgtaccggtccggaattcccgggtcgacccacgcgtccggttgtcaaggaactggtatgaaggattctataagacatcttggcccatccatggttcagcagatgcagcatgcctgcaatgaatgtaagggtactggagaaactatcaatgacagagatcgctgcccacagtgcaagggagagaaggttgtgcaggagaagaaagtccttgaagttattgtagaaaaggggatgcataatgggcagaagataacattccctggcgaagctgatgaagcgccggacacaattactggggatatcgtctttgtccttcagcagaaggaacatcccaaattcaaaagaaaggctgaagatctttttgtagagcacactntgtcccttaccgaggccttgtgtggcttccaatttgtgctgactcacttggatagccgtcagcttcttattaaatcaaatccccggggagttgtgaagcctgattcatacaagg

SEQ ID NO: 248850 - DNA, 361 bp, Glycine max
ggaattcccgggtcgacccacgcgtccgcccacgcgtccgttgacgcgtgggcaagcttcagtttgtcccctgcgtcttattacttggcggttgtgtggtgatatggttcaagctgggagttctgccatggatgtccgtgacagattaagaggattgtctgaacatgagagtatttgcggttctaggactgccccctgtgattcttgtgggcgttctgagatgtttaaggacatggacattcaccaggttgctggtcatcaaaaaggctaattctgatattttcatcttaacagcaacttgtgaaagattgcatctaggtaataaatcgaaaattaacagaaactggaggaaattgaaaga

SEQ ID NO: 248851 - DNA, 398 bp, Glycine max
gaattcccgggtcgacccacgcgttcgcacttgacccctaaattcgtgcccattctcacaactgcacattcttctttctatatatggcaaatgccttttccgatttccaccaaaatctaaaccgaaattcccaattaccctttccaattttcaccaaaacctaatactcccacaccaatcttcgatcatggacgccgattcacaacctcaacaactcgaagagagaacagaagagcaagaactgaagtacctggaattcgtgcaattcgcgaccatacaggctctgatgcgctgcgccatcctctactcatacgccaaggagcgcgcgggtcctctgaagcccggtgtcgacaccgtggaagaggccgtgaagaccgtcgtggctccggtctacgata

SEQ ID NO: 248852 - DNA, 574 bp, Glycine max
  unsure (1)..(574): unsure at all n locations
ttgtatatnnaggatggagccgtatncctgataactgacgagcngtactactgccgtaccggttcggaattcccgggtcgacccacgcgtccgggatttgggcacaattaaatctaagctggagaaaaatatttattctggcactgaggagtgtgcagctgatgtcagactgaccttctcaaatgctatgaaatataatcctcccagtaatgatgttcatttgatggcaaaggaactcagcaaaatatttgacagaaaatggaaagacttaggtcggaaatggaagtgtgaagatgagcatgataaaagcgaatctgaaacaattaaggaaactgggagaaaaagtcttgacatgctgtcccggcatagagattccttgcccaaaaagacacaagtatctgaacacaaaagaatgcccaagattagatcaattgcaacaaaattgcaagcgtgtaattacctaatttccagaacaagaggtaattaaaggcagatatagtcaaaagactagaatccaaacaatatgtgcatttacaataattggctgttccctggttaaaagggtataaccggg

SEQ ID NO: 248853 - DNA, 570 bp, Glycine max
  unsure (1)..(570): unsure at all n locations
tataatatgaggtggannananacctgaaaactagagcgatcgactgccgtaccggttcggaattcccgggtcgacccacgcgtccgcgtttgcctgcaaaatatatcagattcatgatctgaatgatgtgtttgcgtcgttgccgatgtctgatgttgatccattcttgagtgtcagtgatgattatcatgtatatgctaagatccatgtggatgtgagagaatatggtactgctgctgataatcagttagcatgttcaatgttgtcagagttacagaacaaaatacgggaatgtcaatcgatcataagggatgctttggttcataatttagctaacgtcactgagctggatgcagatgaactggctatgctattgtcagagaaattcaagcctgatgaagagtttgtgttcggtccacagtcaatgcttgatcagaatcaaataatttttcattcccaggagtcactgtcatttgatggggatttttccttcaattcaacaagtggtgaagatgacacattccgtgaagcatcttgctctgacccttttggattatttccaaggaggc

SEQ ID NO: 248854 - DNA, 524 bp, Glycine max
  unsure (1)..(524): unsure at all n locations
agaggccttgtcctgcacgatcgctacgcatgccgtaccggtccggaattcccgggtcgacccacgcgtccggttttttacgccggaaaagcccccaaaggagtgaaaaccaattggatcatgcaggaatgtcgcctcgccaatgttgaccgatctgcctccaagaaaaacaacaacaacttgaggcttgatgattgggtgttgtgtcgaatctacaacaagaaagggaagattgagaaatacaacacgaccgcaccgaagatgaatcttgaaatgattcatagttttgagcacgagaacgagacgaagcctgagattcataagcttggaaatgagcaattgttgtacacggagacttcagattcggtgccaaggttgcacacggactcgagcagctcggagcacgtggtttcgcccgatgtgaggtgcgagagggaagtgcagagcgaccccaagtggaataacgatgattatgatctgggcctacagctagaaaacgcgtttgattttcagtttaattactn

SEQ ID NO: 248855 - DNA, 538 bp, Glycine max
  unsure (1)..(538): unsure at all n locations
gtttttagctgtcctcttcatagaacctgaactcatcgccactgctgtaccggtccggaattcccgggtcgacccacgcgtccgcttcgttaagaccctcaccggcaagactattaccctagaagtcgaaagctccgacacgatcgacaacgtcaaggctaagattcaggacaaggagggaatccccccagaccagcagaggctgatcttcgccgggaagcagctcgaggacggacgcacccttgctgactacaacatccagaaggagtcaactctccacttggtgttgcgtcttcgtggtggtatgcagattttcgtgaagactcttacgggtaagactattaccctcgaggtggagagctctgacaccattgacaatgtgaaggccaagattcaggacaaggaaggcatcccaccggaccagcagaggctgatttttgctggcaagcagctcgaggatggaaggaccctcgctgactacaacatccagaatgaatcaacccttcaccttgtcctncgtctccgtggggggttttan

SEQ ID NO: 248856 - DNA, 436 bp, Glycine max
aattcccgggtcgacccacgcgtgcgcaaccatctttggatcaaccctccaatttgtttacaatatggaacagaccctctcctttgaatgttgagcatgaatttgttcaaaacacggcaagagtgaaatctgttgatatgcatccaactgagccatggattctactgggtttgtattcaggaactatttctatttggaactatcagacaaagactgaagagaagtctttaaaaatcagcgaatctccagtgagatcagcaaagttcattgctcgggaaaactggattgttgcagctacggatgacaaaaacattcacgtctacaattatgacaaaatggaaaagatagtagaatttgcggaacataaagattatatcaggagtttagctgttcatcctgtcctgccatatgtaatatcagctttagatgatcaggt

SEQ ID NO: 248857 - DNA, 436 bp, Glycine max
tcccgaattcccgggtcgacccacgcgtccgctccaaatacgatttcgtcaaggtgaaggtgtggttgggtgataatgcggatcactactatgtgctctcccgatttttgctcagcagaatgctaacggtaaccaagattccaaaccacgttgctatcaaaattgctctcgaattgaagaagctgctcacagataacagccttctagatgtctctcaatctgacttggaagtcaacctatttaagcttatggagcggcggggatatggagaagaatacataaatcgttacaagatgatgacgagatttcatcatcaaagagttccgttagtaatccttgtttgtggaactgcttgtgttgggaagtctactattgccacccagcttgcacagaagctaaatttaccaaatgtattacagacagatatggtttatga

SEQ ID NO: 248858 - DNA, 555 bp, Glycine max
  unsure (1)..(555): unsure at all n locations
gtgcctagtagccggcctgatnccncctacgactcgctggactgcacgtaccggtccggaattcccgggtcgacccacgcgtccgggaattcaatgaggtggatcatctgttcaagcatcggattaatagcagtgtattacatgctagtaactatatcaagcaatttccttcgcctatcatatctatcattgcanaattcatctcatttgtatcgggtggctttgctgcaattctgatcatcattgcttttctagaggagtctctgctggagggtcatatatttggtcggaacttgttctggtatgctgctgtttttggaactataactgctattagacgggcttcaattacagatgagcttctagtcatagaccccgaaggagcaatgtcaatggtagttgagcatacacattatatgcccaagagatggcggggaaaagaaagtactgaaatggtccggatggagtttgaaaccttattccagttatagtgggatgatgttacttgaggagatggcctagattttccttactccatacttacttctggggggg

SEQ ID NO: 248859 - DNA, 559 bp, Glycine max
  unsure (1)..(559): unsure at all n locations
gtatttcnatgtggtgttgctacngctcactgactcacgtaccggtccggaattcccgggtcgacccacgcgtccgagcaagatcggaagcggatccttcggcgaaatttacctcgacactcatattgataccttcgagatcgtcgacgtcaagattgaaaacggtataacgtagcatgcgcaattgctttatgaggccaagctctacaatattcttcaaggaggaagtggaatcccgagcataaaatggtgtggtgtaaacagtgaggataatgtgcttgctatggactagctgggacctagactagaggatccatatggctactgtggaagaaagttctgtctcagatgcgtgttgatgatggccgatcaaatgatgactagaatcgaatatgtgcattctagaggattcctacacatggatataagacctgacaactttctcatgggactgggttgcgatgcaaaccaggttatatcattgatttgggcatgcaaaacgatatatggcttgacgactaatcgttacatccctatcagggggtacaaaaacctaccn

SEQ ID NO: 248860 - DNA, 431 bp, Glycine max
aattcccgggtcgacccacgcgtgcgcggacgcgtgggccgcgggtgggatgcttgcgatgctgaactagccacatctctcgctgaaggttcacgcggtgttcaacctcaacaactgggtcgacaccttctggcccgagatcttcaccagactcccgaagatagagagtttgcatgaagatgaggagtttgatcatcatcgaatgctacttgctgcacttcttgtatcaaaggtcttgtattacttgggggaacttaatgattccgcatcgtatccccttggagctggtcctatggttgatgtctcagaggattctgactatgtgcacactcttcttgctgaaggcatagatgaatatgctagcctcaagtctaacgcagcagagttaagtgttgaatctatcagaatggacccaatgttggaagcaattg

SEQ ID NO: 248861 - DNA, 569 bp, Glycine max
catttcttagtagctctctcctataccatccgtatgtcttctgtactgctcttaccggtcctgaattcccgggtcgacccacgcgtcctcccacgcgtcctacaaaaacaaaaaataatatttaaaaaataatattaaatataggaaaaaatggtaaaattataaaataaaaataaaaaaaataaaaaataaattaataaaaaaaataataataaataaagggctcccttttttttgtatccatttttttattctctttctttctatttatcttttctttttttttatatcctaacttcaattctttttctatttttctaaaatttctcaatctgtaaatccttttctttcccctttttaatatactttttactacttccctttttcctaatttcatctatttctctaaaattctctactccttctcattttccaaattatactcttcctttatagatattttgaactttccttttttgtctctattaacctctttaatttaattttttccctcatcttaacttttaacttttaacttccttatctctaaatcatttattttttttatg

SEQ ID NO: 248862 - DNA, 562 bp, Glycine max
  unsure (1)..(562): unsure at all n locations
gtgatttgaggagttcgtccctgatacccgcagccaccgatagtactgtcgtaccggtccggaattcccgggtcgacccacgcgtccgcccacgcgtccgcccacgcgtccgcggacgcgtgggagaatatattacattaagaaagcccaaagaaagaagaagatggcgtccgagtgcaaaggtaagagctcatggcctgagttggttggagtggaaggaacggtggcggtggctacaattgagagggagaatcctttggtggatgctaacactgtgcttaaaggatccatcgtcaccgctgattttcgatgtgatagggttcgggtttgggtcaccaaacatggaattgtttatcaggctccaagaattggataagaagtgtttacactaaagcacttcatatatatgttatgagtcatgaatataatagtatttaaataaggagttattcttccaattatgttatttgattgaaaataaaaacatgactataagaaatttgttttttcttatttttaattatgttatgcactgcaaataaatatacaaattgtgtgtttn

SEQ ID NO: 248863 - DNA, 375 bp, Glycine max
tccggatcgacccacgcgtccgcacgtgctcacgattagacatgtgttgaaactgatggatatggacaactgaaagaacatcgggcctccggaccaaaacttccaggacgaagaatacgacggatactgcttccaatgactgtcaaacgaatctacaagactcaccccaacacgctctgacaccaacaatgggcccgatctgggcacacgcacccaaaatgtgctggaggatacatatactgctgatgtgatacagcgtctcatgaaagtcgcttttacgcagatcaatatgcctattcaacaaacagatgctgctgtaagagctgatggtcaagacgctgctggccggagtgcaatgcttgctgctgcacataa

SEQ ID NO: 248864 - DNA, 433 bp, Glycine max
gggtcgacccacgcgtgccgacgcttttattcctcttcaaaatttcgacatctatccaagcgatagacactctggtctatggaactagtagcggagtgcgaacgaactctgtacccatacattactggatcctctgtacttcctatcaaatacaaagatggtattctaatgaccgctgacatgagatgttcctatggatctaccctgcggtataagactgtctagcgtatcaagcctattataaagcattctcttctaggtgctacctgtgaaataagttactatcatgaaatattccgctaccttgacgagcttatcctttatgacaacatgtacaacgatcgtaattcattagggccgaatgacgtgcataattatgtaacccgtgtcatgtataatacacataacaagttcaatccattgtccaattcac

SEQ ID NO: 248865 - DNA, 541 bp, Glycine max
  unsure (1)..(541): unsure at all n locations
agttntagccggatgttagtgnttgggcctagtcgcatcttctaccggcccggaattcccgggtcgacccacgcgtccgaaagtatccatccatgaatcttgcctatgctgctggccgtgctggaggcacaatgacaggagttcttagtgcagcaaatgagaaagctgtagagatgtttattgatgaaaagattagctatttggatatattcaaagttgtggagctaacatgtgagaagcatcaaaatgaattgttatcctctccttcccttgaggaaatcattcactatgacctgtgggcgcgagaatttgctgctagtttgcaagactcttccagcttcactcctattcttgcatgaggatatgattaaactagggatgtggctgctggtgcttcccaattgcctgctttcaccataatttcttcaggcaattgaacaatttagaatgatgcattccctcagatgttgaaaaataaatagtttatttttgtgttctattttcttgtttatggaatgttggtgttttaacacctcttaat

SEQ ID NO: 248866 - DNA, 493 bp, Glycine max
aattcccgggtcgacccacgcgtccgcccacgcgtccgcccacgcgtccgtgcagctctactagctagggtttcgcaagtgcgatcgaggaagaacgagggccatggctgctgctctgcgtcgcgaaggaaggcgtttgacccaaccaatcaacgccctgcgttcctctctcatctctcaagaccaatcctctcatggcgctcgcttcatttccactcaagtggtgagaaacctaatgaagagtgtgaggaatatccacaagatcaccaaggccatgaagatggttgccgcatgcaagctgagagccgttcagaccatagctgaaaattcccgcggcctctggcagccgatcaccgctcttctcggcgacaatcccagtgctgatgttaagaaaaacgttgttgttaccatctcttcagacaaaagtctttgtggtggactcaattgcacgtctgttaagataagctgggttttgtccaattgaattctgggc

SEQ ID NO: 248867 - DNA, 560 bp, Glycine max
  unsure (1)..(560): unsure at all n locations
gtggcttgagtagctctcaatgataccgccagcnactcataggactgacgtaccggtccggaattcccgggtcgacccacgcgtccgaatcaatcaaattctttgagttgaacacaggggccaagattccttctcttgggttagggacttggcaagctgaacctggtgttgtagctgaagctctcaccacagccattcaggttggatacaggcatattgactgtgctagtgcgtataagaatcaagcagagattggttctgctcttaagaagctttttgatgatggtgtggtgaagcgtgaggacttatggatcacttccaaactctggtgttcagatcatgcaccagaagatgtgccaaaagcattggataaaacattacaggaattgcaacttgactatcttgacctctatctgatccactggccagtccgcatgaaaagtggaacatttggactcaataaagaatatcttgagcaaccagacattcccaatacatggagagcaatggaggcactctatgactcagacaaggctagagccataggagtgagcaatttc

SEQ ID NO: 248868 - DNA, 569 bp, Glycine max
  unsure (1)..(569): unsure at all n locations
gagtcctgagtgtctctcaactgagatcatngataccgatagcactgctcgtaccggtccggaattcccgggtcgacccacgcgtccgggagaaagggtgggtattgcttcacacaaacacaacagtgtctgctgcacctggcgaatggtggcgctatcaacatggtttcgctacattgcccacaagctcgaatactccttctccctcagctggaagaactacaaaggaggtcaaattacagacagagaggtacgtgatgttgtttggaaaaacttctttcaaggaaagctgacgtacttgcactggaataaaggagaggagatggcccctactattgatggaaaagcagtaactcttgttcggaaattaccagttgtagacccaacgtaatttcacacactccttttgtgcaaatctattgactgttattgttagttgtttggcgtgtttttgtaggagatgttgcggttgtgaaggaccctgagaagccagataactacctactcagaagattaactgcaattgaaggctatgaaatgggttctacttgatgaaaaagatgaagcct

SEQ ID NO: 248869 - DNA, 404 bp, Glycine max
ggaattcccgggtcgacccacgcgtccgctcaccgtggagacctcggtgcccttcaccttccacaactgcgatgcgcctccacgcgccgtggagacgtcctcggcggagctcttctcgttcttccgtgacatggcgctgatgcggcggatggagatcgcggcggactcgctctacaaggccaagctcatacgcggcttctgccacctctacgatggccaggaggccgtcgccgtcggcatggaggccgccatcacgcgcaaggattgtatcatcaccgcctaccgcgaccactgcaccttcctcgcccgcggtggaaccctaatcgaggtcttcgctgagctcatgggccgtcgcgacggctgctccaaggggaaaggaggatccatgcacttttaccgcaaag

SEQ ID NO: 248870 - DNA, 443 bp, Glycine max
  unsure (1)..(443): unsure at all n locations
gaattcccggggttagtggtatcagattgatgagaatgttcagagggagataattaaccaccgatctttaaggcatccaaatataatcaggtttagggaggtgttactgacccctacacatttagctatcgtcttggagtatgcttcaggtggtgaactttttgagaggatttgtactgctggtcgatttagcgaagatgaggcaagatatttcttccagcagctaatatctggggttagctactgtcattcaatggaaatttgtcatacagatctaaaattggaaaacactctcttggatggaaatccatctcctcggcttaaaatttgtgactatggttattccaagtctgctctactgcactctcaacctaaatcaacagttggaactcctgcatacatngctacggatgttctgtcgcgaaaggagtatgatggaaaga

SEQ ID NO: 248871 - DNA, 491 bp, Glycine max
  unsure (1)..(491): unsure at all n locations
aattcccgggtcgacccacgcgtgcgcccacgcgtccggaacactgttattcagacctgtgttgttgcttgctatggccttgccttcagtggggggggtggttcatccttgattgccatggatcagagaacatatgaactcataggccctgattaccctggtaatagagctgaagatgttaaaaaccctggcttgggttggatgatgggtttcatgtttgttgtcagtttccttggactntttagtcttgtgccacttcgtaaggttatggtcttggattataagcttacatatcccagtgggacagctacagcaatgctaaataacagtttccatacaaaaactggagcagaacttgctgggaaccaagttctgcagctttgtgaagtatctaagcataagtttctgctggagttgctttaagtgggtcttaatggtattggggattcatgtgggtttgacaactttcctagctttggtttgacactttt

SEQ ID NO: 248872 - DNA, 564 bp, Glycine max
gtgtcactagatatgccgccactgataccgccagccactcatacgactgacgtaccggtccggaattcccgggtcgacccacgcgtccgcccacgcgtccgacacaacacaacgcgaatggctacggcgctggagaagaaagcgaaggaggcattcttcgacgacgaattcggtctggccgtcgatctctactctgaagccatacgattggatccgaacgacgccaatctcttcgcggacagagcccaagcccatatcaaactcaacgctttcactgaagccgtttccgatgccaacaaatccatccaattaaacccttccttgcccaaggcctatcttcgtaaagccaccgcttgtatcaaactccaagaatatcacaccgccaaggtagcgcttcaaaacggtgccgcttttgcccaagacgattcaagattcgccaacttgattcaacaatgtgatcgctgcattgcagaggaatcaagtggccttactagcaccttgtcttcccatttgagcaatagaaatcatgggatgactaaagaagaagctgaaggagacagtttg

SEQ ID NO: 248873 - DNA, 571 bp, Glycine max
  unsure (1)..(571): unsure at all n locations
cgagtacttggagttgctcgncactgaaaccgcttagncactcgctagtactgcccgtaccggtccggaattcccgggtcgacccacgcgtccgcccacgcgtccgcccacgcgtccgtgaatcttcgttatccttctttttttctccttgaactcgaatattcactatggcagatgaggtggttctgctagatttctggccaagtccatttgggatgagggtcaggattgcacttgctgaaaagggtatcaaatatgagtccaaagaagaggacttgcagaacaagagccctttgctcctcaaaatgaacccggttcacaagaaaatcccggttctcatccacaatggcaaacccatttgtgaatctctcgttgctgttcagtacattgaggaggtctggaatgacaganatcccttgttgccttctgacccttaccagagagctcaggctagattctgggcttgacttgttgacaataggatatttgatcctggaagaaagatttggacatcatagggagaggataaagagcttgcaaaaaaggagtcatagaagccctttaatttttg

SEQ ID NO: 248874 - DNA, 559 bp, Glycine max
gaagtccgtctcggatattcattgatgtcttctgcactgtcgtaccggtccggaattcccgggtcgacccacgcgtccgcccacgcgtccgggaagctccccttccagaggctggttcgtgaaattgctcaggacttcaagactgatctgcgtttccagaaccacgccgtgcttgcattgcaagaaactgctgaagcataccttgttgggctctttgaacgacactaacctgtgtgccattcacgctaagcgggtaaccattatgcccaaggatatccagctggcaagaaggattcgcggtgaacgtgcttgaggtggtggttgtgaagatgaagatgaagatgggttgctgcgggtggtgtttttgttgttcagattccttttttttttttcaatggataggggttgttagggagtgtaggtagttttacggtattattactccattaattgtgaatcaggccaatacttgccaagtgtcccttaactgagttttcttccttttagaataatgattttgtaattgatttttggacttgtgggtctcttaactaaaaaa

SEQ ID NO: 248875 - DNA, 395 bp, Glycine max
gaatcgacggaccggtccactcgtccgcatggtatactgtactcatgctctcatccaatttaaatctaatctcattggcaccagaaatgatcatgtatacacggggcgtatactcttactgccaatatcaggagctcgtcaagcacaactattgaaatggcgacattaataccgctatagaattactctgaagtggcagctgccatatcgaaaattgacaacagtaaacatatacctgaaatcccagagcatctttcgaacgatgcacaaaatttgatgacgctatgctgacaaagagacccataagctcgaccgacagcccataagctactagaccacctattgattcgacatcaatcggcatcaaaagctgcaaatgtgagcataaccagaga

SEQ ID NO: 248876 - DNA, 484 bp, Glycine max
  unsure (1)..(484): unsure at all n locations
ggaattcccgggtcgacccacgcgtccggagaacggggaaaccaacctcgatgatgttgaagctgtctttaaagattctgaagagcaccgtgtgagggagaagaaagaagagcagcctacagccatgaatgcatttgagttaatttccatgtccaaaggactgaaccttgaaaacttgtttgatacagagcagggatttaaaagggaaacaagattcacctcaaaatcccctgcggatgagataatcaacaagattgaggaagctgcaaaacctcttggctttgatgtgcagaagaaaaattacaagatgaggcttgcaaatgtgaaagctggaaggaagggaaaccttaatggtgccacagagatattccaagtggcaccttctcttcacatggctgaggtacggaaggcaaaaagagatacattggagttccataagttctacangaaactttcaacaagccttgatgatgttgtctggaaa

SEQ ID NO: 248877 - DNA, 483 bp, Glycine max
ggaattcccgggtcgacccacgcgtccgcaggtacacgtggaagatttattccgaaaggcttatgactttggcgggagtttatagtttctggaaatgcgtttccaaattagagaggcgtgaaactcgacgatatcttgagatgttctatatcctcaagttccgtgatttggcaaattctgttccgctagctaaggatgatgcaagttaactagctatataatttcaccaaaggcttgacagcagacataataagagtcatttatgtaaatataatagtctgcttctcgtgttttgaaatctagtgaggcgacctagaggagtttcatggaagacttgtcttgtctatgttaacttcgattatgtaagagatggcgagcactggttgttgaatttggatgtctcttgttttcgtttgattagtagtcatcaatgatatagacctggaaattacctgtgacttgaggatgttatccttactgatg

SEQ ID NO: 248878 - DNA, 455 bp, Glycine max
tcccgaattcccgggtcgacccacgcgtccggaagaatcaagcaatggagcattcaatgagtgagaactcctgccaattgtgtgctgtagagaagcttacctttgaaccaccgcctatttattgcacaacttgtggggttcgcattaaacgaaataatatgtattataccacgggcaccggtgacacacggcattatttttgtcttccatgctataatgatgctcgtacagagaacatcattgttgatgggactcccattgccaaatcaagattggaaaagaagaagaatgatgaggaaactgaagaatggtgggttcaatgtgataaatgtgaagcatggcaacatcaaatttgtgctttatttaatggcagaagaaatgatggtggacaagctgaatatacttgccctaactgctatattcaagaggtagaaagaagagagcgcaagccctta

SEQ ID NO: 248879 - DNA, 565 bp, Glycine max
  unsure (1)..(565): unsure at all n locations
agtggtcaggtgtccgtctaccgtatantcctagccatcttctgtactgctcgtaccggtccggaattcccgggtcgacccacgcgtccggaccaaatgctttgtataccattgattggagttgtgcattccataccattcgagggatatacggtctatgccagatgctgtacagtcctaattttttgagccaccattatgactaggaatgagttgacgagattatggaccgttaggtcgctggccaccatttctctcttccaatcattgccgaaattgacttgtacaagttcgacccatgggttcttccaagtggagcgattttctgtgaaaacgagtgttactttttcagcctcagagacaggaaataccctaacgggtctcgaaccatcagagtatctgcgtcggtttattggaaagccaccggaaccgactagatcatcaccacctaatgtagaatagttggcatacaatatgccctagttttctacattggcaaaggccccaagggcactcaaactaattgaatcatgcacgattataggcttattgactcttcccaaaa

SEQ ID NO: 248880 - DNA, 571 bp, Glycine max
  unsure (1)..(571): unsure at all n locations
gtgtgctctgaggtgttcgtcaactgagantcattgataccgctacgactgcacgtaccggtccggaattcccgggtcgacccacgcgtccggattggtcttggtcagtcaccttccactcctgcaccttttaagagtcttggcgaggccattgtggcggctgccaagtcttctcaagcaagcagtgttgctgttgctcttgcctcttctgaaggactctccgcacaatcaaagcttagcactgcttatgcaattgcttctggggctgtgctgggattatttgaagataatagatacaaatcagaagcaaagaaatcaacactaaggtccattgactttattggtcttgggacaggacctgaactggagaagaaactgaagtacgcatgagatgtttcttccggaattatctttggaagggagcttgtaaattctcctgctaatgtgctcacaccaggggtgttggcagaagaagcagctaaaattgcttccaactacagtgatgttttcacttgctaaaatattaaattctgaagcatgtgcagattttgaaattgggttctatctgggn

SEQ ID NO: 248881 - DNA, 562 bp, Glycine max
  unsure (1)..(562): unsure at all n locations
gtcaccgaggagtccgtcactgagaccgactgatgacgtttcgactgcacgtaccggtccggaattcccgggtcgacccacgcgtccggttaaccatgaagtttatgtatcttgcattcctacttctatttgttttctctagccaattcgggcttggaggagcagatgcttcccccagacaagtgattgacacagaaggcaagaaagttcgagctggcgtagattactatatccgaccggtcccaacaaccccatgtgatgggcgtgggccgtgtgtggttggaagtggctatgttctcatagcaaggtcatccaaccacacttgccctcttagtgttgcggtggtggagggtttccgtggcctagcagtcacattcaaactagttaaccctaaaaaaggggtcattagggtttctactgacttgaacatcaaaacctncctaactaacacatgttgtagtgagtccacggtctggaagctagatgcccttgatgattcaactggacagtggtttgtgaccactggtggtgtgttgggaaaccctgcaaggataccatcgac

SEQ ID NO: 248882 - DNA, 564 bp, Glycine max
agcgtcctgaggtggctcgctccgaaagtctatgatgtcatctgtactgtcgtaccggtccggaattcccgggtcgacccacgcgtccgcttcatcatcatcttcttcttctctgcatcatcacaatggctgaagtacgttcgcaacaacgtgaaccccagcatgtgcaagtccactcaaccacaacacacacgccacatcaccatggcggggaaggtcgcagcggcattctgaacctcatcccggagatgtccctcacgggttcccaactcctagctctcctcgacggcgttccccttggtgcaatgctgctcctgctctccggcatctcgctcatcgccagcctcttggggctggcggtggcgacgccgctcttcatcttcttcagcccgctgctggtccccgccgacttcgtcataagaatggcggtgaccgcggtgctggcggcagaggcgtgcgggctggcggcgctcgtgttgtatcgtgggtggtgaactatctccggagattgcacggtggacgacgatgatgaccgtgcttgccgagcaggcaaagcgcacgtgg

SEQ ID NO: 248883 - DNA, 313 bp, Glycine max
  unsure (1)..(313): unsure at all n locations
gaattcccgggtcgacccacgcgtccgtactgctgccctcccatttgggacgattgcggttatagttctcatatggacacttgttacgtgtccttggcttgtattgggagggattgctgggaagaatagcaaggctgaatttcaagctcctgttcggacaactaaatatccaagggagattccacctctgccttggtatcgtggaacaattcctcagatggcgatggcaggatttttgcctttcagtgctatatacattgaactntactatatatttgccagtgtttggggccacagaatttacaccatctac

SEQ ID NO: 248884 - DNA, 417 bp, Glycine max
aattcccgggtcgacccacgcgtgcggttggtcctaaatcagttggagtgtgtcttttaacttcagcttttgtgggcatggccttcacgattcaatgggtaagagagttcaccaggttgggattgaatagatcggtaggtggggttttagctctggctttctcaagggagctaagtcctgtggctacagccattgtggttgcagggcgcattggaagtgcttttgcagctgacttaggaactatgcacgtttctgagcaaactgatacattaagagttcttggttcagaccctgttgattatctggtgacaccaagagtgttagccacttgtattgcgttaccccttttgaccctgttgtgttctacattacggatggcatctaatgcccttcttgctgatgggtgttattgggtga

SEQ ID NO: 248885 - DNA, 475 bp, Glycine max
  unsure (1)..(475): unsure at all n locations
aattcccgggtcgacccacgcgtgcgaccctacgttcttctccccaacgtcgacgcttctcagctactcaccttcacgccgttattaatgaaccccgtgggcaccgcctctgctttctcccagggagagccttccgccgagtatttcatcggcgtgaaatcgattaaaatcgacgaaaagacagtgccgttaaacaccactttgttgtccataaacagcaaaggcgttggtggaaccaagattagttccgttaacccttacactgttttggaggattctatcttcaaagcggtgacggaggctttcgtgaaagcttcttctgctaggaacataacgagggtggcttctgtggcgccgtttgaggtgtgcttcagtagggagaacgtgctcgccacgcggttggnggcggcggtgccaactattgagcttgtgctgcagaaccagaagacggtttggagggatttttggagcgaac

SEQ ID NO: 248886 - DNA, 566 bp, Glycine max
  unsure (1)..(566): unsure at all n locations
gtaactaagatgtctcgtctccgagacctactgataccgactggactgctcgtaccggtccggaattcccgggtcgacccacgcgtccgatcccatcatcatggcggccataacccgcctcgcgaagcgcgcgttcgtcgtcgcttccctggcgaggaggtgcctgagctcctccgtagtcaactgccacgcgccgccgcacgacgccacgtcgttccgcccgtttccgctgcgtgaagattcgagcaagcggtgcgtgcagtgggtgttcctcggctgccccggcgtcagaaaaagaacgtacgctagtcgcctctcgaacctgctcggcgttcctcacatcgccaccggcgatctcgttcgcgacgaactcaccttctttggcccactttcttcccagctatcagaaattgtaaaacagggtcaattggtgtcagatgaaattatcattagtttattgtcaaagagacttgttgccggggaagctaaaagcgatctgggatttattcttgaaggttttcctcgaacaattaagcaagcagaaatattggatggtgtaacttgcn

SEQ ID NO: 248887 - DNA, 562 bp, Glycine max
gttctctagtatgtcgcatgagtgcaaatgaaagcgatagtactgtcgtaccggtccggaattcccgggtcgacccacgcgtccgcccacgcgtccggaagaatgttggtgcttcttactcatatggtgaaacatctatgcaggaataggcagcagaataacattcagtacaaaacagttggacaacgcagttggactgcaatatttcgatggaggaatattcgtaggacgaaatgttataccaatttttctggctgccagatatctgattggagttgtacttctatttgtgttattgatctacaaatggcgacggagacatttgtcaatatatgaaaatatcgaaaatttcttgctggatagcaatctaaatcccattagatacggatacaaagaaatcaagaaaatgactggaggtttcaaagtgaaattgggtcaagggggctttggctctgtatacaaaggaaaactccgaagtgggttagatgtagctgtcaagatattgaccaaatccaatgataatggacatgattttatcaatgaagtagctaccattggaaca

SEQ ID NO: 248888 - DNA, 437 bp, Glycine max
ggaattcccgggtcgacccacgcgtccggttcatgttccagtgattttgtgactaggaatatattccatttaccaagtgacccttttatgttgatggctaagtttgccactttgctttggtactccttttggttcaaacattatgattctttcttttttaaacttttactatttgataacgtacagggtcccttgccgaaagagagagggcatcagattcaccatcaacggtcactcatacttcaacctagtcctaatttccaacgttggaggtgcaggtgatgttcacgcagtttccatcaaaggatcaagaacaaattggcaaccaatgaccagaaactggggtcagaactggcaaagcaacgcctatctcaacggacaaagcctctccttcatggtcaccactagcgacggacacaccgtggtctctaataatg

SEQ ID NO: 248889 - DNA, 566 bp, Glycine max
atttcctagcagtccgtcaagagattcctactgtcatctgaactgacctaccggtccggaattcccgggtcgacccacgcgtccgaaaaaaaaaaaaaaaaaaataaattaaaaaaaaaaaaaaacaaaaaaaaaaaaaaggaaaaaaagaaaaaaaaaaaaaaaaaagggcggcctttttaaaggatccaagcttacgtacccgtgcatgcaaagtcataacttttctatagggtcacctaaattcaattcactggccttatttttacaacttcattactggaaaaaccctggcgttacccaacttaatccccttgaaaaacatccccctttcgccagctggcgtaatatcaaaaaggcccgtaccgatcgcccttccaaacagttgcccatcctaaatggcaaatggaaccctccctgtaccggcccattaagcccaacggttgtggaggttactctcaatgttaccggttcacttgccagcgccttaacccccgttcctttagtttatttcccttcttttttgccactttctccggttttccccgtaaagttttaaatgggtg

SEQ ID NO: 248890 - DNA, 565 bp, Glycine max
  unsure (1)..(565): unsure at all n locations
gagggccagaggtgctcgtgactgagacggctgatagcgatagaactgtcgtaccggtccggaattcccgggtcgacccacgcgtccgcaggattttatggaggtggtggaatttcttaagaagcctgagaggttcactgctgttgggggtcgcataccaaaaggtgttcttcttgttggtcctcctggaactgggaagacacttttagcaaaggctattgcaggtgaagcaggtgtcccatttttctcaatctaaggtcctaagttggtaaaaatgttggttggtgttggtgcttctcgagtccgcgatttattcaggaaggccaaagagattgccccatgcattgtttttgttgatgaaattgatgctgttggaaggcaaagaggtactggaattggtggagggaatgatgaaagagaacagaccctcaatcaacttttgacagatatggatggattagagggtaataccggtttcattgacattgcaacttctaacagggtcgacattcttgattctgcattgtaaagcccggcacaatttgataggcatgtcaccggtgtn

SEQ ID NO: 248891 - DNA, 565 bp, Glycine max
  unsure (1)..(565): unsure at all n locations
agtgaactgagcatgcgcgncctgaaaccccctacnactcatcgactgacttaccggtccggaattcccgggtcgacccacgcgtccggtgctgcaatggcttcaagtcaggaggaggtgacccttttgggagctactggaagcccatttgtgtgcagggttcatattgccctcaagttgaagggagttcaatacaaatatgtcgaagaaaatttgaggaacaagagtgaactgcttctcaaatccaacccagttcacaagaaggttccagtgtttattcacaatgagaagcccatagcagagtctcttgtgattgttgaatacattgatgagacatggaagaacaaccccatcttgccttctgatccttaccaaagagccttggctcgtttctggtccaaattcattgatgataaggtttttggtgctgcatggaaatccgttttcacagctgatgagaaagagcgtgagaagaatgttgaggaagcaattgaggctctgcagtttcttgagaatgagataaaggacaagaagttccttggangannnagagatgggtngtaga

SEQ ID NO: 248892 - DNA, 566 bp, Glycine max
  unsure (1)..(566): unsure at all n locations
tgttcttgagtagctctccctgagaccgccacgactcatggactgacgtaccggtccggaattcccgggtcgacccacgcgtccgcccacgcgtccggaaacaaagggacagcacatgataaagcattacaagaaatgtgccacttgtgatgacattgttcgcattgacaatgaagaaaaaaataaggaagtgcaacaggagtaagtatttccatcagaatgttaatggcagcaaacatcttggtctgtggaaactggcagaagcatggcagcaacaataaatagaaatgtcattggaggatcaacgacttttgtctagttacctccctttactgagagagtttattcctaatgcggctgcaaaggttgaaactgatttgattgctcagttggttggtcattccaaagaagaaaattatgtgtacgacctctacaccgtgaaagatgagatggatataaacattgatgattcttcgggttcatattcactaatttcaaggtgattangaggaagactattatgatgggacacaacattcagattatgaatctgatgactcaaatgg

SEQ ID NO: 248893 - DNA, 440 bp, Glycine max
attcccgggtcgacccacgcgtccgcgctgagtcagaagacttctgagaacgacaaccaggctgaggagatgaagaagctcgtgtcggatatcggggagctcatggggaagttcaacgtttcggacttcatttggtacctgaagcctttcgattcgcaggggttcaacagaaaactcaaggagactcgggacaggtttgacgttgtggtggacggaatcataaagcagcgtctagaggaaagaaggaaaaacacagaaacgggcacagcagaacagtttaaggacatgcttgatgctttattggacatgcacgaagatgataatgctgaaatcaaattagaccaaaagaacattaaggccttcatcatggacatatttgttgctgggactgacacgtcagctgtaagcatagaatgggctatggcagagttaatcaacaa

SEQ ID NO: 248894 - DNA, 438 bp, Glycine max
ggaattcccgggtcgacccacgcgtccgctctctgcgcttcttggcggcgacgcggcggcggcggcgtcttcgccggagagttctacttgtagagggtcctccttccactcgtcgccgcgctggcagctctacttcaacgagatcaaagataccgataagctcgttgtgatagatttctcggcgtcgtggtgcggtccttgcaaattcatagagccagcgattcacgccatggccgacaagttcaacgacgttgacttcgtcaagatcgacgtcgacgaattacctgatgtggcgcaagagtttcaggtgcaggcgatgccgactttcgtgttgtggaagaaagggaaggaagtcgacatggttgtgggcgcaaagaaggacgagctcgagaagaagattgagaaacatcgatcgtgatcttagctctgaaatcctat

SEQ ID NO: 248895 - DNA, 313 bp, Glycine max
tcgacccacgcgtgcgcccaccttccagttgatcatgcatacccacttgcaatagagtttgactatcctacgcgcgatgcacggtcgcgggccactttcatgggcgtagagcaatgcacatagtctcatgcccacgagctttcgattaactcatgacgtgaacatttccaactgcatgaccattctggaagaacttatgcctatctcaatcgagatggctaagcgaaacttgaggtgcatctggaacttcacgaatgctgcggcccagagccacaatgagattcttgagatgtacacggattacatcgatcca

SEQ ID NO: 248896 - DNA, 566 bp, Glycine max
agtgtgtaagtatgcgtcatgagaccgcctgataccgttcgactgtcgtaccggtccggaattcccgggtcgacccacgcgtccgcgtgagaggggcagtagccgagattccgtgagttgcaaaaatgaagacgattctttccaccgggaccatgaacatcccggacggcgtgagcatcaaagttcatgccaaggtcatcgaagttgagggcccccgcggaaaattggtgcgagacttcaagcatttgaatctcgattttcagctcattactgacgaaaacggtaaaagaaagctgaaaatcgacgcgtggtttggttctcggaaaacatccgccgccattcgcaccgccttgagccacgtggagaatcttatcaccggcgtcaccaagggctaccgctacaaaatgaggttcgtttatgcccattttcccatcaacgcaagcaatggcaacagcaacaagtctattgagatccgaaatttccttggcgagaagaaggtgaggaaagtcaacattgctgatggcctgtccgttgttcgatctgaaaaagttaaagatgaattgatt

SEQ ID NO: 248897 - DNA, 563 bp, Glycine max
  unsure (1)..(563): unsure at all n locations
ggttaatcttacattgaaacccactgatagcgtttggactgcccgtaccggtccggaattcccgggtcgacccacgcgtccgatttttatcaggttgaggagctcttaaaagaatatgacaatgtgtgcaccctcagggttcgcgtgccaatttcatctgacttgagcaatccacgcaatttcatcaccaagatttctcgttataacaaagtggtcaacattccaaacagcatgaccattttggatgaacttctgcctatttcaattgagatggcaaagcgaaacttgaggggcatctggaacttcacaaatcctggggccgtgagccacaatgagattcttgagatgtacagggattacatcgatccaagcttcaagtgggctaacttcaatcttgaagagcaagccaaggtgataattgctgcacggagcaacaacgagatggatgcatccaaactgaagaacgagttccctgagcttcttttcatcaaggaatcactgatcaagtatgtctttgagccaaacaagaaaactgcttaaatatattaaagcggtttcatgtn

SEQ ID NO: 248898 - DNA, 425 bp, Glycine max
ttcccgggtcgacccacgcgtccgaacgccaaaggcagaatattccgtccggaaattagggttaaggttgcagcgtactccatcagcacccgggttaaataccctatgaccaccgacttgttctaccggaatccttacgctctctcactcacaaacgcacactgaattcaaagacatcgaaagagagaggcatggccgagcaaaccaccatcatgatcaagccagatggcgttcaaagaggccttattggcgagattattaacagatttgagacgaagggtatgtacttgaaagggttgaaactcgatactgtggaccgaacttttgctgagaagcactatgctcatacgtctgcaaagcctttactaaactgggttgatggattacattgtctctagccctgttgctgccatgatctgggacgg

SEQ ID NO: 248899 - DNA, 366 bp, Glycine max
tgaattcttgggtcgacccacgcgtccggtctgcttatgaagtctctcgaagcatctttctttctctttctgcagaagctattcgtgttacttgtggcgaagtattcaacatgcaaagtgcatggttgatttggaaatccacgtccgcatcgcattcgacccgtttgccgatggcaagagaatcagatgcccactgagcaaaggagtatgtgcacatactaattcagcaaaggaatgtaaagaagagtcttataacagtgcaagggatgaagaaggagcatagcgtcatgaagatcctcgaggacctgatgaaggacttctactgcaactggactgtggtgcacgacaaggagcttgtcaagatta

SEQ ID NO: 248900 - DNA, 330 bp, Glycine max
tccgggtcgacgacgcgtccgctttggtcttcatgttctgttctgatccaggtatggcttctaaacgcatcttgaaggagctgaaggaggtgcagaaggatccttctacctcatgcagtgcacgccctgtggctgacgacatgtttcactggcaagccacaatcatgggacctgctgatagaccatatgcaggtggtgtttgcctagttacaattcattatactactgactatcccttcaagccaccaaaggttgcttttcggactaacgtgtttcacccacacatcaacatcgatggccgcatatgtcttgacattctcaaggaccaat

SEQ ID NO: 248901 - DNA, 316 bp, Glycine max
ccaattcccgggtcgacccacgcgtccggttctgtagctctggtccctccaacttcacttaacttctccctctctatctttctctcaatacggaccaaaagattcattcattggtattattcatacaacaaatcaaaaaatgttacccaacaatccttccactattgatcccgacgcggtggcccggcaccacacccacgtggtgtccccgcagcagtgctgctccgccgtggtccacgagatcgccgccccggtctccaccgtctggtccgtcgtgcggcgcttcgacaacccgcaagcctacaagcacttcgtc

SEQ ID NO: 248902 - DNA, 382 bp, Glycine max
ccggtgcgtcgacccacgcgtgcgtgcgtataaaaggaaaataaagaaattagcgtcaaaatgccgggtgtgctcagcagctccatagtgtcgccgggggacgagctcgtggccgccggcagccgtacttcgtctgcgaatatgaccgcagctgaactgccgaagcaggtcgaggagaagaacccctacgacgagtcactggaagttcgagagcatgtccagctcgcttatacccagcacaacgagtctgcgattcagcccacatcctttgctgtcaacgatgactgcgcctgctcgtttgaggtagcccttgacagtttgggaacactgatacaacaatatggactgcacaagtcagtcaatgaagtattggtcgtcattg

SEQ ID NO: 248903 - DNA, 442 bp, Glycine max
cgcgtcgacccacgcgtacggacattactaacggaggtctttatagatttaataaattaataaccagataactatatatagtgtggcacaaggcttttacttatatatctttagtttgaatgttataattctactccgctactaatgctttcctccagaaattttttggcggaaaaaaaaatttgcccaatttaagaagtgacgttgaataattaatatgttcattgatgccaccaagtacctttttacggattaaaccacctcctggaatatatgattccataattacctaaaaatttaatcatttttaattatatataaatattactctaaaatccaggcatggtattatgggtgaaaaatataaatatttttatagagataaataatatttaagcgagagttatatatatttgtaaataaaagagcacgagattttttc

SEQ ID NO: 248904 - DNA, 538 bp, Glycine max
  unsure (1)..(538): unsure at all n locations
tgattagccaanaggagcatatgatactctagtctcactacgatgccgtaccggtccggaattcccgggtcgacccacgcgtccgctccgctctaaattctctgtctctctctctctctctcgatcaatcatggctttgcccaatcaggaaaccgtcgattaccctagtttcaaactcgtcatcgtcggtgacggtggtacaggaaagacaacgttcgtgaaaaggcatcttaccggtgaatttgagaagaaatacgaaccgaccattggagtggaggttcacccattggatttcttcacaaactgtggaaagattcgcttctactgttgggatactgccggacaagagaagtttggaggcctcagggatggatattatatccatgggcaatgcgccattatcatgtttgatgttactgcccgactaacttacaaaaatgtccctacctggcatcgggatctttgccgggtctgtgagaacatcccaattgatctttgcggtaacaaggttgatgtgaagaacaagcaagtgaaagct

SEQ ID NO: 248905 - DNA, 464 bp, Glycine max
  unsure (1)..(464): unsure at all n locations
ggctcgacccacgcgtccgttttcattttctaatctctctctctcccacctttcacactctgtttttcctctggctttctgaggcttctcaacacaaaatacacccttctacatggcgactgaagctgagttcgaatatgaagaggcgagtgaagctgagatcaaatatgatgaggaatacgtacagaattctcgaggcttgaagctttttgcatgccgatggcttccggcgaatggaagtccaaaagcgttaatcttcctgtgccatggctacgccatggaatgcagcatcacaatgaaaagcacaggaacaaggctcgcaaaagcgggttttgcagtgtatgggattgattatgaagggcatggaaaatcagaaagagttcctggccttgttatgaattatgattntgtcatcgacgattgctcccaacatttcactagaatttgtgaaaaagcagagaaca

SEQ ID NO: 248906 - DNA, 547 bp, Glycine max
  unsure (1)..(547): unsure at all n locations
agtctttgcnnnnatggagcgagcatcnactccccacctcacctacgtactgacttaccggtccggaattcccgggtcgacccacgcgtccgcggacgcgtccgcccacgcgtccggttcactgtaaaatattcttccttccctggtccagtcggaggttggcaaatgggtgttccccatggcatgggtatctcaatgcaatacaataatgtggtgcctgtgccaagttttccacagccatcaaagtcaaatataaaaaattaaaaaaaaaaaaacaaaaataaaaaaaaaaaaaaaaaaaaaaaaaaaaaatacaggacaaacgatctactggattagatgtatacatgacctgactgcaaatttaaagattgactattatataatcaaatctaactagactgtccgcatagtacaacggaaggactgtgaaaaccctggcgaatcgcaacttaatcctcgagcgacacatgcacctaattgcgatggcgtagtagctaataggtcttcacaaaaagccgttcaaaacgattgtacagcaggtaac

SEQ ID NO: 248907 - DNA, 551 bp, Glycine max
  unsure (1)..(551): unsure at all n locations
aggtntagccgagtatgcgaatcgctgagnacctgaactcacgtacgcaactgacgtaccggtccggaattcccgggtcgacccacgcgtccgtagaaaacaccctctaccgcctctaagtcctacaagaacccatcccctccccagccgctccggaaatctcactcttgttactcttcttcctccaagagaagtaaacaaccctcacattcaccacagcagcacacacagacaaagacaaccttgtttgtctccaatcaaaacctttcaagctggcgttcgaaaaccaagacaaccctgtccgagaaatcaagcccaagaataggagaatcatgggcgctggaggccctgatgatgaggacaacaacaggtggccaccgtggctgaagcctctgctaaaagaaagtttctttgttcaatgcaagcttcacgctgattcgcacaagagcgagtgcaacatgtactgcttggattgtatgaacggtgctctctgctctctctgcctcgcttaccatanagatcatcgtgctattcagataaggaggtcctca

SEQ ID NO: 248908 - DNA, 540 bp, Glycine max
gttttatgccgtagcgagtaccacgttcccgacactacgcactgacgtaccggtccggaattcccgggtcgacccacgcgtccgcaacaagttaatagcattccgcaaaatggctgccaccaccttagtctctgaagtcgctctcggctcctcctccggccagcggaagatgccgctgatgggcctcggcaccgcgccggaagcaaccagcgcggttaccacaaaagatgctgttcttgaggccatcaagcagggctacaggcactttgatgctgcttctgcttatggtgtggaacagtctgtgggagaagccatagctgaagcacttaagcaaggactaattgcatccagagatcaactcttcatcactaccaaattgtgggtcactgataaccatgcccatactattcttcctgccctgcagaaatctctcaggacacttcaactagaatacatagatctctttctgatccactggcccatggctactaagcctggaaaagttgtgtaccccattgaagtatcagagatagtggaatt

SEQ ID NO: 248909 - DNA, 382 bp, Glycine max
aattgccgggtcgacccacgcgtgcgcccacgcgtccgcccacgcgtccgacaaatccgaatcagtttccgtctctaaccgccgttaagtccgcggaggctcaaacctcgtgctggctaagaaacgagaaacacgtgctggatcgcctaggttcgtcgtctccgaggataattcgctgcttcggagacgactgcagtttcgagaacggcgttgagtactacaatctgttcctcgaatacgccgccggcgggagccttgccgatgaattgaagaatcacgatggccagatttccgagcatgaggctcgggaatacacgagggccatcgtggagggtctgagccacgtgcacaaaagcgggtttgttcactgcgacatatagct

SEQ ID NO: 248910 - DNA, 393 bp, Glycine max
gaatcgacggacccaccgacgcgtacgcacgcacgaacaccgcccaagcagctggcctttctggaagctcaatgacaggagggcttagggcaacagatgagagaagctgggatatgcatattgatgaaaagattagctatttggatatattcaaagatgtggagctaacatgtgagaagcatcaaaatgaattgttatcctctacttaccttgatgaaatcattcactatgacctgtgggcgcgagaattagctgctagtttgcaagactctttcagcttcactcctattcttgcatgaagatatgattaaactcgggatgtggctgctggcgcttcccaattgcctgctttcaccataatgtcttcaggcaattgaacaatttagaatgatg

SEQ ID NO: 248911 - DNA, 344 bp, Glycine max
cgacccacgcgtgcgtcttcttatgttcttcttcaagattgcgacgacgatccaagtgatagacactcggtgcgatggaacttgtatctgaatccgagcgaactctgtacccatacgtgactggatcctctgtagtcgctatcaaatacaaagatgggattctaatggccgatgacatgggatgatcgtatggatctaccctgctgtataagaatgctgagcgtatcaagcctataggaaagcattcttttgatggcgctagcggggagataagtgactcacatgatatattgcgctaccttgacgagcttatactgtatgacaacatgtgataggataggaat

SEQ ID NO: 248912 - DNA, 552 bp, Glycine max
  unsure (1)..(552): unsure at all n locations
gcntctntttagtttnaggaggatgctnttgctgagnttctgtactntgatgtattgacgtaccggtccggaattcccgggtcgacccacgcgtccgcaaaaaccctaaccaagaaagttttcaccgcatctccacctattctcaatctccacagatcgaggaaaagagaatgagtagacgctcgagcagaactgtctacgttgggaatctacctggtgatatccgtgaaagagaagttgaagatttgtttctgaagtatggacacataacacacattgacctaaaggttcccccaagaccacctggttatgcattagtagagtttgaagatgctcaagatgctgaggatgcaattcgtggtcgtgatggctatgattttgatgggcaccggttacgggtggagcctgcccatggtggacgtggtcattcatcctcaagagatcgatgcactagtcacagcaatggccgaggtggacgtggggtgtctaggcgctctgaatatcgtgttctagtctctggattgccctcttcggatcctggcaggatctaan

SEQ ID NO: 248913 - DNA, 470 bp, Glycine max
attcccgggtcgacccacgcgtgcggacaaaggcaactagggagaaggcagagaaagaaataggaaaggaagccaaagaattctacacggaaatggttgaacaaaaaaatcaggtcatccctcttcttactccttacaggatggggaacttaaatctttcacacagaatcgttttggcgccactatttagagcaagatcttacaacaacgttgctcagccgcatgctattctatattactctcaaagagctaccaagggaggtcttctgattactgaagctactactatttcacccacttctaaataccatccaaacgcagttggtatatggtcaagagagcaaatcgaagcatggaaacccattgtggatgctgttcatgccaaaggtggtatattcttctgtcagattgttcatactggaaaggcttacgatccagatcttaagcccgaggacaaaccttaatatcat

SEQ ID NO: 248914 - DNA, 538 bp, Glycine max
  unsure (1)..(538): unsure at all n locations
ggtattgcgntnaggtggaccatcncttacagaactatacgaattgctctaccggtccggaattcccgggtcgacccacgcgtccgcttcttttgttgtttgtgtgtttgttttttctctcacctgaaaatgtcttgctgcggtggtgagtgtggttgcggaagcgcctgcaagtgcggcaacggctgcggaggctgcaagatgtacccagacttgagctacaccgagtcaaccaccaccgagaccttggtcatgggagtggcaccagttaaggctcaattcgagagtgctgaaatgggtgttcccgctgagaacgatggctgcaaatgtggagctaactgcacctgcaacccctgcacttgcaagtgaggtgttggagagctaaagcttcaagcagaaatggcccttagaaataatgataaaaactatatgtagtttcaaaacttcaaaattatgtagtatgtattatgttgcactctggtgttttgtgtctaaacaaacacccttagaataaagtggtcatttcttgcccttgagc

SEQ ID NO: 248915 - DNA, 542 bp, Glycine max
  unsure (1)..(542): unsure at all n locations
gggtncggcnannnaggtgcgtgactagactcttcagctcactacgtattgacgtaccggtcctgaattcccgggtcgacccacgcgtccggaaccatttaagtcagaaagagtttggggtgtgcttgagcttgatgaaggagcttctctctggcgattgttctgaccctttgctggtttcccagcttgggtacatgcagttgcagattggggacttggagggtgcgaaagtttcgttcttgaaggtggaggagttggggaagagtaatgggtcgttgagcgaggttgagtttaggaaccttgtgaataggaacaaggcgttggtgtatttggttgggaaggattatgtgtcggcggtgagggagtacgaggagtgcattgagagggacagtgcggatgttgtggcggtgaacaacaaggctctgtgtttgatgtatctgagggacttgtcggattctattaaggtgttggagagtgcgcttgagagagttcccactgtggctctcaatgagactctngttgtcaatttgtgtagtatgtat

SEQ ID NO: 248916 - DNA, 545 bp, Glycine max
  unsure (1)..(545): unsure at all n locations
agtnttatgccgtatgctagtgcatgancttttgaattantattgcactgctctaccggtccggaattgaccggatcgacccacgcgtccggcatgacgattatggacttattgttagtgaacaagcccggaaatatgctatagtgaaaaaacgtgacgagcctgtcagtcttaaggatggaacagttgttcttcagcttgagactcgacttcagaatggcctcgaatgtggaggcgcatatattacatatcttcggccccaggagagcggatggaaaccaaaggaatttgataacgaatctccatattctatcatgtttgggcctgataagcgtggagctacaaacatggtgcactatattctcaagcataagaatccaaaaagtgtggagtatgctgaacaccatatcaagtatcctccatatgtcccatctggcaaactaactcatgtatacactgcaattctgaagcccgattatgaattgcaaagtttgatcgatggtgacgataagaaaaaggcaaacttcttgtcttatgacgactat

SEQ ID NO: 248917 - DNA, 383 bp, Glycine max
tccggtcctgaattcccgggtcggccgacgcgtacggtgtgacgatggtagatcttcaagccaccgaactttcaggcatgcatgccttatcgggaacaggtagctggcactgccccgtacacatttaaccatcggctctgcatatgcttactgtggtgaacttggcgagaggatcgtgactgctggtcgatacaacgaagatcacgcaagatattgcttgcagcagctaatatctggagtcagctactgacattcaatggtaattggtcataaagatcgaaaagcggcaaacactgtgctggatggaaattcgattcctagcttaaaatttgtgactttggttatcacaagtctgcgctactgcactctgaacctaaatcaac

SEQ ID NO: 248918 - DNA, 455 bp, Glycine max
  unsure (1)..(455): unsure at all n locations
ccggtcctgaattcccggatcgacccactcgtccgtaaattcttctgcctcaatgctttcattcaatggaagtccatactggatggcacctgagggggtaatgaatacaaatggctatagtcttccagacgatatatggagcttgggatgcacaattattgaaatggcaacatcaaaacctacatggaatcagtatgaatgggtagctgccatatttaaaattgggaacagcaaagatatgcctgaaatcctcgagcatctttcgaacgatgcaaaaaatttcatcaagctatgcttacaaagagacccattagctagcccgacagcccataagttactagaccaccccttcattcgagatcaatcggcaacaaaagctgcaaatgtcagcataaccagagatgctattccttgcatgtttgatggaagccgtacaccgnctgtgttagagtccc

SEQ ID NO: 248919 - DNA, 485 bp, Glycine max
aattcccgggtcgacccacgcgtccgcggacgcgtgggtggcaaaccccggcagcagagcctgcgaaagctgattgggaattggcattggtagagactgctagcaatttgtcaaagcagaaggcagctttaggtggtgggttggatcctctattgttgactggtatgtatgatcaaggaatggtgaggcagcatgtcagcactacccaactgagtggtgggagtgcaagcagtgtggcattgccgggaccagggaagactccggttttggctctccccgccccagatggatctgtgcagccggttaatcaggatccatttgctgcatcgctgagtgttccaccaccatcctatgtgcaaatggctgatatggagaagaagcagcacttgcttgtgcatgagcagcatgtgtggcatcagtatgcaagggatgggatgcaaggtcaatctagcttggccaaactgaatggcgctggatactatgcc

SEQ ID NO: 248920 - DNA, 463 bp, Glycine max
aattcccgggtcgacccacgcgtgcgcccacgcgtccgattttcttcatccttctctgttctcctagaacttgattacttgaacattcggtatgacagatgaggtggttcttctggatttctggccaagttcatttgggatgagggtcaggattgcacttgctgaaaagggtatcgaatatgagtacaaagaagaggacttgagtaacaagagtcctcttgtcttacaaatgaaccctgttcacaagaagattccggttctcatgcacaatggcatacccatttccgaatccctcattgatgttcagtacattgaggaggactggaatgacagaaattccttgatgacttcagacccttaccagagagctcaggctagaatctgtgctgattatgtcgacattaagatacatgatcttggaaagaagatatggacatctaaggaagaaggaaacgaagctgtc

SEQ ID NO: 248921 - DNA, 537 bp, Glycine max
  unsure (1)..(537): unsure at all n locations
ggttagctntaggtgcggcctcnctttcagctcactacgtattgacgtaccggtccggaattcccgggtcgacccacgcgtccgcccacgcgtccggtgttggagaatgaaaactgtaacagagccaaatgaaaccgagtcagatgggagcgagttgactcgcgagtgcctcatcaacatcctctctcgactcagcgtcgaggatcgatggcgcggcaccatgctcgtttgcaagtcatggttcagcgtcttcaaggaaccctctcttcacttcgtcttcaacctcgaccctcaattcgactcgcccaccgaatcaactcgctggtggacccccgagttcgaggccaagatcgataacatgcttcgatctgtcgtcgaatgggcccaatcctctctcacccatatacgcattcgccactgttctgatcgttctctcgccctcgtcgcccaaagttgcccaaaccttgaggtgttgtttatcagaagctgtcctcgtgttaccgatgattctatctctaggatagctttgagttgtcn

SEQ ID NO: 248922 - DNA, 545 bp, Glycine max
  unsure (1)..(545): unsure at all n locations
ggcaatgcnntnnagtcgcgtcctgcgactctaaaggattatgacgaattgctctaccggtccggaattcccgggtcgacccacgcgtccgagcaaatcaggatctgctgcttcagtgcttcttcaccttttgtcttctagcctgtggaatttggcatggagacagagaacggtgacaccaggtccaaaaagatggaagagtatgaagtcatagagcaaattggaagaggagcttttggctctgccttcctcgttcttcacaagtccgagaaaaagaggtatgtgctgaaaaagattaggttggccaaacagacagagaagttcaaacgtacagcacaccaagagatgaacctgattgcaaaactgaataacccatatattgtggactacaaagatgcttgggtggagaaggaggaccacatatgcattataaccggctattgtgaaggaggtgacatggcagagaacatanagaaagcccgagggtcattttttcctgaggagaangtctgcaaatggctgactcagttgttgatagctgtgga

SEQ ID NO: 248923 - DNA, 545 bp, Glycine max
  unsure (1)..(545): unsure at all n locations
agttntatgcaataggatgcgagccagggcctctcagctcacctacgtactgaccgtaccggtccggaattcccgggtcgacccacgcgtccggattcaggtactgcgtttcggaagcagacacatatggctcgtacgaagcaaaccgctcgtaggtccacaggaggaaaggctcctaggaagcagcttgcaaccaaggctgcacgtaagtctgcaccaactactggtggtgtgaagaagccccaccgttatcgtcctggtaccgttgctcttcgtgaaattaggaaataccagaagagtaccgagcttttgatccggaagctccccttccagaggctggttcgtgaaattgctcaggacttcaagactgatctgcgtttccagagccacgccgtgcttgcattgcaagaagctgctgaggcataccttgatgggctctttgaggacactaacctgtgtgccattcacgccaagcgtgtaaccattatgcccaaagatattcagctggcaagaaggattcgtggtgagcgtgcttgagttggtgg

SEQ ID NO: 248924 - DNA, 481 bp, Glycine max
aattcccgggtcgacccacgcgtccgcccacgcgtccgcccacgcgtccgaaactagtaatattattcttcgaatccattttattattcggaatgggggttttcacatttgaggatgaaaccacctcccctgtggctcctgctaccctttacaaagctctagttacagatgccgacaacgtcatcccaaaggctgtcgaagccttcaggagtgttgaaaaccttgaggggaacggtggccctggaaccatcaagaagatcactttcgttgaagatggagaaagcaagtttgtgttgcacaaaatagaatcagctgatgaggcaaacttgggatacagctatagcgtaattggcggagttgggttgccagacacagcggagaagatcacattccaatgcaaattggctgctggcgccaacggacggtctgctgggaagctaactgtcaaataccaaaccaaaggagatgctcagcccaaccc

SEQ ID NO: 248925 - DNA, 473 bp, Glycine max
aattcccgttcgacccacgcgtccgcccacgcgtccgcatactcttctcatactccttctgatcttgattccttcaaaacctttcacagccatccgggcatttgcatacctgaaacactcaataatattactttcattgtagaaggacataccaaatttaacatcacaatactgaatcaatatctgaagcaaacttcttatatatctacaacttactagatattgcttcgtttccagacacatctgaaaacatcacatttcacttctaatcggctgctgatcccaatggaagctctgctgacaagctcactgtctaataccataccaaaagatatgctcaccccaacctagaccaacttaaatctgtaaaagccaaagctgatgctctctttaaagccattcaagcttaccttttggccaatcccgattacaactaatccaattcgatcaacttcatgattatcatcactatc

SEQ ID NO: 248926 - DNA, 281 bp, Glycine max
ccggtccttaattcccggctcgacccacgcgtccgcccacgcgtcctcccacgcatccgtaaaaaaattaaaaatacataaaataatatagaaaaaagtgtaaaaaaataaaaaagataataccaaaataaaatataactaactactaccctttacaaatcaactaattacaaataccataccacatcatccctaatgttgtctaagccttcacgagtgttgaaaaccttgaaagtaactgtacccctacaaccatcactaacatcactttcctttaacat

SEQ ID NO: 248927 - DNA, 538 bp, Glycine max
  unsure (1)..(538): unsure at all n locations
ggattgcnnaaagttgaaccagcactcaaagaacataatgtattgctctaccggtccggaattcccgggtcgacccacgcgtccgagcttcatggattttggtatagtccctacactttgagggtggtatggaccttagggttaaaggatataccatatcaaaacatagaagaagaccgctacaataagagtcttcaacttcttgaatacaacccagtatacaagaaaactccagtgcttgtccataatggaaaacccttatgtgagtccatgcttattgttgaatacattgatgagatttggtcacataattcattacttcctgctgatccctacgagagagctctggcaaggttttgggttaaatatgctgatgatgacatgttttctgcagttattgcattcttccttagcaataatgatgaagagcgagaaaagagcatagagaagatatgggagcatctcagggttgttgagaatcagtgttttggtgatcagaagaaattttttggcggagacattattaacattatggacg

SEQ ID NO: 248928 - DNA, 464 bp, Glycine max
tcccggtcgacccacgcgtccgagatgccgacacatcatcccaaaggctcttgattccttcaagagtgttgaaagcgttgagggaaatggtggccctggaacaatcaagaagataactttcgttgaggatggagaaaccaagtttgtactgcacaagatagaagcagttgatgaggcaaacttgggatatagctacagcgtagtgggtggtgctgcgttgccagacacagcggagaagatcacattccactccaaattggctgctggtcccaatggaggctctgctggcaagctcactgtcgaataccaaaccaaaggagatgctcagcccaaccaagaccaactcaaaactggaaaagccaaggctgatgctctcttcaaggccattgaggcttaccttttggccaatcccgattacaactaatccaattcgatcaacttcatgattatcatcactatctctc

SEQ ID NO: 248929 - DNA, 329 bp, Glycine max
cggtcctgaatccccggatcgacccacgcgtccgcccacgcgttcgaccacgcgtccgcttgcggttcgggttttagcgcatcttcttgtagattggaggtagatgggtaaggaaaaggctcacatcagtattgtagttattgtccatgttgactctgggaagtccactaccactggccacctgatctacaagcttggacgcattgacaagcgtgttatagagagatttgagaaggaagctgctgagatgaacatgaagtcttacatgtatgactgtgtgcttgataagcttaaggcttatcgtgaatgaggaatcacatttgatattg

SEQ ID NO: 248930 - DNA, 473 bp, Glycine max
aattcccgggtcgacccacgcgtccgaaagaaaaaaaagaagaagaaagagttctgaccatggctgcatcattatttatgccttcatccgtagtggacgaagaagcgaggtttgaagccgaagtggcggaggtgcaagcatggtggaactctgagaggttcaggctaacaaaaagaccatacacagcaagagatgtggtgtccctccgaggcaacctcagacaaacctatgcctcgaacgagatggcgaaaaagctctggtgccttctgaagaaccaccaagccaacggcacagtctcaaggacttttggtgcacttgatcctgttcaggtcactcaaatggccaagcacttggacacaatctatgtctcaaggtggcagtgctcagccacacacaccacgagcaacgagccgggccctgaccttgctgattacccttatgaaactgtcccaaacaagggtgagcacctcttc

SEQ ID NO: 248931 - DNA, 426 bp, Glycine max
aattcccgggtcgacccacgcgtccgcccacgcgtccgtctactactgctagctgtgacttgttttgagttcaatcaaatcgcattggtgtctgaaaggaggaaagatggttagcgtagctgagatcaggcaggcacaaagggcagaaggcccagcaaccatccttgccattggaactgcaaacccaccaaaccgtgttgatcagagcacctatcctgattactacttcagaatcaccaacagtgaccacatgaccgagctcaaagagaaatttcagcgcatgtgtgacaagtctatgatcaagacgagatatatgtacctaaacgaagagatcttgaaagagaatccaaacatgtgtgcttacatggcaccttctttggatgctaggcaagacatggtggtggtagaagtaccaaagctagggaa

SEQ ID NO: 248932 - DNA, 548 bp, Glycine max
  unsure (1)..(548): unsure at all n locations
ggtatatgcggtggaggatgtgagcagcnactcttcagctcactacgtactgacgtaccggtccggcattcccgggtcgacccacgcgtccgcccacgcgtccgcccacgcgtccgcaaaacatataagaagaagaaagaaatatggctggaggggcatacgaggaagccattgcagcgttgacgaagcttctcagcgagaaagccgacctgggtggtgtcgccgccgcaaagataaaacagctgacggcggatctggataccgtcaccgcaaacgggtcgacgccgtttaacccggacgagaggatccgaaccgggttcgcccacttcaagaacgagaaataccacaagaacccggaattatatggcgaacttgccaaaggccagagtccaaagattatggcttacgattgctcagactctcgagtttgcccatcccacattctggatttcaatcccagtgaagcctttgaggtccgaaatatcgtcaacatggttccaccatatgacatgaccaagtattcatgaaccgatgcgaacattgaatan

SEQ ID NO: 248933 - DNA, 545 bp, Glycine max
  unsure (1)..(545): unsure at all n locations
tgtnntagcnnnagtgagtcgtccagcnactccacgcatcanctacgtattgtccgtaccggtccggaattcccgggtcgacccacgcgtccgcggcctttgtgccggcgacgcatcattcaaatttctgccctatcaactttcgatggtaggatggtggcctaccatggtggtgacgggtgacggagaattagggttcgattccggagagggagcctgagaaacggctaccacatccaaggaaggcagcaggcgcgcaaattacccaatcctgacacggggaggtagtgacaataaataacaataccgggctcattgagtctggtaattggaatgagtacaatctaaatcccttaacgaggatccattgtagggcaattctggtgccagcagccgcggtaattccagctccaatagcgtatatttaagttgttgcagttaaaaagctcgaagttggaccttgggttgggtcgatcggtccgcctccggtgtgcaccggtcggttcgtccattctgccggcaatgcgctccggtccttaactggc

SEQ ID NO: 248934 - DNA, 547 bp, Glycine max
  unsure (1)..(547): unsure at all n locations
agttttgcggtaaggcgtaagccagcnactcttcagcctcacgtacgtactgtccgtactcggtccggaattcccgggtcgacccacgcgtccggcgaaatgcgatacttggtgtgaattgcagaatcccgtgatccatcgagtctgggaacgcagggtgcgctcgaagccattaggccgagggcacgcctgcctgggtgtcacacatcgtttccccaacgcaaacatgtaacaatgttgctgcgcggagtgtatgctgacctctcgcgagcacccgcctcgtggttggttgaaatctgggttcatggccgacttcgccgtgataaaatggcggatgagccacgctcgagaccaatcacgtgcgagccggtcagttctggacccatcgacgaccctatgcgtgcacgcacgctaccaacgagacctcaggtcatgcggtgctacccgctgagattaagcatatcaataagcggaagaatagaatctaacatggatttccttagtaacggctagcgaaccgtgaatgcctaccatgaaaatcgtcgcg

SEQ ID NO: 248935 - DNA, 534 bp, Glycine max
  unsure (1)..(534): unsure at all n locations
ggggagctaggtgcgaatcctcntctgcttatatgattgctctaccggtccggaatccccgggtcgacccacgcgtccgcccacgcgtccgctttgatataaacttgagttgtttggatggcattcaaggtcctgtttatgggggtactggatgtgtctttaatagaacagctttgtatggctacgagccttctattaaacccaagcataaaaagcctgggttgctttcttgactctgtggtggtaaccgaaagaagagatcaaaatctagcaagaaaggctcagacaagaaaaaatctagcaagaatgttgacccaactgtgcccatctttagtcttgaggatatagaagagggggtggaaagtgctggatttgatgatgagaaatcactacttatgtcacaaatgagccttgagaaaaggtttggtcagtctgctgtctttgatgactttacactcatggagaatggtggctgtttctcagtctgcaattccagaaactcttcttagggggctttntcatgttatcagttgg

SEQ ID NO: 248936 - DNA, 538 bp, Glycine max
  unsure (1)..(538): unsure at all n locations
gtnttagcgcgggtgcgtgttgctgcgncattgatcacctacgtattgacgtaccggtccggaattcccgggtcgacccacgcgtccggaaggcatcgcctctctctttggagcaattcatctccattaccgctcctcttcttgacttgggaaaggaagctgagatttcaagctcgatcgccactggtgcgtccaggaatttggatactgctcaaaagaggggttctacaatcctcaacttgaagtgcgtcgatgtccagacagggcttatggggaagtctctgatcgagttccagtcaacaaaaggagatgttcttactgcacacaagtctggtactcatgatgttgttgttttaaaactcaacaaggctgatttaggttctcctgctcttggacaaggtgttgtttacaggttaaaggactcatcaataaccattgctcttgatgatataccggaagacggtttaaacaagtccctaagactggaaaaagtatcaaatgaagcgacttatcgcangatgaaagacgcgtgatacat

SEQ ID NO: 248937 - DNA, 549 bp, Glycine max
  unsure (1)..(549): unsure at all n locations
aggcttagtnctaggatgcctaatgccagcgnctcccgaantacgatagcactgctctaccggtcctgaattcccgggtcgacccacgcgtccgattaaaacaaaaaatgtgcgctgccatatccgtagtggaacaagaagagttgctcgaaaaaggggaggtgttcaagatcaaaggcagggacaagcatggccgcaagatccttcgcattatcgccaaattcttcccagcacggttggtgagtgttgaggttctgaaaaagtacctggaggagagggttttcccgaagctgatggggaagaggaaattcgcggtgctgtacgtgcacaccggcgtccagaggagcgagaattttcccggaatctccggtctccggtggatctacgatgcgattccggcgaacgtgaaggagaatctcgaagccgtttattttattcacccgggcttgcatgcccgccttttcctcgctacattcggccgctttctctttaacgctgggctgtatggaaagctgangtacgtaagcagggttgattatctgntggaan

SEQ ID NO: 248938 - DNA, 539 bp, Glycine max
  unsure (1)..(539): unsure at all n locations
agtctttgcanataggagtgagcctgcacatcgtagtcactcatagcagtcccgaattcccgggtcgacccacgcgtccgcccacgcgtccgctgccagtagtcatatgcttgtctcaaagattaagccatgcatgtgtaagtgtgaactaattcagactgtgaaactgcgaatggctcattaaatcagttatagtttgtttgatggtatctactactcggataaccgtagtaattctagagctaatacgtgcaacaaaccccgacttctggaagggatgcatttattagataaaaggtcaacacaggctctgcctgttgctttgatgattcatgataactcgtcggatcgcacggcctttgtgccggcgacgcatcattcaaatttctgccctatcaactttcgatggtaggatagtggcctaccatggtggtgacgggtgacggagaattagggttcgattccggagagggagcctgagaaacggctaccacatccaaggaaggcagcaggcgcgcaaattacccaatcctgacacg

SEQ ID NO: 248939 - DNA, 538 bp, Glycine max
  unsure (1)..(538): unsure at all n locations
tgattcgctntaggagcgagcagcgactccagctcactacgtactgacgtaccggtccggaattcccgggtcgacccacgcgtccgcccacgcgtccgcccacgcgtccgggttgaggtgagaagggaagggatgtggagggcaacttggagcacagcagcgattccctccgacgaggaacctagcgaatcctcctcctcgtcctccttctccacctctctcttcaatttctcttctggaaacccgagaatcgaggagacccgtggcctcatgcatctcttcccagacgacactccttctactctacccgttggacggaagcctctcgttagcgttgccggcgtcccaaatcacatgacctatgcggatttctgccagttctgtggttccttcattcagcacatgctagagatgcgcatagtcaggatggatgggatggaggatcagtacagtgttttagttcgctttgacgatcaagactccaccgacagcttctacaagcactacaatggccgccgtttctctactctcgaggtgg

SEQ ID NO: 248940 - DNA, 541 bp, Glycine max
  unsure (1)..(541): unsure at all n locations
ggtntagcannagtgagcgaccatcnactcatagcatcactacgcatngacgtaccggtccggaattcccgggtcgacccacgcgtccggcaataactgatgcatataatcataccgattctgagttgctgaaatcagaaaatggccataatggagatgctggatcaactgcttccactgctattttagttggtgaccgcttgcttgttgcaaatgttggggattccagagctgttatatgcagggttggtaatgccattgctgtttctcgagatcacaagcctgaccaaactgatgagaggcaaaggattgaagaagcaggaggctttgttatgtgggctggaacttggagagttggaggtgttcttgctgtttctcgtgcgtttggtgatagactcctgaagcagtatgttgttgctgatccagaaattcaggaagaaaaaattgacagctcccttgagtttcttattctggccagtgacgggctatgggatgttgtcacaaatgaggaagctgttgctatgattaaatcaattgagga

SEQ ID NO: 248941 - DNA, 536 bp, Glycine max
  unsure (1)..(536): unsure at all n locations
gtntatgcagttgctaatcatgaggatctgaacagtattgaactgctctaccggtccggaattcccgggtcgacccacgcgtccgcaaagggaaaaagggtggcaagaagaaggcagctgatccctttgccaagaaggattggtatgacattaaggccccttctctttttcaagtgaaaaatgttggcaaaaccctcgtctctcgtacgcagggtaccaagattgcttctgaaggacttaaacatagagtgtttgaggtctccttggctgatcttcaaggggatgaggatcatgcattcaagaagattaggttgagagctgaagatgtgcaagggaagaatgtcctgacaaatttctggggaatggatttcacaactgacaagctgaggtcattggtgcgaaaatggcaaactctaattgaagcccatgtggatgtgaagacaactgataactacacattgaggatgttttgcattggatttaccaagagaagagctaaccaagtgaagagaactgctatgcacaatcaagccaga

SEQ ID NO: 248942 - DNA, 487 bp, Glycine max
attcccgggtcgacccacgcgtccgatcttatataattaaactaattgcaaagatgaataccaagccctttttctccttgtgcttactgtgcgcactgcttctcatctgtgttgtggcaactgagccatccaaagatgcgacacaagcagaagaaccaaagacacggccagatgcctggagaagtggtggaagtggaggacatggtggaagtgggggacatggtggaagcgggggacacggtggaggctggggacatggtggaagctggggacatggcggtggacatggcggaagatgcaaatgctgcggtcgaaagggctgcaaatgttgctgaagtaaaaaaacacaaacatgaactgaagacacacatacgtgtgtactccatgtaataagtatagtatgtagaattaagaaataaaagcatggaatctatatccgtgctagggctgtcataggttgaccggttttccatcaaccatgcatgta

SEQ ID NO: 248943 - DNA, 546 bp, Glycine max
  unsure (1)..(546): unsure at all n locations
agttntctgcntgagggcgcgtccagcnactacagaatcatgattgtattgcctctaccggtccggaattcccgggtcgacccacgcgtccgcccacgcgtccgctcatcttatataattaaactaattgcaaagatgaataccaagccctttttgtccttgtgcttactctgcgcactgcttctcatctgtgttgtggcaactgagccatccaaagatgcgacacaagcagaagaaccaaagacacggccagatgcctggagaagtggtggaagtggaggacatggtggaagtgggggacatggtggaagcgggggacacggtggaggctggggacatggtggaggctggggacatggcggtggacatggcggaggatgcaaatgctgcggtcgaaagggctgcaaatgttgctgaagtaaaaaaacacaaacatgaactgaagacacacatacgtgtgtactccatgtaataagtatagtatgtagaattaagaaataaaagcatggaatctatatccgtgctagggctgtcataggttgaccn

SEQ ID NO: 248944 - DNA, 466 bp, Glycine max
  unsure (1)..(466): unsure at all n locations
ttcccggtctagttgccgggtcgacccacgcgttcgactactacaagtgctttcttacagtcaaaaccaacatcatctatggcatgttatcaatagcactacgatgatcatggtcgtaaggttgacgagtatggcaacgttgagaagcaaaccgacgaatacggcaaccctgttcatgctgctagtgtcacctatgtagccaccagaactgctgctggtggttacagtgatgacattaataagcaacatgataccaccaatgcctacggcgtagacactggtagacagcattctagtggtggctacgatggtgacactaataaacatcatggaactactggtggctataatgatgacaccaatagacatcatggaactaccggggtctatgggatagacaccgttaggcatcancatgggactactggtggctatgccggagacactggtatgcaacatgggaaca

SEQ ID NO: 248945 - DNA, 544 bp, Glycine max
  unsure (1)..(544): unsure at all n locations
tgggtaagcacggttgctagtaatagcanttgggggtactaagaattgctctaccggtccggaattcccgggtcgacccacgcgtccgcccacgcgtccggaaaaaaagaaaaatgcaggcagcaaagaaagccatagagacctttaaggggaccgcagccaacattggcgcctctgccaagtctggcttggagaaaaccaaggccactatccaagagaagaatgagaagatgaatgcagaagatcaaactcaaatggatatggctaccaagaggaaagaagagaagatcaaccaggctgagatggagaagcagcaggcccgtaagtactacgccgctgcaaaacaatacgccatggctgagcacatggcaaagggcaaccacgacaccgccgggcctagaatcgagactgccacacacatcaccagtgggcccgggactgacaatgctatgtactctaacactgggcctgngactgagactgccacgtacaccactagtgggcttgggcatgacaatgctatacccaccagcactgggcctgg

SEQ ID NO: 248946 - DNA, 330 bp, Glycine max
ccggtcttgaactaccggatcgacccactcgtccgatcaggatatattacattaagaaagctccccatatagacgcatatggcttgcgatcgcaaagtgaacagctgacgccctgtgccggattcagtgcactgcctgtgactaaacacatgtctctctggcagacaacaatcataagaccatattgataagaccatatcccaagtggatattgcctaccttcaagtcatttagctcatgactatcccttcaatccaccaaaagttgcttctcggactctagtgttccacccaaacattcaccgtgattgcactctatgtcttgacattc

SEQ ID NO: 248947 - DNA, 431 bp, Glycine max
tactcggacttgaattcccgggtcgacccacgcgtccggttcatactaagttctgaaaatgagttccaaggttttgcttgttctacttatgggcttgggcactatacttctgatctcctctgaggttgcacccgatgatgcatacgagaattttgacaaaatagatgggaagcctagtgcagatggggtagatgaaagcaagtattggcgtggcggctatggtggcggctatggtggtggttatggaggtgggcgtggaggctatggaggtgggcgtggaggctatggagggggacgtggtggatatggcggcggacgatgtggctatggtggcgggcgtggtggttattgcggcccgtcgtggaggcggccgtggtggctattggcctaatgaacataacgaggcttgggttgatgctaacccttacaac

SEQ ID NO: 248948 - DNA, 545 bp, Glycine max
  unsure (1)..(545): unsure at all n locations
ngtgggntgactcgctgcctgcactgctccgacacgcactgccgtaccggtctcggaattcccgggtcgacccacgcgtccgtgtctttgtatcacgaaaactatacgattcgattgcttgttttcaatggacaccgtgttcaattctcaatcttcttcttcttcgagaagccgctggagttacgatactctcaagaatttccgtgagatctctccgctggttcagaatcacatcaaacgggtttattttacgttatgttgcgctgtggtggctgctgctgttggagcttttcttcatgtcctgtggaacattgggggttttctcaccacgttggcttccattggaagcatggttcggttgctatctacacccgctgatgaagagcaaaagaggttgtctctgttgatggcttcagacttgtatcagggcgcttccattggacctctgattgatttggctatggccattgatcctagccttattgctagtgcatttgtggcaacctttttggctgtagcatgcttctctgctgcagcttttagtn

SEQ ID NO: 248949 - DNA, 541 bp, Glycine max
tgtagcgggcaggccactggtcagtcgtacatcgcactgccgtaccggtccggaattcccgggtcgacccacgcgtccgccattttcaagctctcaacgccatctccagctgcttccttatcagaagcgcttcggcccagagattctcgcttcctctccttcaatccttcttccaacgctattaattacaaaattaacctctccgcttccctccgatccattcactccctccctcttaaaacctccttgcggatcaaatgctcccaaacagatgggaatggaagtcctgcaaagaggacagtgcttcatgatctttatgagaaagaagggcagagtccatggtatgataatctctgcagacctgttacagaccttcttcctcttatagcaagtggtgtcagaggcgtcactagcaaccctgcgatttttcagaaagctatctcatcatcgaatgcttacaatgatcagttcacggaacttgtgcaagcgggaaagacatttgaagtgcatattgggaacttgtaatgaaagatatccaaga

SEQ ID NO: 248950 - DNA, 539 bp, Glycine max
  unsure (1)..(539): unsure at all n locations
agtggggttnttctcgcctcnnaactaagtantgtcgtaccggtcttgaattcccgggtcgacccacgcgtccggtgagtcgataatttctatgggcttagcatcaacctgtaataataatatcctggaggtcatgtcacatagatgatgcgtatgacgctatgctttgagagacccacacatacgagtcatgtgtgttatgatttcatatcccttgacttgtctcttattgattggtatgcctaattaaggctataatatcaatgatgccaagtgagacgcccatgcatttggatttggttgttacagaccatgctttgtgagaaccactaatcaatgctaaattgaacatatttggatgttggtggttttataaatttacattgcgtcttaaaaaaaaatatagttgtaccaattcaacaaccttaaacttttatgactatgtccatcgattactgtttcaacatttacctttgcaagcgaggcccaatctacatactgtttcttttgtgaaaatacgttaatcaagatcgcctgcg

SEQ ID NO: 248951 - DNA, 473 bp, Glycine max
gaattcccgggtcgacccacgcgtccggcgaattgctaaatcttactgagtacaatgttcatatggccaaacttattgatggaggaaggaacagtatgtccaaagaagatatcttttatggttttacctttttctatattattataattatagttataattataatgaagcaacttctctggatgaatgtgcagaggctgcaatggaattttccatttcccttcttcaaactctggttgttgaggaacctaaagttatttcagaacttcacaatcttgttgatgctttggcaaagcttgctacaaagcctggatgccctgagtcattaccacagcttcttgaaatgatcaagaatcctggtgctatatcctctagtaatgctggaaaggaagataaggcaagacaatcaagagacattaaggtgcctggtctgttacctgcaaatagggaagagttcaacagcattgattcta

SEQ ID NO: 248952 - DNA, 234 bp, Glycine max
ccggaattcccgggtcgacccacgcgtccgcccacgcgttcgctaacggcttctgcaattgtctgcgtctatctctgaatatactctctcgaatggctgcccatactatcgcgcatgctacccttaaaggtccgaatgtcgttaatgagatcacacttggcataacacttggctcatctgctgatagtcagtccaagatgcaccactggaatgaccagacgaaaaccaggacct

SEQ ID NO: 248953 - DNA, 464 bp, Glycine max
gaattcccgggtcgacccacgcgtccgcggacgcgtgggttctttttttcaatttccaaatcacgaaactcaagaagatggagaaagcgatcgacagacagaagattttgcttcatcatctcaacccttcatcatccacccaccccaacgaatcatcctccctccatgcttcagcatgtgtggcgggggatagcgctgcttatcaaaggacatcgacattcggggacgatgttgtgatcgtggctgcttatcggactgctcattgcaaagctaaacgaggtggtttcaaagacactcttcctgatgatctactggctcctgttttgaaagctgtaattgagaaaaccaatgtgaacccaagtgaagttggggatattgttgtaggtagtgtattggctcctggagctcaaagagctagtgaatgccgaatggctgcattttatgcctgtttttccgaaactgtg

SEQ ID NO: 248954 - DNA, 546 bp, Glycine max
  unsure (1)..(546): unsure at all n locations
aggttatcgattgcttgagnccaaactcgaccgactggcatacncgtccggaattcccgggtcgacccacgcgtccgcccacgcgtccgcccacgcgtccggttaaccatgaagtttatgtatcttgcattcctactgctattggttttctctagccaattcttgcttggaggagcagatgcttcccccagacaagtgattgacacagaaggcaagaaagttcgagctggcgtagattactatatccgaccggtcccaacaaccccatgtgatgggcgtgggccgtgtgtggttggaagtggctatgttctcatagcaaggtcatccaaccacacttgccctcttaagtgtgccgtggtggaaggtttccgtggcctaacagtcacattcaaactagttaaccctaaaaaaggggtcattagggtttctactgacttgaacatcaaaaccttcctaacttacacaagttgtagtgagttcaccgtctggaaactatatgcctttgatgattcaacttgacagtggtttgtgaacactggtggtgtt

SEQ ID NO: 248955 - DNA, 478 bp, Glycine max
  unsure (1)..(478): unsure at all n locations
gtcgacccacgcgtccgcggacgcgtgggggcgccactcgatgtttccatttgcctgcatgcctttggtattgtggggtgtggttcgtttagtggtgtcaagtcttgcgaacgtgagggtgcatgagtggtaatcgggatgtttttgttgcacggctccatgcttgcgcatgcaacgtgtgacatgcatccttttcattgtcaccttagccttcgtggcttaggtgctgacgattggttcctgtgttgcctacctaccaaacggtattcgtgtggctagtcagacccattccatccaggcctctttgttggggacgctggaggatttcaaagtcccacacgtgaaccacgttagtcgtccatcataacggcttcctgtggcacacgtgtggtgattgttctctcggatgcggtgcatgcagtgaacgtgggtggtctagtgcccncacattgntccttaaaatcggntgtctcggatg

SEQ ID NO: 248956 - DNA, 543 bp, Glycine max
  unsure (1)..(543): unsure at all n locations
gataaggtgcgtttccgctgttcatgctcactacgaactgccgtaccggtccggaattcccgggtcgacccacgcgtccggtctgatcatcacatccagcgtgtgacgctcattaatcatatcactaggtctgatgatgagaatgttggatctcatgggcgtactggcaatctagggtattcaactgaatgcggtgtctggagcaaaccttattatgtcaatcggaattgctgtcgcgttctgtgtgcatatagtacatgcttttacggtaagcttgggggataggagccaacgagcaaagacagcattgtgtaccatgggggcttccgtattcagtggaatcacacttacaaaattagtcggagtcctcgtcctttgcttctcaacatcacaaatttttgtggtgtattacttccaaatgtatctggccttggttctcattggcttcttacacggtcttgtgtttctacctgtggttttgaacttgtttggtcctccattaagatatacagtcattaaggagcagctagaagacatgccttn

SEQ ID NO: 248957 - DNA, 468 bp, Glycine max
gaattcccgggtcgacccacgcgtccgtttgccctcactttctcgctccccaaacgctcctctctctcctccaatggccgaccagctgaccgacgaccagatcgccgagttcaaggaggccttcagcctcttcgacaaggacggcgatggttgcattactaccaaggaacttgggactgttatgaggtcacttggtcaaaacccaactgaggcagaactgcaggatatgataaacgaggttgatgctgatggcaacggaaccatcgatttcccagagttcctcaacctgatggctcgcaagatgaaagacaccgactcagaggaggagcttaaggaggctttccgtgtgtttgacaaggatcagaatggtttcatctctgcagctgagctccgccatgtcatgacaaatcttggggagaagctgacggacgaggaggtggatgagatgatccgtgaggccgatgttga

SEQ ID NO: 248958 - DNA, 528 bp, Glycine max
  unsure (1)..(528): unsure at all n locations
aggctgcggtttcgtgatgccggggaccgtacgcactnactgtaccggtccggaattcccgggtcgacccacgcgtccggccaactcgaaaaccatttaaatcctagtttcaactctcctaatgtggcttcaactccaggtaacgcaatcaaaacccgccttcaaaggaggctactggtactccgaaagtggccttgcagtttccaacattaacccctctcatttcacccacctcttctgtgcatttgcccacctcgaccccaacaccaacaaagtcaccatttcctcgtcagactcatcttagttctcaaccttcactcaaaccctgcaagcaaagaaccctttagtgaagacccttttgtccataggcggcggtttctgtccttctttggcttgaaatttcttcagaatggcaagacaagcccactcccgaaaatcattcatagactctttgatccaacaagccagatcgaacaactttctttgacttgacctaaaattgggagtccctttcctggacaccaacaa

SEQ ID NO: 248959 - DNA, 547 bp, Glycine max
  unsure (1)..(547): unsure at all n locations
aggtgcgntnctgatggccgcagtcgnnangcatagcactgacgtaccggtccggaattcccgggtcgacccacgcgtccgcaagctactagaacaccgtttgctttgctctcccttcattttgcaaaacctctgggtatcgaactctgcagccatgggaagtttggaagttgaatcaacaaatggtcacacctcaagtcctcacaaaaaaactgaaaaatcggagagagagaggagaattgatgagtggcttccaattacttctaaaaggaatggaaaatggtggtattcagctttccacaatgttactgccatggttggagctggtgttctcggtcttccctatgccatgtcagagcttggatggggtccaggtgtaactatacttatcctctcatggatcatcaccctgtacacactatggcaaatggttgagatgcatgaaatggttccaggaaaacggtttgatagataccacgaactgggccagtatgcctttggtgaaaagctaggcctttatattgtggtgcctcaacagcttgtggtt

SEQ ID NO: 248960 - DNA, 551 bp, Glycine max
tgtatgagatgcgactgtcgcctcgccacgcccactgaccgcactgcctgtaccggtccggaattcccgggtcgacccacgcgtccgaaaattctcttccgtttcaggattagggtttcaccgttacagtgaaacatggcaaaaccggagcgaatctctctgcgtctctttgcgctgctcctcttgatttccacctcttcgtttcagcttctccgcgcttccgatgacgccgatgatgatgcgatcttctatgattcgttcgacgaggattttgaagaccgttgggttgtgtctcagaaagatgagtacagtggtgtctggaaacatgccaagagtgagggacatgatgattatgggcttcttgtcagtgagaaagcaaggaaatatgctatagtaaaagaacttgatgaagccgtgagtctcaaggatgaaacagttgttcttcagtttgaaactcggcttcagaatggccttgaatgtggtggtgcatatctaaaatatctccgaccacaggaggcttgatggaaatccaaagaatttgataatgaatc

SEQ ID NO: 248961 - DNA, 472 bp, Glycine max
gaattcccgggtcgacccacgcgtccgcccacgcgtccggctgattgggcagtgaacactaaggtggacatgcgcttcaacgttaagaatgcatattggttaagtgacagggtcagggagaagattttgcaaacggagaaaaaccgtattaacaaggatggggagcttgtgatttcttcaaccaaaactagaacgcagaaggataacattgaggatgctttggcaaagcttcagataaacaaaccggtggaagaatgcagcttaggatggtgacttggtggtagacatatctcttcctcatttctgtattcttgtattgtactcagacattataattcaaatttgaagatttctgttgttggctatttttttttattttcttatgagttagagtagcatcttaatggaaaatggaatatatcttggaggagtttgtacagtggttccttattgtcttctccgctactcattg

SEQ ID NO: 248962 - DNA, 473 bp, Glycine max
gaattcccgggtcgacccacgcgtccgggcgttttgggcgcaagggggctgtatttaacctgatatgtggtgaattggatgaaagggtcatgtcgataatgaaagatatagaaaaagagaattctaagtgtcaggttcttttgttttctgctacatttaatgacaccgtcaagaatttcgtttcaaggacagtcaggatggatcataataaactctttgtaaagaaagaagaactatctttagatgcagtgaagcaatataaagtgtattgtcctgatgaacttgctaagattgatgtggtaaaagattacatatttgaaataggagagaatgtggggcaaacaattatatttgtgcgctcaaaaattactgcaagattaacacatgaagcacttgttaagttgggctatgaggttacatctatacaaggttctcttagtaatgaagagagagacaaaattgtcaaagagttc

SEQ ID NO: 248963 - DNA, 465 bp, Glycine max
gaattcccgggtcgacccacgcgtccgtttatattgaaaatccttaaacgtacgctattcctataataataataagcgacactatgggaataggtacattgtcaagggttcattcaccgactccttttggttgctacagagacagggagacaagacagagtagtacagattactaccaatggctaccaaggtttacattggttattattctacgtatggacatgttgagaagctagctagagagatagaaaaaggggctgcttctgtggagggagtagaagcaaaactgtggcaggtacctgaaacattgcctgaagaagtccttgctaagttgggagcacctccaaagagtgatgttccaattattactcccaatgagcttactgaggctgatggctttttgtttggttttcccacaagatttggatctatggccgctcaattaaagcatttcttgatgcaact

SEQ ID NO: 248964 - DNA, 468 bp, Glycine max
gaattcccgggtcgacccacgcgtccggcgtcgtggtgcggtgctcggagcttccagattccggcgatggaagacagcgcactgcgcgaccgtgcttcattggccgccggagtagggtgtttgtcggtggccggcacctccttctggcgctcctcttcgtcaccgaagcgctctttgccattcacatgcttgagcatttcttccgatactcgtattaaggaaagtgttcaaactgaaggtgcacctgcggctttgggaccatattctcaagcaatcaaatccaacaaccttatttttgtgtctggtgttcttggccttgttcccgagacagggaagttcgtatctgatgatgttgaagaccaaactgaacagcttcttaaaaacatgggggaaattcttaaagccggtggtgctagctactcgtccgttgttaagacaacaattatgttggctgacttgaaggacttt

SEQ ID NO: 248965 - DNA, 462 bp, Glycine max
aattcccgggtcgacccacgcgtccggctttcttcttttcctttgtcaattgagaattgttcctctcttccattcgtgtacccgcagaagaatcatgacgagttcctctgctgccgctcgcaagaatctgagtaagattgcctgcaataggctccagaaagagctcgtggagtggcaggtcaatcccccaactggtttcaagcacaaagtcaccgacaatctccagaggtgggtggttgaagtcactggagctcctgggacactttacgctaacgagacctaccagcttcaggtcgattttcctgagaattacccgatggaagctcctcaggtgatattcttgcatccggctccgctgcatccccatatctacagtaacggccatatttggttagatatattgtatgattcatggtcccctgcgatgacagttagttctatctgcatcagtattctctcaat

SEQ ID NO: 248966 - DNA, 265 bp, Glycine max
ggaattcccgggtcgacccacgcgtccgaaacgccacaatggccgtgacgaaaagcctctgcatcttcctcttcatcgccataagctgcgtgggcgtagctcaggcagcgaacttcaacatcacaaacaattgcacctacacggtgtgggccgcctccgagcccggtggcggctcatggcgtaaccctggcgaatggtgtaacatccacatgaccaagagatctacaggatgacgcatctggggtcgaacaaactgctgcttcta

SEQ ID NO: 248967 - DNA, 439 bp, Glycine max
gaattcccgggtcgacccacgcgtccgaaaattgaaaaaaaaagacgggaaaatagaatggacgcagatagtgattgagaattgggggttgcgatggatgggagaaacggaagcggaagcaggaggagtggggaagcaggaggaatggggaaggcgataatcgcgttggtaattgggagtcttgtgtactatcactgtgcctaccgcaattctacccttgtctctcttttttccgatgtcttcatcgtccttctctgctccctcgccattctcggtcttctattccgacaaatgggcatccaggttcctgttgatccccttgagtggcaaatatctcatgagagtgcgaacgcgatcgtggcatggttggccaatacgattggtggcgccgagtcaatgttcaaggtggctgctactgggcacgacaagaggctgtttc

SEQ ID NO: 248968 - DNA, 548 bp, Glycine max
  unsure (1)..(548): unsure at all n locations
tgtactgtgtgcttagtccctcactgttcgctgcggcatatcncgtccggaattcccgggtcgacccacgcgtccgaaaattaatcatcttacttatttattctccgaaaatggttgatttacattggaaatcaaagatgccaagttccgacatgccttccaaaactctaaaactctctctctccgacaacaagtccttaccctctttgcaactacccttccgcaccacagatatctctcacgccgcaccttctggttgcgccacttacgactactatctccgtcttcctcaactcagaaagctttggaactcctcagattttcctaattggaacaacgaaccaatcttaaaacctatcttgcaagctctcgaaatcaccttccgctttctctccattgttctctccgatccaagaccttactccaaccacagagaatggactcgcaggatagagtctcttatcacacatcaaattgaaatcattgccatactttgtgaagatgaggaacaaaattccgacacacgtggcactgcaccaaccgctgat

SEQ ID NO: 248969 - DNA, 549 bp, Glycine max
  unsure (1)..(549): unsure at all n locations
tgttttgtgtactgtcaacttccacgccgattacggcactgcctgtaccggtccggaattcccgggtcgacccacgcgtccgcccacgcgtccgcccacgcgtccggcaagatatcaaagggcaataaatgtgactgaactgcagcatgaccttgagttactgccgggtggtgatcttactgaaattggtgaaagaggggtaaacatcagcggtggccaaaagcagagagtatccatggctagagctgtctactccaattctgatgtgtacatctttgatgatcccctaagtgctctggatgcgcatgtggctagacaggtttttgataaatgcatcaagggagatttgagagggaagacccgagttcttgtcacaaatcagctgcattttctttcgcaggttaatagaatcattttggtccatgaaggtatggtgaaggaggagggaacttttgaggaactctctaaccatggaccgctgtttcaaaagcttatggaaaatgcgggaaagatggaagagtatgaagaagaagaaaaggtagatactgn

SEQ ID NO: 248970 - DNA, 549 bp, Glycine max
  unsure (1)..(549): unsure at all n locations
cgtnaagtgtcgctgtcgcttcccacgctcgacttagcatctgacgtaccggtccggaattcccgggtcgacccacgcgtccgattagttcatactaagttctgaaaatgagttccaaggttttgcttgttctacttatgttgttggccactatacttctgatctcctctgaggttgcacccgatgatgcatacgagaattttgacaaaatagatgggaagcctagtgcagatggggtagatgaaagcaagtattggcgtggcggctatggtggcggctatggtggtggttatggaggtgggcgtggaggctatggaagtgggcgtggaggctatggagggggacgtggtggatatggcggcggacgaggtggctatggtggcgggcgtggtggctatggcggcgggcgtggtggcgggcgtggtggctatggtcctaatgaacataacgaggctggggttgatgctaaccctcacaactaagaaggcaactttctaaagcttatatatgggtttaagttatcgcaataaataaaacttcatgagaagn

SEQ ID NO: 248971 - DNA, 381 bp, Glycine max
gaattcccgggccgacccacgcgtccgaaaaaataataaaaaaaagcaaaaaaaaattttaaattaaaaaataaaaaaaatataaatggggatagttaaaaacaacaatattatattccgtgaacaatctgaaatatcataacatctcttgtcaacatcactttccaagtgtcacctaggtcaaagtcattgtctcgcaatcatataacggaaattgaaagtattactcctagccttatctataataatttaagttcacttttttagctttttctccagtggacatcttacatatgtcgtataataggtttatcaattcataatttttcccgttcttactttatttttttgctttaccaactttatcactttttaatgcac

SEQ ID NO: 248972 - DNA, 544 bp, Glycine max
  unsure (1)..(544): unsure at all n locations
tgttagtgtcggtgtgcctgcatcgctcgtcatggctntacncgtccggaattcccgggtcgacccacgcgtccgtttctcaacaacttctgctacttcctactccaaccgcacttctgctccgcaattatcatgggcaaggtcaagatcggaatcaacggatttggaagaattggccgtttggtagccagagtggctctgcagagagacgatgttgaactcgttgccgttaacgaccctttcatcaccaccgattacatgacatacatgtttaaatacgacagtgttcatggacactggaagcatcacgatgtcaccgttaaggacgagaagacccttctcttcggtgacaagccagtcactatttttggacacagaaaccctgaagagatcccatgggggtcaactggagctgacatcattgttgagtccaccggagttttcaccgataaagacaaggccggcgcacattttgaaggtggtgccaaagaaggtattatttctggccccagtaaggatgcccccatgtttnngtgtggtgtca

SEQ ID NO: 248973 - DNA, 547 bp, Glycine max
  unsure (1)..(547): unsure at all n locations
gtattcgtgcnnntnncaatgaatggagagagtatagaattgctctaccggtccggaattcccgggtcgacccacgcgtccgacaagctgaagaagggaaggtggctttgaggaatataagaagagatgcattaaaagcttatgataaacttgagaaggagaaaaagctctccgaagataatgtgaaggatttgtcaagtgatttgcagaagctgacagatgagtatatgaagaaagttgacaccatcttcaaacagaaagaaaaggagttgctcacagtttgatgctttgttgcaaaaagtaaatgctgagttctatctaaagaaggtcaaattttgtgcctactttgctccagggttggatgatgaatgcgcatgttcattggttatacagaagacaaacttttgaattaaatagatgtttttcaaattggaaaggtgagttcatgtctgtaaattggatttatttcacgtaattcttcattgaaattagaccctcaccgaanaaaaaaaaaaaaagggcggccgctctagaggatccaagcttn

SEQ ID NO: 248974 - DNA, 202 bp, Glycine max
gaattcccgggtcgacccacgcgtccgcccagacgtccgctgaagatgcttcatttccacagttactacatccagcttcactttcaggaatggttaaatgcatgtgtaggtattttagacactgctatagttccaagcctgtacttgaacttacaatctgagcaatacctgctgacacttgggagcacaaaattgtggaatc

SEQ ID NO: 248975 - DNA, 473 bp, Glycine max
gaattcccgggtcgacccacgcgtccgatttggtataatacattgatatgtttcttaaaaaaagcactgcaatgtcttccatattggtgctagttggaatgttatcgtccattacagttgcacaatccataggagtttgctatggagtactcggtaataatctaccatcaaggcaagaagttgtggacttgtataaaacaaatgggataggtagaatgcgtatatactatccagatgaagaagcactccaagcccttagaggttcaggcattgagttgattatggacgtggctaaggaaacccttcaatcaatgacagaccccaatgctgctacagattgggtcaataagtatgttacagcctactcgcaagacgtcaatttcaagtacatcgctgttggaaatgaaattcaccccaatacccatgaggcacagtacattctatctgccatgaccaacattcagaatgcaatt

SEQ ID NO: 248976 - DNA, 457 bp, Glycine max
gaattcccgggtcgacccacgcgtccgagaaaaaccagctttcttcaagcacctagatttactctctctctaaatggcgttctcttgttttcgcggcagagtcctcttcgcctccgttttcatcctctccgcttaccaagaatttaattcttatggagttgatgggggacccgcagcaaaagcactcagaccgaagtttgatgcctttgcacatcaagtacattctaaagttggctttcaacttccagatattgatatgaaatttttagtggctggggctattgctctcaagggccttggagggattcttttcatactcagcagctcttttggagctttccttttgcttttgcatcaagtgatcactactccaatactgtatgatttctacaattatcacagtgaggacaaagaatttatccaacttttcatcaaatttactcagaatatggctctc

SEQ ID NO: 248977 - DNA, 464 bp, Glycine max
cggaattcccgggtcgacccacgcgtccgcccacgcgtccgcccacgcgtccgcaattatcgtgtcttcttggctctctgtttaggatcgacatggatttcttttttccattggcaatacttgtgatgatattaggcacaccatactctagtgcttctggaaagagtgaaagtaatgtgaaaacagctgtttttctgtctcctaagtttgaacttggaccgggatcggttgcaaataaatatgattatgatattgattttccaagaggtcatatagcacttaagagtttcaatgcagaggtagttgatgaagcagggaaccctgtgcctcttcatgaaacttatcttcaccactgggttgttggaagatactatcaacctaaatatgtgacgacacacacaaactatgatggacataagatacttcacaactttgaccatatatttgtgaggaacaacggcata

SEQ ID NO: 248978 - DNA, 545 bp, Glycine max
gatgaaggtgctgttgcctagcctgaacgctcgcgctatcccgtccggaattcccgggtcgacccacgcgtccggccacgcatccgttcatactgggtgtatgcacattcggggatcaaatcaactgccgagaggcatgggctactatatacaaggacctagttacagatgccgacagcgtgataccaaaggctcttgattccttcaagagtgtcgaaaacgtcaagggaaatggacgaccaagagccatcaagaagatcactttccttgaagatggataaaccaagtgtgtgctgcgcaagatttacagcatatatgaggctaactggggatacagctactacgcacttggtgatactgcattgccagacacagtggaaacaatcacattatactactaaacgcttgctggacccaatggatagtctgctgagaagctcactgtcacatacgaaacaagaaggagatgcttagccctaacgagacgaacttcaaacttgaaaatgcgaaagctgatgctatcttcaatggccatgatgcttagc

SEQ ID NO: 248979 - DNA, 547 bp, Glycine max
  unsure (1)..(547): unsure at all n locations
tgtttggtncttgtgccgtcaccgcncgtgacgcactacctgtccggaattcccgggtcgacccacgcgtccgctcatccctctcaacgacgaccttgccattcccaaccccaacgccgtttcccctccctcagattgggcactctccggacttcaacccttctcgctcgccgtctccgtctccttcgcccacccgcaccctctacgagctccgatcccgtaggtctctcggcaagaaaccctccaccagtcgccaaggcaaaattcgcaccctcggcgatctcaaacgcccctcccgcgacgaccatgattccgggtccgatcctgatttcgaacccgaccagtactacaccggctgctaaaagagtgggatgcttgttcgagatcctaccagaggaaacaacaacaacaatttggatgatattttcgatcaagcaaggcatgttgctagtgatgcgcccccggagaatcctcgaagctcttcgaggtcgagaagttttagtggcacggcgaggttgctctccggagagactgtgccatctgctcc

SEQ ID NO: 248980 - DNA, 549 bp, Glycine max
  unsure (1)..(549): unsure at all n locations
cgtatgcgtcgcnttctcgtgaacgtgcacttcgattgatcgtactcggtctggaattcccgggtcgacccacgcgtccgaaagaaaaaaaaaaaaaaaaaaaaaaaaaattaaaaaaaaaaaaaaaaaaaaaaaaaaaaaagaaaaataaaaaaaaaaaaaaaaaaaaaagggcggccgttttagaggttccaagtttacttcctcttgcatgcaacttcataactttttttttagtgtcacctaatttcatttcactggccgacgttttacaacgtcgttactggaaaaaccctggcttttcccaatttattcgccttgcataacattccctttttaccaactggcttaatacctaaaaggccctgacctttcgccctttctaacagtttcccatcctgattggcaaatggtacgcgccctgtatcggccttttagcccgttgtttttggtaattttctctcactttgaccgttacatttgccaacgcctttatccccgcttttttagcttatttccttttttttttttccacttttcccgttttcc

SEQ ID NO: 248981 - DNA, 549 bp, Glycine max
  unsure (1)..(549): unsure at all n locations
tggatgcagagcggcntnncgctgatataagcagactatagtattgctctaccggtccggaattcccgggtcgacccacgcgtccgattcgatcttcagtattcagtgatctgcaaagaccttgttttatattatatacaagagtggtcttgccttgtgtggagtgttattcaatcactttgagtgtgtggtgtggcttccaattgatgtaacgagtgtttcctttcttatttcctttttccacagaattgtgagagccagttgatgtctttgtatgtcacttcatcaataaatcaatatgttataataataaaagaaagcatcatttataaaaaaaaaaaaaaagggcggccgctctagaggatccaagcttacgtacgcgtgcatgcgacgtcatagctcttctatagtgtcacctaaattcaattcactggccgtcgttttacaacgtcgtgactgggaaaaccctggcgttacccaacttaatcgccttgcagcacatccncctttcgccagctggcgtaatagcgaagaggcccgcaccgatcg

SEQ ID NO: 248982 - DNA, 549 bp, Glycine max
  unsure (1)..(549): unsure at all n locations
agttgtggttnctatcgctgagactganattcatcgcactgccgtaccggtctggaattcccgggtcgacccacgcgtccgcccacgcgtccggttctttcttgtgcttttcctagtggccagaaccatagctgcttctcgaagataaagaacatctgatgctattgaattgatctcccaaatcctaatttgcaggccacataatacagaaaatagttcacatcaagatgaacatcctacgctctttttggaacagtcccactggcctcaaaacaactcatttttggggtcctgccttcaactggagcccttgctttgccgcagcaatggacacaaagaaaccaccgganacaatatctgtcaatatgaccggagtgatgtgtgtttattcggcactgtgcatgatgtttgcttggatggtacgtccaagaaacccacatcttcttgtatgccatgtcttcaatgagacagtgcaatngtatcaactctcaggatggttcagagctcaaaggggccttgagcatgacaaaaaggatgcagatgcagatn

SEQ ID NO: 248983 - DNA, 522 bp, Glycine max
  unsure (1)..(522): unsure at all n locations
gcaggttgctatagaaggttangcacgcactgacgtaccggtccggaattcccgggtcgacccacgcgtccgagagcatcaaactcttcttcttcgatttccattgcgaagcgttactttttcttcttctgggtcttgattttcttcgctcttcgatcttcgtccggggactgctccgaataccaccaccaccactcgccgatggccacgatcggaggcttacacgactcccaaggctctcaaaacagcgtcgaaaccgaagccctcgctcgattcgccgtagacgaacacaacaagaagcagaattcgcttctggagtttgctagggtggttagggcacaggaacaggttgttgctggtaccctgcatcaccttactcttgaggctattgaggctggtgagaagaagctctatgaagccaaggtgtgggtgaaaccatggctgaatttcaaagaactccaagagttcaagcctgctggtgatgcaccatcgtttacctctgctgatcttggtgtcaaaaaa

SEQ ID NO: 248984 - DNA, 465 bp, Glycine max
aattcccgggtcgacccacgcgtccgcggacgcgtccgtccacgcgtccgcccactcgtccgaacctgccagttctgaagaatggagctacgctacatgttaaaaaatctcaggcgtctaaggagagagggttacaagggagcacaataagcagtcctagtgaaatggcacagggaatcagagcagggaaaatagctgaaggaaatgatgcacattctctttctcttcaagctgttgaaactagacagcaaacacaagtcatcaaagttgtaccacataaccggaaatcagcgacggaatcagcagctagaatttttcaatccattcaagaagagagaaaacaacatgatttagtctagtgctgtttatggaggtggagttatttgagttgattttgtacagtgcgtcaagtcctgtactttgttgttgtttggtaatatgtatcttgcttgtttattctactct

SEQ ID NO: 248985 - DNA, 525 bp, Glycine max
  unsure (1)..(525): unsure at all n locations
aggcggtgnctagagccaaactcgaccgcactgacgtacccgtccggaattcccgggtcgacccacgcgtccgggcttgcttaagctccttagtgctgctccttgcagctctaattctatcccctcaagttcgtgcaaactatgagaatcccccagtgtacaagcctnccactgagaaaccaccagtttataagcccccagttgagaagcctcctgtttacaaacctccagttgaaaaccccccaatttataagcctccagtagagaagccaccagtgtacaagcccccagttgagaaacccccagtgtacaagcccccagttgaaaaaccaccagtgtacaagcccccagttgagaaaccaccagtgtacaagcccccagttgaaaaacccccagtttacaagcccccagttgaaaaacccccagtgtacaagcccccagttgaaaaaccaccagtgtacaagcccccagttgagaagcccccagtttacaagccctcagttgagaagccaccagtttacaagc

SEQ ID NO: 248986 - DNA, 459 bp, Glycine max
  unsure (1)..(459): unsure at all n locations
gaattcccgggtcgacccacgcgtccgcacctctcattttcccacgacccattttcatttttccaaaaagatctcaactttgcttcagactagagcactccctctttttacgttcccgtttcatgggcatctcttggaatcgggaaccatagacatcgccatggaaaaggacaagtctcacactcacagctttcttcacagtatcgtcaaacacttcaaattcggttcaccgaaagagcgaaacaatgaagctgacgtacaccaaatggctgcacaggagcagaagatctttgcctacgaaaccttgacagctgcaactaagaattntagtgctattcataagctnggtgagggaggttttggaccagtctacaaggggaagctgaatgatgggagagagattgctgtgaagaagttatcacacacgtcaaaaccaagggaagaaggagttcatgaatg

SEQ ID NO: 248987 - DNA, 550 bp, Glycine max
  unsure (1)..(550): unsure at all n locations
ggttagtgtcacttgatgcctgcactgcntctgcatcgcgtacccgtccggaattcccgggtcgacccacgcgtccgtctgtctctctctctctctctctcgctcttcttctcatcaagcacagagttacagactcggcgatcttccgattctctttcgtcttggtttatgagctcgaaggagagacccactcttggtggcacgcggattaagacccgcaaacgaaatattgctgcgccgctggaccctgcagcattctcggatgcagtggtccagatttatttggataatgctggtgatctggaacttattgctaagagtattgaatcttcagaccttaacttttcaagatacggtgacaccttttttgaaggtgctttcactgggggtcgtacacaacctggaactaccaagcctgatgaaggggaccgncacccatactctataatagagtgggagcctaagcgtgaagtcattttaccatctgtaatctacatacaaaagattttgcggcgaaggccatttctcatcaagaaccttgaaaatgttt

SEQ ID NO: 248988 - DNA, 262 bp, Glycine max
actcggttcggaattcccggctcgacccacgcgtccgcccacgcgtccgctagattcagccacagattcggaggataagaacatagtcctaggagagggcccgtactaagcagactgatcctaagtccacatgaggaaaggctcctatgaagcatctcgctgccaatgctgcacgtaagtctgcactcaactactgactgtgttaagtagccacattgttcccgtcctgttaccgatgctctacttgagattagtaaatacc

SEQ ID NO: 248989 - DNA, 550 bp, Glycine max
  unsure (1)..(550): unsure at all n locations
tgtagtgcnntataaatgaagtcgaggttctattgcattgctctaccggtccggaattcccgggtcgacccacgcgtccgcatttcaaaggcatgttttttcaacaaagttcattctacccacgagtcgattcaacaaacccagacgctaattctcccttctctatccccgcaccatcttcttcttcttcttccatttatccctcagtggaaacaacagagaatctcatttgggaagagccaaacacgactacagaagaagccatggaaaacgttctggtcacggtcccgggtgcgattctgcatctgatagaaaaggattccagcgtgcaccttgcttcgggcgacctnaccatatcgacccttggagaaggcgacaaaatggtggcgggtctggcatgcgtcggcgatcaaggtcaatggcccgtggcgaaagacgtgtcggccgtgaagctggatgaatcgcactacttcttcacggtccaggtcccacaggagcacggngaggagaagggattcgaggtgttgaattacggtttaacggtggcggc

SEQ ID NO: 248990 - DNA, 525 bp, Glycine max
  unsure (1)..(525): unsure at all n locations
tagctgtttngacactgaaatgggaaagtaatgctctacccgtccggaattcccgggtcgacccacgcgtccgttctcatctttctctcttctctctccacccaaaccctaactcccgaccctgttcccctcgggtatccgtcatgaaaggaggaaagtccaagaccgaatctaagagagccgatcccaaacttgctgtgaataagaagggagccgccaccaaggctaggaaacccgccggcaaggggaaggcagcgaaagaccctaacaagccaaagaggcctccaagtgctttctttgttttcatggaggagttcaggaaggtattcaacaaagaacatcctgaaaacaaagcagtgtctgctgtgggcaaagctgctggagcaaaatggaagaccatgtctgatgctgaaaaagcaccttatgtggcaaagtctgagaaaaggaaagtggagtacgagaagaacatgagagcctataacaagaaacaggcggaaggtcctactggtggngatgaagaagaat

SEQ ID NO: 248991 - DNA, 439 bp, Glycine max
cggaattcccgggtcgacccacgcgtccgcccacgcgtccgatttttcttgacgatggcctcagcatgcacttcttcatctgttgcgttacatctgattaaacatcgtaataatgttatgagaaacagttactgacaaagatggctcaatacgcactcccaacacctgttgcataacatcatgcatttatttcatcagtaacaattgtatgaagccatgaaataatgctatgacaggcagacgaggacaaggatggccgtcttactttgactgagatgattgagaacccatatgtattttatagtgctattttcaacgatgatgaagatgatgacgacgattaccatgatgagttccggtaaattcatgttaggatacccagaaaaagttggcacaattctagtgacacggaatcagtatttgaggataatgacacgac

SEQ ID NO: 248992 - DNA, 394 bp, Glycine max
  unsure (1)..(394): unsure at all n locations
ggaattcccgggtcgacccacgcgtccggttctctcacacactcattcggtgctccgaatctcagattctagggttagggttcccaatgtctcgaccgatcagaaaatgagttcaactggtggttctaccaagggcggaaggggcaagcccaaagcctccaaatccgtttcaagatcgcagaaagctggtctccaattccccgttggaagaatcgctcgattccttaaggctgggaaatacgccgagcgtgttggtgctggtgctcctgtgtacctctctgcagtgctcgaatatctcgctgctgatgttntggaattggctgngaatgctgctagggataacaagaagaatcgtatnggtcctaagcacattcagcttgctgtgaagaacgat

SEQ ID NO: 248993 - DNA, 546 bp, Glycine max
  unsure (1)..(546): unsure at all n locations
tggatccggtgctgatgaatttcatgacatgactgccatactccgtccggaattcccgggtcgacccacgcgtccgcagggcagttggatttccacagatggcaaatgctgcagccattgcagctgcctttgggggaggtctacctcctggaataactgggacaaatgacaggtgtacagttcttgtatcaaatcttaatcctgatagaattgatgaggataaactattcaacctgttctctatttatgggaatattgtgagaattaaacttctccgaaataaaccagatcatgcacttattcagatgggagatggttttcaagcagaattggctgtacactttctgaaaggagccatgttgtttgagaaacgattagaggtcaacttctccaagcatccgaacataacccaaagtgctgacacacatgaatacatcaattcaaatctcaatccgttcaaccgtaacgcaaccaaaaactaccggtactgctgcttcccaacaaagatgatccatttgtccacacttccacangacatcactgaag

SEQ ID NO: 248994 - DNA, 358 bp, Glycine max
  unsure (1)..(358): unsure at all n locations
accggtctcggaattcccggctcgacccacgcgtccgcggacgcgtggggtagaatcgtgtggatcgtttgcagaagaagaggtaaagagaaggagtgaccgaagcgaagatgttacccacagcttccaaaggacgttcttcttcctcctcctcttcctctcgacctaacaatcccatgctgcttccctacctccgcagaatcatcaagtggcaacaaatggatattgaatatactttttggcaaatgcttcatctatgtacgtccccgaaagttgtctatcagcatactaaatatcacanacaaaccaagaatcaatgggcacgtgatgatcctgcatttgttgtgatctgcagtct

SEQ ID NO: 248995 - DNA, 524 bp, Glycine max
  unsure (1)..(524): unsure at all n locations
cgaccgtactgacactgaataataaagtatctctcgtaccggtccggaattcccgggtcgacccacgcgtccgctacaacattcactccctctctcttgtcttttcctctacgttcctgcattgctcgtctcgaacgctaaccatggccggcggaggtttcaccagcggcggcggcgccggagatttcgaggccaaaatcactcccatcgtcatcatttcatgtatcatggctgccaccggaggtctcatgttcggctacgacgtcggcgtttcagaaagacagtggaagagaaaggactggacagtaattactgcaaatacgacaaccaaggattacagcttttcacgtcgtctctgtatctggctggtttgacttcgacgttctttgcttcatacacgactcgtaggttgggaagaaggctgaccatgttgattgctggggtattcttcatctgtggagttgtccttaatgctgctgctcaagaccttgccatgctcatcgntggcagaatcttacttggcn

SEQ ID NO: 248996 - DNA, 459 bp, Glycine max
aattcccgggtcgacccacgcgtccgcccacgcgtccgcccacgcgtccgatttagtgtggctcaagattgtggaaaaccaacaagaagaaaaagatataatcataattatatttcttgatcggtgctccgagtctggccgaggacaacagggaggcctgcatgagctcccccgacctctcctccctgtggctgtcaacgccgcaatccgccactccgggacccgacacgagcagagctccgccgcctccgccgccgcaatctcagtctcctctacaaaggcggttgcagacgctactagaaggagctagagaaagctggacctatgcaattttctgggagtcttctcacgacaacttctccggcgctacccttctccgttggggcgacggctattaccagggcgaagaagaggacaaagccaaaggcaaagctcccaaaacgacgacgtctgcagaac

SEQ ID NO: 248997 - DNA, 404 bp, Glycine max
gaaacttaatcgatcatcacttcacttcactaatacgtcatggcagacgagacccagaacaagtatgagagctctgaggttgaggtccaggatcgtggtgtttttgactttctcggtaagaaaaaggatgaagaagacaagcctcatcctcaggaggaggtcatcgccaccgagtttcaaaaagtcactgtctcagaccaaggagagaacaagcacagcctcttagaaaagcttcaccgatctgacagcagctctagctcttcaagtgaggaggaaggagaagatggagagaaaaggaagaagaagaagaaggaaaagaaagggctgaaagagaagatcgaggagaaaatagagggtgatcatcatcatcacaaggatgaggacacaagtgtccctgttgagaa

SEQ ID NO: 248998 - DNA, 379 bp, Glycine max
gtagagcgagagagaaaaaaatgttggggatcttcagcagttccgtggtgtctccgccggatgagctggtggctgccggcagcagaacgccgtcgccgaagacgacggcggggaagctgctgaaccggttcgtggagaacaaggcgtcagcggtgtcgctgcaggtgggagaacacgtgcagttggcttacacgcaccacaacgagtcaccgtggcatcccagatcatttgctgctaatgatgagatattctgcttgtttgagggggctctagacaatttgggcagcctgagacaacagtatggactggcctagtcagccaatgaagtggttttggtgattgaggcttacaaagctttacgtgatcgagcaccataccc

SEQ ID NO: 248999 - DNA, 524 bp, Glycine max
  unsure (1)..(524): unsure at all n locations
agaatggggnnntntngcatgaacagctcagcactgctctaccggtctggaattcccgggtcgacccacgcgtccgcccacgcgtccgctgtaaagcgtgccaagaaggatttactaaacaagaacttagctgagttcaagaatgaaataaacaccttgtcgaaaattgagcacattaaccttgtaaggtggtatggatatttggagcatggacatgaaaagattattgttgttgaatatattagtaatggaactcttcgggaacatttagatggtattcggggagatggactagaaattggtgagcgtctagacatagcaattgacatagctcatgcaattacttaccttcatatgtacacagatcattcaattattcatagagacgtcaaagcattcaatatcttaatcaacgattaactaaaggccaaaagttccgacctccggtttgctcgggtgggaccaaaaaaccttggggaacccatattttaacttaaaattaaaggaacaacttggtacatgga

SEQ ID NO: 249000 - DNA, 439 bp, Glycine max
  unsure (1)..(439): unsure at all n locations
gaattcccgggtcgacccacgcgtccggaaagttgccctacttgtatggcaccccaagaggaacacggggttatctcctcatgcctgaactgcttcctagctggtggggtcctgtatcggttcgagtatgccgttacccctgccctcttccttgcaaaagcccgcggtggaacatgtactcttgcagtctctgatagtgatgatatcgtcatccatcgagcaaaatacctgctcgaaaatggctttgggtgctataatgttttcaagaaaaactgtgaagactttgctatctattgcaaaaccgggctcctagaaatcggacaaagtggccaagcagtttccatcatagggggacctcttgctgctgctctatcctcgcccctccgtatggttactactaacgtttatggaatggcaacgacngcnggtggagtctact

SEQ ID NO: 249001 - DNA, 522 bp, Glycine max
  unsure (1)..(522): unsure at all n locations
agagccgtgactgtgccacccaggatctcatcgacgtaccggtccggaattcccgggtcgacccacgcgtccgaaacgccacaatggccgtcacgaaaagcctctccatcttcctcttcatcgccataagctgcgtggccgtagctcaagcagcgaacttcaacatcacaaacaattgcacctacacggtgtgggcccgccgncgtgcccggcggcggctcaaggcttaaccctggcgaatcgtggaacatcagcgtgacgaacggcacgacaggaggacgcatcttgggtcgaacaaactgcaccttttacaacgcacgacgccggaagtgcctcaccggcgactgcgacagtgttcttgagtgcaacaaaacaggtacaccttcgaacaccttggtgggaattcgcgtttgaacagttcaacaaacttgacttctaccacaatttccttgtcgacgggttcaacaattcctttgaagtgaaccccaaactacacctggaagcttcttgaaatgcgccgcg

SEQ ID NO: 249002 - DNA, 519 bp, Glycine max
tgagctgcgctgcgccatgccagcagagtgacgcactgccgtaccggtccggaattcccgggtcgacccacgcgtccgggggaatggcatggttgcagttgcagagaatcatcaccaataccaagggaggtgctaatttgatctcaccgctcccacgattcttctcgaaatgttccccctatgttttgaaagttggaataccagagtttctaaacgggattgggaagggggttgagtcccacgttcctaagcttgaatctgaaatcggtgatttccagaaacttctcgtcattcgaacccttaaactcaagaagctcggtattccttgcaaacataggaagttaatattgaaatacacacacaagtacaggctgggattatggaagccacgtgctgagttcatcactgcctgattggtttctaagtagtaagtagtcgcttgttgttagaccatattgcaaatgtttagccgcagcagaatgacaatgctctacttgaaaagatcaagtcgcacttgct

SEQ ID NO: 249003 - DNA, 520 bp, Glycine max
  unsure (1)..(520): unsure at all n locations
tgagagcatgcttgcccatgagtaagactctcatcgcactgccgtaccggtccggaattcccgggtcgacccacgcgtccgggagagcgcctgaaaatcggaggcgtggaagtggggagaaagatgagcgaggggatgagctccatgagtttcaagctcaaggagttcttccagcctgggcccaatcaggccgacaagcttgtggaggacgctacttccgaggccctggacgagcccgaatgggccctcaatctcgatctctgcgacctcgtcaacaccgacaagctcaactgcgtcgaactcgtccgcggaatcaagaagcggatcattctcaagagccctagggttcagtacctcgcccttgtccttctcgaaaccctagtcaagaactgcgagaaggccttcttcgaggtcgncgncgagcgtgtcctcgaccagattgtcaagctcattgaccacccccaaaacggtggtaataacggaaccagggccttatgaggatccaagcctgggtgagtca

SEQ ID NO: 249004 - DNA, 522 bp, Glycine max
  unsure (1)..(522): unsure at all n locations
aggtagtgtncttgaaatgagccttcactactgcactgacgtaccggtccggaattcccgggtcgacccacgcgtccgattgttactaccaccatcaccattactaccattgctgcaactctccgttagcagacttcaaggaatgggcaaagaggaaaatgatgaaaatgaaaagaaagatggagaagatggagacgaggatgaaaatgcacaagaggaggatgaagaagatattagtgatgatgattataatcagaatatagattttgatgacgatgaagatgattataatgatgtagatgacggggatgatgaacctacctattagatatcagtatggagaatgttcttctgctcatcccgtgacagctatacaagcatggactgttgctcctttaattttacagtttggaagttaaaattgttcgttagccttatttggcttttactttgtcactattttaacttgttcaattactaacggatgttttccttgtaaatgtttagattaaagaagtatac

SEQ ID NO: 249005 - DNA, 519 bp, Glycine max
  unsure (1)..(519): unsure at all n locations
aggagcgtgctaggcatgcacgtgactgactgctctaccggtccggaattcccgggtcgacccacgcgtccgctaaccctaaccctaaccagaggtaatggattcagtgcctcgaagaagcagaggaggaggcgttttggaaaacctcgacaaggtcctaatgcgtcgcaactgagtctacgtcaccttcgtcatcgcaggcgccttcctcggagaacgggctgtggattacggagctcacaagatcggggagcacaataacgttgggtccaaatggcacctagatggaaaggaaaagatgcaaaagctaaaaaggatgcacaagctgaagcgctcaaggaacccatgtcaaagattgtatctcaacttcagtcttctctagttcaatcaaatacttgtggatttctctctggtagtagtgtacacttagcagtgggagcagaacaacttcatttgctcgataaagcatgctttggctcacctgtgagaacagttgaaaaggacaaaacctcgtttcan

SEQ ID NO: 249006 - DNA, 517 bp, Glycine max
tgcgtggtgctgatgccagctccgatcgtactgccgtaccggtccggaattcccgggtcgacccacgcgtccgcccacgcgtccgatcatttcaactattgtgttcttcttggccaaataaagccaacccctggtgctgttttggtttgtctgagagagaaatgatggcattggagtgtagtagtttccacttcctaaatggggtttacatggtgctgtttttttgccttggcattgtccttgtaaattcggttaatgaagagggtttgagtcttttgaggttcaaagcttcccttcttgacccaaacaacaatctctataactgggattcttctgatttgactccttgcaattggactggtgtgtattgcacaggttcagtggtaacttctgtgaaactttaccaactcaatctgtctggtactttggctcctgccatctgtaatcttccaaagcttcttgagttgaatttgtcaaaaaatttcatctctggccccattcctgatggttttgttga

SEQ ID NO: 249007 - DNA, 518 bp, Glycine max
  unsure (1)..(518): unsure at all n locations
gaagtgccgntatcgactgaacgtatccatacgactgccgtaccggtccggaattcccgggtcgacccacgcgtccggttgtgtacagagagagagagagagagagagagagagagagagagaggctgctatggggaacagagctatgttaaccttgctactactcctcttcttctcgaccaatttggttccttccgcccttgctatctggctgacgttacccaccactggcactaagtgcgtctccgatgaaatccaacacaacgtcgtcgttttggccgactacgtcgttatccccagtgatcacgcccacaacctcaccatcgccgtcaaggtgacatcaccgtatggaaacaatcttcatcacaaggagaacacaacacatggtagtattgcatttacaactcaagaggctgggaactaccttgcatgcttctgggtggatagccctagtcaaggagttggtgaagttaatgtaaaccttgattggaaatatggaatngcagctaatgattggg

SEQ ID NO: 249008 - DNA, 529 bp, Glycine max
  unsure (1)..(529): unsure at all n locations
tgtggtgtgctgaggccttttcacgtacgcnatagcactgccgtaccggtccggaattcccgggtcgacccacgcgtccgctggaaagaccatcacccttgaggtggagagctctgacactattgacaatgtcggagccgagattcaggacaaagaaggtatcccaccagaccaacagaggctcatttttgctggcaaacagcttgaagatggccgaaccttggctgattacaacatccaaaaagaatctaccctccacttggtgctccgtctgcgcggtggtatgcaaatctttgtgaagacccttactgggaagaccattactttggaggtagagagctcagacacaattgacaatgtgaaggcaaagatccaagacaaggagggtatcccaccagaccaacagaggctcatttttgctggcaaacagcttgaagatggccgaaccttggctgattacaacatccaaaaagaatctaccctccacttggtgctccgtctgcgcggtggtatgcaaatctttgtgaag

SEQ ID NO: 249009 - DNA, 235 bp, Glycine max
gaattcccgggtcgacccacgcgtccgctgcgcgtgggaaaaaaaaaaaataaaaataaaaaaaaaaaaaaaaaaaataaaaagaacaataataaataaaacaaacatacaacttaaaaaaatcttttatacataaaaataacttcttttcaatttccgtcaatttacaacttctttaatcaaaactccatctcattacccaaatctttatgattgcattacatacctttttttt

SEQ ID NO: 249010 - DNA, 523 bp, Glycine max
  unsure (1)..(523): unsure at all n locations
tgatagagcgtntcngctgaggccttcagcgatagcactgacgtaccggtccggaattcccgggtcgacccacgcgtccgaaaatatatagcaagtatcctgctatgcagtagtcatcattttataattattttgtaaaaggtaattttcctcctttgcagtcattgctttgtgatcccaacccaaattctcctgcaaactctgaagcagctcgaatgtttagtgagaacaagcgtgagtacaatcgaagagtgagggaaattgtggagcagagttggacagcagattaagttcatccttatatgcatgggaagctttgaaggcatgaatttggttgcagtgatggcaactataagaatgattgtgcaaactcatcacatttatattctctgctgatatgaatgatagcatcatcttatctttaatttattatagcttctgcattgcatatgtcagctaatgtaaaatagaattatgcgtgtcaatttactttcgattgttgtcagacattcaacatgaaaat

SEQ ID NO: 249011 - DNA, 519 bp, Glycine max
cggagtgtgcttggatagtatagggaagtagtgctatacctgtccggaattcccgggtcgacccacgcgtccggatttggataccagcagcaactagttcctggaatgagacctggtggtggtcccatgccaagcttctttgttcctatggttcagcaaggccaacaagggcagcgcccagggggccgccgaggaacaggtcctgtgcaacaaccccaacagccaatgccaatgatgcagcagcagatgcttccaagggggcgtgtctatcgttaccctcctggccgcaacatgcaagatgtcccacttcaaggtgtagctggtggaatgatgtcagtcccttatgacatgggtggtctgccaatccgcgatgctgtgggacagccaatgcccattcaagctttggccacggctcttgcaaatgctccccctgaacagcagaggactatgctcggtgaagctttatacccgcttgtggatcagctggaacacgatgctgcagcaaaggttactggcatg

SEQ ID NO: 249012 - DNA, 521 bp, Glycine max
  unsure (1)..(521): unsure at all n locations
nggccggtgnctagtaatagtattgtatagtattgctcgtaccggtccggaattcccgggtcgacccacgcgtccgcccaaaccaatcagtgggtgccgcggggaagtggttttcccatgatgtcacgttttatgcatgcgccttctcccgttctgtcttcttcgcatcctcatttgggagttggccacaagagagagcgtgaagatgacactggcgctggtgcgagtggaggtgttgctattgcagcagcttcttcacaaacgcaaacacaagagattgaaagtgctggcggcgacaggaggaggagatacaggggagtgaggcagaggccgtgggggaaatgggcggcagagattcgcgatcctcacaaagcggcgagagtgtggcttgggacattcgacactgccgaggctgcggccagagcctacgatgaagccgcattgaggttcagaggtaacagagcanaacttaatttccccgaaaacgttgtacccgttccacctnctnctncggttcccga

SEQ ID NO: 249013 - DNA, 473 bp, Glycine max
cggaattcccgggtcgacccacgcgtccgcatgtcttgaaatatatgtttgctatatgctattaccttttctattctcccaagtgtaacttcagaagtatctatatggaatgtgtggaacaggttttggagatgaacaacaacccacactatttgtatcggatgactattcttcgtgctatctctctgcttgctcctgtgatgggccctgaaatcacttgttcaaacttgttaccagttgttgttgctgcatcaaaagacaggtactttgtattaccttttgaaagccgggtacatgccatcatttccatacagtttctttaagttcctaattgctgccatttactcccttttagagtgcccaacataaagttcaatgtggcaaaggtattagagtccatcttccccatcgttgatcagtctgtaagtatcattcttatgtttccatcttctgttcatctttctttgtcttaa

SEQ ID NO: 249014 - DNA, 516 bp, Glycine max
  unsure (1)..(516): unsure at all n locations
cggcgcggctgaggcctgcacgcnccgtagcgcactgccgtaccggtccggaattcccgggtcgacccacgcgtccgcccacgcgttcgtagaagtattattatacttccattaccatttaaaagaaaatggcatagacgggtattgacacattcgaggacgatatcacctctgctgcggctcatgctactctttacaaagatgtcgttacagatgccgacaacattattccaaacgctcttaattcctttaacagtgaaggaaaccgtgagggaaaaagcagccccgggaccaactaggaaaaaaatttcggaaacaaatgatgaacccaggatggaattgccattatgaagccagatttggagaaaacctgggaattaagttccggggatattggactggctcaatcgccaaaaaaaactttaaaatcccctttccatgcgaatttgattgccggcccaaatgaaggttttccggaaaaatttcattccaataacaaacccaaggcgatgctta

SEQ ID NO: 249015 - DNA, 522 bp, Glycine max
  unsure (1)..(522): unsure at all n locations
agtagctgtnctgtggactgatctgacccgtacagcactgtcagtaccggttcggaattcccgggtcgacccacgcgtccgcccacgcgttcggaaattcttatgcgttgttgtagcggtggcctttgttatgatgacagaggtgccccaaaatgtgagtgctcaaaactgtggttgtgctgaagggttatgttgcagccaacatgggtattgtggtaacggtgaggagtactgcggtacagggtgcaagcagggtccttgttattcgagcacaccaagtactaacaatgttaatgtggctgacattgtcacaccacaattcttcagtggcataattgatcatgctgactctggctgtgctggcaagaacttttactcacgagatgcttttcttaatgctctcaattcctataatgactttggtagacttggttcccatgatgactcctagcgcgagattgcaactgcttttgcccatttcacacatgaaactggacatttttgccacattgaagagattaa

SEQ ID NO: 249016 - DNA, 529 bp, Glycine max
  unsure (1)..(529): unsure at all n locations
agtgagatgcgtntaaaatgaataagtcatccatagcactgccgtaccggtccggaattcccgggtcgacccacgcgtccgcccacgcgtccgcgaaagggctgcaaatgttgctgaagtaaaaatcacaaatagatgaactgaacacactcatatacttgagtgtactccatgtaataactagtatatatgtaagaaataagaaataaaagcatggactctatccgtgcttgggctggcataggttgaatgttttccgccaaccatgcatgtagttgacacatctttttactatacagcatatatatttctaaaaaaaaaaaaaaaaaaaaaaaaaaaaaaaaaaaaaaaaaaaaaaaaaaaaaaaaaaaaaaaaaaaaaaaaaaaaaaaaaaaaaaaaagggttaaaaaaaaaaaaaaaaaaaaaaaaaaaggggggcccgtttaaagggaccaaagttaactacccgtgcattgcaacttataacttttcatatggggcccccaaattaaaattaatggccggggt

SEQ ID NO: 249017 - DNA, 77 bp, Glycine max
ttttaaaggatccaagtttacgtccccgtccttgcaacgtaatactttttttatagggtcccctaaattaaattcat

SEQ ID NO: 249018 - DNA, 523 bp, Glycine max
cggagactgtgctagtactagaaagagatagtactgctcgtaccggtccggaattcccgggtcgacccacgcgtccgcccacgcgtccgcggacgcgtggggcaggaccctcctgaagatgctgttgtttcagtttgtggtcatgttttttgtaaccagtgcatttgtgaatatcttactggtgatgacaatcagtgccctgctccaaactgcaaaactcgactaagcacgccttcagtgttttccaaagtcacactgaatagttctttttctgatcagccttgtgataatttgcctgattactctggttgtgaagtggaggaatctgagttttgttctcaggctcagccatatgattcttcaaaaattaaggctgcacttgaggtgttgcagtcgttgtctaaaccacaatgctttgcttcccaaaacaattctgtgcagagcacttctggggaaagtaccgatggccttggtagctcctctagtgctgacagaatgaaatccttgaatgaaattcctgaga

SEQ ID NO: 249019 - DNA, 518 bp, Glycine max
  unsure (1)..(518): unsure at all n locations
ggatgctgcttgtaatgtattgtgatagtatgctcgtaccggtccggaattcccgggtcgacccacgcgtccgcccacgcgtccgcccacgcgtccggcgtaccgaaggcagtggcagcgacgatccggctcacggtgccggccggaggagctcggccggcgccaccggttggaccggcgctgggtcagtaccggctgaacctgatggcgttctgcaaggacttcaacgcccgcacccagaagtacaaggcggagacacccatggccgttacgataacggcgtacaaggacaacaccttcgagttcaccgttaagtcgccgccggtgtcgtggtacctgaagaaagccgccggcgtggaatccggtagcagccggcccggtcacgtgaccgcgtcctcgttgtccgtgcggcacgtgcacgagatcgcgaaggcgaaacagtccgatccgtaccttcagaacatgcctctcgagtccatttctaagtccatcattggaaccgncaacagcatggggat

SEQ ID NO: 249020 - DNA, 521 bp, Glycine max
  unsure (1)..(521): unsure at all n locations
cggctggtgctgtggcctgcaccgtnctgcatagccacgccgtactcggtccggaattcccgggtcgacccacgcgtccgatttcaatcaacggttatacccttttctatttgagcatcatcatgtccaccggggcgcagcccaaggccaagaaaacggcgtcgtccaagaagcccctctcccatcctaccttcgccgcgatgatagcggaggcgatagcgagtctgaaggagagaaccggttcgagccaatacgcgataaccaaattcatcgaaggcaagcacaaggagtggcctccaacctacaagaagcttgttctcgttcatctcaagaagtctgctgctgctggcaagctcgttaaggtcaaaaactctttcaagctcgcaccgactaagtctgctcctgttaaagccgctgctgctcccaagaagcccaccatagctgcggctaagcccgccgccaagccccgctttcaagcccaaagttggtgcacctaagaaggaagcctgtgccaacccaag

SEQ ID NO: 249021 - DNA, 524 bp, Glycine max
  unsure (1)..(524): unsure at all n locations
gagatgctgctgtggcctcactgcncagtcacgnactgcctgtaccggttcggaattcccgggtcgacccacgcgtccgcccacgcgtccgttccattccattccttcattgctatgcccacataacaacaccgaaaaggatggcacttgtgagccacgtttgtgtgagatgtgtagccacacccacttccccagagtccccaaattcggcacccttgccagacccaaggcaaaccaaggttctccttccgaagaagaagcctcagaaatggtccaccggggtggctcccggggagtacggtggccctcccaccaccaccaaactccgcaaatactggggcggcgatgacgaagaccctttggcctctgatgactatatgtggaacaaggagtttatgggtcgcttccaaaagttgattgaggaacccaatgctcaaccccctcctgcaaaggaagagccttcagggtttctaagcttaaatagagtcatgagcctggacagtttgaaagttgatttgagcaaa

SEQ ID NO: 249022 - DNA, 527 bp, Glycine max
cggatggtgctgagcactcaataagaagtaatcgcactgccgtaccggtccggaattcccgggtcgacccacgcgtccggtgttctcttcttcacactgcagttgatctggtgaatgagaccaaattggaccaagagattaagtcttggcttgcatttgcagcacaaaaagttgttgaagtaaatgccttggccaaggcattgtctggacagaaggatgaggttttcttttctgctaatgctgctgccttggcttcaaggaagtcctccccaagggtgataaatgaggctgtccaaaaagccgctgctgctctgaagggctctgatcatcggagggccacaaatgttagtgccaggttggatgctcaacagaagaaattgaatctttctgttcttccaacaactacaattggatctttccctcaaactgccgatcttagaagagttcgtcgtgaattcaaggctaacaagatctccgaggaagattatatccgtttcattaaggaggaaatttacaatgttgtaaaa

SEQ ID NO: 249023 - DNA, 524 bp, Glycine max
  unsure (1)..(524): unsure at all n locations
tgagtgggnctgngcatggcatgatgtcatgcattgccgtaccggtccggaattcccgggtcgacccacgcgtccgctttctctcttctctctccacccaaaccctaactcccgaccctgttcccctctcgtatccgtcatgaaaggaggaaagtccaagaccgaatctaagagagccgatcccaaacttgctgtgaataagaagggagccgccaccaaggctaggaaacccgccggcaaggggaaggcagcgaaagaccctaacaagccaaagaggcctccaagtgctttcttcgttttcatggaggagttcaggaaggtattcaacaaagaacatcctgaaaacaaagcagtgtctgctgtgggcaaagctgctggagcaaaatggaagaccatgtctgatgctgaaaaagcaccttatgtggcaaagtctgagaaaaggaaagtggagtacgagaagaacatgagagcctataacaagaaacaggcggaaggtcctactggtggggatgaagaagaatctg

SEQ ID NO: 249024 - DNA, 519 bp, Glycine max
  unsure (1)..(519): unsure at all n locations
cgagcgctactagaccatgcaaagcatgttatcgctatacncgtccggaattcccgggtcgacccacgcgtccggagcgagtcagagttgggagagccccttacacgacttttacctctcggtctgggtcttctatatcttggaaagcaggacagtgttgaggcaactgccgaagtttcaaagactttcaatgaaaaaattagaaagtactgtgacatgacactcttatcatgtgcctatgctggaactggaaatgttctcaaggttcaaaatctgttgggtcattgttcacaacatcttgataaaggtgaaactcaccaaggtcctgctgtgcttggaattgctatggtagctatggctgaagaattgggacttgagatggcaattcgatcattagaacatcttctacaatatggagagcagaatattcgccgagcagttcctttggcccttggtctactctgtatatcaaatccaaaggtcaatgttatggatacgttaagcagacttagccatgag

SEQ ID NO: 249025 - DNA, 522 bp, Glycine max
  unsure (1)..(522): unsure at all n locations
gagtgctnctgaggccagcnatgcacntgcattgcactgactgnntcggtttggaattcccgggtcgacccacgcgtccgcccacgcgtccgcccacgcgtccgcccacgcgtccgcaacaatttgataatcctgcaaagcctaagattcattatgagacaactggcccagagatatgggaagatacaagaggaaagatagatattttagttgcaggaattggaactggtggaactgtttctggagttggccaattcctaaaacaacaaaatccaaaaatacaggttattggtgtagagcctctggaaagcaacatacttactggcggaaagccaggacctcacaaaattcagggtattggggctggttttgtgcccaggaatttggatcaagatgtgcttgatgaagttatagcgatatcaagtgatgaagcagttgaaactgcaaagcaattagcactccaggaaggcttgctggtgggaatttcttcaggagctgctgctgcagctgctttgaaaggtg

SEQ ID NO: 249026 - DNA, 520 bp, Glycine max
  unsure (1)..(520): unsure at all n locations
tgagctgcgctgtcgcctgaccagaaacgctancgtactgactgtaccggttcggaattcccgggtcgacccacgcgtccgcccacgcgtccgctttctctctcaaaaccctaaccctaaccccaatccccagagtctggaagcctctccaatggcgtaccagacccccgatcaagattcaggttccgatccgaagaccccaacgcgcctctacaacccctacaaggatctcgaagtccccattcgcaacctctaccagctcccaacctccccggagtacctcttcgtcgaagaagcccgccgcaagcgccgatcctggggcgagaacctcaccttctacaccggctgcggctacctctccggcgctgtcggtggcgccgactccggcctcgtcggcggcgttaaatccttcgagtccggcgacaccgncaagctccgcgtcaaccgcgtcctcaacttcttcggccacgccggccgcgcctggggcaaccgncttcgcgtcatcggccttctttacgcc

SEQ ID NO: 249027 - DNA, 527 bp, Glycine max
  unsure (1)..(527): unsure at all n locations
tgagtggtgcgtgtccatgcacaagatagttcncgtactgccgtaccggtccggaattcccgggtcgacccacgcgtccgcccacgcgtccgcccacgcgtccgattaaaaccctatagcatcagcccatcaactagcagaaaggagtttgtgtaagggaagaagatggtgtcaggttctggaatctgcgcaaagcgagtggtggtggacgctcgccaccacatgttgggtcggctagcgtccatcgtggcgaaagagcttctgaatgggcagaaggttgcggtggtgcgctgcgaagagatttgcatctccggcggtctggtgaggcagaagatgaaatacttgagattcctccgcaaacgcatgaacaccaaaccctcccatggccctatccacttccgcgccccagccaagatcttctggcgcaccgttcgtggaatgataccacacaagacaaagcgtggggaagctgctcttgctcgtttgaaggtttatgaaggaatccctcctccatatgacaagaccaa

SEQ ID NO: 249028 - DNA, 521 bp, Glycine max
  unsure (1)..(521): unsure at all n locations
cgtagggtgggnttacactggatgggatgtagttgccacgacgtaccggtccggaattcccgggtcgacccacgcgtccggagaactaaaggtttcacctgttaatgaaagatgctgtactgacaagcaagtgttgctttaaaagcttttgtgacagatgtattagggactatattatctccaagtctatctgtgtatgtggtgcaacaaatattcttgcagatgatctcttaccgaataagacattacgagataccattaatcgtatattggagtcgggcaatagcagtgctgaaaatgctgggagcactttccaagctcaagatatggagtctgctcgctgtccgcagcctaagattccatccccaacctcatctgctgcatccaagggagaactaaaggtttcacctgttaatgaaaaaacaacaaatatacaggaaacaactgatgatagaaaggctgtttctgctccacagcagacatccgagcaagtaaggaaccccagagctgctgatatatct

SEQ ID NO: 249029 - DNA, 521 bp, Glycine max
  unsure (1)..(521): unsure at all n locations
agagggcgcttaccctacttagattgtcatgcactgacgtaccggtccggaattcccgggtcgacccacgcgtccgcccacgcgtccgccactaatgtgccaagctcgagagtctaaaattcaaatcctagcttgggttaacttagatatgagttctctatttttaattttccttatccttcttgttgccgatggggtccttgtccgaggaagtataaatattacagaaataagcttcgatcaaaactatgaggttacgtggggtgataatcatgttgtctccttaaaccaagggaaagaaattcagctcacaatggataactcttcaggatccggttttggatccaagatgtcatatggctctggactattccatttgaggatcaaagtaccagataggaattctgctggagttgtcacagcttactacttaacttcacaaggaagaagtcatgacgagttagactttgaattcttgggcaatagagaagggaagccatatagattacaaaccaatgtgn

SEQ ID NO: 249030 - DNA, 521 bp, Glycine max
  unsure (1)..(521): unsure at all n locations
agtcagggtggtnttcgctgaggcattcactcatagcactgacgtaccggtccggaattcccgggtcgacccacgcgtccggttacctccaagcacaatgatgatgagcagtacgtttgggagtcccaagctggaggttcattcactgtcaccagggatacctctggtgaggttcttggcaggggtactaagatcactctcttcctcaaggaggatcagctagagtaccttgaggagcgccggttgaaggatttgattaagaagcattctgagttcattagctacccaatttctctttgggttgagaagactaccgagaaggagatttctgacgatgaggatgaggaagagaagaaggatgaggagggtaaggtggaggatgttgatgaggagaaggagaaggaagaaaaaaagaaaaagaagatcaaggaagtgtcacatgaatggtccttggtgaacaagcagaagcctatttggatgaggaagcctgaagagatcacaaaagaggagtattctgcttt

SEQ ID NO: 249031 - DNA, 518 bp, Glycine max
cggagcgctgactgagcaatagaatggggaagtaaatggtatacccgtccggaattcccgggtcgacccacgcgtccgctatatgctaatgagcctgctaatgcggaaaatccagttagcatgcctgttggtacagctgagccagaacgaacaagagatgctggtagtggtggcaatactaatcatgccagacctgctagcaatattgtaaacattgtaaagccagtaggctattcagcttcagtagccagtggaatgcaggatgttttagtaacctttgtggcttcaaagtctgatggaacagaagtgatggttgacaacaagtatctaaaagcatttaatccacttgttgtgatcaatttctatgagcagcatgttcgctacagccctacattgtgaccaaacagagaatagagtgtgcttttgagtttggagttaggttcacacgattgtgcttagttagtaggtttggtgaaaaatggcttacttttatagatgcagaaaatggtaagggtaaa

SEQ ID NO: 249032 - DNA, 460 bp, Glycine max
tcccgggtcgacccacgcgtccgcccacgcgtccgcaaaaagctcttttccttctaaatttgattccttagttaagcatcggagtaatggtatatggcttcttaaccttcctcaaaaaacaaaaccctaaagggagtacctggtggtgccggaaagaaacccattccactgggtgagaacgtcctgcaaaaccatgctgcattcttggacttgattaaaaatggtgtcatctacccatggaagacttttaaagggaaagtttccatcaatactttttccaattgaaattaaaaatatccaacgcggcaaacacggcagtgacactggagtctacgatcctgaaggaaggtagttgttcaaatatttcttttttcataccttaattgcttccattttagtcatctaattaattttaaaacatttgggttccatattaattttcatggtcatggataaatct

SEQ ID NO: 249033 - DNA, 520 bp, Glycine max
  unsure (1)..(520): unsure at all n locations
tgagacgtnctgagcctagctcagcacgtaatgcactgccgtaccggtccggaattcccgggtcgacccacgcgtccgcccacgcgtccggcaatccaaatcgctttgggcaagagaatgctatccaatagggaatcggcacgtagatcgaggatgaggaaacagcagcacctggaaggtctcagtgcccaattggatcagctaaaaaaggagaacacccaaatgaacacaaacataggcatcagcacgcagctgtacctcaacgtggaagctgagaacgcgattctgagggctcaaatggaagaactgagcaagagattgaactctctgaacgaaatgataagtttgattaactccaccaccaccaccaacaactgcttgatgttcgatgaggcacaggagactacgactcagttgttcaatgattgtggcttcatggatgcttgggaatacggaataccactcaatcaacaaatcatggcttacgctgancatgacatngtgatgatggatggattgg

SEQ ID NO: 249034 - DNA, 520 bp, Glycine max
  unsure (1)..(520): unsure at all n locations
tgtagtgtgcgtgacactgaaaagcacgatacgtactgctcgtaccggttcggaattcccgggtcgacccacgcgtccgttccttttgaaggttagaagtgctacaatacaaacaatggcagctactcaggaagatgtgaagcttttgggtattgtgggaagcccatttgtgtgcagggtccagattgcccttaagttgaagggagttgaatacaaatttttggaagaaaatttgggcaacaagagtgatttgcttctcaaatacaaccctgttcacaagaaggttccagtgtttgttcacaatgagcagcccatagcagagtctcttgtgattgttgaatacattgatgagacatggaagaacaaccccatcttaccttctgatccttaccaaagagccttggctcgtttctggtccaaattcattgatgataagattgtgggtgctgtatcgaaatctgttttcacggttgatgagaaagagcgtgagaagaatgttgaagaaacatatgaggctctn

SEQ ID NO: 249035 - DNA, 525 bp, Glycine max
  unsure (1)..(525): unsure at all n locations
agaggggtactgngcccctccnagtattgtaatagcactgccgtaccggtccggaattcccgggtcgacccacgcgtccgcccacgcgtccgcacaaactagtaaatagtaatattattcttcgaatccattttgttattcataatgggtgttttcacatttgaggatgaaaccacctcccctgtggctcctgctaccctttacaaagctctagttacagatgccgacaacgtcatcccaaaggctgttgatgccttcaggagtgttgaaaaccttgaggggaacggtggccctggaaccatcaagaagatcactttcgttgaggatggagaaagcaagtttgtgttgcacaaaatagaatcagttgatgaggcaaacttgggatacagctatagcgtagttggtggagttgggttgccagacacagtggagaagatcacattcgaatgcaaattggctgctggtgccaacggagggtctgctgggaagctaactgtcaaataccaaaccaaaggagatgctcag

SEQ ID NO: 249036 - DNA, 525 bp, Glycine max
  unsure (1)..(525): unsure at all n locations
tgagacgtaattgagtagtgggataggaagagaatgcttgtaccggtccggaattcccgggtcgacccacgcgtccgagaaaacgctgtgctgtggctgagaaggggaaaggcgcggttgaaagattgaaagctcgacatgtcagggaaaggcgcaaagggtttgataactgctaaggacaaagataagaaaaaaccaatttctcgctcctcaagagccggtcttcagtttcctgttggacgcattcatcgtcttctgaagtcaagggtgacagcacatggaagagttggggcaacagctgcagtttattctgctgccatcctggagtatttaactgcagaggtgttggagttggctggcaatgcgagcaaggatctgaaggtgaagcgtattaccccaagacatctacagcttgccatccgtggagatgaagaacttgataccctcatcaaaagaacaataactggtggaggtgttattcctcatatccacaagtcccttatcaacanatcttcgaaggaatgn

SEQ ID NO: 249037 - DNA, 520 bp, Glycine max
  unsure (1)..(520): unsure at all n locations
agaggtgtgctgagcatgcatgtgattcatngacgtaccggtccggaattcccgggtcgacccacgcgtccggcacaagttgaacttcgtgacgagcatgggaacccagttgaactaacagatgcatatgggaatccggtttggttaacggacgagaaaggcaacccggtgcacctcacggctgtggcaaccaatgcacacaaatctatgcttcagaatgacaccccacaagagcttcctcactccaagagttcaagctcgtctgaggatgaagggcatggagagaggatcaggaagggactgaaggataacatagaagaaaagttaccagctggagaaggagtagtgaaggagaataaacacaccacaattgctgcttctacttctacaacagatactagtgatgctaatcaccacccaaccactgagcatgagaagaagagtatcatagacaagattaaagaaaaattccaataaatcagcagtgaatattaatatatattcacgaattgaagctttn

SEQ ID NO: 249038 - DNA, 519 bp, Glycine max
  unsure (1)..(519): unsure at all n locations
ngagcgggctgaccatgataagcagtatattgatcgctgtaccggtccggaattcccgggtcgacccacgcgtccgctttttttctcctcttctgccctccacacaacttctctctcctctctctctctctacagatccttctttcttctcttcgctgctcactgtagcgtagccatggctttcagagttggaggagcgggaggaggaaatgcctcttctggcatgggtgttgctgagcatagcgtaagcacgttcctggaattgcagaggaagaaagttcatcgctatgtgatttttaaaattgacgagaaaaagaaagaggttgttgttgaaaaaactggaggccctgctgagagctatgatgatttcactgcatccttgcctgaaaatgaatggcgatatgctatctttgactttgattttgggacatctgagaacttgccaaagaaccaaatcctttttaatgcatggtcttcttcggtagccccgaattcgcctaagatgctatatgccacatc

SEQ ID NO: 249039 - DNA, 524 bp, Glycine max
  unsure (1)..(524): unsure at all n locations
agttaggtgcgctgtngactgggataagacgaatgacgcactgacgtaccggtctcggaattcccgggtcgacccacgcgtccggaaagaagaagaagaagcgttctttcggagagttcgaagatgtcgggcgttaccggcaacgacgaggaagacaagaagccaaccgaacagggagcacacatcaaccttaaggttaaggggcaggatgggaatgaagtttttttcaggatcaagagaagcactcaattgaagaagcttatgaatgcttactgtgaccgacagtcggtggatttcaactccattgcttttctgtttgatggacgccgcctccgagctgagcagactccagatgagttggaaatggaggacggggacgagattgatgccatgcttcaccagacaggaggttctgttgtctgaaggatgtgattactttgctcctcattataagtaggaattagttaacttagagctatgtatggcataagatacatattttattatctgctattatatacagc

SEQ ID NO: 249040 - DNA, 516 bp, Glycine max
  unsure (1)..(516): unsure at all n locations
ggaggtgggctgacgatgaatgggggatatatagtactgctctaccggtccggaattcccgggtcgacccacgcgtccgcccagattcaaccagttaaacttggaacccaaggctttgaggtttcaaaattgggattcggatgtatgggccttactggagcgtacaatgaccctctccaagaacaggatggcatatctgttatcaagtatgcgttcagtaagggaatcacattttttgatactgcggatgtttatggagccaatgctaatgaacttttggttggaaaggctttgaagcagcttgccagagaaaagattcagatagccacaaaatttggtattgcttcacgaggttttcctgatatgaagatcaagggttcgcctgaatatttgcgatcatgctgtgaaactagcttggagcggcttgattgtgaatacaatgatctctaatatcaacacagagtgtacacatntgtaaccatagaaggaaccgtggtggaactttaaaattgggcc

SEQ ID NO: 249041 - DNA, 529 bp, Glycine max
  unsure (1)..(529): unsure at all n locations
aggagggggnnnnnnncaactgagactcactccaatngcanttccgnnccggttcggaattcccgggtcgacccacgcgtccggactggagcatctgataatcttcgtgaatggtggaaggacaaagtccggtttgatcgaaatggtcctgctgccataaccaagtatcaagctgataacgctattccggggaagaatgatggatgcaatccgatcggtccaacaccacacaccttgcaagagctgcaagacacaaccttgggttctctcttgtcagcactcatgcagcactgtgatcctcctcagaggcgttatccattggagaagggcgttcctacaccatggtggcctaatggtaatgaagagtggtggccccaaataggtttgcctaaagatcaaggtcctccaccttacaagaaacctcatgacctgaagaaggcatggaaagttggtgttctgactgcagttatcaagcacatgtctcctgatatcgcacaaattcgcaagctcgtgaggcaatccaaatgcc

SEQ ID NO: 249042 - DNA, 520 bp, Glycine max
  unsure (1)..(520): unsure at all n locations
tgttggagtcctgtggcctgcnctcgtcgcacatactactgccgttccggttcggaattcccgggtcgacccacgcgtccgcccacgcgtccgcccacgcgtccgcccacgcgtccgcgcggagatcaatatttgatctaggtccatcgtcgatagaagatacgagaaaccaaaggcaatgtttttgtgggattggttttatgggattctagcgtcgctcgggctgtggcagaaggaggccaagatcttattcttgggcctcgataacgctggcaaaactaccttgcttcacatgctcaaagatgaggttttgttttccttttttttttttgtttccccaatcgtttacctttttttttattattattataagagttggttttgcagagattagtccagcatcagcctacccagtatcctacatcggaggagttgagtattgggaagatcaagtttaaagcttttgatctagggggtcatcagattgctcgaagagtttggaaagattactatgcccaag

SEQ ID NO: 249043 - DNA, 523 bp, Glycine max
  unsure (1)..(523): unsure at all n locations
agtaggggnnnnnnnnaactgaggatcgactctcatcgcactgacgtaccggtccggaattcccgggtcgacccacgcgtccgggcaggttcaggcccgggtacgcaaagcacgtgttgggcccaatgctgaagtttctgagggagacgagaacacccttgatggtgaacccgtacccgtacttcggttacaacgggaaaaacgtgaactttcttctgttcaggcccaaccgaggcttgtacgacaggtacacgaagaggagttacacgaaccagttcgacgctctgatggacgcggtgcactcggcgatgaatgctttggggtacggtgacgtggacatcgccgtcggcgaaacggggtggccctccgtttgcgacggttgggacgcgtgcagcgtggcgaacgcgcagtcctttaacagggaactggtgaagcacctggcgacggggaaaggaacgccattgatgccaaaccgaagcttcgagacttacatcttcgcgctcttcaatgagaaccaaaagcc

SEQ ID NO: 249044 - DNA, 490 bp, Glycine max
atccccgggtcgacccacgcgtccgcccacgcgtccggccacgcgttcgtccacgcgtccgcacaaaagtgttgcacttgagtgaaaagtagtgtgttaagaactaaacaatttttcaatggcgtccaagaaacaagatgagcgagctgaggcatctgcgaaagttgctgccaaagaactcgaacaagtcaacagagaaagaagagaccgtgatttccgtgttgctgctgaacaacaacaacatcatcatcaggaagatcaacaaaaacgtggtgtaatcgggttcatgtttaaagcggtgcatgacacctactagaacgccaaggaagctgtcgatggcaagaaagaagctactaataacgcgtacagtaatacagaagttattcacgatgttaacatttagaccgatgacgtgtcagctacgggggaagtacgggacatatcagccacatagactcatgatatctacgattctgtcacggacaacaac

SEQ ID NO: 249045 - DNA, 472 bp, Glycine max
  unsure (1)..(472): unsure at all n locations
cgcgtncgattttgattcattagagagaaaatacaagaaagtgttcgacgaatctgttgaaagtggtgactggatttgattcattcacataaccaatttatcatctctccgatctttcaatggattctgacttctggacctcgcgtcttgctgccgctaaacgccaatacacgcttcagcatcaccatccaaattctcacttagatcggatgggaatcgatgattctgatgtggaagaagaggtgagacctgattttccttgcccgtattggtatgaagactttgacatcgcgtctttgtcttctcatcttgaagatgaacattctcgtgaatcaagagtcacgatttgtcctatatgctccgttaaagttgcacggtacatgttaaatcacataacgctgcaacatgggcattgatctaagttacagagaacgcgcaggttaagaagagtcgctattccaaacagtcagac

SEQ ID NO: 249046 - DNA, 280 bp, Glycine max
ccgtccggaattcccgctcgacccatcctccgacgcgtacgcccacgcgttcgtacaaaaggatttcgcatgagagcagagctgagagacaaggggtaaatagtactccaatgtcgatcgctatacattcacaaacgagctgaggcagctgctaaagctgatgacaaagaactgggacaagtgacagagcacctagagaccgacaattccgtgctactgctgatcatcaactatcatcgttctcaggaagatcaacatgaccgtcgagttacaacgtcca

SEQ ID NO: 249047 - DNA, 395 bp, Glycine max
tcctgaattcccgggtcgacccacgcgtccggatgaaattgaacttcttgttgtctttgaacttgtgctatgctctttgctaaaatattgaacttgggcataataaaaaaaaaagaaaaaaaaaaaaaaaaaaaaaaaaaaaaaaaaaaaaaaaaaaaaaaaaaaaaaaaaaaaaaaaaaaaaaaaaaaaaaaaaaaaaaaaaaataaaaaaaaaaaaaaaaaaaaaaaggggcacctaatttaaattaactaactctactttttacaacatttcaaaatgtaaaaaccttgatggtacccaaaaaaaacaattttgtggcacatttttaaaaaaccagtaaacgtaaaaaccaataagttcccaaaaaaaaaccttttaaaaaaaaacccaatt

SEQ ID NO: 249048 - DNA, 358 bp, Glycine max
cccggtcttgaattcccgggtcgagccacgcgtacggtttgcttttcccctcctgagttctctcgctcccaccaacggcagggtcaggccacggggcgggccccacccctgcgcatacattgccatctgtttctcctgtttttgtttgtttgtttgttttccgatttccctttttacttttttttcccctttcttcctacacttagtttcttgggctgggtgggatttgcacagctgcagtcctggccccaggcagtcccccacactctccttctggcatcagtccctgccctctttttcacatagagcctggcttgggagaggggcttaactcttggtgtgcctggctgtctggtgt

SEQ ID NO: 249049 - DNA, 477 bp, Glycine max
cgggtcgacccacgcgtccggaggaagctccggcaggtgattatgccatcacagatttcaatgcaggtgctattgctgctgatggccagtggcctggtacaattgatcaatcatggagtgatgcagttccacaacctattccagcagcacctggtgtcaactggggggcacctgcagaagcacctgctgctgttgcagaaggagattggggtgaagctgttccaccaccacaacaaatccctgttcctccctctggaattgactctgtccaaccaactggctgggaataaactagtgttttttgatgctatgattttgccctgtccttcaatttagttgtctttcttagaagtaaaatatggatcagtttttttgtagcaaagcaacttggtttttttttttttctagtttgttatgagtggcaaaatattatttttaacatggtaaaaaacaaagactgaatgagctagttcggca

SEQ ID NO: 249050 - DNA, 363 bp, Glycine max
cgcctggctcgacccactcgtacagtcgtagattcaaagcgcagataccagtgcaggtgctaacccttataaggagccactcgtcctggtgcaattgaacaatcatggagtgacgcagttactcaaactattcgcactgcaaccatagtcaactatatggcacatgcataagcacctgttgctggtgcaaatagagattggcgtgaagctaatccaccaccactaccatccctgatattgctattgaattgactctgtccaaacaactggctgggaataaactcacgattttcgatgctatgatcttgcactgtgcttaaactgaattgtcctgcctagaagtaaactatggctcagagtttt

SEQ ID NO: 249051 - DNA, 492 bp, Glycine max
cgggtcgacccacgcgtccgcccacgcgtccgagttcttttctttagcagaagaagctttgaaaatatggtctgagaaggccgggaccttcagccctccacttttaatagtcattggtgatgaaaattgcgaccctaaggcacttaaatatgctctgggcaaaggagccgttgattatgaggattttctccagagtggagatccagaatatgcatggaaacccccagaggatgagtggcagagcatttcattgggttacacatccggtaccactgctagtccgaagggtgtggttttacatcaccgtggagcctatctcatgtctctgagtggagctcttatttggggaatgactgaaggagctgtgtatctttggacacttcccatgtttcattgcaatggttggtgttacacttggacacttgcagctctgtgtggtacaaacatatgccttcggcaggtaacaccgaaagcagtatatgaagccattgc

SEQ ID NO: 249052 - DNA, 455 bp, Glycine max
  unsure (1)..(455): unsure at all n locations
ccggtccggaattcccgggtcgaccgacgcgtacgctatgagtgccggaaatcgctgcccacagtgcaagggagagaaggttgtgcaggagaagagagtccttgaagttattgtagaaaaggggatgcagaatgggcagaagataacattccctggcgaagctgatgaagcgccggacacaattactggggatatcgtctttgtccttcagcagaaggaacatcccaaattcaaaagaaaggctgaagatctttttgtagagcacactttgtcccttaccgaggccttgtgtggcttccaatttgtgctgactcacttggatagccgtcagcttcttattaaatcanatccccggngaagttgtgaagcctgattcatacaaggctataaatgatganggaatgcccatgtatcagaggccattcatgaaaagggaaacttacattcacttcact

SEQ ID NO: 249053 - DNA, 422 bp, Glycine max
cgggtcgagccacgcgtccgcccacgcgtccgagttcttttctttagcagaataagctttgaaaatatggtctgagaaggccgagaccttcagccctgcacttttaatagtcattggtgatgaaaattgcgaccctaaggcacttaaatatgctctgggcaaaggagccgttgattatgaggattttctccagagtggagatccagaatatgcatggaaacccccagaggatgagtggcagagcatttcattgggttacacatccggtaccactgctagtccgaagggtgtggttttacatcaccgtggagcctatctcatgtctctgagtggagctcttatttggggaatgactgaaggagctgtgtatctttggacactttccatgtttcattgcaatgggtggtgttacacttggacac

SEQ ID NO: 249054 - DNA, 555 bp, Glycine max
  unsure (1)..(555): unsure at all n locations
gtntccggnnntnnacttagaaatcgatactctatgnatagaatctcattgaacgactccaccggtcttgaattcccgggtcgacccacgcgtccgcccacgcgtccgcccacgcgtccgcccacgcgtccgggaagactaacagacagtaagggcagagcggtggatttcaagaacacacttcttataatgacatcaaatgttggaagcagtgtgattgagaaaggaggccgtaaaattggatttgatctggattatgatgagaaggatagcagttataacagaatcaagagcctggtaaccgaggagctaaaacaatacttcaggccagaatttttgaataggttggatgaaatgatcgtcttcaggcagctcacaaaactggaggtgaaggagattgctgacataatgctcaaagaggtgtttgaaagactgaaggtgaaagatattgaacttcaagtgacagaaagatttagggacagagtggtggaggaaggttataaccctagttatggagctagacctctaagaagagccataatgcgacttttggag

SEQ ID NO: 249055 - DNA, 298 bp, Glycine max
cgggtcgacccacgcgtccgcgcattttgtaatttaatttagctaaatctaattaattattaggcgaagagttgtttttaaagatgaagctccttggttgttgaatccttatggtaattttgatttattattttatgtacttttattctattgtctcaatgatattaaggaaaagtcataaaataaaaataaaaaaaaaaaaaaaaaaaaaaaaaaaaaaaaaaaaaaacaacaataaaaaaatagtcataaaaatatatcacgtcaaaaaaccaaagataaagtctaaatgaaatca

SEQ ID NO: 249056 - DNA, 219 bp, Glycine max
tcctgtactcaacgaaacggttctttaatatattggggatgccaaccctcacaacgatcatcccacaactctccatggtcaacccgaacacaatccacacctcatttaccctgacaatattgttccccttcatgctacatatccaccttatcctcatatccccattgatcctcctttcaaacatctaaaccattcttaaactgatccttcttgtccttt

SEQ ID NO: 249057 - DNA, 489 bp, Glycine max
tgcggtgaccaactgcagcccatgacgttacgactgcaccggtccggaattcccgggtcgacccacgcgtccgagccgcccgcttgcccgtcggtcgctagctcgctcggtgcgcgtcgtcccgctccatggggctcttcgtgcggctgctggctctcgccctggctctggccctgggccccgccgcgaccctggcgggtcccgccaagtcgccctaccagctggtgctgcagcacagcaggctccggggccgccagcacggccccaacgtgtgtgctgtgcagaaggttattggcactaataggaagtacttcaccaactgcaagcagtggtaccaaaggaaaatctgtggcaaatcaacagtcatcagctacgagtgctgccctggatatgaaaaggtccctggagagaagggctgtccagcagccttaccactctcaaaccttcacgagaccctgggagtctttggatccaccaccactcatgtgt

SEQ ID NO: 249058 - DNA, 481 bp, Glycine max
  unsure (1)..(481): unsure at all n locations
ccgggtcgacccacgcgtccgattgaccatatcaaggcaggattgtctgtgttggcaaaatatagaaggcctatagttgtgcatgctgagattcaacaagattttgaaaatcatttggagcttaatgaggataaccttgatccacgtgcttacttgacctatctcaataccaggccaccttcatgggaggaggcagccattaaacaacttgtaagtgttacgaaggacacaagaaaaggtggccctttagaaggagcacatgttcacatcgtccacttgtctgattcaagtgcttccttagatctgattaaggaagcaaaaagtcatggtgacagcataagtgttgagacttgtcctcattacttagctttcacgtctgaagagataccaaatggggatactcgttntaagtgttccccacccattcgtgatgcataccacatagacaaattatgggaggctgtattagagggacacattg

SEQ ID NO: 249059 - DNA, 495 bp, Glycine max
gaatccccgggtcgacccacgcgtccgcccacgcgtccgatcactaccaattgctaaagatatttcactcactggtcacactactaatacagctttctggagatggcttcaactgtctcttacatgcttctacttccccttctagtgatggttgcctttgctggggacttaaacaaagactttgacatcacatggggagatggccgctccaagatactaaaccatggagagttactcactctttcattggacaaagcatctggctcaggttttcaatcaaagaatgagtatctctttgggaagattgacatgcagctcaagcttgtccctggaaactctgctggcaccgtcactgcctattatttatcttcaaaaggatcaacttgggatgaaatagactatgaatttcttggaaatctgagtggtgatccatacatccttcacacaaacgttttcagccaaggcaagggggacagggaacaacaattctatcta

SEQ ID NO: 249060 - DNA, 488 bp, Glycine max
aatccccgggtcgacccacgcgtccgcgtaggagccttacctctctctctctctctctctctctctccattccgtagtatccctctgtgcgacccttttacttagcattccctgtttccggtattcgctccctttttttttctgcattctgtctggttttacttagatctctgtcccgcaccagatctggtgcagggtgagagggttgggttcattaattttgtatcaatcttccttctgagcggtaggcgtggggataccagagtcttttcgggaagcaagagagggttctctccgttttcaatagatctctcactgtcttcttttgagggggaagccggggcctcggcctctgcggctgtcaaagcccccaccttcacagccctatcaacaaaaccctaaccctattgttctcttcttcattatctaattcaattttgatcgtcgccgtcactagagatgcctgtcctggcttgttgcgtggatgc

SEQ ID NO: 249061 - DNA, 306 bp, Glycine max
attcccggactcgacccactcatacactacttctagatctccaactaccacccttttttttttttcttcactttctattattaaatgaacttttctatatactggggctactctttacaattccctatttacatattcccacaacattattccaaacgctcttaaattcttcaacaatattttatacattcaattaaaatcatacccaacaaccatcaacaacatcactattctttaagatttacaaaccacaatttttctttacaaaatataaaacattcattataccaactttatatacaacta

SEQ ID NO: 249062 - DNA, 446 bp, Glycine max
ccggtcctgaattcccgggtcgagccacgcgtacggctggcaccaggagccgtgggcaagggaagaggccacaccctgccctgctctgctgcagcgagaatgggtgtgaaggcgtctcaaacaggctttgtggtcctggtgctgctccagtgctgctctgcatacaaactggtctgctactacaccagctggtcccagtaccgggaaggcgatgggagctgcttcccagatgcccttgaccgcttcctctgtacccacatcatctacagctttgccaatataagcaacgatcacatcgacacctgggagtggaatgatgtgacgctctacggcatgctcaacacactcaagaacaggaaaccccaacctgaagactctcttgtctgtcggaagatggaactttgggtctcaaagattttccaagatagccttcaacacccagagtc

SEQ ID NO: 249063 - DNA, 488 bp, Glycine max
  unsure (1)..(488): unsure at all n locations
ccgggtcgtcccacgcgtccgcccacgcgtccgcccacgcgtccgggtgattcctggggagtatggtttcattgctcagctgagggagggtcgccaggtcaagaagagaccaactgagtttcgtgttgataaggtcctccagccctttgatgaaaacaagtttaacttcactaaagttgggcaagaagaggtcctgtttcagcttgaggctagcaatgatggggaggctcaattctttccaaatgcacctattgatgttgagaattctcctagttttgttgccatcaatgtgagtcctattgaatatgggcatgttctgctgattccacggatttttaagtgtttacctcaaaggattgaccatgcaagcttcttgcttgcacttcaaatggcagttgaagcaaggaatccatattttaggttgggttacaacagcttgggtgcatttgcaaccattaaccatctncactttcaggcatattacttgg

SEQ ID NO: 249064 - DNA, 468 bp, Glycine max
aatctcccgggtcgacccacgcgtccgggatttggaaggattggccgtttggtggccagtgttgcccttcaaaggaatgatgttgaactggttgctgtcaacgatcctttcatcaccactgattacatgacatacatgttcaagtacgacaccgttcatggccagtggaagcattttgatgtgaaggtgaaggactctaatacccttctctttggtgagaagcccgtcaccgtttttggaatcaggaaccctgaggaaattccatggggtgaggctggtgctgattatgttgttgagtcaactggtgtattcactgacaaggacaaggctgctgctcacttgaagggtggtgccaagaaggttgtcatctctgccccaagcaaagatgcacccatgtttgttgttggtgttaacgagaaggagtacaagccagagcttgacattgcttccaatgctagctgcactacc

SEQ ID NO: 249065 - DNA, 487 bp, Glycine max
cgggtcgacccacgcgtccgcacaactccactctctctctctctctctgattcagcttcagcgaaatcgagttctaaccgtaggtcgtgcttttgcgtctgagaagccacttctctacttgcggttcttcttcttcaatttgatttgattcgcttgctggaaaattctttgagtgagggagaagatgtctggtggcacgcagaagagtctgagaaaagcacttggagcccttaaggatactacaacagtctcgttggctaaggtcaacagtgattacaaggaattggacattgctatagttagggccacaaatcatgttgaacgtccagctaaggaaaaacatataagagctatattttcagctatctcagctacaagacccagggctgatgttgcctattgcatccacgcacttgccaagcggttatcaaagacacataactgggcagttgcattgaaaactttaattgtcattcaccgtgctcta

SEQ ID NO: 249066 - DNA, 448 bp, Glycine max
accggtcttgaattcccgggatagaagagccttccatatatagcctctcaaaaaaatgaaaagtactacctatttggctctctgtggactttgtgccctgtcttgatcatatcagccttcagccaccgctgatattggattcggcaccgagagcaatcctagtcgaaacggcgtcacatactacgagacgacaggcataagaagaaagggccgtggaatagaatgtggcgaaacctatacagaaacatgccctctcactgttgtgcaatctacctttgatgtcgcaaagggtgtaccactgatcatatcatgcccagttatgatgcttgacatgatcgaaagacttatatcgagcctcagttgcacttatgtacccatgtgtgccctaactacgtctcggtggaccgggaatctaaagggtatgccagattaacaccatgtgagacta

SEQ ID NO: 249067 - DNA, 544 bp, Glycine max
  unsure (1)..(544): unsure at all n locations
gtntccggnnttnnnttagataggggcattaggatgggggtatatgggaaagctgcaccggtcctgaattcccgggtcgacccacgcgtccgtgcaatttggaatcggcatgtaaatttcaagttcttcccaaagcgctttgagatcagaatagagaatagttacagatcgagtaccttgagtgagagcgtaaatctcttgttgaatttctgaaacacgaaccaaatcaccttgtgagaaacgctctttcagatcgagccacacatcggaagcgttatccatgaaaacgatggatcgggaaattgaaggttcaacggagttgagaatccagctatgaatcaacatattgcagcgattccaagctcggaacgacggatcgaaggcatcaaccggcatcggaattgttccgtcaagaaattcgaacttgagtttggctccgagagcgcgtcgcagagacctcgcccaagaatggtagttggaaccatcaaagagtggtgtgaccttgacggacgagggaccgtcgctaggatgaacaaagaacgga

SEQ ID NO: 249068 - DNA, 413 bp, Glycine max
taattcccgggtcgacccacgcgtacgacaaatggttaaatcttcataaatatgtgtacttctattgcttaaagcaaaaagcatcatcttcggtccagttgccatatgttagaggaggcgcagcattcaaaaggatctgtttgttttaatggaacccaactacaataccatttcgacaacttattaaaataaggaattaaaaactccattgttcacattaatgaatgacgatggtgcaacaatgtatatagtcacctttaccataaggataatacgcttaggctcatctaacctaatgaacgatcttcacttttctacgctttttagcacccaccatgaatctaatccatatttctacaatttgaatagattccacgctaagtactctgatcacttatcatttacttatgatc

SEQ ID NO: 249069 - DNA, 480 bp, Glycine max
actcccgggtcgacccacgcgtccgaagagatggcttctcctcttcttactccttacaagatgggcaaattcaatctgtcccatagaggtgttttggcaccgctgaccagacagaggtcttacgacaacgtcccacaaccccatgccatcctctactactcccagagaacttccaacggaggccttctcattactgaagccactggcgtctctgacacggctcaaggctatccgcaaacccctggcatatggactaaagaccatgttcaagcttggaaacccattgtcgatgccgtgcacgccaaaggcggtgtattcttctgtcagatttggcacgttggaagaggttcagattcagcttatcagccaaatggacaagcacccatatcttctacggacaagccactcacaccccaaattcgaagtaatggcattgatcaagtacaatttacccctccaaggagattaaggactgatgaa

SEQ ID NO: 249070 - DNA, 491 bp, Glycine max
agaatccccgggtcgacccacgcgtccgcggacgcgtgggcaaaaatcagtagttatgtatctatctttactgaatgtagaccactttctatgagcatgggaaatgcaattaggtttgtaaagagtcgtattgtcaatctgactttaaatcattcggagtttgaggcaaaaacaaccctgtgttctgatattgaccggttcataaatgaaaaaataattcttgctgataaggtgattgtccgacatgcttttacaaaggttaaggatggggatgttcttctcacatatggattgtcatgtgttgttgagatgattcttttatatgcctatgagcaaggtaaaaagttccgtgtggtggtggtagattcacgacctaagcttgaaggtcaggccttacttcgtaggctagtggctaagggcctgagttgcacatatactcatataaatgctgattcttatatcatgcatgaggtcacacgggttcttctggg

SEQ ID NO: 249071 - DNA, 482 bp, Glycine max
cgggtcgacccacgcgtccgcggacgcgtgggcggacgcgtgggcttccacaaaggatggtcttgattatcgacatgaacatgcaaataggaccgagttccatgaccagtaccatgtcgataatcaagaccatccttccacaaaggaattcgagcaagaatatcaagagaatgcccatttgtcatggaattgggtcctattcgaatgttcatgaaggacctcacttaatcagtttcagaccacaggctcgaaatgtaccattgcaatcttccatgactgttacagatgaacctggttactatgaggatggagagtttgggataagattggagaatgtgcttattgtcaaagaggctggtacaaatttcaattttggtgatagaggttacttatcttttgaacacattacctgtgcaccatatcagaccaagttgattgacctgaaccttctatgtcctgaggagatagattggctgaactcg

SEQ ID NO: 249072 - DNA, 552 bp, Glycine max
  unsure (1)..(552): unsure at all n locations
agggcccgggnnttnncttagaaatttgatctgtatgnatcagaacctctattgaagagctccaccggcccggaattcccgggtcgacccacgcgtccgcacaattcattttcgaacgaacgtgtcacagaattctcgccttttccgaatatggcatcgcgcgtcagcattggcaatctcacttcctccgcgccgtatattaattcccctcattttcgctcacaacttaagctttccagcaactcctgtttgcacaagccactcatgcgcgacaagactgtgctggtaaccggcggagccggttacatcggcacccacaccgttcttcagctcttgctcggaagttgcagaaccgtcgtcgtcgacaatctcgacaattcctccgaggtttctatccaccgagtcaaggagcttgccggcgaatttgggaacaacctcttctttcacaaagtggacctacgggacaaggatgcactagagcaaatttttggttccacacaatttgatgctgtcatacactttgctggactgaaagcagtaggagaaagtgtg

SEQ ID NO: 249073 - DNA, 556 bp, Glycine max
  unsure (1)..(556): unsure at all n locations
tgggctgggncttnnncttgaggcttagctcatcattgaagcagattatataggatcgctctaccggtccggaattcccgggtcgacccacgcgtccgcaatagtgtcgttcccatatgaatgttccggtatgtatccttcttgcatttcggtgcctagggggaactgatttagagatatatgggtactcaatattacccaacactcgatgggtattcagaaaaaagccgcgtttcctgtttaacagaaggttgtaaacatcgaatagaagacaagtgtcatgttaaaccggagttggcgattgcgaatacaatgatgggtggatggctaatttagtcttgctctgcattggaaactcaattgtctttgtggctaatctttagcgaaataacgagacatagtcaacgagagtgcagtttgcaagtctggcttaaagctagaatgtcaggccttacttcgtaaagctgtagtgctactgacctgagttgcacatatactcaaagttgaggctgtcttatagatcatgcgtgaagtaagccggattacaatgtgatcc

SEQ ID NO: 249074 - DNA, 553 bp, Glycine max
  unsure (1)..(553): unsure at all n locations
tggggtgcnnnnttnnnctatgaacctgcnactcatcgnataagaactatatagaagtgctctaccggtcttgaattcccgggtcgacccacgcgtccgcccacgcgtccgcgagaagtatccaacaatgactaccacccgtgttgctatctgtctttgctgtgcattcctttactacgcggctgatggagccaaggttagtttcaataacaagtgctcatacacggtatggccaggaaccctaaccggtgaccaaaagccccaattatcaacaactggtttcgagttgggtccaggagcatccaactctgtggaccttccatctccatggtccggtcggttctgggcccgaacaggatgctccaacaacaacggaaggttcagctgcgccaccggcgattgcgcctacggtcaagtcgcatgcaacggtgccggtgcaatcccgacagctactttggtagaaatcacagttgcagcaaacggagggcaagatttctacgacgtgagcaacgtggatggcttcaacgtgcccatgtccgtaaccccacaaggg

SEQ ID NO: 249075 - DNA, 414 bp, Glycine max
cgggtcgacccacgcgtccggatggttgagatttctggggtcatactgtatagtattgaaagattgcttgcctgatgtgacaatcagtttgtaaatgttgctaaatgataatgtttagcattgccaaaaaaaaaaaaaaaaaaaaaaaaaaaaaaaaaaaaaaaataaaaacatatatacaaaaagagagaaacactataataaaagaaacaaactacaagaaaatcatgaagcatgagatctgaaccaaacatgtacatttgcagatatacaaactcatgagcatgctaagtgctttcattcgggttgtgcagaaagagtataaatacttcttacgagctactcatcactagcggaacctattcataaatgacatcttaagcaaaaaactttttggccttgatcttatttgga

SEQ ID NO: 249076 - DNA, 480 bp, Glycine max
cgggtcgactccacgcgtccgcccacgcgtccgctggttagttctttgcagaaacaaaattctccctattttccgccacagaacagcaggaagaaagtgcatccaaagaatgctgattgtaactcatttattatgttaggctttggtttaaaagattctgtcgtatgcataatactgtcctaattttcaggactcacagatgctatacattttttccccttctcagcatatctgggaggaagttaatgttaaataacttgtacaacaatgacacaaaggcagcaggaagttatctgcggtcatggtttctgcttggcaataactaaaaatcaactttttgaaaaagcaccaatggtgttagtcggggattgatttctcgaaaaggtggcttacaacttatcaatgggagtaaaactgccattggtactaaatacaactgtgcaaattgtggttcctgatgatgctattggctctgtatat

SEQ ID NO: 249077 - DNA, 490 bp, Glycine max
  unsure (1)..(490): unsure at all n locations
tcccgggtcgacccacgcgtccgctggcttggttgggggattgggtttaacaccaagctgcaacattggcgagggaggtattgcagttgctgaggctgtacatggttcggcacctgatattgctggaaagaatttggcaaatccaactgctttactgctaagtggtgttacaatgttgcgccatttgaacctccatgacaaagcagaacagattcaaaaagccatcctgaacacaattgcagaagggaagtaccgaacagctgacctcggtggcagttcaaagacaactgaattcacaaaggcaattattgatcatctttagattttggttttggagtcagcaagaaattcttgcttatgattntgattttcagtcaattntctatttattaacccaattaatccgaaagagtgggattacctcagcttaaaggaaaactcacccatgtgtgtgacattttacaaccaaagacatggaatgggcaggctt

SEQ ID NO: 249078 - DNA, 453 bp, Glycine max
  unsure (1)..(453): unsure at all n locations
cgcctgcgccgacccacgcgtccggataggcggaagcaccaatcagcaacagnggcgagggaggcaangaacgggggccgaaagcagggcatggatcaacacctgatattgacggaaagaatttggcaaatccaactgctttactgctaagcggtgttacaatgttgcaccatttgaacctccatgacaaagcacaacagattcaaaaagccatactgaacacaattgcagaacggaagtaccgaacagctgacctcggtggcacttcaaagacaactgaattcacaaaggcaattattgatcatccttagactttggctttggagtcagcaagaaactctagcttatgatttcgaatatcagtcaattgtctatgtattaacccaattaatccgaaagagtgggattaccttagctcaaaagaaaacttacccatgtgtgtgacattttaca

SEQ ID NO: 249079 - DNA, 339 bp, Glycine max
gaattcccgggtcgaccgacgcgtacgctggagtttcagcttggacactgagccaatcagacaagcaaagcaagccaggacagaccgtcctgccccaagcccagcttgtctcctgccttccaacgccatggggagcaatctcagcccccaactctgcctgatgccctttatcttgggcctcttgtctggaggtgtgaccaccactccatggtctttggcccggccccagggatcctgctctctggagggggtagagatcaaaggcggctccttccgacttctccaagagggccatgcactggagtacgtgtgtccttctggcttctaccccgtccctgt

SEQ ID NO: 249080 - DNA, 343 bp, Glycine max
  unsure (1)..(343): unsure at all n locations
tcgttccacgcgtccggcgtcgccttcttcgctgcaactatctaccttacctctttttgcgaatctgaatcgaaatggggtcngatactgagagcggcgcttttcaggccgttatcaatcatgtcctcagtctaataatcaacaccttctacatgcaacaagtgagatctaacttcatgagctcatcagcaatgcactctgacactttggacatgaaccgatctgagagtcttacagacaacagctagcttgatgctcagtcaatagatgacattcaaattattcttgaacagaccaacatcacattgattatcatccacagaagtatcggcatctctaaagc

SEQ ID NO: 249081 - DNA, 481 bp, Glycine max
cgggtcgactccacgcgtccgcccacgcgtccgcccacgcgtccgctaatccttcacttgtttgttttgtggtgtattattacattttgcaccatgccttctctcttcgctagaaaccagaggttctcattggctactctcctgcttcttctggaactattgacaggaaaccttcgcatggcagatgctcaaattggtgtgtgttatggcatgctgggcaacaatctaccgtcagcaaacgatgttataggtctttatagatcaaataacataaagagaatgagactctatgatcctaatcaagctgctctagaagcacttagaaattctggcattgaactcattcttggggtgccaaactctgaccttcaaagccttgccaccaatcctgacacttctcgtcaatgggtgcaaaaaaacgtgttgaacttttggcctagtgtcaaaatcaagtacgtggcagttggaaatgaagtgagtc

SEQ ID NO: 249082 - DNA, 413 bp, Glycine max
ccgggtcgacccacgcgtccgcccacgcgtccgaagttctgaaaatgagttccaaggttgtgcttgttctacttatgttcttggccactatacttgtgatctcctctgaggttgcacccgatgatgcatacgagaattttgacaaaatagatgggaagcctagtgcagatggggtagatgaaagcaagtattggcgtggcggctatggtggcggctatggtggtggttatggaggtgggcgtggaggctatggaagtgggcgtggaggctatggagggggacgtggtggatatggcggctgacgatgtggctatggtggcaggcgtggtggctatggcggcagtcgtggtggccgacgttgtggctatggtcctaatgaacataacgaggctggtgttgatgcttaccctcac

SEQ ID NO: 249083 - DNA, 376 bp, Glycine max
cggccttgaattcccgggtcgacccacgcgtccgcggacgcgtgggccgcagctgcttgtattcgcaccgcaaacagtgagccatggtcgtctgaaggaacaagcgcatcttcaaggggaagaagggtggcaagaagaaggcagctgatccctttgccaagaaggattgatatgacattaaggctccttctgtgtctcaagtgaataatgttggcaaaaccctcgtctctcgtactcagggtaccaagattgcttatgaaggactcaagcatagagtgtttgacgtctacttggctgatcttcacggggatgaggatcatgcattcgagatgattaggctgagagctgaagatgtgcaagggaagaatgttctgac

SEQ ID NO: 249084 - DNA, 323 bp, Glycine max
cgcccacgcgtccgcccacgcatccgcacaaaaggggtccactagagagaaaagggggcgcaaggggaaacaatcacacaatggcgtacaacaaacacgaggagcgagctgaggcagctgcgaaagttgctgccaaagaactcgaacaagtcaacagagaaagaagagaccgcgatttcggtgtcgctgctgaacaacaacaacaacatcaccaggacgatcaacaagaacctggcgtaaacgggaccatgtctaaggcggggcatgacaactccgagaacgccaccgaagctgaccttggcaagaaacaagctacaaataac

SEQ ID NO: 249085 - DNA, 491 bp, Glycine max
tggcgtgctgcgctagcccatgatgcactgcacttaccggtccggaattcccgggtcgacccacgcgtccgcccacgcgtccgcccacgcgtccggagtatgttgttttcgacgaggctgattgtttatttggcatgggtttcgccgagcagttgcatcagattcttgctcagctcggggagaaccgtcagaccttgcttttcagtgccacactgcccagtgctcttgctgaatttgccaaggctggcttgagagaccctcagcttctccgcctcgacttggaaactcgaattagccctgacttgaagcttgccttcttcactttgaggcaggaagagaagtactccgcgttgctgtatttgattagggagcacattggttctgatcagcagacattgatttttgggtccaccaaacctcatgtggaagttctcaaccttttggttcctgaaaaagggtttgagccatttggggggtattgcgacatggat

SEQ ID NO: 249086 - DNA, 181 bp, Glycine max
cacgcgtccgtccacgcttccggatattttgtttcgacgaggctgattgtatgtgcaggttttacgacgggcagttgcatcaaattcttgctcagctcgtggagaaccgtcagaccttgcttttcagtgccacactgcccagtgctcttgctgaatttgccaaggctggcttgagagaccc

SEQ ID NO: 249087 - DNA, 497 bp, Glycine max
tatgagactcgatgtcacttacgtaccgctccggaattcccgggtcgacccacgcgtccgtcgagatcgacgacgatctgaaactgcgagcattttgggacaagaggatctcacaggaggtcatcggagatgcactcggtgaggaatttaagggctatgtcttcaaaattaccggaggttgtgacaaacaaggatttccaatgaagcagggagtgctgactcctggtcgtgttagacttttgcttcacaggggaactccttgcttccgtggatatggaaggcgtaatggagagcgtaggagaaagtctgttcgtgggtgcattgtcagcccagacctctctgttttgaacttggtaattgtgaagaaaggtgagaatgatttaccaggattgactgatgttgagaagccaaggatgagaggcccaaagaggagctaatccaaaattcgtaaactgttcaacctgtctaatgaggatgatgttaggaagtatgtcaat

SEQ ID NO: 249088 - DNA, 445 bp, Glycine max
gaattcccgggtcgacccacgcgtccggcaaagtgttgctttcagcacaaaagcacttgtttcatccatgcttaattacattcgctgcatgttttcaagcaagcgttttcattggaggcctttcatatggagttgatgatcagtctcttaaggatgtattttctgactttggagatatggttgatagtaaatttggctcactttcattgctgttacatggtgtcctatttcaaccacccgccagcctcactttaccatatgttcttcagtttcctttgttgtcattataatttttccatggcattataatcacagcaagcgtagcattttatgtcattcctaaataactataattgtttttgtgctgatgtattcaatggaaaatttcttgggttttcttaaaaaacaatatattttatattttttatgttattttttttatttt

SEQ ID NO: 249089 - DNA, 509 bp, Glycine max
  unsure (1)..(509): unsure at all n locations
ggagccgtatgaatgacngtagttacaatagactgacgtaccggtctcggaattcccgggtcgacccacgcgtccgcccacgcgtccgattaagaaccctccagaagttaagaaaggatccaaagacaagaaggcgatgaggagagctgagaaggagagacagaaggaaggtgaattagctgatgaggaacagaagaaagtgaagaaagaggttaagaagaaaggctcttcatcttctaaggatggcactgctaaatcaacctcttctaagaaaaaagcaagtggctctgatgaagaccacacttcacctactcacagtcaaattgacgagaaagaggaggctccagatgaagatgatgacgacgacgtgcaatggctgacagatacatcacttgatgctgcccgtcaacgtatccaagaacagttaagtgctgtgacagctgataattggttatgctttctacagatgaaccagagaagaagaaaaaaacaataagtaacagaaatgg

SEQ ID NO: 249090 - DNA, 451 bp, Glycine max
ggaattgaattcccgactcgaccgacgcgtccgatgatattctcatacttaatagttgccggatagcgtcactgaattgagctgttagagtacgctagagtttatttcagctggcaaagttacgagagaatacgaatctttgaggcatgactggttgatctggctgtgtctgggaccccaccatcattgatatttttcattctacatatgtatttaatgccagtaacgactaatgttgtctggcaagcactgcccaaattgacttgaactataaacaaccatgtgggttcccaattgaagcaatttcaagtgaaaaagagtggtactttttcagccccagagacaggaaatacccgaacgggtctcgacccaacagagtagctgggtcgggttattggaaagccaccggaaccgacaagatcatcaccaccgaaagtagaaaagttggcat

SEQ ID NO: 249091 - DNA, 540 bp, Glycine max
  unsure (1)..(540): unsure at all n locations
cgagctgtngtgtcctagttgactccgtatgatctaccggtccggaattcccgggtcgacccacgcgtccgcgaacctcaacaacgctgaacgcagaaaggggaaaaaggggattagggtttaggaagcagcgacaacaatggatttcacagcggagaagaaggaatcagagagcaacaccgaaaatgctcatccaacaactttagattcttcttctcaattggcatcggcacttgattccagcaacaaagaaatcgaagaacgacaagctcgtgaactcaaagccggtcttcaccccctcaagcacaagtttgtcttctggtacacgcgccgaacacctggagttcgaaatcaaacatcatacgaggacaacataaagaaaattgttgaatttagtacggttgaaggattttgggtctgctactgccatcttgctcgtcccgcttctttacctagtccaacagatttgcaccttttcaaggaaagaatccgtcctctatgggaggactctgctaactgcaatggtggtaaaatggatat

SEQ ID NO: 249092 - DNA, 505 bp, Glycine max
accggaattgaattcccgactcgacccacgcgtccgaccacgcgttcggccgtattttctgctggtatatgaaggtggagaagagagcaggggaaggataatggtgacggaccaggatatatctaaaggggtggcgtctctactgcgtcactctggcccatactccataactacggttaacagtgtcgatcatcatcttgaggcctaactatggttagacctctatcacatggccatgttcatcagagaccagatcgaccatcttctacggactctatcacaagcattagatcctaactcttctacacttcacaaagactattttgcccctcacccccaaccgcactttccgaccacccactttccttcccattttgccctccatgacgagatcaactttcagcagcacccccgcgctcctacaccgtgcaaagttgagacctttcctcctcaaaatgctcacactgttgccccttctcaagtgcccaaagaaagtgttcaaact

SEQ ID NO: 249093 - DNA, 454 bp, Glycine max
aattttgggtcgacttatgcgtacgctgcattcaggcttagctcgcttaccacaccacaccatatggctagttgctgtatccatgtgacctggctgatcggctcatcttctttttctgtttgccttgtgtatatcaagaacaaaggttgtcaccattgatgtacgtgcagtcaagagtctcatccaaaccggttccatttatcttgatgttaggactgtggacgagttcaagaaagggcatgtgtatgcagataatgtccttaacattccatacatgttgaatacacccaaaggcaaggtaaagaatggtgactttctgaaggaggtttcattatcttgcaacatagaatatcatctcgttgtgggttgtcaaagtggggtgagatctctgtatgcaaccctgctgatcttctatctgatggttttaagaatgcgaaagacatgggaagaggtt

SEQ ID NO: 249094 - DNA, 354 bp, Glycine max
ccggtctctgaattcgacgcacgcgtgacgctatctctctcgctctttcagctatcacttttgggtttaactaaagactactcaaaatggtgaactgcacaatttaaaagctgcgtggcattatcgactataatcataatatccccaatatgtctgtcattgctcatgttgatcactcaaaatcaaccctgactgattctcttgtcgctgcttcttgtattattgctcaagaagttgcatgtgatatccgtatgactgataccccttcacatgaagctcaacgtattattacaatcaactctactactatctgactctactatgaaatgactgattaagctctcaaaattttta

SEQ ID NO: 249095 - DNA, 376 bp, Glycine max
cggaattcccgggtcgacccacgcgtccgcatgtatggaatatggtgcttcatcacggtcctgttgttctccccagtggcgttttcggagactgtgcaacccacaggacaagaaagtgctgctccaaatcaagaaggacttcaacaacccttacctgctagcctcctggaaccctaacaccgattgctgcaactggtactgcgtccagtgccaccccgaaacgcaccgcatcaactccctcgtcatattatcctctgttccccaaaccaatttatccggcccaataccaccctccgtcggtgacctaccttttcttgagacccttcaattccacaagctccctaaactcaccggcccaattcagcccactatagcc

SEQ ID NO: 249096 - DNA, 521 bp, Glycine max
  unsure (1)..(521): unsure at all n locations
gggtnnaggtaggagttcttgtgatgaacatgatgctcatgcaatgctcgtaccggtccggaattcccgggtcgacccacgcgtccgcccacgcgtccgctcgctcagagatcattgaagcatgttcctgttccttcccacaacttgattttggagtacactttcctcagtcagcgggggtactaccctgattcacctgataaagaaaaccaagatagtttctgcatcactacacaactccaaggtaaccccaatgtccatttctttggtgtctatgatgggcatggccaatttggtagccagtgttcgaattttgttaagcataggctggttgagaagttgtcaaatgaccctgcattgttggaggaccctgttcaggcttacaattctgcattcttggcaacaaatcaagaattgcgtagtactagtgagattgatgattctatgagtgggcaccaccccgcgattacggtgcttgttattggtgacactctttatgttgctaatgttggtgattcaaa

SEQ ID NO: 249097 - DNA, 508 bp, Glycine max
  unsure (1)..(508): unsure at all n locations
ggatgccgtttgagttgaaccctgcngctcatccgactgccgtaccggtccggaattcccgggtcgacccacgcgtccgggataggaattatttacttgttgtctggattcggcgggagtgtactatcttccttattcattagaaacaacatttctgttggtgcttctggtgctctttttggacttcttggagcaatgctttcagaacttatcacaaattggagtatttatactaataaggcagctgctttgttcacacttctgtttattattgtcatcaatcttgccattggaatgttaccacatgttgataactttgctcatattgggggattcctcacaggatttctccttgggtttattttgctgctccgccctcagtttgggtggttagaacaacgacgtccccctgctggtgttcgcctcaagtcaaaatacaaggctttaaaccaatatgttctatggattgtctcggccattttactaattgttgggttatctattgctc

SEQ ID NO: 249098 - DNA, 524 bp, Glycine max
  unsure (1)..(524): unsure at all n locations
ggtgtttattaagttatgcgtntntttgataaactagtaccgatagcactgccgtaccggtccggaattcccgggtcgacccacgcgtccgaaaaaatatattttacaccccagaggggctataattggagataccattgtttctggtacagaagttcctataaaaatgggaaatgccctacctttgaccgatatgcccttaggcacggcaatacataacatagaaatcacactcagaaagggtggacatttagctagagcagcaggtgctgtagcgaaactaattgcaaaagaggggaaatcggccacattaaaattaccttctggggaggtccgtttgatatccaaaaactgctcggcaacagtcggacaagtgggaaatgttggagtaaaccagaaaaatttaagtagagccggatctaaatgttggctaggtaagcgtcctgtagtaagaggagtagctttatgaaccccgtagaccatccgcatggaggtggtgaagggagggccacaattggtagaaa

SEQ ID NO: 249099 - DNA, 386 bp, Glycine max
taccggttcggaattccacggctcgaccgcacgcctccggaactacatcgcttccgcttcctcttaactgtcgtacactcatatccttttatctccagtgcaacaataagctcacatcataaaaattcacctatgcaatcctaatctcatttctacacttgatcccattaaatctatatcaaatcaagcagggcatgacccgtctcgcctaatactacattcctctctacgacttctagaagcacaaggtccaataccatgttcatccgctcgattataacacataccctaaatacacaaattacgtctagtctcgtacccacaagataatttacaagcgaaaatctgatgtatttctctaactctttgatgatatcactgctaat

SEQ ID NO: 249100 - DNA, 450 bp, Glycine max
cggaattcccgggtcgacccacgcgtccggatcatcgccgtgcaacaaatgtcagtgccagactggatgctcaacaaaagaagctcaaggttccggtccttccaaccaccactattggatccttccctcagactgtagaactgatgagggtacgccgtgagttcaaggctaacaagatctccgaggaagagtatgttaagtcaattaaggaggaaattcgcaaagttgttgaacttcaagaagagcttgatattgatgttcttgttcatggagaaccagagagaaatgatatggttgagtacttcggtgagcaattgtcaggctttgccttcactgttaatgggtgggtgcaatcctatggttcccgttgtgtgaaaccaccaatcatctatggtgatgtgaaagccgtccaagccaatgactgtcttctgtcatctctggctaaagctt

SEQ ID NO: 249101 - DNA, 512 bp, Glycine max
  unsure (1)..(512): unsure at all n locations
tgggttatggttgacgtgaccagcnccgtacggactgacgtaccggtccggaattcccgggtcgacccacgcgtccggccatggagcgcatcatctgcgccaagtacaagctaggtcgcaagatcggaagcggatccgtcngcgaaatctaccttgcgacgaatattgataccttcgagatcgtcgccgtcaagatcgagaacggtaaaacgaagcatccacaattgctttacgaggccaagctctacaatattcttcaaggaggaagtggcatcccgaacataaaatggtgcggcgtagacggggaggataatgtgcttgttatggacttgctgggacctagtcttgaggatctttttgtctactgtggaagaaagttctccctcaaatctgtgttaatgttggccgatcaaatgatgactagaatagaatatgtgcattctaaagggaatttcctacacagggatataaaacctgacaactntctcatgggacttggtcggaaggcaaac

SEQ ID NO: 249102 - DNA, 512 bp, Glycine max
ggtatagtaggcggttggctgaagactagagcatctgcactgacgtaccggtctcggaattcccgggtcgacccacgcgtccgcgaaccgcactctttatctctttctccgccgcaaactatccttctccggcggcgccaccgtacaaccctcgagttaagcaaaggagcaacagaaggaagtgcttggttgcaaatggcggccaccgcaagcaacaacgacatcgtcgtcaccgtcgacagccctttgatgagcctaatcaacaagcgcctccgcgccctccgcaagaagctgaaccgcatcctcgccatggaagaggccgtcacccagggcaagcctctgaacaaggatcatgaagaggttctccgctccaaaccatccgtccttgctctcatcgacgagctcgagaagctacggcagcctctcgccaccgaactatacgaagagcttactaaaacaacgggaccttctttaaaactctcgctagaccgagacctagaccgaaaacgaaa

SEQ ID NO: 249103 - DNA, 512 bp, Glycine max
  unsure (1)..(512): unsure at all n locations
gggtgcgcgtgtgcctgatnaactagnagtgataggactgacgtaccggtccggaattcccgggtcgacccacgcgtccgcccacgcgtccggttgccattctcatcctcttctttctctctctaccattgccatggatgcctacaagcaccggccatccagcgccttcaattctcccttctggactacaaattctggtgctcctatttggaacaacaactcctctttaaccgttggagctagaggtccaattctgctggaggattatcatcttgtggagaagcttgcaaattttgatagggaacgtatcccagaacgtgttgtccatgccaggggcgctagtgcaaagggtttctttgaggtcacccatgacatttctcacctgacatgtgcagatttccttcgagcccctggagttcagacgcctgtaattgttcgtttctcaactgtttcattcatgagcgtggtagccctgaaaccttgagggaccctcgaggttttgccgtgaagtn

SEQ ID NO: 249104 - DNA, 513 bp, Glycine max
  unsure (1)..(513): unsure at all n locations
gtattagtagccgattgcatgatggctgatnactgctaggactgacgtaccggtccggaattcccgggtcgacccacgcgtccgcccacgcgtccgcttaaaccctagccgctcttctcttcattcttcactttggaaacaatcataatggcgttctgtaataaggttggaaatgtcttgaggcagggtgctgctcgcagcacacatgcccctgttgcgtccatgcttaattacatccgctgcatgtcttcaagcaagcttttcattggaggcctttcatatggagttgatgaccagtctcttaaggatgcattttctggctttggagatgtggttgatgcaaaagttataactgatagagacagtggaagatcaaggggatttggatttgtcaacttctccaatgatgagtctgcaagttcggcactctctgcaatggacgggaagggatccctaaatgggcgaagcattcgggtatcctatgcaaatgataaaccatctgcacctcgacct

SEQ ID NO: 249105 - DNA, 542 bp, Glycine max
  unsure (1)..(542): unsure at all n locations
tgagcggtgngtgtgccacgctancatcgnatngcacgtaccggtccggaattcccgggtcgacccacgcgtacgaacatgttctacaatatggagagcagaatattcgccgagcagttcctttggcccttggtgggctgtgtatatcaaatgcaaaggtcaatgttatggatacgttaagcagacttagccatgatactgattcggaagtagctatggcggcagctatatgcttgggtctaataggtgctggaacgaacaatgctcgaattgctggcatgcttcgcaatctttcaagctattactacaaggataccagccttctattctgcgtgcggattgcccaaggtcttgtacatttgggaaagggcttattaacccttaatgcatatcattccgatcgcttcctactatcaccgacagcacttgctggattaattaccatgttgcatgcttgcctagacatgaaagctattgtgctgggaaaatatcactatgttctctactttctcgttttggcaatgcagccaaagatgttgttg

SEQ ID NO: 249106 - DNA, 463 bp, Glycine max
  unsure (1)..(463): unsure at all n locations
gtcttgaattcccgggtcgaccgacgcgtccgtgcatttctatttctaactaattattgtgcttattattattgttgagaaagaaaagaatggcggattaataaaattgtttgagttgaacacaggggccaagattccttctgttgggttagtcacttgtcaagctgaacctggtgttgtagccaaagctgtcaccacatccattctggttggatacaggcatattgattgtgctcaagcgtataacaatcaagcagagattggatctgctcttaagaagctttntcatgatggtgtggtgaagcgtgaggacttaatgatcaccttcaaactctggtgtacagatcatgcttcaatagatttgcccaaagcattggattaaacattgcaggattttccacttgattaccttgacctctatctgatccaatggtcaatgcgcattaaaagcctatcagtttga

SEQ ID NO: 249107 - DNA, 433 bp, Glycine max
cgggtcgacccacgcgtcacgccacgcgttcgaccacgcgtacgtccactcgtcctagaatcttcctgagcgaacttatggatcagtgcttattccacttctgccagacgataatagagctggcgaaacaactcgcaaagggttttattcgtatgatgataaacgcaaggctagtcctgatcctgaattgaagaactatattgagaaggctaggagcatttctggtgtctccggagatccaaagcttgccaaattacaagaaaaggatatcatatagatgatattctttcctgcggtgaatgaggcttgtcaggtccttgatgaacgtatcgcattcaaagcagcaggaccttgatatttcttctatcatgtggcaatgggttttttcccccttacaaggggggcatgcattcatatatctgggcttgattct

SEQ ID NO: 249108 - DNA, 462 bp, Glycine max
  unsure (1)..(462): unsure at all n locations
ccggaattcccgggtcgacccacgcgtccgggaagttttggggtttgaatctatagaatagaatcaaaccaaattgaaagaagatcgatcgatcgatcgatggctctggtcggagttgaagtgaagcatgcggcggagggcgcaccggaggagaattgctccgccaagcccaccaagcagggcgagggcctccgccactactattctcacaacatccacgagcatcagctccttctccgtcaaaagacgcataacctcaaccgtcttgaggctcagagaaacgagctcaattccagggtgaggatgctgcgcgaagaattacagcttttgcaggaaccaggctcttatgttggtgaagttgtcaaagtcatgggcaagaacaaagtccttgtcaaggtccaacnccagaaggaaaatatgtcgttgatattgacaaaagtattgacattacaaagattactc

SEQ ID NO: 249109 - DNA, 516 bp, Glycine max
  unsure (1)..(516): unsure at all n locations
gattattagttatgccgtntgncctgatgcctgcnactcatcgcactgccgtaccggtccggaattcccgggtcgacccacgcgtccgaaaagcatataagagatggggttagaagggaaggaaacgccgtcgtttatgagggattgtgtcgataagtgtggtggctgcgccgttattgacggtggttttgccactgaacttgaaaggcatggggcggacctcaatgacgaactctggagtgccaaatgccttattagctccccacatcttgtccgaaggatctgcagtttcacacgagtgatcaaaggaatgggaaaaaaatgttcacctagattacctcgatgcaggagcaaacataatattaacagcatcttatcaggccactattcaaggttttgaggccaaagggttctctagagaagaaggtgaaactatgcttagaagaagtgtggagggattgcacgtgaggcacgagaaatttattatgataggtgcaccaaagattcttctgactt

SEQ ID NO: 249110 - DNA, 510 bp, Glycine max
  unsure (1)..(510): unsure at all n locations
gttatgccgtntgtttgacgccacgtacagctgcactgacgtaccggtccggaattcccgggtcgacccacgcgtccgctttatataacctaattgcaaagatgaataccaagcccgttttcttcttgtgcttcctgtgtgcactgcttctcatctctgttgtggcaactgagccatccaaagatgagacacaagaagaaccaaagacacagccagatgcctggggaagaggtggaagtggggggcatgatggaagctggggacacggtggagactgggggcatggcggaggaggacacggtggaggacatggcggaggaggacacggtggaggacatggcggaggatgcagatgctgcggtcgaaagggctgcaaatgttgctgaagtaaaaatcacaaatatatgaactgaacacactcatatacttgagtgtactccatgtaataaaactagtatatatgtaagaaataagaaataaaagcatggactctatccgtgcttgggctgg

SEQ ID NO: 249111 - DNA, 517 bp, Glycine max
  unsure (1)..(517): unsure at all n locations
gtctattagggatgccgtgtcccctgaggactganaccgctagcactgccgtaccggtccggaattcccgggtcgacccacgcgtccgcttctcaattttcctcagctttcagctttcttagaaaattcgccatttgcttgagttcttgcactatgacaaatggtgtcatgttctttggtgatggcccttataattttggttatttgaactctgatctctccaaggttctcactttcacgcctctcattacaaatcctgttagcactgctccaagttatttccaaggggaaccctcagtagaatacttcattggggtgaaatccattagagtctctgacaaaaatgtaccattgaacacaacccttttgtctatagatagaaatggcattggtgggactaagattagtactgttaatccatacactgtcttggagaccacaatttacaaagcnttgttgtctgaggcctttgtaaaagcagtaggagcccctacagttgcacctgtggctccatttg

SEQ ID NO: 249112 - DNA, 532 bp, Glycine max
gagtgggtggcctacgctatcatcgactgacgtaccggtccggaattcccgggtcgacccacgcgtccgacaaaggtgaagctcaggctcaggattggagaggcagaccctccaaccctgccaaacacgggggaatgattcccgctgcttttgttcttgggttgcaagcttttgagataatggcaatagccgcagtggggaacaatctgataacctacgtgacgagtgagatgcacttccctttgtccaaggctgccaacctagtcactaactttgttgggaccatctttctcctcgtcctcctcggcggctatctttccgactcttacctcggcagcttctggaccatgctcatctttggtttccgtgaactttgctggttcatattgctttctgtccaagctcatgttcctcagttgaagccacccccatgcaatatcaacgatttaagagaacagtgcttaaaaaccaaaggcctgaagaccatgatattcttcgtagccctgtactttgtggcattaagtaatggttt

SEQ ID NO: 249113 - DNA, 538 bp, Glycine max
  unsure (1)..(538): unsure at all n locations
acggtggtgtgcgtgcctagccttcgactcacgnacgtactggtccggaattcccgggtcgacccacgcgtccgatacgaaatgaagagtactatcttctttgctctctttctagtttgtgccttcaccatctgggacgggccttcagccaccggtcagttcgtgctcgacactgatgatgatcctcttcaaaacggtggcacatactatatgttgccagttatgagaggaaagggcggtggaatagaagtagattcaactggaaaagaaatatgccctatcactgttgtgcaatcacccaatgagctcgataaggcgattggactagtctttacatctccattacatgccctttttatcgccgaaggctatcctttgagcattaagtctggttcattagctagtatgacgctgtgtgccggcatgcctactgggtgggctaattgtgagagagaaggtctacaagctgttaaacttgcttcacgcgatacagtagatggttgggttaataatgagagaagtttccgggatacaatga

SEQ ID NO: 249114 - DNA, 410 bp, Glycine max
aattcccgggtcgacccacgcgtccgtccacgcgtccgtccacgcgtccgatcagttgatgaggcaaacttgggatacagctatagggtaggtggtggagttgggttgccagacacagtggagaagatcacattcgaatgcaaattggctgctggcgccaacggagggtctgctgggaagctaactgtcaaataccaaaccaaaggagatgctcagcccaacccagacgacctcaaaattggcaaagtcaagtctgatgctcttttcaaggccgttgaggcctaccttttggccaatcctcattacaactgatccaattcgatcttcagtattcagtgatctgcaaagaccttgttttatattatatacaagagttttcttgccttgggtggagtgttattcaatcactt

SEQ ID NO: 249115 - DNA, 459 bp, Glycine max
  unsure (1)..(459): unsure at all n locations
ccggaattcccgggtcgacccacgcgtccgcatgtatgggcatgttgagaaactagcagaagaaataaagaaaggggcttcctctgtggaaggtgttgaggccaagttatggcaggtacctgagacactgctggatgaggtgcttggtaagatgagtgcaccacccaagagtgacgtaccagtcattacccccaatgaactatccgaggctgatggctttgtattcggcttcccaacaaggtttggaatgatggctgctcagtttaaagcctttctagatgctactggaggcttatggagagcacaacagcttgcaggcaagcctgctggcctcttctacagcaccggttcacaaggtggtggacaagagactacagcactcactgctatcactcnaactggttttcatcatggaatgatattcgttccaatcggttacacattcggtgccggcatgtt

SEQ ID NO: 249116 - DNA, 519 bp, Glycine max
  unsure (1)..(519): unsure at all n locations
gaataaatgcgatgtcctngtcggactgaacacgtacgctcatgacgatcccgtccggaattcccgggtcgacccacgcgtccgaattactgctattacgagacgacgcagatttagttcggattgttcgattgcgatggctaggaaagatgcttatcgatggtgaagctgaattggctcaaggtggtggagaagaagtgtcgaattttgacttcgacttgtttattattggggctggaagtggtggcgttcgtgccgctagattttcatccaattttggagctaaggtggggatttgtgagcttccatttcatccaattagttcagaaacaattggaggagtcggtggaacgtgtgttattcgtggttgtgttcccaaaaagattttggtctatggagcatcttttggaggtgatcttgaggatgccaggaattatgggtgggagttgagttgagaaaaagttgacttcaattggaagaagctcttgcaaaagaagacagatgaaataaacagattaa

SEQ ID NO: 249117 - DNA, 361 bp, Glycine max
gaattcccgggtcgacccacgcgtccgaattactgctattactagacgactcacatttagttttgattgttcgactgctatggctaggaacaggcttatcgatggtgaagctgaattggctcaaggtgttggagaagaagtgtctaattttcacttcgactcagagattattgctgctggaagtggcggcattcgcgccgctagattctcatccaatcttgtgagctaatgtgctgatttacgagctctcatttcatacaattaattctgactcaattcgacgagtcggctgtacgtgtgtcattcgtggatgtgctcccaaacagattctggtctatggagcatcttttggaggtgatct

SEQ ID NO: 249118 - DNA, 518 bp, Glycine max
  unsure (1)..(518): unsure at all n locations
tgaataatgcatggcgtgtccgctgatgcctgcngctcatcgcactgccgtaccggtccggaattcccgggtcgacccacgcgtccgcctatctctttcaacattattatcaagttgttatttagtattgtgaccaatggtcatcatgttaacaggagacagctgtcccgcaacacttccattgcccttggctgccttcacaagccttaccataacctacaaagttgataaggcatcagagcgttttcttaatttggctggccaaacattggagagcctcgctgcaggttgtccatggccttgcatgccaattgtagcttccttgtggaccctaaaggcaaaacgttggagtgacttccttatcttctcagcatctagaactgtcttcctccacaacagtgatgcagcagttcaacttctaaagagctgcttcacagctacccttggcatgaattagggctctcctatctcaagcagtggtggtgttggagccctacttggacatggatttaagtacc

SEQ ID NO: 249119 - DNA, 519 bp, Glycine max
  unsure (1)..(519): unsure at all n locations
aggttttgatgtttgcgcgtntgngctgatngcctccngctcatcggactgccgtaccggtccggaattcccgggtcgacccacgcgtccgcccacgcgtccgcccacgcgtccgtggtgttgcaaggtctcagattccctgacaccccatttgttagtatccaagcgagggatctcattagagggttgttggttaaagagcctgaaaaccgtttgggttcagagaaaggggctgctgagataaaacagcaccccttcttcgaaggccttaattgggcgttaatacgttgcgctatcccaccagaactgccagacttgtgtgaatttggagtttcagagatgaccccacagtcccagggaaagggtgttaagtatgtagagtgcaatgcagcaggagagctagttgaatttgagttgttttgaagagactgctctttggcaagagtagcattcttggtttatggattcccttgtttttggctctatgcttcacgtgtcgagctgcaacagttatgtaag

SEQ ID NO: 249120 - DNA, 517 bp, Glycine max
  unsure (1)..(517): unsure at all n locations
tgattaagcnagtcggtgtcgctgagaatcgatagcgatagcattgacgtaccggtccggaattcccgggtcgacccacgcgtccgaaacattataatttctattacatacattttgtagctaggatgagcaagttactactcatgggtgttgctgggttcgtggcaacctttgtcaccatggtgatgatgatggtgcccaaaaacgtgagtgcccaaaacataggtgatgacatcgtcacacaagacttcttcaacagcataatcagtcaggctgatgatggttgtgcatggaagaacttctactcacgagatgctttccttaatgctcacaattcctacaatgagtttggtaggcttggtaatcaggatgactccaagcgtgaggttgcagctgctttcgcccatttcacccatgaaacaggacatttttgctacatagaagagattaacgtgnttgcatcatgggactactgtgacgagagcaacaccgagtacccatgtgcccctaacatagc

SEQ ID NO: 249121 - DNA, 542 bp, Glycine max
  unsure (1)..(542): unsure at all n locations
tgagtggtgnctgtgccatcngctcatcgcatcgacgtaccggtccggaattcccgggtcgacccacgcgtccgcccacgcgttcgcacacacaactactacaagtacttccttacaatcaaaaccaacaacagcgatggcaagttatcaaaagcactacgatgatcagggtcgcaaggttgacgagtatggcaacgttgagaagcaaaccgacgaatacggcaaccctgttcatgctgctagtgtcacctatgtagccaccagaactgctgctggtggttacagtgatgacattaataagcaacatgataccaccaatgcctacggcgtagacactggtagacagcattctagtggtggctacgatggtgacactaataaacatcatggaactactggtggctataatgatgacaccaatagacatcatggaactaccggggtctatggtataaacaccgatagggaacaacaatggactactggtggctatgccggtgacactggtaggcaacatgggaacatttgggggccttactaat

SEQ ID NO: 249122 - DNA, 461 bp, Glycine max
gaattcccgggtcgacccacgcgtccgaatttagcaatttacccttaaagttgtagcaagaagttaattaataatgagtgcgaatgcggggggggtgttgagcggtgagaggatgggggagaacgagaaaggagagcgatggagcggagcgatgacaaatctgacggagatggcctccaatctcgactctctccagaagcttctcctcaccaaagccgtcttcgtcgacgacgacaccttctccaaagcctacctcgccgccgaccaggcccgcaccatcaagctccttcagcaacgagtccagaccttggagagagaggtcgacgccgtcatcaccaccgccgtccgcgctcgctccgagaagcgccaggccgaggctgctcagaaatccgccgaatccgcggcgctcatcagctcaccgccgaactcgaaaacaccacaaaggtgtttgaactgcacat

SEQ ID NO: 249123 - DNA, 457 bp, Glycine max
ggaattcccgggtcgacccacgcgtccgcccacgcgtccgcttgttgtccatgggattgctggtgctggttcggtggctttagccagggccttggcttaccctcgggacaccatgaaagtcctcattcaagttggttccatcaccggtaaagaattggaccatgcccatgttttgaccagactactctctgtatccggcaatgcaggtttgttcaatggttttggctggttgttggttggaaggatttttggtctgggagcacgatttggggtttatgaaatcctgtctgccttttataaagatggtctggaaaataattatttgtttgcttctgaagctcttttggctggcgttgtaactggtgccattgaggcagtcataagctctccattcgaaacttcatcaagcttagtatgcaagttaactctgcttcatatgttcctagctgcaactttg

SEQ ID NO: 249124 - DNA, 461 bp, Glycine max
  unsure (1)..(461): unsure at all n locations
ccggaattcccgggtcgacccacgcgtccgcccacgcgtccgtaatgatggagattttgctcaaaagctttcgcatccttcatcaaattggtcaagagaatacattgcaacaattgatggtttagttcacaagaggcacttaatagccataagcgagggaactactgttgagggtgtcctttgtgtgcctgatgttgtggagttacttccacgtcagccagagatgcaaagaactcgaattcgcattgtggttcatgaaggtaggaaacatgaagttcgtgaactcgtcaaaagagctggacttgagattcattcattaaagcgagtacgcattggtgggtttagacttccaccagaccttgggttaggaaagtatattgagttaaataaaacgaatctcaacccgcattgnggtggaagagctaataaagttgcttcttatattactggagctagaaaca

SEQ ID NO: 249125 - DNA, 446 bp, Glycine max
gaatttccgggtcgacccacgcgtccgcccacgcgtccgtaatgatggagattttgctcaaaagctttcgcatccttcatcaaattgggcaagggaatacattgcagcaggtgatggtttacttcacaagaggcacttaatagccataagcgagggaactactgttgagggtgtcctttgtgtgcctgatgttgtggagttacttccacgtcagccagagatgcaaagaactcgaattcgcattgtggttcatgaaggtaggaaacatgaagttcgtgaactcgtcaaaagagctggacttgagattcattcattaaagcgagtacgcattggtgggtttagacttccaccagaccttgggttaggaaagtatattgagttaaataaaacgaatcttcaatcgcattggggtggaagagctattaaattgctttttaaattactgg

SEQ ID NO: 249126 - DNA, 521 bp, Glycine max
  unsure (1)..(521): unsure at all n locations
ggtcatatgctatgccngtatccgctgatnccctcnngctcatcggactgccgtaccggtccggaattcccgggtcgacccacgcgtccgcttttcttttccgctcccgtaggaatcgaagatttataattccaatcatatatagtaatggtaacatcgtagtataatctgattcatcaacagcgcttgtcggaaacagagtcggtttagtttgttagttagttgtttaatgaacgcaattcggtcccgttggttgacgagaatggcagaagacattgggaaaagcaacctcgaatcctcttctgcttcaacaacttcccgaggcttctggccttctgtcttacgttggatcccctcttccaccgatcacatcatcaatgctgaaaaacgccttctctctcttgtcaagactccgtatgctcaagaacaggtcaatataggttccggtccacncatgatttccaaagttagatggttccgttcatctagcaatgaaccacggtttattaacacggttacat

SEQ ID NO: 249127 - DNA, 513 bp, Glycine max
  unsure (1)..(513): unsure at all n locations
gttatttaggtatgcgtctcctgaggccacntatgtagcactgccgtaccggtctcggaattcccgggtcgacgcacgcgtccgctgccgtctatgcgctcctgtccttaactggacgggtcgtgcctccggtgcatggactgggaagaaattagagtgcgcaaggcaagcctacactctgtatacattaccatgggataacaccacaggattctgatcctattgtgttggccttcgggatcggagtaatgattaacagggacagtacgtggcattcgtatttcatagtcagaggtgaaattcttggatttatgaaagacgaacaactgctaaagcatttgccatggatgttttcattaatcaagaacgaaagtctggggctcgaagacgatcagataccaggctagtctcaaccataaaccatgccgaccagggatcagcggatgttggcctttttaggactccagtggcaccttatgagaaatcaaagtctctgggtatcggagggagtag

SEQ ID NO: 249128 - DNA, 508 bp, Glycine max
  unsure (1)..(508): unsure at all n locations
tgtagccgtgtgcatgagaactganactgataggactgacgtaccggtccggaattcccgggtcgacccacgcgtccgaaaaataaagttgaaaatcagggtgctggtaatattccaagatacttgaatcttgaaccggcacttgcaatggattggcttgagataccatgggatgatttgcgaatcaaagagcgtgttggtgccggatcatttgggactgtgtatcgtgctgaatggcatggatcagatgttgctgtcaaagttttaacagttcaggatttccaagatgatcaattgaaagagtttctaagagaggttgcaataatgaaacgagagaatacaccaaaacccaacatgaaaacccttaacaaagcctcacttattatattccctctcttgttcctttccctattcaagcattcccatgctgcaggaatcgctatcttaactggggccaaaacggtggagaaggcaccttagcagaagcttgcaacactagaaactaccn

SEQ ID NO: 249129 - DNA, 548 bp, Glycine max
  unsure (1)..(548): unsure at all n locations
atgagtatgtnctgtccctcgcgatcatgnatngtactgacgtaccggtccggaattcccgggtcgacccacgcgtccgctcttgctacttgaagaaagtaggatacaaccctgacaagattccttttgttcctatgctgggctttgagggagacaacatgattgataggtccacaaaccttgactggtacaagggtccaactctgcttgatgcacttgaccagattagtgagcccaagaggccctctgacaagcccctcatgcttacccttcacgatgtgttcatgattggaggtattggaactgcgccagtggtacgtgttcgataccggtgtcttgaagcctgaaatggttgtgacttttgcaccaactggactgacatctgaagtcaagtctgtggagatgcaccatgaatctcttacagatgcacatgcttgtgacaatgtcagattcaatgttaagaatgtaactgacaaggcatggaagcgtctgtatgcagcctcacactcacaagaatactcttcatatgaggctgctaacttcacatn

SEQ ID NO: 249130 - DNA, 544 bp, Glycine max
  unsure (1)..(544): unsure at all n locations
gagtgtgtnctgggactcgagtcatgatagactgacgtaccggtccggaattcccgggtcgacccacgcgtccgcccacgcgtccgcccacgcgtccgaaagaaaaaaaagaagaagaaagagttctgacgatggctgcatcattatttatgccttcatccatagtggacgaagaagcgaggtttgaagccgaagtggcggaggtgcaagcatggtggaactctgagaggttcaggctaacaaaaagaccatacacagcaagagatgtggtgtccctccgaggcaacctcagacaaacctatgcctcgaacgagatggcgaaaaagctctggtgccttctgaagaaccaccaagccaacggcacagcctcaaggacttttggtgcacttgatcctgttcaggtcactcatatggccaagcacttggacacaatctatgtctcaaggtggcagtgctcagccacacacaccacgagcaacgagccgggccctgaccttgctgattacccttatgatactgtcccaaaacaagttgagcacctctt

SEQ ID NO: 249131 - DNA, 439 bp, Glycine max
cggaattcccgggtcgacccacgcgtccggcttaatcgaactattcagattctaaaaaatgagttggtggtgggctggagcaatcggtgctgccgggaagaaattcgaggaagaggaaccgccgcgaagcttacagagcgtgggcctggtgatcggcgtgacgggcatcgtgggcaacagcctcgccgagatcctccctctcgccgacaccctcgccggtccatggaaggtctacggcgtcgcacgccgcccccgtccgccgtggaacgccgaccatcctgtctagtacatccagtgcgacgtttacgatcccgccgacgccgaagccaaactcttcggcctaaccgacgtcactcacgtcttcttcgggtcgtggaccaaccgctccaccgaagcagaaaaccctgcgaagttaacggcgctatgttacagaacgtgc

SEQ ID NO: 249132 - DNA, 517 bp, Glycine max
  unsure (1)..(517): unsure at all n locations
gtataatggcggttgagtgaagctagcnacctaagcactgtcgtaccgcgtccggaattcccgggtcgacccacgcgtccgcccacgcgtncggtgaaatggttggagctaaatctcgtaatatctcttatttaaaagggagggtagcttcttggattggaagtcctacctcggttgccataccatttggagttttcgaacatgttctttctgataaaccaaaccaggcagtggctgagagggtcaataatttgaaaaagaagttaattgagggagacttcagtgttctcaaggagattcgtgaaacagttctacaattgaatgcaccatcccatttggtagaggagttgaaaactaaaatgaagagttctggaatgccgtggccgggtgatgaaggtgaacaacgatgggagcaagcttggatagctataaaaaaggtgtggggctctaaagtggggaatgaaagagcatacttcagcacaagaaaagtgaaactcgaccacgaatatctttccat

SEQ ID NO: 249133 - DNA, 519 bp, Glycine max
  unsure (1)..(519): unsure at all n locations
gaatatggtcagaggtgccgtatgcctgacgcctcnaccgctgcactgacgtaccggtccggaattcccgggtcgacccacgcgtccgcggacgcgtggtctgacgcgtgggttctgcagcaattggtgttgatcctgccatgatgggtgttggccctgctgctgcaattcctgttgctgttaatagctgcatgtctagagcttgatgatattgatctttctgaaataaatgacgcatttgcctcccagttcgtgtattgccgtaacaagctagggctagatccataaaagatcagtgttaatggaagcgcaatggcaattgcacatactctggcttcaacaggtgctcgatgtgctgcaactctgatgcatgaaatgcagaaacgtggcaaggactgtctatttctatttatatctatgtgcataggtactggaatggtgccagctgctgacttttttgatagaggagatagtgctgattagctatacaatgccctgaaagcggatgaccttcttttn

SEQ ID NO: 249134 - DNA, 519 bp, Glycine max
  unsure (1)..(519): unsure at all n locations
ggaggtttaggaggtttggcgtatgcctgaaaaangaatgccgtacgactgacgtaccggtccggaattcccgggtcgacccacgcgtccgcaaaaacataaacaaagtaagagttcactcaatctcactgtgttgtgagttgtgtgtgagcaccaaccaacaatggtgtctctgactccgttatgtttctttattaccttgttgatcgctggtgcatactcagcggcggagccccaaacggtgcgttttgacaccggtgggttgagcagagacacctttcccaaaggattcttattcggaacggccacgtctgcgtaccaagtggagggtatggcccacaaagacggtcgcggcccaagcatttgggacgtcttcatcaaaaaacccgggattgtcgcaaataatggcacgggagaagtttctgttgatcagtaccatcgctacaaagaagatatagggatctcatggccagcctgaattttgatgcctaccggttctcaatctcgtggtccagaatt

SEQ ID NO: 249135 - DNA, 552 bp, Glycine max
  unsure (1)..(552): unsure at all n locations
ggatgagtgggtgcgcctacccgagatgcataggacctgcacgtaccggtccggaattcccgggtcgacccacgcgtccgcccacgcgtccgtgcatgcactttcactcgaagaaccttgaagcgagtctgggccagagcggccagcgacaacaactgaatcagctagggttgctttgcttgctatcttgttggaggattttctgttcaagagaagatggtaactagaattgtggatcttcgttcagacacagttacaaagccaactgaagcaatgagagctgctatggcaagtgctgaagttgatgacgatgttctaggctatgatccaactgcttttcgcttagaaacagagatggcaaagacaatgggcaaagaagctgctctttttgttccatctggcactatggggaaacctgtatctgtacttgttcattgtgatgtcaggggaagtgaggntattcttggagacattngccatatcaacattttttgagattggaggcatttgcaacccattgggggagtgcattcaagacaagtgaaaaatacn

SEQ ID NO: 249136 - DNA, 401 bp, Glycine max
ggaatttccgggtcgaccgacgcgtccgacagaatatatggagttgggatcatcgtattacttgatacatttgaacggtcaaaagaagaagcttgattggcggataagactgaggatgttgcgtgacatatgcaagggtttgatgtgcatacacagaatgaacgtgtgtcaccgtgatctgaaaagtgcaaattgtctagtgaataagcattggactgtcaaaatatgtgatattgagctttcaagaataatgacagagtctcccatgagagattctgtatcaactggaacgccaaaatggatggctcctgagcttattcgaaatgaaccgttcacagaaaaatgtgatatcttcagacttgtggtgataactgtgggaaactctgtgacctgtgaacaga

SEQ ID NO: 249137 - DNA, 516 bp, Glycine max
  unsure (1)..(516): unsure at all n locations
tgttagccggtnntgatttgaaccctacgtactcataggactgcacgtaccggtccggaattcccgggtcgacccacgcgtccgcccacgcgtccgaaagaaaatggccaactcgaagaacaatttaattctagtttccactctgcttatgttgcttcaactccacttcaccccatcaaaagccgccatcaaaggaggctactggtactccgaaagtggccttgcagtttccaacattaacccctctcatttcacccacctcttctgtgcatttgcccacctcgaccccaacaccaacaaagtcaccatttcctcgtcagactcatctcagttctcaaccttcactcaaaccctccaagcaaagaacccttcagtgaagacccttttgtccataggcggcggtttcggtccttctttggctgcaaatttctccagaatggcaagacaagccatacccaccagaaaatcattcatagactcttcgatccaacaagccagatcgaacaacttcctcgg

SEQ ID NO: 249138 - DNA, 512 bp, Glycine max
  unsure (1)..(512): unsure at all n locations
cgttagtccgggtcgatgatnaatcganaaccgttgcgactgcacgtaccggtccggaattcccgggtcgacccacgcgtccgcccacgcgtccgcccacgcgtccgaaaatgttttgatattaaaagaaaaatcattatgtgcaaagctttctgatatgggaattagtaaacgccttcttgaggatatgtcttctttgggtcacactgttactggctgtggaagttcagggtggcaagcaccggagcaacttgttcaaggacgtcaaacacgagctgtggatttatttagtttaggttgcattctctttttctgcatgactggaggaagacatccatttggagaacgtcttgagcgggatttcaatattgtgaaaaatcaaaaggatcttttcttagtggagtttattcctgaagccgacgatcttatttcttgtttgttaaacccttaaaaccctgatctcagactaacagcgattgaagtattgcatcatcctcttttttggagctctg

SEQ ID NO: 249139 - DNA, 512 bp, Glycine max
gcagccgtgtgcctgaggctgatgcctgtgcatgcacgtaccggtccggaattcccgggtcgacccacgcgtccgcccacgcgtactttcactcgaccaactccgaacagacactatatgattacttcgtacaccggatcaatggattatagagcgggcagtactcctcggcatgtgcaacgcctctcctcgacatctttgcactcgtacacgacgctttcttgcaaaaatacgggctcaagttgaacgatgcgaatcgtcctgaggataaacacaaacctatgtatgaagaatgggctaacaattctaatgtgaagtacattgctggacgtgctactcacaattgaatcaggcttgatcactggatgcttcaagcaccaggtgccacaagctacataggttgcataggaaaggacaactatggagaggagatgaagaagaaatgtacaaccttgatggtgtaaaggctaactattgtgaaatcgcacaatacaactactggaacttgtgct

SEQ ID NO: 249140 - DNA, 500 bp, Glycine max
  unsure (1)..(500): unsure at all n locations
nctgatnccccgtgngcccctactattgtccgtaccggtctcggaattcccgggtcgacccacgcgtccggagtctatagccttggccgacaggtccgggtaatctttgaaatttcatcgtgatggggatagatcattgcaattgttggtcttcaacgaggaattcctagtaagcgcgagtcatcagctcgcgttgactacgtccctgccctttgtacacaccgcccgtcgctcctaccgattgaatggtccggtgaagtgttcggattgcggcgacgtgagcggttcgctgcccgcgacgttgtgagaagtccactgaaccttatcatttagaggaaggagaagtcgtaacaaggtttccgtaggtgaacctgcggaaggatcattgtcgatgccaaaaaagccaactatcttattaatgatttgaaaaaaccttagggggcggacgctctagaggatccaagcttacgtacgcgtgcatgcgacgtcatagctctttt

SEQ ID NO: 249141 - DNA, 541 bp, Glycine max
tgagatgtgactagtcccacgctattatagtaggactctaccggtccggaattcccgggtcgacccacgcgtccgatctgaactgagtaatgacactcttaaccctttatcttcttggaaccataattcatccccgggcaactggactggtgtcctctgtgacaagcatggccaaagagtgacaggccttgatctttcaggcttgggactctcaggtcacttaagcccttatattggtaacctctcctctcttcagtccctccaattgcagaataaccaactcacaggagtgattcctgaccaaattggcaacctattcaatctgagacttctaaatatgagcactaacatgttagaaagaaagcttccttcaaacaccacccacctgaaacagctccagattcttgatttatcctcaaacaagattgccagcaagattcctgaggacatcagcagcttgcaaaagcttcaggctttgaaactgggaaggaatagcctctatggtgcaataccagcatccatagggaacatttcttctcta

SEQ ID NO: 249142 - DNA, 550 bp, Glycine max
  unsure (1)..(550): unsure at all n locations
agagggtatnnntnnnatgtanctcgattctangtcacgacgtaccggtccggaattcccgggtcgacccacgcgtccggtcaatttcaagtacatcgctgttggaaatgaaattcatcccaataccaatgaggcacaggatattctatctgccatgaccaacattcagaatgcaatttcatcagcaaatttacaaattaaggtgtcaacagctatagactctactttgattactaactcttaccctcccaatgatggcgttttcactagcgatgcggagccatacataaaacccataatcaacttcctagtgagcaatggggccccacttcttgccaacgtgtacccttactttgcttatgcaaatgatcaaagcattcctcttgcctatgctctttttacccaacaaggaaacaacgacgttgggtaccaaaacctctttgatgctatgttggattcaatatatgctgctttgggagaaagtggaacgttcaatttgcagatagtggtttctgagagtgggttgccatcttaagggtgaaccttgacc

SEQ ID NO: 249143 - DNA, 540 bp, Glycine max
  unsure (1)..(540): unsure at all n locations
agtggcgttnntntccctgagaccaactagaaccgataggactgacgtaccggtccggaattcccgggtcgacccacgcgtccgaaagcagagaaggaccggagggagaagaaggagaagaaaagggaaaagaaagagaggaagagagagaagaaggagaagaaagagagaaggaaagcggagaaagaaaggaaacttaaagaaggagcaagtgcctcccctggcactgatgatggcaaaaagtttaagctcatcaacgaactaaaggaaaccaaagtagatggaaaattgcaaaagggtgaagacagtgagaatgaacaacatgagaggagtggaattacagaggaacttgacctacctgtcacttctgtggagccttgctgcctttctgactgtactcaaagcagtaagagaaaaaggagctccccagaatcaactcatgatcatggatctgctattaaaattcgacttccgttgaggaagcatagagaacctgaagaattganatccaaatcaaaatttcaaagcgggtgttcttct

SEQ ID NO: 249144 - DNA, 529 bp, Glycine max
agatggatgtgacctagctctcggagaaatgattgactgctctaccggtccggaattcccgggtcgacccacgcgtccgccaagatccaggacaaagagggcatccccccagatcagcagaggctgatttgtgccggtaggacaacttgaggatggaagaacccttgctgattacaacattcagaaggaatccacccttcacttggtgcttcgtttgagaggtggtatgcagattttcgttaaaactttgaccggaaagaccataaccttggaggtggagagttcagataccatagacaatgtgaaagctaagattcaggacaaggaaggtatcccaccagaccaacagaggcttatctttgccgggaaacagcttgaagatggaagaacccttgctgactataacatccagaaggaatctaccctgcacttggtgttgcggcttcgtggtggcatgcaaatctttgttaagactttgactggaaaaaccataacctttgaggttgaaagttctgataccattgataat

SEQ ID NO: 249145 - DNA, 527 bp, Glycine max
  unsure (1)..(527): unsure at all n locations
agagagatgctatgcaggnacctccagttctcatcgaactgccgtaccggtccggaattcccgggtcgacccacgcgtccggctattgccatcgatcctagccttattgttagtgcatttgtggcaacttctttggctttggcttgcttctatgcggcagctttagttgcaaggcgtatggagtacctataccatggtggtatgctttcttctgggctgtccattcttatgtggatgcactctgcttactctctctttgggggctcaattgcactcttcaagtttgagctgtactttgggctttaggtgtatgacagctacgttatagtagacactcaagatatcattgaaagggctcacatttggtgacctgcattatgtgaagcatgcattgacattgttcactgatttggctgcaatctttgtgcgaattctaataataatgttgaagaattcatcttacagaaatgagactactacgaaatggagagattagaaggctgaccgacctaactcagctcaggctt

SEQ ID NO: 249146 - DNA, 526 bp, Glycine max
agttggttgtgtcccatgcctgttagttctcatgcaccggtctggaattcccgggtcgacccacgcgtacgggcgaacttgggatacagctacagcgtggttgggggtgctgcattgccagacacggcggggaagatcgcattcgactgcaaattggttgctggtcccaatggagggtctgctgggaagctcactgtcaaatacgaaacaaaaggagatgctgagcccaaccaagacgaactcaaaactggaaaagccaaggctgatgctctcttcaggccattgaggcttacctttggccccatccgattacaactaaatcctttcaacttacttggcaataactttctgcttggagaactaatccatcactctgttctcaacttaaagtggctttcaatggattcaagcttttctttcttctttcccttttccatattattgggagacttatgatataaccggattttaacttaatcatattaaatattattaaggttgggcaatttttccacctaaaaaaaaa

SEQ ID NO: 249147 - DNA, 534 bp, Glycine max
  unsure (1)..(534): unsure at all n locations
agtgtagttgctgtccctgcnactctaatgactctcatcgtactgccgtaccggtccggaattcccgggtcgacccacgcgtccggagagattgccaagtcaaaatcggtgcacgaaattctccactttatctaaggcaattcggggagtttgtgaagacagataatcactagctactcaaaaatggctcacagtaggaaggaacgttgcagctcctttgatgttacttaactagatcatctattttattgttcttggcttcgctagttgatgcctcaacacgatcatctatggccaaacttaccaccctagtttaggttgaaatagtgcaaccatgtctttcttaaccttatctatactaacagctgttctgggcatcatgtacaaacttgtgggtcggaatcacatgacgacattgaagagtgacagtttagcatttgctggagccacatcaatggatgcttgttcaggcacagctctagcattatggatggcttagaagcaaatacacttatgatggcatagacggtgaag

SEQ ID NO: 249148 - DNA, 468 bp, Glycine max
accggtatgggatacccgggcggacccacgcgtccggagaagaagagggagaagaaagagaagaatatggaaaagaaagagaagaaaaaggagaaggaggaaaagaaagagagaaggaaaagaaagagaagagggagaagaagagggagaagaaagagaagaaaatggaaaagaaagagaagaaaaaggagaagaaggaaaagaaagagagaaggaaagaggagaaaaaaaataaattataaagaaacgaaacacgggcaagaaaggggagtagagaccactcaataaatgaaatagctactaaaggctttgttctctttttagttatttgataattatccaatttgagttatggagttataaatatgaggagttttttttcaaaaagaaaaaagcataaataaaacaataataaaaataaaaaaaaaaaaaataataataatataataataaaaaaaagggtggccg

SEQ ID NO: 249149 - DNA, 409 bp, Glycine max
aattcccgggtcgacccacgcgtgcgcccacgcgttcgcccacgcgtacgctccgccacttctgaatctattgaatcaacaatcatgtcggacggagagcaccatttcgagtccaaggccgacgccggagcctccaaaacctaccctcagcaagccggtaccatccgcaagaacggctacatcgtcatcaaaggccgtccctgcaaggttgctgaagtttcgacttacaaaactggaaagcacggtcacgctaagtgtcactttgatggaattgatattttcactgccaagatacttgaggatattgtgccctcttctcacaactgcgatgttcctcatgtgaatctgactgattaccagctcattgatattgctgacgatggatttttgagtctgcttactgaaaatg

SEQ ID NO: 249150 - DNA, 293 bp, Glycine max
ccacgccgacccacgcgtgcggtacactcggagtagacttttggtgttcccacatacagggatatagcactcctgggggaaaaggtcttgaggaatctaatgcaaacttggatgaagtggatgcccttgctcaagagctccagactagagctaaaaaaagagggttatgagtaacagctcattagttcatgcattctccatacatgcatggcgctgctactagctctgaattgaaggcacacgcatatgctgctgatcagatgaagatagccatgaaggtgacacattatatg

SEQ ID NO: 249151 - DNA, 530 bp, Glycine max
  unsure (1)..(530): unsure at all n locations
tgggaggtgctgcaatgcnacctccagctngtcatcgcaggtccggaattcccgggtcgacccacgcgtccggatggattgccctatgatgaattcttttcacaaagatctgagtctctcttgaaggttcttaggtcaggggccaggataaagaaagaagcctttcaggctgcttcaattcctgttgttttggtcgagaacagtgggagatgcaacaaaatgacagtgatgaaaaggttcttccaaatgggactgcttggattcctaatctagtccagacaatcacagaaatcgcattgaacaaaagtgagtctattcatgttgacaagaatttgattgaagggccaaatccgaatcagagaggaaaattatggattcctctcgtgttcgctctccaatacttccttatcatgaagccaataaaaggactgatcgagaaagacattgcaaatgagagaaagccaacatgggagagacgcgatgctgcttttcggaagagagatttatattaattgtgcatttctgtgccc

SEQ ID NO: 249152 - DNA, 298 bp, Glycine max
aatagggagaagaaagagaagaatttggaaaagaaagagaaaaagggggataatgatgaatttaaaaagagagaggagaataaagagaaaagggagaagaagagggagaagaaagagaagaaaatggaaaagaaagagaagaaaaatgagaagaatgaaaagaaatagagaatgaaagaggagaaaaaaaataaattataaagaaacaaatcacgatcaataaaggggagtagataccactcaataaatgaaaatatctactaaaggctatgttctcattttattaattagataaata

SEQ ID NO: 249153 - DNA, 524 bp, Glycine max
  unsure (1)..(524): unsure at all n locations
ggcagttgtgtcatcactctcagctctcatcgatgactgtaccggtccggaattcccgggtcgacgcacgcgtccgcccacgcgtccgaaatacctaagattcgctaaaatcccttccccgtcgccagatcgcatggacccttgaattccgattcggataggcatgtccggagcggccttgtcgccgccgacgaattcgaagtcgctgacgcagacggtgagcgggtcgcacaagttcgtgatcgagggctattcgctggcgaaggggatgggagtggggaagcacattgcaagcgacgtgttcaccgtcggaggttaccactgggcgatctacttctaccccgacggcaagaatcccgaggacaattccgactacgtctncgtcttcatcgtcttggccagcgaaggcaccgacgtcagggcgcttttcgagctcacgctcctcgaccagagcggccagnggaagcacaaagttcatagccatttcgatcgctccctcgagaccggttcctacacgcttaagg

SEQ ID NO: 249154 - DNA, 525 bp, Glycine max
agtgtgttgtgtcccatgcctctcagctcactaccgactgccgtaccggtctcggaattcccgggtcgacccacgcgtccgccgctcaacaactataataacatctttctctctccgaacagatcaaactagggccacctgaagcgccaaatcagtccatgatttcaccgttaaagatgccaagggaaatgatattaatcttggtgactacaaaggaaaggtccttatcattgtcaatgttgcctcacaatgtggcttgactaattcaaattacactgagctcagtcagttgtatgagaaatacaaacagaaaggtctggaaattctggcatttccatgcaatcagtttggggcacaggagcctggatctaatgaacagatacaagagtttgtttgtactcgcttcaaggctgagtttcccgtttttgacaaggttgatgtgaatggtgacaaagctgctccactgtacaagtatctaaaatcaagcaaaagtggactctttggggatggtatcaaatggaactt

SEQ ID NO: 249155 - DNA, 476 bp, Glycine max
aattcccgggtcgacccacgcgtccgcggacgcgtgggttccaccactggtggttttgaagctggtatttccaaggatggacagagtcgtgagcgtgctctccttgcattcactcttggtgtgaggcagatgatttgctgctgcaacaagatggatgccactacacctaagtactccaaggcaaggtacgatgaaattgtcaaggaagtttcttcctacatgaagaaggtcggatacaaccctgacaaaattccttttgttcccatctctggttttgagggagataacatgattgagaggtctacaaaccttgactggtacaagggtccaacccttcttgaggcccttgatcagatcaatgagcccaagaggccatcggacaagcctctccgattgccccttcaggatgtctacaagaatggtgggataggaactgtgcctgttggacgggttggaaccggtgtcttgaaacctgg

SEQ ID NO: 249156 - DNA, 461 bp, Glycine max
gaattcccgggtcgacccacgcgtccgcactttccaatacaataatcactaactgaatattcgatcggagatgtctgccgccgccggggaagctagcgctcccgccgtcgaaaagccggttgaggaggtgaaggcgccgaaccccgcgaaggagaagaaacctaaggctccgaaggaaaagaagccaaaacaggccaaaacagcttcacatcctccatattttcagatgattaaggaggctttgatcgctttgaacgagaaaggaggatcgagtccttatgcgatagcgaagtacatggaggagaagcacaaggcggtgctccctgcgaatttcaagaagattctaggtctgcaactaaagaaccaagctgcgagagggaaactcgtgaagatcaaggcttcgtacaagttaaccgaagccgcgaagaatgagaacaccgtcaaagtgacgaatgccaacg

SEQ ID NO: 249157 - DNA, 347 bp, Glycine max
tgcacctcataccatgatcgtcttttctttttcaattgcctctttccttctacctaccctgcatgttcaccgaaagttcactaccattcaagtggcctaatgctaaatccaaatttatataattgtggaaaagtctgccttagtctctttagcacttatcatcttagtaatagttaaaattgtataccacaaaaatcaaccatgctacaaatgttggtttcgatacaagctctaattctaaatgaaaagcctttttttaatgagcctgagtatacttcaacatattctggatcttattgtctaactatatcctatgaattcaaccagagttcatttattttattctt

SEQ ID NO: 249158 - DNA, 434 bp, Glycine max
taccggtccggaattcccggggttcttttgttctgtttaggtgcctgtttatatagctgagattgcacctcaaaacttgagaggtggccttgggtcggtgaaccaggttgaagccttattgttgcttcttgatgcaagtctgtttttttttttttttatttgaagtttattattcattaattttgtagtttttctggctcagctctctgttacaattggcattatgctggcttatctgttgggtctttttgtcaactggagagtccttgcaattctaggtaaattgctaattatttacttggcttagctcttgcggatagacaaatgaaaatattaaaaaccttggtcacaaattagtttcattaagttcttacagaaaggaacagaaagaatatgtgtgtacaggggaggagccatatttataaaattaaaaa

SEQ ID NO: 249159 - DNA, 527 bp, Glycine max
  unsure (1)..(527): unsure at all n locations
agatggtggtgtgnctgggcatctcagctctcatcgtactgacgtaccggtctggaattcccgggtcgacccacgcgtccgcccacgcgtccgcccacgcgtccggagaaaagaaggaaccgattctagagagagaaaaagcggtggatttctagggagagagcggagggcgcgagcgcgatggttcagatcgcgaggaggaagaagggacggtcgtcgaaggcggatctggcgcgccgctccggcgagtcttcagccgccgcgtcgcagtccgatccccggcggagccttcggcgtcggagcgtgaggtacaacatcatcgactacgacggcgattacctcgacgacgactaggaggactagaggaggcgcatgaagaagaagctcaagctcatggcgaagctgaaccaggacggtgaagaagaagaagaagaagagcgagaagaagaagaagaaatcgagccgacgtcgccgagccgcactcgcgccgagccagtggaagaatacggtgacgacgaaaaggaaag

SEQ ID NO: 249160 - DNA, 430 bp, Glycine max
gaattcccgggtcgacccacgcgtccgcaacagtgcactctggctcctcagatttcctgcagctggggaaatgagactgagagcatgtgctgctgcacaaggggtacagccggatcaaattattttcacagatgttgcaatgaagaatgaacacatcagacggagttctttagcagacttattccttgactcgcctttatgcaatgcacatacaacaggaacagatatactatgggcaggtttgccaatggttactctgcctcttgagaaaatggctactagggttgctgggtcactctgtcttgccactggactaggggaggagatgattgttagcagcatggaagagtatgaagatagagcagtctcattggctctgaatcggccgaagcttcaggctcttactaataagcttaaagctgtacgcatg

SEQ ID NO: 249161 - DNA, 440 bp, Glycine max
  unsure (1)..(440): unsure at all n locations
gaattcccgggtcgacccacgcgtccgggaaaatctgccaaagacaatctttgtgatagttagtgaatcaaggatggaccttctaagggctgttataattgaacctcaaggcaccccataccatgatggtcttttctttttcgattgcctctttccttctacctaccctgcaggtccaccgaaagttcactaccattcaggtggcctaaggctaaatccaaatttatataattgtggaaaagtctgccttagtctcttgggcacttggcatggtagtaatagtgaaaattggataccagaaaaatcaaccatgctacaagtgttggtttcgatacaagctctaattctaaatgagaagcctntttttaatgagcctgngtatacgtcaacatatccttgtgctgangggcaaaagaagatctaangagtacaacgagagt

SEQ ID NO: 249162 - DNA, 532 bp, Glycine max
tgagatgatctttgactagacctctacttctcatccgactgccgtaccggtccggaattcccgggtcgacccacgcgtccgcccacgcgtccgctcgatttccttctctataacacaacgctctcttctctggcgaccaaagtacttgttccagtgtctactctactcaaaaaggatttgggacatcatgtgcagtgattcgaaaagtaaactttcttccccaaccctcgtcgtcatggagaatagtaacattcagaagcagaatctggatggtctctacaactcggttttgcttgaattgtctgcatctgatgattatgaagctttcaaaagagaggtggaggaaaaaggcttagatgtgaacgaggcaggcttttggtacggtagaagaattgggtcaaagaagatgggatctgaaacgaggacccctctgatgattgctactttgtttggaagcgccaaggtgctcaattatattcttcttcagaaaggaggaggtgttgatgtgaacagggtctgtggttctgatagg

SEQ ID NO: 249163 - DNA, 539 bp, Glycine max
  unsure (1)..(539): unsure at all n locations
aggttgatgagcgacgcctcnacctccagctcacctancgaactgcctgtaccggtctcggaattcccgggtcgacccacgcgtccgatggaattgagttccttaggacttacctcatccttccatccgaaattgtccgtgccactgtcaagaagcaggccaagcccgccggaagaccattcggtggcccacccggtgatcgccccaggggcccacctcgctttgacggagagaggagattcggcggtgaccgtgatggataccgtggaggtccacgcggacctggcggtgatttcggtgacaagggtggagctcctgctgactacaggccttcttttgggggtggtactggcggaaggcctggcttcggtcgtggttccggcggttatggagcaccgactagttcaaacattccttcttaaatataaaataatatgtgctctagtttttggcagttttggctgtcatttgaagttactagaagttcccctttgcccaaaagtgtttggtctggctgacaatttacttatatcggtttt

SEQ ID NO: 249164 - DNA, 528 bp, Glycine max
  unsure (1)..(528): unsure at all n locations
tgtggatgctgtggcctgggangccttgangtgcatgtactgacgtaccggtccggaattcccgggtcgacccacgcgtccgcccacgcgtccgctcgaatccacagagtgagactcatcgtgtgaacaacgatgactgcgggtttgagcgtacttgagaaatttgagcggccatggacgaaaccgccgtaacgacgaagcctgattggctcaacaaccgcgcgagggtcgccggagagagaaccgaagaatttttctgtggcggcgacgacgaagaggaatgcgactacgaggcttgtgacatgttgactcggagcttctggcaggcgcagactgtgctggacgagaaccgtgcgctgatcgacgaagtgaacagcaaccacgagtcgaagattcctgacaacatggcgaagaacgttggcctcattactcagatccacggtaacatcttcaaagttcgctctatttactccgattaatctgtaaatttcccaacattattcgccagcgctgcgtcaacggcgtcag

SEQ ID NO: 249165 - DNA, 532 bp, Glycine max
  unsure (1)..(532): unsure at all n locations
agcccgagttgtgtgcaagcnccttcagttctcatcaccggtccggaattcccgggtcgacccacgcgtccggagaaacatggcttccttaagctccttagtgctgctccttgcagctctaattctatcccctcaagttcttgcaaactatgagaatcccccagtgtacaagcctcccactgagaaaccaccagtttataagcccccagttgagaagcctcctgtttacaaacctccagttgaaaaccccccaatttataagcctccagtagagaagccaccagtgtacaagcccccagttgagaaacccccagtgtacaagcccccagttgaaaaaccaccagtgtacaagcccccagttgagaaaccaccagtgtacaagcccccagttgaaaaacccccagtttacaagcccccagttgaaaaacccccagtgtacaagcccccaggtgaaaaaccaccagtgtacaagcccccagttgagaaacccccagtttaccaaccccccatttgaaagccaaccatttacaaa

SEQ ID NO: 249166 - DNA, 533 bp, Glycine max
  unsure (1)..(533): unsure at all n locations
agtcatggttgtgtcctagctgcataaagtactcatctaccggtccggaattcccgggtcgacccacgcgtccggggaattcacttaggagaagaagaaatgtccatggagtcctgaatgcactgagctgggggattttgatgcccgttggtgccataatagcaaggtatttgaaggtgttcaaatctgcagaccctgcttggttttaccttcatgttacatgccaaacctctgcctacatagttggtgttgctgggtggggaactggtctcaaactcggaagtgactcggttggtattaagtataacacccatagagcactcgggatcaccctcttctgccttggaacccttcaggtttttgctctgctcttgaggcccaacaaagaccacaaaatcagaatctactggaacatttaccactacgccgttggatactccaccataatcatcagcatcatcaacgtctttaaagggttttgatgcattggagacttcttgtagggatcgctacaatgactgggaacatgctan

SEQ ID NO: 249167 - DNA, 358 bp, Glycine max
gaattcccgggtcgacccacgcgtacgcccacgcgtacggatttcttactgtattgttcaggtggacagaggtgttacattgagtggggctctacgtaaagcatgacaaatggcttgagaagaacggaataaagaattccaactttgctgtggttacatggtccaactgggattgtcgggtgatgcttgaatctgagtgccgattcaagaacatacggaagcctccttacttcaaccgctggatcaacttaaggattcctttccgtgaggtatttggtgctgtgaaatgcaatctaaaggaagctgtagacataatcgccttggactacgattgtccaacacattgtggtcttgatga

SEQ ID NO: 249168 - DNA, 279 bp, Glycine max
ccattcacacttgcacatgcattttatctcaatccataaaatcacgtaacatcgtgcacttgtaaactcttgcatccatcatcctaagcaaactacatctcagttctctctgaagataactccaatatggaactgggtcactacagaagacctctctataagtactatgctcctacttgtaaacactaccaaaagcttgctccataatataaaaaccctggaagcaacttccataaagccaattctatattcatctccattgctgactgtcatcagcac

SEQ ID NO: 249169 - DNA, 531 bp, Glycine max
  unsure (1)..(531): unsure at all n locations
cgtggatgctgtcgcctcngacgtcagctcacctacgtactgccgtaccggtctggaattcccgggtcgacccacgcgtccgcccacgcgtccgatagaagagccttccatatatagcctcccaaaaaaatgaagagtactggctctttggctctctttctactttgtgccctaacttcatcatatcagccttcagccaccgctgatattgtattcgacaccgaaggcaatcctattcgaaacggcggcacatactatgtgttgccagttataagaggaaagggcggcggaatagaatttgccaaaaccgaaacagaaacatgccctctcactgttgtgcaatctccctttgaagtctcaaagggtctaccactgataatttcatccccatttaaaatccttgacatcaccgaaagacttattttgagcctcagtttcacttatgtacccccctgtgccttaacttcttcttggttgaaccgtattctcaaaggtctgtcaaaagaactccatgttaaacttactggcttc

SEQ ID NO: 249170 - DNA, 456 bp, Glycine max
aattcccgggtcgacccacgcgtccggtgaccccattaaaagtggcacaatcattatattgcagcacatgagaacaaggaagtgggtgcacaggcattttcatgcatccccgatatcaagcaatcttgaggtcagtcgttttggaggataatccgaatctgacaccggtgactattgaaagcttataatagaatgatatgctaagacttgtaaacactatcaaaagattcgtcttcagcatattgacactggaggctatctacatagtcatgataagaaatacatccctattgctactggtcagcacgcagtatgttgtgctcctgaaaagcatgctgtcaatgcgcagctgtcaaccgaatgtgactacgattcccttacgcaaagcatatgatatactcagtatctgttcttattctaaacgggtaaaccattcatagtgagagatcattgcta

SEQ ID NO: 249171 - DNA, 536 bp, Glycine max
  unsure (1)..(536): unsure at all n locations
atgatgaggagctntcatgantactacgagactcatcgcactgctctaccggtccggaattcccgggtcgacccacgcgtccgcccacgcgtccggatgtatcagatctggagcaggagaatagcgttgggagcgttcgcgtgtgttctgcttttcctatcggcctcagcagacgacgtcgttgtgctctctgaagataacttcgagaaggaagttggtcaggacagaggagctctcgttgagttctatgctccttggtgtggacactgcaaaaagcttgctccagaatatgaaaagcttggtagcagcttcaagaaagccaaatctgttttaatcggcaaggttgactgtgatgagcacaagagtttgtgcagcaaatatggagtctctgggtacccaacaattcagtggtttccaaaaggatctcttgaacccaaaaagtatgaagggccacgcactgctgattcacttgctgagtttgtaaatacgggaagaggaacaaatgtgaagatggctacagctccttccatgtagtg

SEQ ID NO: 249172 - DNA, 529 bp, Glycine max
  unsure (1)..(529): unsure at all n locations
agatggatgggccactagactaaaggggactaatgatctgctctaccggtccggaattcccgggtcgacccacgcgtccgagaagcttcccgaaatcgaagtcgacgacggcaccaagaaggtcaccatcctgttcggcagtcaaaccggcaccggcgaaggcttcgccaagggcacagcttaagaaggcaaagcgcgataccagaaggccacgttcaaaatcgtcgatatggatgattatgcccgcgatgacgaataatacgaagaaaggttcaaaaaagagactcacgttcttttctttttagctacatatggtgatggtgagccaactgattatgccgcgaggatttattaatgggttacagaggtgaagttgagactgttcccgtgggcataaaggntgagagcttatgtgttgactttgtgtgcttttgtggaggatttaagggggtgagaaaggagaaaggtggcttcagaatcttcactatggtgtgtttggccctggaaacaggcagtatgaacattttaa

SEQ ID NO: 249173 - DNA, 467 bp, Glycine max
  unsure (1)..(467): unsure at all n locations
ccgggccgacccacgcgtccggtccaaggcacatgatcccacaatggaagaaacaacatcaaccatcatcagggctgcacgctccaccctcacaccttcccaattctcagatctcactcgctccattatctccgccaccaaccaccaccatcgccgcctctcctccctcctctcctccccaacgctcttctctttaacccttcaccatctccacactctcacactcccccagaagaccctcctcatcgcccgccacctcctctcctccctccacctcctcaccgccacgtcgccgcctctgtccaccaccacacggcagcgcgacctcgacgccgcgctgctcctccttctcctctgcgaaacgcacaaccacaacccacatgccctcgaggcaccgttctccgaatggagaaaaaacttgagcaaagtgttctctgattcgttgntaactgtttctctggcacccc

SEQ ID NO: 249174 - DNA, 541 bp, Glycine max
  unsure (1)..(541): unsure at all n locations
agatagtattccttnnatgagncccactgatntcactgtantaccctaccggtctggaattcccggctcgacccacgcgtccgatactctgctgcatatcacacaccacctttgcatataagagagaacagagaggatactctgtcttacatgctgcatcgcaggttatcatgcaggactccatctcaatgaagatctaccatccggatctgatgtccgctatcttcaagggcaagctcgacatctccaacgtctcctcctctaccaacgccggcgcctccgacttactcatagagaaccgttacttgctgatgctgctgaccatctgcgttgtcatactgatccgctgcgtcatcgactgcatacagcgcagatcatcatactgcaatggcaagccttttgagccatctaaactgcgttgcaacaagcttcccgaaatcaaaatctacgactgcaccaaaaatgtcaccatgctcttccgcactcaaactcggaccgtcgaatgcttcaacaaagccacagctcaagatgccaaagcgcg

SEQ ID NO: 249175 - DNA, 526 bp, Glycine max
gctgatagcatgacgaccgtcgtaccggcccggaattcccgggtcgacccacgcgtccgcccacgcgtccgcccacgcgtccgcaactttggaagagaggctgaaaaagcttattcccaagagcaaggatgagatcctcagcttgtcttggatgactttggctatgcagtcactttgtgagagccataatgacattaaaaccatcataacagagcttgagcttcctgtacatgattgggatgagaaatggatagacgtgtacttggacattagtgtgaagttgctagatatatgcattgcatttagctctgaattatcacgcctgaaccagggtcatcttttacttcagtgtgcattgcacaatttaggttcttcctcttcagagcagtatgttcgggcatgttcttcacttgatggttggaaacagcatattggttctggaaaccctaggattgagaaatgtggcagcattttggatgatcttctgcggtcacttgatctttcaaaaggtaaaaagtccgcttaa

SEQ ID NO: 249176 - DNA, 556 bp, Glycine max
  unsure (1)..(556): unsure at all n locations
cgtatgccgttnattatcgctgagaccatgaggactgtcgtaccggcccggaattcccgggtcgacccacgcgtccgggggaacaagatctgcgtggactgctcccagaagaaccctcagtgggcctccgtctcctacggcgtgttcatgtgccttgagtgctccggcaagcaccgcggcctcggcgtccacatctccttcgtccgatccgtcaccatggactcctggtcagacatccagatcaagaaaatggaagccggcggcaacgacaaactcaacgccttcctcgcccagtactccatccccaaagaaactgacatcgtcacgaaatataacaccaacgccgcttctgtgtaccgcaaccggatccaggccatcgctgagggacgtccctggcgcgatccgccggtggtgaaggaaaacctctccgncgganaggggaaaccgccgctgacacaaacgcggaggaacaacgattctggatgggatgatggggttacgaggggagtcctccgagcaagagcatgtcgaccggggaatttatgactctgaatgg

SEQ ID NO: 249177 - DNA, 545 bp, Glycine max
gtagtgcgttgagtgttgctacgagcgtcaggactgtcgtaccggtccggaattcccgggtcgacccacgcgtccgcacaaacagagaattaggcaataagataattaaagatgtctgacgattgcaaaggtaagagctcatggcctgagctagttggagtgcaagggacagttgcggaggctacaattgagagagagaaccctttggtggatgctatcattgtgcccgaaggaaacatggtcatcactgatttccgctgtgatagggtttgggtttggatcgataaagatggaattgtcaaggaagttccccacattggatagaaactgctccccactagctagggatcaaataattgtttccagttttatgttattttattcagaataaagtttcagaaatgtcaaaagattaatgtaataaaccaactagagttggccttgtataatgttttagactcaaaatctgttcttgtcattctatatatataaaaaaaagttaatataacaaaaaataaaagaaattttataaatattataataaa

SEQ ID NO: 249178 - DNA, 565 bp, Glycine max
  unsure (1)..(565): unsure at all n locations
ggttgtagatttttgttgtagactgaaaccctttgagacccttngtanngtccgtaccggtccggaattcccgggtcgacccacgcgtccggcatttttctctcgctctctgccttccatcaccctcgccatttcccttcccaagatagtagaagatggcagacgctgaggatattcaacctcttgtttgtgacaatggaacaggaatggttaaggctggttttgctggagatgatgccccacgtgctgtgtttcccagcattgtaggtcgtcctcgtcacactggtgtgatggttggcatgggccaaaaagatgcatatgttggtgatgaggcacagtctaagaggggtattttgactctcaagtaccccattgaacacggaattgtgagcaattgggatgatatggaaaagatttggcatcataccttctataatgagcttcgtgttgccccagaagagcatccagttctcttaactgaggcccctcttaaccctaaggctaatcgtgagaagatgaccccaatcatgttggagacctttaacaaccctggtatgtatgtagn

SEQ ID NO: 249179 - DNA, 530 bp, Glycine max
catgataatccgtataccgtttggactgccgtaccggtccggaattcccgggtcgacccacgcgtccgctcaacgagaacagaaatctcgtgtggaacaaaagggtaaaagctcgtttgatgctgatggccagtacgaatacgaaccgtgaaagcgtggcctatcgatcctttagtccttcggaatttgaagctagaggtgtcagaaaagttaccacagggataactggcttgtggcagccaagcgttcatagcgacgttactttttgatccttcgatgtcggctcttcctatcattgtgaagcagaattcaccaagtgttggattgttcacccaccaatagggaacgtgagctgggttagaccgtcgtgagacaggttagttttaccctactgatgacagtgtcgcattagtaattcaacctagtacgagaggaaccggtgattcgcacaattggtcatcgcgcttgggtgaaaagccagtggcgcgaagctaccgtgcgttggattatggctgaacgcctttaagtag

SEQ ID NO: 249180 - DNA, 555 bp, Glycine max
  unsure (1)..(555): unsure at all n locations
cgttgccgagccgatngctgataccctgatacaactgcactgccgtaccggtccggaattcccgggtcgacccacgcgtccgcccacgcgtccgcggggagaatgtgctcttaatgattcagactgtgtgataactattgatgacatttataaatggcttgcggctactttctttctctggtttgttctggccatttactttgacaatataatcccaaatgcatcaggtgtgaggaaatcaatattgtactttctaaatcccagttattggatgggaaaaggaggtcaaaaagtgaaagagggtggggtttgtagctgtataggttcagccccacgtcaagaacaaagtacaccagatgatgaggatgtccttgaagaagaaaacaaagtgaaacagcaactaacagaaggtcttcttgatgcaaatgttgctgttcagatacgtggccttgcaaagacatatcctggcacacgtagcattggttgctgctttaaatgtaaaagaactttaccttacaatgcagttaaagggtttgtggtgaactttgcaaaggn

SEQ ID NO: 249181 - DNA, 558 bp, Glycine max
  unsure (1)..(558): unsure at all n locations
cgtggccagtaggctgttgatgatnacgctagcnactcatcgcactgccgtaccggtccggaattcccgggtcgacccacgcgtccgcttgttccttttgaaggttagaagtgctacaatacaaacaatggcagctactcaggaaggtgtgaagcttttgggtattgtgggaagcccatttgtgtgcagggtccagattgcccttaagttgaagggagttgaatacaaatttttggaagaaaatttgggcaacaagagtgatttgcttctcaaatacaaccctgttcacaagaaggttccagtgtttgttcacaatgagcagcccatagcagagtctcttgtgattgttgaatacattgatgagacatggaagaacaaccccatcttaccttctgatccttaccaaagagccttggctcgtttctggtccaaattcattgatgataagattgtgggtgctgtatcgaaatctgttttcacggttgatgagaaagagcgtgagaagaatgttgaagaaacatatgaggctcttcagtttcttgaaaatgaacttgaaga

SEQ ID NO: 249182 - DNA, 564 bp, Glycine max
  unsure (1)..(564): unsure at all n locations
atggtaccctggtggcttatctctgaaantcattgatgcagcngcacctgccgtaccggtccggaattcccgggtcgacccacgcgtccgatttctacacatccctagctctgtcgttccgtcgttgacgatggcgtttggtgtgcgaggccctgacctccgctctctctttcttctctctctcttgtccatcgcttccgccaatgtcttcttcgaagagcgtttcgatgacgggtgggaaaatcgatgggttaaatcagattggaaaaaagatgagaacgtggctggggagtggaaccacacctctggtcaatggaatggagacgctaatgacaaaggtattcaaaccagtgaggattacagattctatgctatttcagctgagtaccctgaattcagcaacaagggtaagacactagtctttcaattttctgttaagcacgaacagaagcttgactgtggtggtggctacatgaagttgctcagtggggatgttgatcataagaaatttggccgtgatactccttacagtattatgttttggccagatatctgcaggtacag

SEQ ID NO: 249183 - DNA, 553 bp, Glycine max
ggatgccgtatgacttacgctgagagcctgcgaccgttgtaccggcccggaattcccgggtcgacccacgcgtccgattccattaaaagctataccatggccatatctccaattttgttgttggctatcttatctgtcatttatggcaatggtgttcttcccattgaagctacccatcatgtttacagaaatcttcagactctatcttctgattcctctgatcaaccttatagaactgcttaccatttccaacctcgcaaaaattggataaatgaccctaatggaccaatgaggtacaaaggactttaccatctgttctatcaatacaatccaaaaggtgccgtatggggcaatattgtctgggcccactcaatatcaaatgatcttgtgaattggactccactggatcatgccatctacccttctcaaccgtctgatataaacggttgttggtcaggctcagccacaatactccctcgggcaagccaaccattttatacacaaggatttaaccctattaagcaccaagttcaaaactaagccatacccaaaa

SEQ ID NO: 249184 - DNA, 568 bp, Glycine max
  unsure (1)..(568): unsure at all n locations
gtatgccgagtagtaaatccgatantcaactggcatctgtactgtacgtaccggttcggaattcccgggtcgacccacgcgttcgaccacgcgttcgaaatatattatcttggtaaaaaaaaaaaaaaaaaaaaaaagaaaaaaaaaaaaaaaaaaaaaaaaaaaaaaaaaaaaaaaaaataataaaaaaaaaaaaaaaaaaaaaataaaaaaataaaaaaaaaaggacaaaattatagaaggtgactagtatttataaatagaacaaacaaaggataaattaccttaaaaggaccattaaagtaaaaaaaacagcataatgtatacaatcacttacattggaaaaagtattatttgacgcaatttttattgataaaaaaaaatatcgaattaatattgtgaattgaactacaatgaggtatgtaataaacccttattaaaaatatggtaaaaacaaataggaggatagtgatttccataattaatattaatttaaacgcatttgataaatacgaaaattaataataataatgattatttaaaataaatacctaagtacgttttaaag

SEQ ID NO: 249185 - DNA, 529 bp, Glycine max
tttgatatccgagagcgatcgcactgccgtaccggtccggaattcccgggtcgacccacgcgtccgatgacttccatagcagatgcaaatgacagatgggcatcttatgctggaccgggaggatggaatgatcctgatatgctggaagttggaaatggagggatgaccacagaagaatatcgtgcccatttcagcatatgggctttagctaaggctcctttattggttggttgtgatattcaagcaatggataataccacatatgaactgataagcaaccgagaagttgttgcagtaaatcaagacaaacttggaatacagggaaagaaggtgaaaaacaataatggtttggaggtgtggacaggtcctcttcgtggtaacaaggtagcagtgatcttatggaacagaagttcatcaaatgcatcagtgactggatgttggtctgacattggcttggaaccaggaactatagttgatgccaagagatttaatggagcactcaacgcaaacatcggtttcaggaaaaata

SEQ ID NO: 249186 - DNA, 566 bp, Glycine max
  unsure (1)..(566): unsure at all n locations
cgtgtgccagtatgnctgatcgctgcnnaactttcgatgcagctagcactgccgtaccggtccggaattcccgggtcgacgccacgcgtccgcccacgcgtccgcacagctagcagatattacatacacgtgaatcactaatggagccatggagaagaaatcaatagctgggttgtgcttcctcttccttgttctctttgttgctcaagaagttgtggtgcaaactgaggcaaagacttgcgagaacctggctgatacatacaggggtccatgcttcaccactggcagctgcgatgatcactgcaagaacaaagagcacttgctcagaggcagatgcagggacgattttcgctgttggtgcaccaaaaactgttaaatggatccattcactccaacgtgaagaagatgcatgcagcgcttatttataaaaaataaaactactatatactatatataataagactggcgctgcatcaatgacctatgtattatagtatatattattaccgatgtcagaactatagatgcatgtactgtgcataaatgctgaattatgtacttatgtt

SEQ ID NO: 249187 - DNA, 561 bp, Glycine max
  unsure (1)..(561): unsure at all n locations
cgttgctcagtntgcctatccctgaaaacgccagcnactcatagcacctgcggtaccggtccggaattcccgggtcgacccacgcgtccggattatcctaagtctttgggaatagtgctgcaatggcttcaagtcaggaggaggtgacgcttttgggagctactggaagcccatttgtgtgcagggttcatattgccctcaagttgaagggagttcaatacaaatatgtcgaagaaaatttgaggaacaagagtgaactgcttctcaaatccaacccagttcacaagaaggttccagtgtttattcacaatgagaagcccatagcagagtctcttgtgattgttgaatacattgatgagacatggaagaacaaccccatcttgccttctgatccttaccaaagagccttggctcgtttctggtccaaattcattgatgataaggtttttggtgctgcatggaaatccgttttcacagctgatgagaaagagcgtgagaagaatgttgaagaagcaattgaggctctgcagtttcttgagaatgagattaaggacaagaagt

SEQ ID NO: 249188 - DNA, 545 bp, Glycine max
tgtcgtgcgtatgagtgtttccgtatgctggatgcacgttgtaccggcccggaattcccgggtcgacccacgcgtccgctgatgtacaaagtacagatgcaatgctatgaggatgctaaactgatgaagctgttccctgagattgttagatctctgtatgaccaggatgtgctggctgaagataccattcttcattggttccgaaaaggaacaaactccaagggcaggcaaacctttgtgaaggcgctcgaaccctttgttaattggctggatgaggctgaagaggaggagtaagtctggtggaggttcatggctagggctgaagaaattatcttgtcttgcagcccttgtaccattagctaagatattggctttgaagtctataagttcagttctgcctagtactaattatctatttaatttgagtttgtgtttgacttcttcattttgctcttcggacttattactgtgcctgtgttttcctcacgccacattgatatggtatactagtgccttattgaatttgaagtgatatttcattatgg

SEQ ID NO: 249189 - DNA, 553 bp, Glycine max
  unsure (1)..(553): unsure at all n locations
tgatatgccgtgtgcgtgatgctaccaggcttagtactgtgtaccggcccggaattcccgggtcgacccacgcgtccgcccacgcgtccgcccacgcgtccgccaaagctctccacctcctccagcatctcctcttcggttttcataaacaaattatgcggctcgcggatgaacgcaagctcctcatggtccacatgccagccacgagacagccagttgtgtggcggcacaaggcgaaaaaggaaaaaagcaaaatcacttcgcaatcgattacggttttaacgccatcgttgccgccgcgaacgggtcgaagctcacgattctgaagtccccgacgggccgcgagatcgaggcccactatgagttgggccgcgaactggaccacagcgagttcgggataacctacctctgtacgaacaaggagttggggatttcatatggttgccgctgaaagattgaagcttttttggtgtagaggaagatgggggcttagaattgtggtgtggggtgcaattttggggtgcgtgattctactgttggntaatccagtgcn

SEQ ID NO: 249190 - DNA, 551 bp, Glycine max
agattgccgagtactaattccgataccattgatacagtcgcactgccgtaccggtccggaattcccgggtcgacccacgcgtccgaccatgttgggcaagtggagtcaacttatagatcacgggacaagccatatgggcattggggatgctgatagaaatgctgtatcactaacaacaactgtaaacaatcattatggagccgggtttaactctacttctactggtatcttgggcaacaatgagatggatgacttctctacttccactgatatatcccctgataaactaccttcagattcagcaaattttattgaaccaaacagaagaccattgtcttccatgactcctcttatcatcacaaaggatgaccagttagttgcggtacttggatggagctgtggaatgaacattattgcaacaatggttcaagtatttcttaatcatttcatcttgtgaatgaaaccctttgatgcagatttgagctcaatgatctatcacaagccaatgccaaaagtagtttactatgagaactagaatgctcataaggcct

SEQ ID NO: 249191 - DNA, 554 bp, Glycine max
  unsure (1)..(554): unsure at all n locations
gattcgcaggatgccgtangctgagaacccagcnactcatcgcactgccgtaccggtccggaattcccgggtcgacccacgcgtccgaaattccatacacaatgatgaagtttgcttcttttgagaccattgttgagctgatctataagcatgccatcccaacaccaaagaatgagtgcaccaaaagcctgcaacttggtgtcagttttgctggtggatatgttgctggtgtactttgtgcaattgtgtctcatcctgctgataatcttgtctcttttctgaacaatgcaaaaggagcaacagttggtgatgcggtgaagaagcttggtttgtggggtctctttacgcgtggtcttccccctccgaattgttatgattggaactcttactggagcccaatggggaatatatgatgcattcaaagtcttcgtcggattgccaaccactggtggtcctgctcctgcagctgctccagcttctggttctgagctagcaaaggcatagaatgtccaatgatgacaagcaacaatgttgtacgaaacttagaaagccan

SEQ ID NO: 249192 - DNA, 409 bp, Glycine max
aattcccgggtcgacccactcgtccggggacaaatttagtgtttgaagatgaaatcactgcattacaacctgaagtagataagttgaaaactctaaatgtgaacaaaattattgcactgggacattcgggttttgaaatggataaactcatcgctcagaaagtgaggggtgtggacgtcgtggtgggaggacactccaacacatttctttacacaggcaatccaccttccaaagaaggtgcctgctgggaagtacccattcatagtcacttctgatgatgggcggaaggttcctgtagtccaggcctatgcttttggcaaatacctatgctatctgaagatcgagtttgatgaaagaggaaaacgtcatctcttcccaatggaaatcccattcttctaaacagcaccat

SEQ ID NO: 249193 - DNA, 554 bp, Glycine max
  unsure (1)..(554): unsure at all n locations
gcttatgccgtgtgcggatgctgaataaactgaggaccgntcgtaccggcccggaattcccgggtcgacccacgcgtccgtgttaccatttgctcccagtacagagcttaaccgagcttcacaaagatgaatcgggaaaagttgatgaagatggccggttcggttagaactgggggaaagggtaccatgagaagaaagaagaaggctgtccacaagacaacaaccacagatgacaaaaggcttcagagcaccctgaagagaataggggtgaatgccatcccggctattgaggaggtcaatatctttaaggatgacgtagttatccagtttctaaatcccaaagttcaagcatccattgctgctaatacttgggttgtcagtggttctccacaaaccaagaagttgcaagatatactccctagcattatccaccaattaggaccagattacttagaaaacctgaagaagctatccgagcaatttcagaagcatgctcctgaatgagcccgcggttctaccacagctcaagaggagaatgatgatgacgatgtccg

SEQ ID NO: 249194 - DNA, 547 bp, Glycine max
  unsure (1)..(547): unsure at all n locations
ggtttggcgtataagtgtcgctgatacatgacgaccgtcgtaccggtccggaattcccgggtcgacccacgcgtccgcgcggatgaactgcgttctgatgttattttcagtgtttctagaactgggggccatttgggctcaagccttggtgtggtggaactcactgttgcacttcactatgtcttcaatgcccctcaggacaagatactgtgggacgttggtcaccaggttggttttcaacttccttgctgctttttgctttacttgttctaaactaaattggacaaccttgtatgaatttgcagtcttacccgcataagatactcaccggtagaagggaccagatgcataccatgaggcagacaaatggcttatctggcttcaccaaacgttctgagagtgaatntgattgttttggcactgggcacagctccaccaccatttcggcaggacttggaatggctgttgggagggatctgaaagggaagaaagaataacgtggtttgctgtataggcgatggtgccatgacagcatggcaagcttatt

SEQ ID NO: 249195 - DNA, 548 bp, Glycine max
  unsure (1)..(548): unsure at all n locations
gatagccgggtggtgtgctacgaccatcgagacngtcgtaccggcccggaattcccgggtcgacccacgcgtccgcgaattagggttttccaattcgcagagcaactcaacacaacgaaccaaaccaacaatgtggcagccgcagcctcagtcgcagccgcaacacgggcaagcggcgctggagcaggtgcagtgcttcggtcgcaagaagacggcggtggccgtgacctactgcaagcgcgggcgcggtctcatcaagatcaacggctgccccatcgagctcgtcgagccggagatcctccgctttaaggccttcgagcccatcctcctgttgggaaagagccgcttcgccggcgtcgacatgcgcattcgcgtcaagggcggcggccacaccttccagatctacgccattcgccagagcatcgccaaggcgctcgtcgcgttctaccagaagtacgttgatgaacagagtaagaaggagatcaaggacattctggtgaggtacgatcgtaccttgctcgtcgcggatcccaagcgcttcgagcccn

SEQ ID NO: 249196 - DNA, 552 bp, Glycine max
  unsure (1)..(552): unsure at all n locations
tgttcggtggtgcctatcgctgataccctgcgnacgatcgcactgccgtaccggtccggaattcccgggtcgacccacgcgtccgaaaaggtcaacacaggctctgcctgttgctttgatgattcatgataactcgtcggatcgcacggcctttgtgccggcgacgcatcattcaaatttctgccctatcaactttcgatggtaggatagtggcctaccatggtggtgacgggtgacggagaattagggtactactatagtgctatcacatttcaaaaaaaaaataaaaataaaaaaaaaaaaaaagggcggccgctctagaggatccaagcttacgtacgcgtgcatgcgacgtcatagctcttctatagtgtcacctaaattcaattcactggccgtcgttttacaacgtcgtgactgggaaaaccctggcgttacccaacttaatcgccttgcagcacatcctcctttcgccagctggcgtaatagcgaataggcccgcaccgatcgcccttcccaacagttgcgcagcctgaatggcgaatgggaccg

SEQ ID NO: 249197 - DNA, 488 bp, Glycine max
cggtctcggaattcccggatggacccacgcgtacgggactggtgcactgatcacaatattgagttcattgaggcatgtgcttccaatgctgattgggacaaatgtgtgtcgattgatggtgatttacaatgagttgagcgtctctacggtgcactttctgctcatatgtggcctggaatggtattgaaatctggcaataggataaatcaactgtcatttccagagaaagaagagttatcttcagaagaatctgattatgaacaagagtatgaagtcttatcagctggctcagccgattgggatgaaagtgaacaacgatggatttctgcatcgtccttagattcatggggatcagctcctcaaaacaatgctggcacagttggtcaacatgaggatggaattaaatctgataaagagtcacatgctacaacctcaagcactgcaattcacgatgagagtgaaaaggatattgtgcacaattccatgga

SEQ ID NO: 249198 - DNA, 548 bp, Glycine max
tggagtctcgtatccacgtcaatccgtaggtcgatcgcacctgccgtaccggttcggaattcccgggtcgacccacgcgtccgggttacttcttcttcttcttcttcttcttcttcttctctctggaattttccgtgacttgggtgtgcatcgatggcggcgatcagtctccggaaggggaacacgcggctgccgtcggaggtgaaccgcgtgctgtacgttcggaaccttcccttcaacatcacgagcgatgagatgtacgacatcttcagcaagtactgcgccattcggcatatccgcatcggcaccaacaaggacactcgcggaacggccttcatcgtctacgaggacatctacgacgccaaaaccgccgacgaccacctttccggcttcaacgtctccaaccgctacctcatcgatctctactaccagcaagcgaagatgatcaagaagttcgatcataatgagaactgtgacgatatctcgcgcattcaggataattactgcgttttcatcaaagattagtatattaagtacttccttctttg

SEQ ID NO: 249199 - DNA, 563 bp, Glycine max
  unsure (1)..(563): unsure at all n locations
agtgtgcacgagttggctgttaactgaaangcctacnttctgctagcactgtctgtaccggttcggaattcccgggtcgacccacgcgtccgattcactccctctctcttgtcttttcctctacgttcctgcattgctcgtgtgaaacgcggaccatggccggcggaggtttcaccagcggcggcggcgccggagatttcgaggccaaaatcactcccatcgtcatcatttcatgtatcatggctgccaccggaggtctcatgttcggctacgacgtctgcgtttcaggtggtgtgacgtctatgcccccgttcttgaagaagttttttccgacggtatacagaaagacagtggaagagaaaggactggacagtaattactgcaaatacgacaaccaatgattacagcttttcacgtcgtctctgtatctggctggtttgacttcgacgttctntgcttcatacacgactcgtaggttgggaagaaggctgaccatgttgattgctggggtattcttcatctgtggaggtgttcttaatgcttttgcttaagactttccattg

SEQ ID NO: 249200 - DNA, 557 bp, Glycine max
  unsure (1)..(557): unsure at all n locations
tgttctcgggaggcgttcctgaaaccttagncagcnatagcactgccgtaccggttcggaattcccgggtcgacccacgcgtccgctcactttatttgaatttctaatccgtgaggttgttgcgcttcagaaatggctaccggggctgctgtgccaactacgttttctaccctcaagacatgggattccagtttggggtttgcaaaaaacatagattttgtgagagtttccgatatgaagagcatgaaatcttctgcgaggaaaagggtgtcaattatcaggaactcaaatcctggccaagatattgctgaacttcaacctgcatccccaggaagccctcttttggttcctaggcaaaagtattgtgaatcattgcacaaacccatcatgagaaaaacaagcacagtaatggttggtaacgtggctattggtagcgagcatcctataagaattcagaccatgactacaactgacactaaggatgttgcttggacagttgaacaagtgatgagaatagcagattaaagagctgatattgtacggattacaattcaggg

SEQ ID NO: 249201 - DNA, 546 bp, Glycine max
ggtttgccgtgtagtgttgctgatacctgaggtactgtgtaccggcccggaattcccgggtcgacccacgcgtccgggggtttaaccgtgtacctctcacttcttctacgaccatcatcttccttccttccttcagtcgttctaactcttagcagccatggcgagcaccaaagttcagagggttatgactcagcccattaacttgattttcaggtttcttcagagcaaagcacgcattcagatttggctatttgagcaaaaggatttgaggattgaaggccgaatcattggttttgatgaatacatgaatttggttcttgatgatgctgaagaagtgaacatcaagaagaagagcagaaaaacattagggaggatccttcttaaaggagataacataactttaatgatgaacacggggaaatgatgaacactccttgacagttgttaactatgttcctatcaaacaagaaggcataatgatcttttccttgggtttggattcatctaacaaactctcaataccgaagctgatgatttaatgataag

SEQ ID NO: 249202 - DNA, 289 bp, Glycine max
gaattcccgggtcgacccacgcgtccgaaaaaaaaaaaaaaaaaaaaaaaaaaaaatataaaaatataaaaaaaaaaaaaaaaaaaaaggaaaagggaaaaaaaaaaaaaaaaaggagaataaaaaaaaaaaaataataaaaaaaaaataaaaaaaaaataaaaaaaaagggggctttttattaaggtccaaatttatatttctctattatattactaaaatatttttattttgtggccccaaaattaatttatttggccttatttataaaactttataaatgtaaaaa

SEQ ID NO: 249203 - DNA, 551 bp, Glycine max
ggatagaggtatgtatagtcaactgataccatgaggactgtcgtaccggcccggaattcccgggtcgacccacgcgtccgagacattgtacaatgagttggaagtcgttgaaggaatgaagctcgacaggggatacatggctccatatttcataacaaaccagaagaaccagaaatgtgaacttgaggatcctctcattataatccatgaaaagaaaatctcaagcataaatgctatcgttaaagtattagagttagctttgaagagacaaagatctttattgattgtcgccgaggatgtggaaagtgatgcccttgcaactcttattctaaataaacttcgtgctggaatcaaggtatgtgccatcaaagctcctggttttggtgaaaaccgtaaatctggtctccaggatcttgctgttcttacaggaggtcaacttatcaccgaagagcttggtttgaatcttgaaaaagtagacctggacttatttgggctctggcagaagataacaatttctaaagatgacactgtcagtcttgatggagctggtg

SEQ ID NO: 249204 - DNA, 560 bp, Glycine max
  unsure (1)..(560): unsure at all n locations
tggtcctcgagatgtgcatctccgaaaatcantgaagcngtagcactgccgtaccggtccggaattcccgggtggacgcacgcgtccggccatgaaaaggactatatctggtatgctgggcttgcttccatctgatcagtttcacgttgtcattgaggccttgtgggaacccctttccaagttactaatttcttcaatgatgactgggtatacgctgcacaatgttgaatatagactttgtcttgataaaaaccttgatatgtttgaaggagatatagagaagccaaaggcataaagtacgaaagtggacttacaagggttgatgcatgacagtgtaaatgtaattgactttggtagagataagagcttgtcttctaaagttgaaaagctttcatgaagacgctgacattcaagaacttggtgacatatctgcataagctctgcaatatatttttaatctgcaatctcgcttgtcttccatgaaaatagagctgcattaaattaataagaaaaattctgctcttcaaatgcaacagttttttgatatagaaatgtacatt

SEQ ID NO: 249205 - DNA, 565 bp, Glycine max
  unsure (1)..(565): unsure at all n locations
tgtgccgagtgctgttgctaccatgctagctgcntctgcactgccgtaccggtccggaattcccgggtcgacccacgcgtccgcaatcaccgtgctctttatatagctgcttcgtactacaaacactgactagggtgatggagaccattttaagtatcactggttaacacacatcttcacagtaactcatatgataccactgaaactctgaaggatcgaacatgaatttgaaactgcgactcatgattcaagatatataacctatcaactttctatggtactatagactgcctaccatgctgttatacggttcgaagacaaattactgattctaatgatgagagacatcctgactaacacctaccacatacaatgcacgcaccaagtgctcagattacacaatactgacacgaggatgcactcacggtaaataatagattcaggactcattgaagcctgaaagtatgaatgagtacaatctaaatgcctttactagcatccatgggacagaaccctaggactcggaatcctaggtaatttcatattcataacccctaataatgag

SEQ ID NO: 249206 - DNA, 559 bp, Glycine max
  unsure (1)..(559): unsure at all n locations
tgtgttccgtgatggtgtctccgaaattcangtatgcagtagcactgccgtaccggttcggaattcccgggtcgacgccacgcgtccgggcataatgagggagcttctacttgatttctatacaagttctggaaatagggagcccgagaatataatcatattcagggatggtgttagtgagtcccagttcaatcaagttttgaacattgaacttgatcaaattatcgaggcttgcaagtttttagatgaaaagtggaatcccaagtttttggtgattgttgctcaaaagaaccatcatactaaattctttcaacctggagctcctgacaatgttcctcctggaacggtaattgataacaaaatttgtcatcctcggaattatgatttctacatgtgtgcacatgctggaatgattggtactagcatgcctacacactaccatgttctgttagacgagattggcttttcacctgatgatctacaggagcttgtgcattcattatcatatgtgtattataagatcacaacttgcatttttaatcttgctccaatattcttt

SEQ ID NO: 249207 - DNA, 549 bp, Glycine max
  unsure (1)..(549): unsure at all n locations
gggatggccgttgcgtgttgcctggtanactgacgactgtcgtaccggcccggaattcccgggtcgacccacgcgtccgcaacattttacactcttttcttcttctcgttgttgcttcgctgttgaatcatggatcagggggtcgatttcagcgctgcccattccatgggaaccactatcatcggcgttacttacaacggcggtgtcgttctcggagccgactctcgaaccagcaccggagtgtatgttgccaaccgagcatcggacaaaatcactcagctcactgataatgtatacgtgtgtcgctctggatcggctgctgattctcagattgtctctgattatgtgcgttacttcctccatcaacacacaatacaacttggacaacctgcaacagttaaagttgctgcaaaccttgtccgacttctctcatataacaataagaatntcttagagaccgggttaaattggtggtggatgggataaatatgaacgtggacaaatttatggagttcctctgggtggaacaatagtacaacaaccttttgt

SEQ ID NO: 249208 - DNA, 546 bp, Glycine max
  unsure (1)..(546): unsure at all n locations
cgattgcgttgcgtgtccctcgtcactaagactgtcgtaccggtccggaattcccgggtcgacccacgcgtccgcttgtactgttctattagttcatactaagttctgaaaatgagttccaaggttttgcttggtctacttatgttcttggccactatacttctgatctcctctgaggttgcacccgatgatgcatacgagaattttgacaaaatagatgggaagcctagtgcagatggggtagatgaaagcaagtattggcgtggcggctatggtggcggctatggtggtggttatggaggtgggcgtggaggctatggaagtgggcgtggaggctatggagggggacgtggtggatatggcggcggacgaggtggctatggtggctggcgtggtggctatggcggcgggcgtggtggcgggcgtggtggctatggtcctaatgaacataacgaggctggcgttgatgctaaccctgacaacttagaatgcaactttctaaaggctatatatggggttaagttattgcattaaataaaacttctn

SEQ ID NO: 249209 - DNA, 547 bp, Glycine max
tgtattgcgatgtgcgttgactgataaatgatagcgatcgcactgccgtaccggtccggaattcccgggtcgacccacgcgtccggagtttttgtgtgctcttggattggttgttagaatggagggtcagagtaagggtagttggaatgtgatggaagggagtgagggcaaaggaagggagtttgtggtggaaaagtctgcatcatcaatagtgggaacttgtgatttggttctaaggattttggcctttttactaacccttgtggctgctgtagttattgggacagataagcaaactgccattgatccaatcaagcttgaggattctatgccaactttgtacgttcctgttgcagctaagtggcattacttgtctgcctttgtctattatgtggaggcaaatgcaatagcatgtgcatatgcaatactgtctctcttgctcactcttgcaaataggcgtaaaggcaaaggaacgatggatacattgatcactgtgctggacacagttatggtagccttgctcttctatcgcaactgaaccgccatt

SEQ ID NO: 249210 - DNA, 554 bp, Glycine max
aggtcgaggtgtgccttgaggctgaatagactgagtaccagtcgcactgccgtaccggtccggaattcccgggtcgacccacgcgtccgtgcagttatggttaaaaatgaaagtgagaagaacatgggttgacattataaatagaatgaagttgtgaaagatgaatctttgtatgatggtggatagggagttctggtggaaacagaaagaagttggactcaaaatctttttttgtaacatattatattataaaaatacctataaatctatgttgctttggatgtgtgtgtttattttctttaaaagtgttgcatgtttatgtgtgtgagtgtgggtgcacatactttttacagtaactgttttggaactccacgtatacggtatatcgtgattcaggtgaatgagaagttattcccatgccaactatcaaataaaaatgttgacatggctgataaggctgtgcaattggctgttgaaacatggggcaagagatccttaactgaacttgaagcatatgaacgcctatcctatacctgtgaaaagggtcctgctca

SEQ ID NO: 249211 - DNA, 402 bp, Glycine max
tgccgtaccggttcggaattgccggatggacccacgcgtgctgttgaattcttcaatcatgtgaatctgctatatggtacccttacagagctcgggtctcgtgagaattgggggacaatgtctgcaagacccaagtatgaatatagatgggctgattgtgtacaaattgagaaacctattgaggaagctgctccaaaatatgtttaatatataatggactggattgaagcacagttttatgatgaatccatattcccacagaagcttggttcaccattttctcccaactttaaagaagcttttgaagacaatattcaagcgtgtgatccgtgtatatgctcacatataccattctcacttttataaaattgtgagccttaaagaagaagtccacttaatcac

SEQ ID NO: 249212 - DNA, 569 bp, Glycine max
  unsure (1)..(569): unsure at all n locations
tgtgtttctagaggatgccgtccactgagacccctaccncacctacgnactgacgtaccggtccggaattcccgggtcgacccacgcgtccgcccacgcgtccgacaagttctctgagttgttttgtgagatagcacatagcatagcaaggaaggagtattacaaccgaaaccctgaagaaaaaaagagtagaggaagaaaaaacacctgcaccaccaacgatgggtgtggattactacaagatcttgcaggttgataggagcgccaaagacgacgacttgaagaaagcttataggaaacttgctatgaaatggcaccctgataagaaccccaacaacaagaaagaagctgaagctaagtttaagcagatttccgaagcatacgaggtacttagtgatccccaaaagagagcaatctatgatcaatatggagaagaaggtctgaagggtcaggttcctnctnctgatgctggtggtgctggaactggaactatcttcttcttcacaggagatatcccnggttcggttccggtcaatccgaggaatgccgatgacattttttgcaaattt

SEQ ID NO: 249213 - DNA, 449 bp, Glycine max
cgtaccggtcttgaattcccgggtcgaggcacgcgtccgctgcgggttagcttggggaattttctgtttttcactattctagctgttctggtggttggtgtgaaaacccagagggatccccgggatagtatgcaccatggaggttggatgatgaaaattatctgctggtgccttctggtaatctttatgtttttcgttccaaatgagatcatcagcttctatgaaacaatatcaaagtttggctcgggcatgtttcttcttgttcaagtcatgctcttgttggattttgttcatggatggaatgacaaatgggttggatatgatgaacaattctggtacattgctctatttgttgtttcccttgtttggtatgtggcaacatttgcattctcaggagttctctttcacttctttacgccatctggacaagactgtggactcaatgtctt

SEQ ID NO: 249214 - DNA, 558 bp, Glycine max
  unsure (1)..(558): unsure at all n locations
aggacagtatggtgtttccgtatatctgtatgcntctgcactgtcggtaccggtccggaattcccgggtggagccacgcgtccgattagttcattctctttgcgcagatccctacctctcctttcaagatgcagatcttcgtgaagaccctcaccggaaggaccatcacccttgaggtggaaagctctgacaccatcgacaacgtcaaggccaagatccaggacaaggaaggaattcccccggatcagcaacgtctcatcttcgccggaaagcagctcgaggacggccgtaccctcaccgactacaacatccataaggagtcaacccttcaccttgtccttcgtctccgtggtggcatgcagatcttcgtcaagactctcactggcaaaaccataaccctagaggtttaaagctctgacaccattgacaacgtcaaggtcaagatccacgacaaggagggaatcctcccagaccagcaacgtctaatcttcgactgaaagcaacttgaggactggctcaccctttgcgattacaacttcataaagattaattcatcaa

SEQ ID NO: 249215 - DNA, 546 bp, Glycine max
cgtatcggtgttcgtgtctccgatagccctagtactgtcgtaccggtccggaattcccgggtcgacccacgcgtccgcccacgcgtccgcccacgcgtccggcagaatcaggctgaggcacttgatctggaaaaaaccgtgcttgagacagtagaggaagctgcagaggactggaggattgatgatattaaagggctccttgggcgttgtaattttaaagctgatatgcttgaccgaaaagtttcactattgagtggcggtgagaaggcacggctggctttttgcaaattcatggtaaaaccatcaactctgcttgtgttggatgaaccaaccaatcacttggatataccttctaaagaaatgctcgaggaggcaatatatgaatacgaaggcactgttatcacagtatctcatgaccgatactttattaagcaaattgttaatagagtgatagatattaagatggctctatacaggattatgcaagtgattacaattattattatagaaaatcttgatgctagggaagagtactggacgcaagtg

SEQ ID NO: 249216 - DNA, 551 bp, Glycine max
  unsure (1)..(551): unsure at all n locations
ggtaggaggttgcgtgtcgactgataccatgaggtacgntcgtaccggcccggaattcccgggtcgacccacgcgtccggcagaactctgcttcttcggattccgatcgcacgcgccgtcaccatggtgaacgttccgagaaacaaagaagacatactgcaagagtaaggagtgcaggaagcacacgctgcacaaggttacccaatacaagaagggtaaggatagcattgctgcccaaggaaaacgccgttatgatcgcaaacaatccggttatggtggacaaactaagcccgtctttcacaagaaggctaaaaccaccaagaagattgttctgaggttgcaatgccagggttgcaagcatgtctcccaacacgctattaagaggtgcaagcactttgagattggtggtgacaagaaaggcaagggaacatcactcttctaggttgagaattaggatttagagctctatgtttcagcaatgttgggaatgtttgtatctctctggattttatctgctaagtatattttattattttgcaacaccttgttat

SEQ ID NO: 249217 - DNA, 344 bp, Glycine max
cggaattcccgggtcgacccacgcgtccggtcatacgttattccccagacgtttcgatgtttgcatcaggggatgtcaatcgagaagctgtagtgtgggaccgtgcctcccgagaggtgaagctgaagaacatgttgtaccatactgctaggataaactgcctagcgtggtcccctgatagccataggattgctacaggatcactcgacacatgtgtcatcatatatgaagttgatcagcctgcatctagtagaattaccataaagggtgctcatttaggtggggtttatgggttagcatttactgatgaatatagtttggttagcttaagtgaagatgctttt

SEQ ID NO: 249218 - DNA, 538 bp, Glycine max
  unsure (1)..(538): unsure at all n locations
taccgagagcangtagtacagtcgcacctgccgtaccggttcggaattcccgggtcgacccacgcgttcgggaatttcttagacaggcaaaggctgctcaacttttcatggcatcagagtcatttgttgtcgatgatatgcttgagtctgatctttccaaggcttttggcgggatggatagacttgacatgttttttccatttgatccatgtttgttgaagagaagtgaaagctacataaggccacattttgttcgctggtcaaaagtcagaactacatatgatgacgataacgacaatgatgaagtcagtgatagtggcagtgaattatcagatgatgattttattgacaggaacgccaaggatatgattgacgatgatatgatggtgagcgttgaaggcgctgattttaaccctgacttgaacaaaatgtctattactcccagaaaatcttgttaacattggtttgagacaccgttgaattaatgtacgcgaatgtcagctagaatcataaccgtcactagttccgaatctctgtg

SEQ ID NO: 249219 - DNA, 557 bp, Glycine max
  unsure (1)..(557): unsure at all n locations
tgtttagtctgtcctatcancatgactcccttataccgatcgcactgacgtaccggtccggaattcccgggtcgacccacgcgttcgcagagattacaatccgcggttaatgccaaggactctgaatcttcaaattccaataaaatgatttggctgcattttggggttaacagtggtgcgacaaggtttgctatagagaaacaagctgtcaacgaggctaattttcgatgccctgatgaaatgggatggaagccccataaagtccccatagttccttcggatggtggaatttcacgaacaagggagactacacttcctgttgtggagatcaccaaagccttgacagagaatggatatgaagttatggtatcagatgatgcaggcaggtttgtgtgcaattatgtttactatcattcccttcgctttgccgagcataacgggatcaaatcccttttcgtgcacgtgccactctttgtgacaataaatgaagagactcaaatgcaattcgcagcttccttggtagaagggcttggctctatacctcagtagtaccatta

SEQ ID NO: 249220 - DNA, 559 bp, Glycine max
gagtcgcgtatgcgtgtcgactagacgatgagactcatcgcactgcggtaccggtccggaattcccgggtggacccacgcgtccggcagttatacaccctcgagaatggtgaaattccaggcaaaattataaaaccattttttgctctccgtccaaacggcagatccgatccgccctacaatcccctctcagtttttctctcgaggatccggtgaaacgacatggcgatggtggaccagcctctgtatccgattgccgttttgatcgacgagttgaagaacgaggacattcagctgcgcctgaactcgatccggaggctctccacgatcgcgcgcgcgctcggcgaggaccgcacgcggaaggagctgattccgttcctcagcgagaacaacgacgatgacgacgaagtgcttctcgcaatggccgaggaattaggcgtcttcattccctacgtcggaggcgtcgaccacgccaacgtgcttcttccttccttggagactctcttgcaccgtgaggaaacctgcgtcagagacaaatcggtgagtcgctgtgcaaaatt

SEQ ID NO: 249221 - DNA, 402 bp, Glycine max
accggcctcggaattcccgggtggacgccacgcgtccgatcgtctcttcctcaaactctgaacctttcgtgcagcgcagagctttgctggcataccgaccgtgacgaaattaacgtctctacgtaacagcacacagcgatttccccaaatcatcgaaaccctaactcgcgattcccaatcgaaaccctaactcgggatggcgattttgctgggcgaaattcttcaatcgctggagctgtggctgaagctgatcaagaacccgcagccgcagccctacgtaaaccctaatctggaccccgttttgctggtgcccggtgtcggtggctcgatgctgcacgccgttgacgaaaccgacggaagccatgaacgcgtctgggttcgctttctcaacgccgagtacac

SEQ ID NO: 249222 - DNA, 541 bp, Glycine max
  unsure (1)..(541): unsure at all n locations
gctgatanccttgagaaccgatagcactgccgtaccggttcggaattcccgggtcgacccacgcgtccggaacctcagagatcttcaacgcgaattgtagaacaaagccaatgatctcagcaagcttgaaaaggaaattgcgaagaatcaccaaatgagaaagaaatacacggtccagcttggcgagaacgagctcgtccttaaggaactggatttattgaaagacgacgcaaatgtttataagttgattgggccagtacttgttaagcaagatttggccgaggccaatgcaaatgtccgcaagagaatcgaatacatctcagctgaattgaagcgtctggatgccactgttcaagatttggaagagaagcaaaatagcaagaaagatacgatactaaaattgcaacaaaggattcaatcatttcaggctgggaaaggcaaggcgtaattttcccttacatatnggtccaggcattgggatttaaccgggctactgctaaggttggatggggatttgaattttgtgcctctttgtttggaa

SEQ ID NO: 249223 - DNA, 561 bp, Glycine max
tgattagtatgcgtgtctccgagaccaccgatacctgtagcactgccgtaccggtccggaattcccggggggacccacgcgtccgcccacgcgtccgctccgatcgcatagctcgcaaccacaatcatgccttccggaagaaggactctcttgaaggtcatcattctcggtgacagcggagtggggaagacgtctttgatgaaccagtatgtgaataagaagtttagtaatcagtacaaggcaaccattggagcggattttttaaccaaagaagtgcaatttgaagataggcttttcaccttacagatttgggatacagctggccaagaaagattccaaagccttggagttgctttctatcgtggtgctgattgatgtgatcttggatatggatgttaattcaatgaaatcatttgacaaccttaacaactggatggaggaaattctgattcaaagcaattcttaccattcagaggaatttccttttgggtcatacgaaacaaaagtgactttgatggtggaaacaacatggttgtggttgagaagaaagcttatgcttgt

SEQ ID NO: 249224 - DNA, 557 bp, Glycine max
  unsure (1)..(557): unsure at all n locations
agattgctcgtatgctgtttctgatnagcttgtatgcagcngctactgccgtaccggtccggaattcccgggtcgacgccacgcgtccggaggaaactctggtggaggcccgcagcgatactgacgtgcaaatcgttcgtctgacttgtgtataagggcgaaaagactaatcgaaaccgtctaataacttggttccttccaaagtttccctcaggataacctgaaccccccggccaattctatccggtaaaacccattattataagcattcggggccccacccccttcaactaatcttaaacctttaaatagttagaaccgtccggttcttttgttaacccgtcccttgaattcaaaacctcaaattggcccatttttgtaaaccaaacctgccaatccggaataaaccggaacctggtttccggtcccaaacttgcccttaacttaaaccccccaaaggtttttggccatataaaacagcagaccgttgtaatggaattcaaattcccttaagaatttttaacactctactttcctaatcaactacccttaaaatg

SEQ ID NO: 249225 - DNA, 547 bp, Glycine max
  unsure (1)..(547): unsure at all n locations
atcacnccctctataaccngtagnanctgtcggtaccggtctggaattcccgggtcgacccacgcgtccgctacccaacaacgttaattgaccaaaacccatctttgttgttcttcaaaatttccatatgttgaaccattttatttgtggcagtttccatcaccaagaagaagatgtaccatgttcaagccccaagaagtactccaggagaaaagaaagtaggaatattaacaaaaacccatactccaatcgaggcttagacaagttttctgcacttttggctgatcttgacgagagaaggcaaaaggtttactcacagatgagtcctcaggacatatcttttgttcggtttgcgtattccagcaatgatgatttcgttcccatagtggtcaaagtgaaaaaaaataataaggatcagaagaagcacaagagtgaagaactcaaagcaagacacataacatctttctcggagcaattggagaaatcttctgaagaaacaccttgaaagaaaggaactaaaacttaataagttggagcttattagaag

SEQ ID NO: 249226 - DNA, 283 bp, Glycine max
aattgccgggtcgacccacgcgtccgcggacgcgtgagcggacgcgtgggcggacgcgtgggaggacgcgtgggcggacgcgtgggctgacgcgtgggaaaaaaaaaaaaaaaaaaaaatggaaaaaaaaaaaaaaaaaaaaaaaaaaataaaaaaaaaaaaaaaaaaaaaaatatataaaaaggtggtgctatgtataaaattttgggtatttatcgcctgattaaaagctgtattatcatgtattgggattaataactaggataaattgtattacatttta

SEQ ID NO: 249227 - DNA, 526 bp, Glycine max
  unsure (1)..(526): unsure at all n locations
nnnaagtggccnnnnatttgaccaccgcctacgccacgctgtaccggtccggaattccgggtcgacccacgcgtccgatttattttctttttttcatatttttcttctaattttccctttgcataatttctcgcgtaacggaaagccatgaaattcggaaagagcctgagcagccagatcgagaaaaccctgccggagtggcgtgacaagttcctctcctacaaggagctcaagaagaagctcaagcaattcgaccctcccgccgccgccgatgagcgccccggcaaacgcctcaagtccgacgccgttcccgacgccgccgacatgtcgaaggaggagagcgacttccggaacctgctggagaatgaactcgacaaattcaacaccttcttcgtcgagaaggaggaagagtacattatcagactcaaggagttacaagatagggttgccaaagttaaggattcaagtgaagagatgatgaaaatccacaaggaaattgtggacttccatggagagatggtcttgg

SEQ ID NO: 249228 - DNA, 521 bp, Glycine max
  unsure (1)..(521): unsure at all n locations
nnnttgtgtcnttcatgcgcacgtccgacgtcatgcctgtccgtccggaattcccgggtcgactcacgcgtccgcccacgcgtccggagaacaacaccatggggagcacaaggagggacttgtggataagatcaaggacaagatccatggtgatggccatgacaagggtgagaaaaagaagaagaaggacaagaagaagaaggagcatggacatgaccatcatggtcatagcagcagcagtgacagtgattagatcttatatgttaagcaggtgtacggtacgatggtagtgaggagccagaatccctcttcctgctttatgatgtaatacaaataaaatagcgattccggaaatcatgtctgtagctgctctttttatttatgtgataaatgtaaaacgctttggtttggcttgggccgtgtgcattangttgaaaaaataaatgttataattactcagaatctcagatctttctcatactctgccccttgtttaaagaccacaagnngagaccctaata

SEQ ID NO: 249229 - DNA, 420 bp, Glycine max
taccgattccgaattcgacccacgcgtccggccacgcgtgcgccagaatccaagggggttcctgctagtgtacagatatttgcttgtggaaatgcgtctcaaagtcaacctgttgctcgacgtatttttttccgatgttcaaccacccaacttaaatggaatcatggctcaactgggcttctagtggtggtgcagtcagatgttgacaaaactaatcagagttactatggagaatcaaagttatgctatctgaccacggatgggatgcatgaaggacttgtgcctcttcggaaagatgggcccattcatgatgctcagtggtcatattctggcttggaatttgctgttgtatatggatttatgcctgctaaagcaactctgttcgacaagaagtgcaatcctctactagagcttggaact

SEQ ID NO: 249230 - DNA, 444 bp, Glycine max
  unsure (1)..(444): unsure at all n locations
ttcccgggtcgacccacgcgtccgcaaaaccaaaacagtaaagctaacttcaacacctttaattttctaaaagtaattcagcggctgaataccaagcggagaagatgagtcaggagcagccacggcgtcccaaaggccaaaaccccatcaaatacggcgacgtttttgtcgtctccggcgaccttgcacagaagcccgtcgcaccggaagatgctgccatgatgcaaagcgcggaaactcgagtgctcggacaaacccaacccggcggagcagcttccgtcatgcaatctgccgccaccaggaatgaacaggctggccttgtcggtcaccgggacgtcaccgacgttaccggcgaccgtggcgtcacagtcacagaaactaaagtccctggaagacgcattataaccgaggcttgtggtggccangnntctttttttttctttt

SEQ ID NO: 249231 - DNA, 530 bp, Glycine max
  unsure (1)..(530): unsure at all n locations
nggggtgggccnnnatctgtgccatgttctactcgcacgcggtaccggtccggaattcccgggtcgacccacgcgtccgcccacgcgtgcgcccacgcgtacgcctacctatttttcttctctctcaacagcttcaggttcttcctcctcgatcatgtctcacttcaagggcaagtaccatgatgagcttatcgccaatgctgcgtacattggcactcctggaaagggtattctcgctgctgatgagtcaacagggacaattggcaagcgtttggccagcatcagtgtacagaacattgaatccaacaggcgagctcttagggagctgcttttcactgctcctggtgttcttgaatatctcagtggtgtcatcctgtttgaggaaaccctttaccagagcacagctgcaggcaagccctttgtgaatgtcttgaaagaagctggtgtgctttctcgcatcaaggttgacaagggcacaagtcgaacttgctggaactaatggagaaaccaccaattaaggttctagatgg

SEQ ID NO: 249232 - DNA, 453 bp, Glycine max
cggaattcccgggtcgacccacgcgtccgcggcgatgagacggcaccgtttttcggcttccttggagccgcagctgccctcgtcttgtcctgtatgggagctgcctatggcacagcgaagagtggcgttggcgtggcttcgatgggtgtgatgagaccagagctggtgatgaagtctattgtccctgttgttatggctggagttttgggtatttatggccttattattgctgttattatcagtactggcattaatcccaaggccaaatcttattacctctttgatggttatgcacatctctcctctggtcttgcctgtgggctggctggcctctctgctggcatggctattggtattgttggtgatgctggtgttagagccaatgcacagcagccaaagctttttgttggaatgattcttattctcatttttgctgaagctcttgctctctat

SEQ ID NO: 249233 - DNA, 427 bp, Glycine max
cccgggtcgacccacgcgtccggattattattcttccatttccattaaaaagaaagtatcataaatgggtatttacacatgcgaggacgaaagcacctccccagaggctactgctactctatacaaagctctagttacagatgccgacaacatcatcccaaaggctcttgattccttcaagagtgttgaaaacgttgagggaaatggtggccctggaacaatcaagaagataactttcgttgaggatggagaaactaagattgtactgcacaagatagaagcagttgatgaggcaaacttgcgatatagctacagcgtattgggtagtgctgcgttgccagacacaacggagaagatcacattccactccaaattggctgctggtcccaatggaggctctgctggcaagctcactgtcgaataccaa

SEQ ID NO: 249234 - DNA, 524 bp, Glycine max
  unsure (1)..(524): unsure at all n locations
nggggagcgcnnnnacatcgaaccgtacgcatngctacngccgnaccggtccggaattcccgggtcgacccacgcgtccgcggataaccgtagtaattctagagctaatacgtgcaacaaaccccgacttctggaagggatgcatttattagataaaaggtcaacacaggctgcctgttgctttgatgattcatgataactcgtcggatcgcacggcctttgtgccggcgacgcatcattcaaatttctgccctatcaactttcgatggtaggatagtggcctaccatggtggtgacgggtgacggagaattagggttcgattccggagagggagcctgagaaacggctaccacatccaaggaaggcagcatgcgcgcaaattacccaatcctgacacggggaggtagtgacaataaataacaataccgggctcattgagtctggtaattggaatgagtacaatctaaatcccttaacgaggatccattggagggcaagtctggtgccatcagccgcggtaatt

SEQ ID NO: 249235 - DNA, 523 bp, Glycine max
  unsure (1)..(523): unsure at all n locations
nnaagatgccnntcccccgcacgtccgggacggactgctgtaccggttcggaattcccgggtcgacccacgcgtccggttacagggataacatacgacagagaaagcatcgaacaatggttgctaaaagcgaaagattgcacgtgtccaatcacaaagcaacgattgccacgaagcacagagttcttaaccccaaaccacacgcttcggaggctaatccaagcgtggtgctcagcaaacgaagccaatggcgtagaccaaattccaaccccaaaatcccctcttagcatcgtcaacgttgagaaactcgtgaaggatctcgaagtatcttcccgttttcaaagggcattggagaagttgcacgatcttgcaatagagaacgggaggaacagaaggtgcatggcttctgcgggtgtagcaaaagctatggtgcacgtgatcacaaagagttttatccaaggtaacaaaacgacctcgtgcgtngaagaggctctgagaattcttggtttgctttggagtaatgg

SEQ ID NO: 249236 - DNA, 525 bp, Glycine max
  unsure (1)..(525): unsure at all n locations
nnnaaggtcctntcatgcgcatcgcgctacgtcatgctgtaccggtccggaattcccgggtcgacccacgcgtccgctttgaatggattctaattcttcttctccaagtcccaacaaccacgcttccacaaccgaaatcaacggtttctttcatcccaagctgggttcccaacctgccaccagctcgcgatctcgtcttgccatggcttctcctgtgaactccgatcctaaggtcgtcaccggcacagccggttacatcctcgaagacgttccgcatttcaccgattacattcccaatctcccaacataccctaatcctttgcaagacaaccctgcttattcagttgttaagcaatattttgtgcatgttgatgacagcgttcctcaaaaggtcgttgttcacaaagatggtgcaagaggggtacattttaggcgtgccgggcctcgtcaaaaggtgtactttgaagctgatgaagttcaagctgccattgntacttgtgggggtctgtgntctgggcttcacaa

SEQ ID NO: 249237 - DNA, 524 bp, Glycine max
  unsure (1)..(524): unsure at all n locations
nnnaagtgccnntccccggacctgcaggaaggacgctcgtaccggtccggaattcccgggtcgacccacgcgtccgtgcttgcaaattatttgaaccaatctatgatcaaacagatggtggtgatggctatgtgtctgttgaagtatctcccaggctcgctgatgacactgagggaaccatagaagctgcaaaatggcttcataaagtggttgatcgccccaatgtgtatattaagattcctgctacagaggcatgtgtgccttcaattaaggaagttattgctaatgggataagtgtgaatgtgacgctgatattctctcttgcaagatatgaagctgtaatagatgcttacttggatggtcttgaggcatctgggttaaatgacctctctagagttacaaggggttgcttcttctttgtcagtagagtggacactctcattgacaaagcccttgagaaaattggcaccccagaggctcttaatctacgtgggaaagcagcaatagcccaagcagcaattgct

SEQ ID NO: 249238 - DNA, 375 bp, Glycine max
  unsure (1)..(375): unsure at all n locations
ccgggtcgacccacgcgtncggaagtacttagttagaatacggaattatcaaaccattccatcaccacctgtctatgttggtccactagacgttacgtcccaagtacactaacaagctgggagcagaatttcaggagtatcgaacgatatatgcgtgaaaataaattgttaggacagctgtatattaggcataaccagagtaatgcagatactgatcgtatcctgtctagagccaacaagagttgcttgtctttaccagacaccaattgcttttatgccaatgctcagaagccatcacgacattgtgcttatggctcaaggaccgctagatctatgctggctagaatggagaagctgtcgcatagatcttggccc

SEQ ID NO: 249239 - DNA, 526 bp, Glycine max
  unsure (1)..(526): unsure at all n locations
ggggnaggnnnnnaacatgagactcaagccatgcggtaccggtccggaattcccgggtcgacccacgcgtccggtccgaagaaaaagaacagcctttgttggtaacggagcctaaagaagaaaagaaggatgaccccaacgcgatttccaacttcaggatttcggaaccattgagggagaaattgaaggagaagggtatcgaatcgctgtttcccattcaggccatgaccttcgacaccgttctcgatggttctgatttggttggccgtgctcgcactggtcagggtaaaactctggcatttgtgttgcccatattagagtctttaataaatggtccagcaaaatctgcgagaaagactggctacgggaggactccgagtgttctcgtgcttctacctactagggaattggcttgccaagtgcatgctgattttgaagtgtatggtggggcgatgggattgagttcatgttggttatacggtggagctccatattaaggtcaaagacttaaactgaagagaagtgt

SEQ ID NO: 249240 - DNA, 522 bp, Glycine max
  unsure (1)..(522): unsure at all n locations
nnnnaagatgccnnnacatggccatcgcgcctacgccacgctgtaccggtccggaattcccgggtcgacccacgcgtccgcggacgcgtgggcggacgcgtggggccgatggaaatcgccgcctgcctggcttacgcgctctccgtgtggcttgccgcgcgcaacaatgtgcatacgtggtggacgggcattatcggctgcgtgctctacggctgggtcttctactccgttcagctttacgcggatgtcaccctgcaactcttctttatcgtcagcagcattgccgggtggatcaactggctgaagggcaatcacggtcagcaactggcggtgcgcaaaacgccgctgcaacatatagctttcctgctggtgggcgcgctgattgtcgcgggcggatatgcctggctactgcaccgttttaccaacgcctggtcgccgtggctggactcggcgattatggtcttcagcattctcgcgcagtttatgctgatggggcggcggctagagagctggtacttctgg

SEQ ID NO: 249241 - DNA, 438 bp, Glycine max
  unsure (1)..(438): unsure at all n locations
ccggaanncccggggggaccaacgcgtccgatcttgggttgcttctttacaaagggtcagatatgcagggcaccatctggcttaatggtgcttgaaaggttagcaccagaatttgtgaatagacttgtgcaatgggccaaaaacatcaaaatttcatatccctttgaagaaggttgtaggctaggtcctattgttagtgaaggacagtataaaaaagtgttgaattgtatctcaactgctaagagtgagggtgcaacaattttgattggagggtctcgcccagagcatttgaaaaaggggtactttgttgaaccaaccatcataactgatgtgactacctcgatgcaaatttggagagaagaaagttttggacctgtgctatgtgtgaaaacattcagtaccgaagaaaaagctttttgactagcaaatgacacacac

SEQ ID NO: 249242 - DNA, 528 bp, Glycine max
  unsure (1)..(528): unsure at all n locations
ggggncgcgtctaatcccgcacctgccccangctatgctgtaccggtccggaattcccgggtcgacccacgcgtccgcccacgcgtccgctaatcagaaaaaaaaaaccctagtaatgccgccgatggggaggaggcgaaaggtagcacccaaatcttctctatccaccgagccacctctcaagcagcaacaaccaaaacccgaaaatccccctcaagaatacgaagaagtcgaagaggaagttgaggaagaagaggtagaggaagaggtcgaagaggaagaagaagaagaagaggagagaaagatggagaagcaacaacaacaagcaccatctaaggaaacaaaagcacagagtgatgaatcagttaaagaaagcagcactgaagggcttccaatggaggatagtccctatgtgaaatacaaggatttggaagattataagcgtcagggttatggtacacaaggtcatcaagaaccaaagacaggtcgtggagcttgaaccactgaagcacccacttttcttggggt

SEQ ID NO: 249243 - DNA, 528 bp, Glycine max
  unsure (1)..(528): unsure at all n locations
nnnnaagtgcccctaaatgggccacgctcccacagcactgctgtaccggtccggaattcccgggtcgacccacgcgtccggtaattttcttgggaattgggtcctcctctactttggttatacctcatccccggatcttgggccagagcaagtccaaattatggccaacgcaattgatatattagaatcaaaacagaatctcaagattctaccagtatttgtttccattgatcctcaacgtgatactccctcacaacttcgtgcttaccttaaagagtttgattcaagaatcataggattaactggacctgttgcagctattaggcagatggctcaagaatatcgtgtttactttaaaaaggtagaagaggatggcaatgattatcttgttgactgttcccacaacatgtatttgctgaatcctaaattggaggttacgagatgctttggagtcgagtatagtgcagaggagttgtcagaagcgatagtgaaagaacttaacaagaacccctcttgaattgttaccaa

SEQ ID NO: 249244 - DNA, 532 bp, Glycine max
  unsure (1)..(532): unsure at all n locations
ggggnagcggccaaaaaactgtgcatgcnntctntgnacagctgtaccggtccggaattcccgggtcgacgccacgcgtccgcccacgcgtccgttttcaacactcattagatcccagtcatcaattgcgttaacgaactggtaaggcaaccatgaggggcattctttctgtaaggacagccttggttcaacatcgtagtgagaaattgggccttggtttcaggctatttagcactcaaggtgcttccactgctagtaccccacagccgccgccaccaccttcaccaccagagaaaacccattttggtggccttaaggatgaggacaggatatttactaacttatatgggctgcatgatccttttctcaaaggtgccatgaaacgaggggattggcatcgaacgaaagatttggtacttaacggtactgattggattgtgagttaaatgaataagtctggcctacgtgggcatggcggtgcttgtttctctttcggcctcaaatggacattcatgccaaaagtttccgtggc

SEQ ID NO: 249245 - DNA, 528 bp, Glycine max
  unsure (1)..(528): unsure at all n locations
ggggatgcggggnaaaactgagactaagcactgcgaaccgctccggaattcccgggtcgacccacgcgtccggtctagaatattcctatctgaaattaaaaaaaaaaaaagaaattgtcttgctcatagggaggacgtctataacctgtcgacattgaaaataacaaataatataaattgatagacgaaaagagtagcgggcagtgacaaagcaaaagcgtggagtgggtcttgcgttgtgttggaatcccaaattcatttctgtttctcattctcaattcttcttctattctcattctgatttgccacacacgcagaaaggttgaaaatagtgggacttgattcactggaggtggagaaagatggctaacaacgcagctgcttgtgctgagagagcaactagtgatatgctcattggtccagactgggcaatcaacatagacttgtgtgatatcattaatatggaccctgggcaagccaaggatgctttgaagatactcaagaaacggttgggcaggaaaaaatcca

SEQ ID NO: 249246 - DNA, 527 bp, Glycine max
  unsure (1)..(527): unsure at all n locations
nnnnaagctgccntnaatggccatgccactacgctacgctgtaccggtccggaattcccgggtcgacccacgcgtccgagctgctgggcttgtacttggtgtcataggacttgtactgctcgagttacctgccctatcatttgatgaaagcaacttctcactatggggaagtggtgagtggtggatgctacttgcagctcagagtatggcaattggcacggtcatggtccggtgggtctccaagtactctgaccctgtcatggctactggatggcatatggttattggtggtctcccacttgtgctattcgcagttcttaacaatgaccccgcagtgagtttgagtctcaaagagtacagttcgactgatatattggcactcctgtacacatccatttttagaagcgcagtcagctatggtgtgttcttttatagtgcaactaaaggtagcttgaccaagctcagttcacttacgtttatgaccccaatgtttgcttcaattntttgggtttctctatcttggtgag

SEQ ID NO: 249247 - DNA, 527 bp, Glycine max
  unsure (1)..(527): unsure at all n locations
nnnaagaggccanaaaatgtccctcgngctccgcacagcgtaccgtccggaattcccgggtcgactcacgcgtccgaatcaatcaaattctttgagttgaacacaggggccaagattccttctcttgggttagggactaggcaagctgaacctggtgtagtagctgaagctctcaccacagccattcaggttggatacaggcatattgactgtgctagtgcgtataagaatcaagcagagattgattctgctcttaagaagctttttgatgatggtgtggtgaagcagtgaggacttatggatcacttccaaactctggtgttcagatcatgcaccataagatgcgccaaaagcattggataaaacattacacgaattgcaacttgactatctagacctctatctgatccacaggccagtccgcatgaaaagtggaacatttggactcaataaaaaatatcttgagcaaccagacattaccaatacattgaaagcaatggaggcactttttgacttaaacaaagcta

SEQ ID NO: 249248 - DNA, 457 bp, Glycine max
  unsure (1)..(457): unsure at all n locations
cggaattcccgggtgcgacgccagcgcgnntccgcccacgccgtnnncggcagcatcgcttatactttcttcatttccatggggctttgcccaatcagcagaaccgtggggattaccctagntttcaaacctcgtnntatcgtcggtgaatgggtggcaccaggaaagaacaacctttgtgaaaaggcatctcaccggagaattcgagaagaaatatgagccaaccatcggtgtggaggttcacccattggattttttcacaaactgtggaaagattcgattctactgctgggatactgctggacaggagaagtttggtggcctcagagatggatactatatccatgggcaatgtgctattataatgtttgatgttactgcccggctaacatacaaaaatgttcccacctggcaccgtgatctttgcagggtctgtgaaaacatcccaattgttctt

SEQ ID NO: 249249 - DNA, 526 bp, Glycine max
  unsure (1)..(526): unsure at all n locations
ggggnagcgtggtgtncccagcttcanagctacgtcgaaccggtccggaattcccgggtcgacccacgcgtccgcccacgcgtccgcaaacctcttcccaatgaggaacctctctttcttcttcttcttcttcttcaccttcttcgccgccgtcagatctgatccctcagatcaccgctacaaagaaggcgaccccgtccctctctacgccaacaaagttggccccttccacaaccctagcgaaacctaccgttacttcgaccttcccttttgtgaaccaggtgatttgaaagagaagaaggaggcgctcggggaggtgctgaatggggaccgtttggttagcgcgccatacaagctggagttccagcgcgacaaggagttggtttccgtgtgcgacaggaagctctccaaacaggacgtggctcggttcagatccgcggtgaggaaggactactacttccagatgtactacgacgaccttnctatttggggctttataaggaaagttgacacaggaagggaaggc

SEQ ID NO: 249250 - DNA, 531 bp, Glycine max
  unsure (1)..(531): unsure at all n locations
aggggatggaccnnaaaatgtgaatttcggctccgcgacngctgtaccggtccggaattcccgggtcgacccacgcgtccggctggggctatagagtttattatatgccatgcagaggtctcaattgcatttgcagaagaaaagaaaatacctgagctattgaagacatttccaaatgcaacaaagtatctcaagacaattgtaagcttcggaaaggttacccctgaacaaaagcaagaagttgaaaattctgggttggaaatatattcatgggatgaattcttacaagtgggtcaaaatcagagttttgatcttcctattaagaaaaggagtgacatctgtacaataatgtatactagtggaactactggtgaccccaagggagtgttgatatcaaatgagagtattattactctcttagctggggttaagcgactgttggagagtgtaaatgaacaattgactgagaaggatgtatacatatcataccttccacttgcacatatatttgatagggtcattgaagagaca

SEQ ID NO: 249251 - DNA, 448 bp, Glycine max
  unsure (1)..(448): unsure at all n locations
ggaanncccggggcgagccacgcgtccgcccacgcgtccgcaaacctcttcccaatgaggaacctctctttcttcttcttcttctggttcaccttcttcgccgccgtcagatctgatccctcagatcaccgctacaaagaaggcgaccccgtccctctctacgccaacaaagttggccccttccacaaccctagcgaaacctaccgttacttcgaccttcccttttgtgaaccaggtgatttgaaagagaagaaggaggcgctcggggaggtgctgaatggggaccgtttggttagcgcgccatacaagctggagttccagcgcgacaaggagttggtttccgtgtgcgacaggaagctctccaaacaggacgtggctcggttcagatccgcggtgaggaaggactactacttccagatgtactacgacgaccttcctatttggggct

SEQ ID NO: 249252 - DNA, 530 bp, Glycine max
  unsure (1)..(530): unsure at all n locations
cgggaagagtncctnancccactccgcacgctatgctcaacccgtccggaattcccgggtcgacccacgcgtccgattaccactctcaccccacatcccagttagtacacacttccacacaacacacggaattgttatgttttttaaataaaaaccaccccacttcttttatcaacaacacacgcacgctataatcctaactttccaaagaacttactatttttttttcaggtggtggggcagtgaagcagcttaaccgggaagagaaacaaaatgggtcaacggtggtgccggtgaacagagtggtggtggaggagaagaggttcggcgggccggggtcgtcgacgccgtcgtgcagatccaagtgcggatggtgcagtccttgttttacggttcacgttccggtccaaccgggtttgattattcgcctcgagtactacccagaagcgtggcgttgcaagtgcgggaacaaagcttttatgccatgacgttaattaattaatagggtatattaaaaatctaggacaaaa

SEQ ID NO: 249253 - DNA, 531 bp, Glycine max
  unsure (1)..(531): unsure at all n locations
nnnnnaagaggccnnnnnctaggccatgcccgctacgctactgctgtaccggtccggaattcccgggtcgacccacgcgtccgaatttttcatcaaagaccaaactagctttattcgactcaaccactatcctccatgccgttatcctgaccttgctcttggcgtcggtcgacacaaggaccctggtgccttaaccattcttgcacaggatgaggttggaggacttgaagtgagacgtaaagcagatcaagagtggataagagtgaaacccaccccagatgcttatatcatcaacattggtgacactgttcaggtgccagtgtagtaccatattgaaaactgaaaattttgaaatttcggtgtctggttctaacacactctatgattggttgaaatttattagaaactacaaaatcatgaaaggaccgttaagtaagacgtcagaagcacaattttcttgtaattttcaataaatttaaaccaatggtaagtgtgttaagaaaaggttattagagaatatggtggtaggaa

SEQ ID NO: 249254 - DNA, 427 bp, Glycine max
  unsure (1)..(427): unsure at all n locations
gggacccacgcgnnnncgggacgcgtgggacaaaaatgaaaaacatgaaattgtgttcggtgatgctatgcttatcactagcgttccttcttggggccacagcaaaacaatgtggcacacaagctggtggagcgttatgcccaaatagattatgttgcagcaaatttgggtggtgtggtgacacagattcctactgtggagaaggttgccagagccaatgcaaatctgcaacaccctcaacaccaactccaacaacacctagtagtggtggagatattagcagactcattagctcttctctctttgatcaaatgcttaaataccgaaacgatggccgctgttctggccatggattctacagatatgatgctttcattgccgctgctggctctttcaatggctttggcacaaccggtgatgacaacac

SEQ ID NO: 249255 - DNA, 446 bp, Glycine max
  unsure (1)..(446): unsure at all n locations
cggaanncccggctcgacccacgcgtncggtttcaaatttggagcatcttcagaatttggtggtcattgactgcaaagggttggaatctttgagtgttgactccacctctgagcttcacatgttaaccatcttggattgcttagagttgaagactctccatctcaaaacttctaggctcaagtcttttcggtatcgtgggcctcttcctttgcttaggccagaatatcatttcaacctgcgtgatgccatgcttgatttcagattaggactaagctgcagtggtttaaagaccaaggattttgatgcaacccttttaacaataaagaactgtgaagttcttactctgtgtaaatggacttttgaggaattaatatggccatcgatttctcctctatctgggagcttcatattctataaattaagagagttatggtggattgacaac

SEQ ID NO: 249256 - DNA, 443 bp, Glycine max
cggaattcccgggtcgacccacgcgtccggttatcgatcacaagaccggtaaggctcagatctgggacactgccggccaagaacgatgcagagcagatacgagtgcatattacaggggtgctgtgggggcaatgttggtttatgacatcactaaacgccaaacctttgatcacataccacgttggttagaagaactgcgcaaccatgctgacaagaacatagtcatcattcttacaggcaacaaatgtgatcttgagaaccagcgtgacgtacccactgaggatgcaaaagaatttgctgagaaagaagggttgtttttcttagagacctcagcactagaagcaactaatgttgaaacagccttcataactgtcttgacagaaatatacaacattgtcaacaagaagaacctaactgctgatgaaaatcacggaaatgggaac

SEQ ID NO: 249257 - DNA, 286 bp, Glycine max
  unsure (1)..(286): unsure at all n locations
cggaatnnccggcgggagccacgcgtccggcagggtctaatgggtaactgcctagattcttctgccaaagttgatgcagctcaaagggccaggtccactggtgcatcaggaatctcaaaaactactccttccagggtatctattccatcatacagtgaaaaaagcaatgcctcaagtcttcccacaccaaagcccgagggtgaaatcttgtcttctgccaatcttaagcccttcacattcaatgagctgaagaatgccaccagaaattttcgccccgatagtcttc

SEQ ID NO: 249258 - DNA, 434 bp, Glycine max
ccggtccggattcccgggtcgacccacgcgtccgcaacccttttaaacaaatatcgtaccgaggttttggaatttctgaatgacatatttgacaccctgctcaaggcactttcagatccatctgatgaggttgttcttctagttcttgatgttcatgcatgcattgcaaaagatcctcagcactttcggcaacttgttgtcttcctagtgcacaatttccgggtagacaattcccttttggagaagcgtggtgctttgataattcgtcgactttgtgtgcttttgaatgctgagagagtctaccgtgaactttctacaatactagaagcggaatctgacttggattttgcatcaattatggttcaggctttgaatttgatcttacttacatcatcggaactatctgagattcgagatcttttgaagcaatcact

SEQ ID NO: 249259 - DNA, 533 bp, Glycine max
  unsure (1)..(533): unsure at all n locations
nnnnntttgggggcnaaccccgacgtgggacgcgatgctcgtaccggtccggaattcccgggtcgacccacgcgtccggcagggtctaatgggtaactgcctagattcttctgccaaagttgatgcagctcagagcgtccagatccactgctgcatcaggaatctcaaaaactactccttccagtgtatctattccatcatacagtgaaaaaagcaatgcctcaagtcttcccacaccaacgtccgagggtgaaatcttgtcttctgccaatcttaagcccttcacattcaatgagctgaagaatgccaccagaaattttcgccccgatagtcttctcggtgaagggggatttggatatgtctacaagggatggattgatgaacacacatttacagcttcaaaacctggatcaggaatggttgttgctgtaaaaaggcttaaacctgaaggttttcaaggtcataaggagtggctgactgaagttaattacctgcgacaactgggccaccctaatctgggtgaaattaaaggg

SEQ ID NO: 249260 - DNA, 527 bp, Glycine max
  unsure (1)..(527): unsure at all n locations
aaagtggnnnnaactgaaacgactgcnacagccacgccgtaccggtccggaattgccgggtcgacccacgcgtccgcccacgcgttcgcccacgcgttcgagctagctagcaagcaagcacataaatggaggcgaagcgaggccatgccctcatgtgcttggcacgtgtttcactcttcctctgcgctctaaccctatccgctgctcacggaagcaccacggttcacgacatcgcgagaaagttgaaactcggggacaacgagcttctgcgcacggagaataagttcacggtttacatggagaattactggaggagctactccacagaggaggagtatttgcgccggatgtggatactcggccagaacatggtcagagcggttgaccattaggcgctggacctcaccgacggccactgcgtcacacaggtctacgatctcaccgaggacgagttttaaaaactctacacttgcggtaatggccngcttgacgacattgaataacgccgtcggctgaattgagccggc

SEQ ID NO: 249261 - DNA, 525 bp, Glycine max
  unsure (1)..(525): unsure at all n locations
nnaatagcngnnnncactgcactagcgtacggcactgccgtaccggtccggaattcccgggtcgacccacgcgtccgctgtgagtctttcttagctgatatggcggttgatcgctcccttacgaggtgctgtaggctcgtactgtggtcgtggatgttgctgaggatgatgatggcgcagggtgcagccgcgagggccaaccggaaggagtgggactcggtcataaagttaccggctgaaccggtcgatgctgactcggatcatgaagtgggaacacgatgggcggttcttgtggctggttcaaacggctatggaaactacaggcatcaagcagatgtgtgccatgcgtaccagttgctgataaaaggtgggctaaaagaagagaacatagtggtgtttatgtacgatgacatagctacagacgagttaaatcccagacctggagtcatcatcaaccaccctgagggacaagatgtgtatgctggtgttcctaaagattacaccggtgaggatgtgacngnccaa

SEQ ID NO: 249262 - DNA, 418 bp, Glycine max
cacgcgtccggaaagaactggtggtttttatgcttgcaatcgatatgaagcagctaaacaagggggagtgtatgatgatactgaaagaagaagggaaatggcaaagaattcgctggagagatacactcattattatgagcggtgggccagcaatcaatcttcaaggcaaaaagctcttgcagatctacagcagatgcaaactgttcatattgagaagcttagtgacatacagtgtcagcctgagtcacagcttaagttcataactgaagcctggctacaaataattgagtgtagaagagtgctgaaatggacatatgcatatgggttctatttgccggagcatgagcatgcaaaaaagcagttctttgagtacttacaaggtgaagcaaaatctggtcttgagagacttcatcaatgc

SEQ ID NO: 249263 - DNA, 301 bp, Glycine max
caattatattgattccttgtatgagggtattgacttctacacaaccatcacccgtgcccgtttcgaagagcttaacatggacctattcaggaagtgcatggagcccgtggagaagtgtttgcgggatgctaagatggacaagagcaccgtccatgatgttgttcttgtcggtggttctactaggattcccaaggttcaacagttgttgcatgacttcttcaacggaaaagagctttgcaagagcattaacccaaatgaaactgttgcctatggtgcagcagtgcaagctgccattctcaat

SEQ ID NO: 249264 - DNA, 340 bp, Glycine max
accggtctcgattcccgggtcgacccacgcgtccgatttatacctacctctccctcaagaatccaatcttcgacagaccctcactgctagactatcaaccttgacgtgggaagctatgacaccatcgacaacgtcaaggccatgattcacgacaaggaaggaatccaccctgaccagcaacgtctcatattcaccagaaagcaactcgaggacggtcgtacccttgctgactacaacattcataaagagagtactcttcaccttgtactccgtctccgtagtggcatgcagatcttctttaagacactcaccggcaagaccataaccctagatgttgaaa

SEQ ID NO: 249265 - DNA, 423 bp, Glycine max
  unsure (1)..(423): unsure at all n locations
cggaattcccgggtcgaccgacgcgtccgggagttctaaatttccggcgagtttccctctctcgaatctgcgacaccgacgaatctcactaagcggaacttcgcattcagaaaatggctttaggtggaacagctcccccgagaggaagtgcagcagctactgccagcatgaggagaaggagaacaaccggtggtgcggcctctggaggagcagctggaactatgctccaattttacactgatgatgcccctggactcaagatctccccaaatgtggttcttgtaatgagcattggctttatagcatttgttgccatccttcatgtgatgggcaagctgtactttgtgcgtagggaggcttangaaatagatcaagatgttaggtccatttttggattttcaatacacagtctctgatatgaaa

SEQ ID NO: 249266 - DNA, 490 bp, Glycine max
  unsure (1)..(490): unsure at all n locations
cggaattcccgggtcgaccgacgcgtccgcccacgcgtccgcttgtgacatcacaaaccgtaccctntttgtttatttcctttgtgggtggtgaattcgtgcaaatttctgcgacacccagatggattttgcgctgaatccgtgtcctttgcgatcttctacgttcgtgaatttcgtcgagagggttaaacagcttggtaccctcgccttttctgcagtcattgggaacatcttctccgcgatcttgaccttctgcttcgcattagttggcactttgttgggggctttgactggagctttgataggacaagaaactgagagtggcttcattcgaggggctgctgttggtgccatatcangagctgttttttccattgaaagggttgaatcctctcttgttctctggcaatctgatgaatctgggattggctgtgtcttatacttgattgatgttattgccagcttactgagtgggagacttgtgcgtgag

SEQ ID NO: 249267 - DNA, 543 bp, Glycine max
  unsure (1)..(543): unsure at all n locations
agaggggtnntcccccacctcgacgaccgancgacgtaccggtccggaattcccgggtcgaccgcacgcgtccgggtgcttgtgctgctagttgtgagactcgaatgtttgtcaccaatattccttacttgcaagaagtaatagttatggcatccacatgtgattcctgtggttaccgcaactctgagttgaaacctggtggccgaattcctgaaaaaggaaaaagaattactcttaatgtgaagaatgttaatgacctgagccgtgatgtaataaagttaaaagttgtaatgatacatatgcaggtctttctaataaggataaactgtgaaaaatgtcatgatgatacccatataggcctgatcatttaaattttttctgcaatctgagacataaaaatgtatttcatatctattgactgagtagtttggtttgattaagctgatactgcaagtgtaaaagttcctgaacttgacttggagctggcaagcggaacccttggaggaaattgtactactgttgaaggttaattacaaaattagn

SEQ ID NO: 249268 - DNA, 548 bp, Glycine max
cgtggggttaccccatgccccgtacgactcgacgtaccggtccggaattcccgggtcgaccgcacgcgtccgaaaaaaagatcatacatagttactgtcggtgggtcgcaaagatgcttgggggccttcgagggaggggtcataagataaaggggacactctgtgttgatgctcaagaatgagtacgacgtgaatagcgtatccagcgaccctggaaggatcgctcaaggtgcttacttaatcaggacaacactccatactattactgcctactagggccgatccacgtttgttcagcttattactgctacccaagctgatggcgactgcaacaggaatcttagaaaggctacactttgtcgaatgtatcattacttgaacgcaactctcggaacatgccaatctgcattaaaaattaatcttgaatcttatcatgggagtggtatacctggagcattctatatcactagatatcttgcaaacagatattatcatgagagttatcattcgaagacgttgcgaccattgcagcatccctttgagtgcag

SEQ ID NO: 249269 - DNA, 378 bp, Glycine max
tccgcccacgcgtccggccggaaaacaggtcggttaggtgttaccggcaaacctcgctggaatgtcgaggattcagctctacggatttcatgtctcaaatgaagaatctgatcgaacagaaccagcaacaggccaggcagatcctcatccaaaatcctatgttaaccaaagcgcttttccaggcacaaattatgcttggaatggtgcaagcacctcaagtggttccaaaagttcagccaatggtttcacagaacaatcagcagccagtacaaccaacacaacagccaaatattcagcctgctccattattgcctgggcatggtggtgcacaggatcaagcaggtgtatctcaaacccaaattcctctgaggaaacacc

SEQ ID NO: 249270 - DNA, 479 bp, Glycine max
cggaattcccgggtcgaccgacgcgtccgcccacgcgtccggttttccatcaaactcaaacataacagggaaatcatttggatttacgggttgttcggaaccaatggctcttaatagaccccaagatacagtttctaatgtcacaggcaaatgaagataaaacatctggagacttcagagaaatgggatttcggcttgcccaggaagtgatcttgttcctgaaaaagaagatggataaagcttcaagaaatggaaacttgaaagatatcaagcttagctttgttggtcattctattgggaatctcattatcaggacagccttgacagagagcgtcatggagccatatctaagatacttacatacatatgtctccatatcgggtccacacttgggttatatgtatagttcaaactctctattcaattcagggttgtggatattgaagaagctcaagggcacacaatgcaatcaccaactt

SEQ ID NO: 249271 - DNA, 545 bp, Glycine max
  unsure (1)..(545): unsure at all n locations
agatggtgngtnnncccaggttgcggaagtancgacgtaccggtccggaattcccgggtcgaccgcacgcgtccggaaacaatggcgacggtggagctctggtggatgacgtgctttctctaacaactgctgttggaaaagagagagagaatggcggtggattacacatgctgctcaacggcgttcttcgttcacatagtggtaatcgtgctgctggtgctgttcgcgggcctcatgtcgggcctcaccttgggcctcatgtcgctcagcctcgttgatcttgaggttctcgctaagtccggcactcctcaggatcgtaaacacgctgagaagatattaccagttgtcaaaaaccaacatttattgctatgtactcttctaatttgcaatgctgcggccatggagacacttcctatttttcttgatggtcttgttactgcttggggcgctatcctgatttcaatgacattaattcttttgtttggtgagattataccccaatcaagttgttctccgtatggttttgctattggtgcattaatggc

SEQ ID NO: 249272 - DNA, 352 bp, Glycine max
  unsure (1)..(352): unsure at all n locations
accggnccggaanacccgggtcggccgacgcgtacggcggggaagccgagcctgctctacgatctcttgtgcaagccgaatgagatccacgctctgaagactacgccgggggaggagcgcgtggagaaccacgagaaccacgcggtgcacgccacgcaccagatcgcggagtcgtggattcacgcgtcgcggaaggttcttgatagaatcgcggactctgtgctctccagaacctttctgaaagcagtatatgactgctactccgtggagaggatctggaagcttctctcggaggtggaggacctccaccttattatggatccggacgattttttgaggctaaagaatcaac

SEQ ID NO: 249273 - DNA, 553 bp, Glycine max
  unsure (1)..(553): unsure at all n locations
ngtgtgctgannnaacgggttgacgangtancgacgtaccggnccggaattcccgggtcgaccgacgcgtccgatatagaagagccttccatatatagcctcccaaaaaaatgaagagtactacctcttgggggctctttctacttggtgccctaacttcatcatatcagccttcagccaccgctgatattgtattcgacaccgaaggcaatcctattcgaaacggcggcacatactatgtgttgccagttataagaggaaagggcggcggaatagaatttgccaaaaccgaaacagaaacatgccctctcactgttgtgcaatctccctttgaggtctcaaagggtctaccactgataatttcatccccatttaaaatccttgacatcaccgaaggacttattttgagcctcagtttcacttatgtacccccctgtgcctcaactccttctcggtggaccgttattctcaagggtctgccagaagaactccatgtcaaactcactggctacaaaaacacaatagatggttggtttaggattcaaaagagctt

SEQ ID NO: 249274 - DNA, 275 bp, Glycine max
ctcgacgtctacaactacaagatcaaacacctactcaaaccctccgattccccctgggccaaccgcatcatcttacacctcctcaacatcaaacacgactctctactacaaggcctcatcaagatggcagatctcactattaatctggctgccatttgcactcccactgattacaacacccttcctctctacaccatttacaacaatttcatctacgcgctccccgtggtgaaatacttttccgaaaacaacaagcgccttatacatttctctac

SEQ ID NO: 249275 - DNA, 278 bp, Glycine max
ccccacttgtttcaagcacaaagtcacagacaatctccagaagtgggtggttgaagtcactggagctcctgggacactttacgctaatgagacctaccagcttcaggttgattttcctgagaattacccaatggaggctcctcaggtgatattcttgcatccggctccgctgcatccccatatctacagtaacggccacatttgtttagatatattgtatgattcatggtctccggcgatgacagttagttctatctgcatcagtattctctcaatgc

SEQ ID NO: 249276 - DNA, 482 bp, Glycine max
  unsure (1)..(482): unsure at all n locations
ccggtcgaccgacgcgtccgagttactagtgcatattatcgcggtgctgttggagcaatgttagtttatgacatgactaagcgcgaatcatttgatgacatggcaaaatggttagaggaactgagaggccatgctgacaaaaacattgttgtgatgctaattggcaacaagtgtgatcttggaactcttagagcggtgccaactgaagacgcggaggagtttgcgcaaagagagaacctattctttatggagacatcagcacttgagtccactaatgtagaaactgcctttctgaccattctaactgagatatacagacttataagcaagaaaacacttactgccaatgatgatgcagatccaagtggtatttcagggcttctgaagggaaccaagataattgttcctagtcaagaaatcaatgctggtgaaaagaaaggtaaaggtggcnttgtgtgaatgtcctaactttttcttggttt

SEQ ID NO: 249277 - DNA, 414 bp, Glycine max
  unsure (1)..(414): unsure at all n locations
accggnccggaatacccgggtcgaccgacgcgtccggatcaactagcttcactctctctcaatgacaatcttgtgtcttagattcctttagtggtgggactgtaatctgcgtgtgcagttattcctattccgtatgcttccccccagtttatttgcaggtgtcttagatgttttgttttagtcagagtactaaggaagtttatgttcttggtacttttggtttcactttttttcctatctgaattgctgtccgatggattagcataacttgttggatctattatagcaatgctggtctcaccggcctcaagatcatcatcaacacctatggaagattgggtgcacatagaggtattgccttctctagtgaagatcctaccaacgttgataagaattgtgcctacattgtgaatg

SEQ ID NO: 249278 - DNA, 240 bp, Glycine max
catatcaatccccccactaatttcaaacacaaattcacaaacaatcttcaaacctcgctcaaacaaatcactttttctccttctacactatacactaattatacctaccaccttcatgtttattttcctataaattacccaattgaatcttctctatttatattctttcattcccctactcttcattcccatatttacaataaccatcacatttgtttaaatatattttattatttatta

SEQ ID NO: 249279 - DNA, 433 bp, Glycine max
  unsure (1)..(433): unsure at all n locations
gaaaaaccgggccgaccgcacgcgtacggctgtgaaacccaacctgctctacgactttttgtgcaagccgaatgatatccacgcgctgtatactactccgtgggaggagcgcgtgaaaaaccacnataaccacacggtgcacgccacgcaccatatcgcttaatcttgtattcacgcgtcgcggaagtgtttttttttttacttttctcatataaaatttaataccattatatctatctcatctttttattaatatctttattatttaatcttatcattcattataaaattatattaaattattttttattgttttcttataattttctttatttactttaactatattttatttattttttttttaatattattttactttcactattatttcatttatattttattctatttaattattttctttttattt

SEQ ID NO: 249280 - DNA, 458 bp, Glycine max
  unsure (1)..(458): unsure at all n locations
cggaattcccgggtcgccgacgcgtccgggaaatccattgacatcgatggaaagaagtggcccaatgtttctggtttagcttaattagcgtggcgctgggtccttggttcttctcaccactgcaccaacccatcccctctcgcgtcgagtcacgagtcacgagtcacgagtcactcactacaactacttctttctctttctggtaggtttctctctcgcacacttgtcactgtctcctcctcgctcccaattttgaccgagttgttgactccacgatgccttccaattccgatttggtccgcgccgttgagtcgctcctcggcgtctcgctcgccgattccgtctccgattcgctgctcctcatcgncaccaccttcgccgcgctcataatcggcctcctcgtgtttctctggaagaaatcttcggatcggagcaaggagctaaagccggtgatcgtg

SEQ ID NO: 249281 - DNA, 558 bp, Glycine max
  unsure (1)..(558): unsure at all n locations
gtnttttnnnaagccggggnnaannaagggggcctangactgacgtaccggnccggaattcccgggtcgaccgacgcgtccggttgatttagtggagcaatgtcgaacatacaagcagagagtggtaaaccttgttaattcagcttcggacgagtcactgctatgccaaggcctaactctgaatgatgatctgcagcgtgtcctggccaaacatgaatccattgcttcaggaacttctgctcaaaatcctgctgagaaaccgaaacctgcacctactggagcacttgtagatgttgatgatcctttggttgatattggagatactagtaaacaaacagatgtgagatcgtcttctagtgctggagctgggtctcaaacattgaatcagttaatgcttcctgcacccccaacatcaaatggatcagtcccccctgcaatggttgatccccaagtggacctactcagtggtgaagactataactcaccaaaagcagaaacttcacttgctcttgttcctctaggagaacaacagccagccagccctatatctaacagaat

SEQ ID NO: 249282 - DNA, 458 bp, Glycine max
  unsure (1)..(458): unsure at all n locations
cggaanncccgggtcgaccgacgcgtccgcttagttactttatcagtatcattcattatcactacgattgttctaaaagcaattattacgtgctggagaagaattaagagatcatcatcacaataacaagatgagttcaggaattagagcatggagtgtggcagctagtgttggagttgtggaggccttgaaagaccaaggcatatgcaggtggaatcatgctttaagatcagctcaacaccatctcaaaaaccatgttggctcattctctcaggctaacaagctttcttcttctgctatgatctccacaacactaaaacatgagaaggcaaagcaatcagaggagtccttcagaactgtcatgtacttaagctgctggggccccaactagatatcataagtccaataagaaaatattctttctcttttaatttctagaaattatcaagcttagtcac

SEQ ID NO: 249283 - DNA, 443 bp, Glycine max
cggaattcccgggtcgaccgacgcgtccggtagtgttggtgggttgcaaagatgcttgggggtcttctccataggggtcataagataaaggggacagtggtgttgatgcgcaagaatgtgttggacgtgaatagcgtaaccagcgttgggggaattattggtcaaggtctcgacttagttggctcaacactcgatactcttactgccttcttgggccgatccgtgtctctccagcttattagtgctaccaaagctgatgccaacggaaaagggaaacttggaaaggctacctttttggaaggtatcattacttcattgccaactttgggagcaggccaatctgcattcaaaattaattttgaatgggatgatgggagtggaattcctggagcattttatatcaagaattttatgcaaactgagtttttccttgtgagtttgac

SEQ ID NO: 249284 - DNA, 549 bp, Glycine max
  unsure (1)..(549): unsure at all n locations
agtggggnnnnnaaagctagcngagcttagtactgtctgtaccggtccggaattcccgggtcgaccgacgcgtccgcaaaactttccgattttggcttggccaaagatggtcctgaaggagatgacacacacgttggaactagagtcatgggcacacaaggctatgcggccccagaatacatcatgacaggtaaataatttcacatcaagaagtaaaaaacaatgacaggttgacttggagtttaatttttaactcattgctagctcaaatctcacacgtgtacatttttttcttcttccgtataggacacttgacagcaatgagtgatgtgtacagttttggagtcgtgctcttggagcttctaacaggacgaaggtcagtggacaaagggcgcccacaaagagaacagaacctcgtggaatgggccaggtctgctttgaatgattcccggaaacttagcaaaataatggatccaaggcttgaaggtcaatattctgaggttggggccaagaaagcaacttgattggcttaccaatggcctaaccacn

SEQ ID NO: 249285 - DNA, 561 bp, Glycine max
  unsure (1)..(561): unsure at all n locations
tggggnannnnnaagcggggnnncnctacgcagtcnggcgaattancgacgtaccggtccggaattcccgggtcgaccgacgcgtccgcccacgcgtccgcttaaaaagattcagtgaagaacaacgttaatggcatctcttggtgtgcgggcagttcatgcggctgcattaacatccacctccgacccacctcctctttttgatggcaccaccaggttgtacatcagttattcttgcccctatgcacaacgtgtatggatcgctcggaacttcaagggactaaaagacaagatcaatttggtccctataaaccttcaagacaggccagcttggtataaggagaaagtctaccctgaaaataaggtgccatccttggagcacaatggcaaggtgttgggagaaagtcttgatttgatcaaatatgtaaatgaaaactttgaaaggacacctttgtttcccagagatcctgccaagaaagaattccgagagccattgatatcccatgttgatacattcagcaaaaacctggtcgtttcattgaaagggatgctgtacacaag

SEQ ID NO: 249286 - DNA, 372 bp, Glycine max
  unsure (1)..(372): unsure at all n locations
ccggnncggaatncccgggtcgaccgacgcgtccgggggaattggaactggagaaattcatcactcacacagttccattctcagagattaacgaggcttttgattacatgctgaaaggggagtccatcagatgcatcattcgaatgggggagtaaatctatatcagaccaatgatgacatgacatggtccctgttgggggactgagttctctttctggttgtgaaaagaagaaaataaatttcatatatgatatatatccctttaggattattgaatttgtgaaaacttgtgagtttgagtgtagagaatgatagggcctttgctgctgttattgtctaatgcatgataaataaaatgtcggttttttgtcg

SEQ ID NO: 249287 - DNA, 578 bp, Glycine max
  unsure (1)..(578): unsure at all n locations
agcattgtgnnnttttnnaaacgtnnnnangtancgnctgtaccggnccggaattcccgggtcgaccgcacgcgtccgcccacgcgtccgaaaaaaaaaaaaaaaaattatataaaaaaaaaaaaaaaaaaaaaaaaaaaaggaatatttaaaaaagagtggaaaaataaaaaataaaaaaaacataaatacaaaataataaattaatatataataaaaaataaaataatttacctcgttctaaattttaaaatttttttatacttaaaaaaccaaaaacgtttcccatcttaatttcttttcaaaatatattcttttccccagtttttataaatatctaatattgttaaaacccttctctattccaaataatattgtatcctgaaatttcaaattttacctactttttaatataatattaagtcttttccctttttacgtttacatatctttgtgactctttaatatgttaatgtttttaacctcctattatttcattatataccataatttttttaattttttccacatttatatcttttaatttcttatattgaacctcttttttagttttcttc

SEQ ID NO: 249288 - DNA, 503 bp, Glycine max
cggaattcccgggtcgaccgacgcgtccgcccacgcgtccgcggacgcgtgggttcagaaaacgtgccaaacttgagcgacgtcactaagaagaccaaaggtcggcaaaagatagagatgaagacgatagccaacaagtgtagccttcaagtgacattttcaaagcatcgaactggagttttcaagaaagcgagtgagcttgccaccctttgtggtgtggaccttgctgtgattatgttctctcccaataaccatgtttactccttcggtagccctaatgtggattctgtaatccaacgttatacgacagagggcccacctcccctcttcacccaagacctcaatgaggccccttgcaccatggatgagggtgagctccaagcacacctcaactgtttgtccaaccaaattgacgcggagaagcaacgtgtagaggatctaaaccatttgttgatggctgcgaaggatcacatctggtgggatgtgccaattgaaagcatgag

SEQ ID NO: 249289 - DNA, 455 bp, Glycine max
cggaattcccggggtttttgaagagagagaaagtagagagagagagaaacacaactgctttgccaaaccttaatttcagggcacttccaagctgacaggaccagttgttgttccctttttgtgttgtttgattcagcgatttctggttttcgttttttttctttctttgttacaaggagagttcgatgtctttaagttgaataacttgttgggacatatttgactcggtgcttttcttttggtgcttgcctcatgggaaacagtgaggatgagaaatctgttaagactggaagcccttcttcttcacctgcaacaactgatcagaccaaccaacctaatattcatgtctatcctgattgggctgccatgcagtattatgggccaagagtcaacattccaccatacttcaactcagctgtggcttcaggtcatgctccacacccatacatgtgggg

SEQ ID NO: 249290 - DNA, 258 bp, Glycine max
cggaattcccgggtcgaccgacgcgtccgtgaaaacatatacgatgggaacttacgtgccccacataagacggttagcaccaaagctagagacaacttgggacaagagaggagacaaatccagatgagaaaactgccctcttgacaacctgaaaaggccactaaatttcacaaatacctgtcaaaaattcgaaatttagtattcctcaagctgaagcatttactaataaaaacatttaagcatgctcctcttaggagg

SEQ ID NO: 249291 - DNA, 420 bp, Glycine max
gaatcccggtcgacgacgcgtccgcccacgcgtccgctctccgcagcagccacacttcttcgccgtttcagctgaagagccgtgggcaggtaagcagggggtgagcataataatgttatccccaatgggcacttccggaaacactggcaaaactatgtgaagacttggtttaatcaaccagcccgaaagaccagaagacggttggctcggcagaagaaggctgtcaagattttccccaggcctactgctggatctctcaggcctattgttcatggccagactctgaaatacaacatgaaagtcagagccgggagaggattttcactggaagaattgaaggctgcatgaattcccaagaaacttgctccaactattgggatttctgttgatcaccgcaaaaagaatcgttctttggagagt

SEQ ID NO: 249292 - DNA, 553 bp, Glycine max
  unsure (1)..(553): unsure at all n locations
agaggnttnnncccaagggttacccgacgacgacgtaccggnccggaattcccgggtcgaccgcacgcgtccgcccacgcgtccgcccacgcgtccgcccacgcgtccgaaagcctccaaaaccaacccgagcggggcgcgatggcgtgggccctccaaaggcgatgactagcaggttctggtgcagcgtaaatcgaatgcgagagttttgacactaaacaggactaaacagttgaatgccctctctttttatatggtttctcggctacttgaaattttttctgaagatgagaaagattctgatattaaattggttgtcgtgaaaggaaatggaagggctttttgtgctggtggtgatgttgcagctgttgctcgtgattgaagtaaaggtgactggaggtttggtgcaaaattttttcaaagtgaaattaaattggattacttgatggcaacatatagtaagccccatgtttcaatctttaatggaatgtcatgggaggtggtgcttgtggttctgtacattgaagacttcttgttgtacttagaataccgt

SEQ ID NO: 249293 - DNA, 559 bp, Glycine max
  unsure (1)..(559): unsure at all n locations
agatgntnnnnaaagccaggctgacgaacgacgacgtaccggnccggaattcccgggtcgaccgcacgcgtccgctgggaagctcactgtcaaatacgaaacaaaaggagatgctaagcccaaccaagacgaacgcaaaactggaaaagccaaggctgatgctctcttcaaggccattgaggcttaccttttggcccatcccgattacaactaatcctcttcaacttacttgtcatcactttcttgcttggagacttatccaatcactctgttctcaacttaagttgccttccaatgtatccagtctttcctttcttctttccttttcccatataattgtgagacttatgatatatctgtatctcacttcatcaataataaattataataaanaaaaaaaaanaaaaaaaaaaaaaaaanaaaaaaaaaaaaanaaaaanaaaannaaannnaaggggcggccgctctaaagaatccaagtttacgtacgcttccattcaacgttaatattttttctttagtggcacctaaattaaattcatggccggtgttttacaag

SEQ ID NO: 249294 - DNA, 174 bp, Glycine max
ccatcaaaaaagatcactttccttgaggatggagaaaccaagtttgtgctgcacaaaatagaaagcattgatgaggcgaacttgggatacagctacagcgtggttgggggtgctgcattgccagacacggcggagaagatcacattcgactccaaattggttgctggtcccaat

SEQ ID NO: 249295 - DNA, 502 bp, Glycine max
  unsure (1)..(502): unsure at all n locations
cggaattcccgggtcgaccgacgcgtccgaagcccgtttgtgtgcagggtccagattgccctcaaattgaagggaattgaatgcanattggtggaagataatttggcaaacaagagtgatctacttctcanatccaaccccgtttacaagaaggttccagtgtttattcataatgagaagcccatagcagagtctcttgtgattgttgagtacattgatgagacatggaagaacaaccccatcttgccttctgatccttaccaaagatcctttgctcggttttggtccaagttcatagatgacaagattgtgggtgcttcatggaaatctgttttcacggttgatgagaaagagcgtgagaagaatgttgaagaatcgttggaggctctgcagtttcttgagaatgaactacaggacaaaaggttctttggaagagatgaatttggatttgtagatattgctggtgtcttcattgcattttcatcccaatttttcaagaagt

SEQ ID NO: 249296 - DNA, 405 bp, Glycine max
  unsure (1)..(405): unsure at all n locations
ccggnccggaattcccgggttgattgctgcctgctgatacctacgagagagctctggcaaggttttgggttagatgtgctgatgatgacatgtgtgctgcagttattgcatgctgccttagcaataatgattaatagcgagaaaagagcatagagaatatatgggagcatctcacggttgttgagaatcaatgttttggtgatcagaagaaattttttgggggagacattattaacattatggacatagctattgggtccatatataaaattcttggggttgcagaagatattattgactcgaatgtgctggaagattagaaattccctcacttgcattcatggtataataatttcaaggatgtagcacatattaaagaaaacctcccagaccatgagaaaatgg

SEQ ID NO: 249297 - DNA, 474 bp, Glycine max
cggccggaatcccggtcgacgacgcgtccgcggacgcgtgggtgcgtcccttgttggaattcctaaagagaaggtgctatctgaagtaaagcgagatgagaaaaagaagtgataaatgaactacagaaagataacaacattgtagcaatggttggtgatggaattaacgatgcagctgccctggcttcttcacatgttggtattgcattaggtggaggtgtcggggctgctagtgaggtgtcttctattgtattaatgcgcaaccagctctcacagatagttgatgccttggagcttagcagactgaccatgaatactataaaacaaaatctttggtgggctttcatatacaacattgtaggaattccaattgcagctggagtgttatttcccataaatgggactgtgctaactccatcaattgcaggggcactcatggggttgagctccattggcgtaatgactaactcgtta

SEQ ID NO: 249298 - DNA, 381 bp, Glycine max
acccgggtcgaccgacgcgtccgcccacgcgtccgccttaagctccttagtgcttctccttgcagctctaattctatcccctgaggtgcttgcaaacgatgagagtcccccaatgtacaaacctaccactgagaaaccaccagtttataagcccccagttgagaagcctcctgtttacaaacctccaattgaaaaccccccaatttataagcctccagtatagaagccaccagtgtacaagcccccagttgagaaacccccactgtacaagcccccagttgaaaaaccaccaatgtacaagcccccagttgagaaaccaccagtgtacaagcccccagttgaaaaacccccaatttacaagcccccagttgaaaaaccccc

SEQ ID NO: 249299 - DNA, 558 bp, Glycine max
  unsure (1)..(558): unsure at all n locations
tgggtttnnnnaagatggnnnntannccattttcangcatgaccgacgtaccggtccggaattcccgggtcgaccgacgcgtccgcatattctaagagacgagccagtggcatggctttatgagcttgggaagttgggtgggggagatgggaaatgtacatggtcgtgttgatggagctaaagctttattgattggatctcacatggtacatgcataggctaaaatcaaaagatctctcaatatgccacaatatgatcctactgggatcttgtataatgaagccgaatgctacaaactgaaatgatgcttgcgctgtgacatggcccaactttaccgatgtatacccttttgcaccgattgaccaaaactaaaggttatcagcatatctggtattaggaaatgttcaacaatttgagtgaactgttgctggacaaattctccttacatagccgactggtggttattcgtgcacattattttatttgccaattgtagatatcctcatttgtgccattaagtgagtttcaagctgaaagctttgaccgattgacaagtag

SEQ ID NO: 249300 - DNA, 315 bp, Glycine max
  unsure (1)..(315): unsure at all n locations
accggnccggaatacccgggtcgaccgcacgcgtccggaaatggataagaataacattgcacctaatgtcaccactctgaataactcgctctgtggcttttaccgcgagaagaagtttgatgatgtacggaaggtgtttaaattaatggagaagtatagtgtttttccttctattagtacttacaatgttaggattcagagtttgtgtaagctgaagaggtcttccgaggctaaagcgttgctcgaggggatggtttgtaacgggaggaagccgaattcagttagctacgcgtgtttgatccatgggttttgtaa

SEQ ID NO: 249301 - DNA, 573 bp, Glycine max
  unsure (1)..(573): unsure at all n locations
atgttnntnnnnnatgatggnnnaacccaaggtttacngcaggcacgacgtaccggtccggaattcccgggtcgaccgcacgcgtccgccttgttcctccaaaattctatgtggtgttgcagatggtgatgattactgcttgggtgagtgaccttttcactggtatgggtggttgttttggatgctgtatgaaacccacaccaattattgctgtggatgaacctgcaaagggactaagaattcaggggcagacagtaagaaaaccacacatatcagatggtttctggagttcaagcacttgtgatctggataacagcaacattcaatctcagagaagtatctcgtctgtcagtacattaaatcaaattctctatcatagcggtggaacttctaccccaggcgccaatcctgaatttgtaaacccaggtcttcttctttggaatgagagcaggcttcagtgggttggaagtggcaaatctaggaagcataaccaacaaaaaagagaacccaaactaaatttgaatgccaccttataaaagttgcttgggactaaaccacccttttttcaaccan

SEQ ID NO: 249302 - DNA, 444 bp, Glycine max
cggaattcccgggtcgaccgacgcgtccgatggtcatagtctacacctaattagccaaacacaccacagcaccaaactagttggctcaaggctctttgaatggctttggaggctttgaattcaccaacagcagccaccactcccttccgtggttaccaagaagaggaggaggaggttgaccttcacctacgcgagccttgggccaagagaaaacgctccaaacgacctcgttttgagtcggaggaagagtacttggctctttgcctcatcatgcttgcacaaagcggtaacaacaacaacacccaattaccgtcttcgtcacagtcacacaaagaagcgtcaccgccgctgaaactatcacacaggtgcaccgtttgcaacaaggcttttccttcttaccaagcactcggtggacacaaggccagccaccgcaaggcctcgtcg

SEQ ID NO: 249303 - DNA, 352 bp, Glycine max
  unsure (1)..(352): unsure at all n locations
ccgggtcgaccgacgcgtccgattttctctcttctctgcttcttcttgttcaaatcttaagagctgaggagaatcaatcgagagaaatatgtctggtgtcgctcgtggacgccttgctgaggaacgaaagtcatggcgcanaaaccatccacacggtttcgttgccaagcccgagactctacctgatggcaccgtaaatttgatggtctggcattgcactattcctggcaagaccgggactgattgggaaggtggatatttcccactgacaatgcacttcagtgaagattaccctagcaagccctccaagtgcaaattcccttcaggtttctttcaccctaatgtgtatcca

SEQ ID NO: 249304 - DNA, 458 bp, Glycine max
ccggcctgaaacccgggtcggcgacgcgtccgcccacgcgtccgctgatggcaagacccaagtcactgttgagtactacaatgacaagggtgcgatggttccaatccgcgtccacactgtgctcatctccacacagcatgatgagactgtcacaaatgatgagattgcagctgatcttaaagaacacgtgattaagcctgtgattcctgagaagtaccttgatgagaagaccattttccatttgaacccttctggcaggtttgtcattggagggcctcatggctatgctggtctcaccggccgcaagatcatcatctacacctatggaagatggggtgcacattgtggtggtgccttctttgggaaggatcctaccaaggttgataggattggtgcctacattgtaaggcaagctgcaaaaagcattgtttcaaatggacttgcttggaaggcaattt

SEQ ID NO: 249305 - DNA, 551 bp, Glycine max
  unsure (1)..(551): unsure at all n locations
ggcggttgngatttccaatttcgngcatganccacgtaccggnccggaattcccgggtcgaccgacgcgtccgcccacgcgtccggttaaatagaaaagaggagtttgagaatggcaacgatcancccggtgtgggtttaattcctggagtggccancnatngttacttcaccagcctccggcaagacctatttcctccgcagcacaggggagaaaggattgacgattgaggggaagttcataaagttcacaggcatacgagtatacttggaggataaggcggtgccatcactctccgctaagtggaaaggtaaaacttcaaaggagttaattcacacccttcacttctacaaggatatcatttcacggccgtttgaaaagctaattagaaggtccaagattctgccattggctggcgctgaatactcaaaaaatgtgattgaaaacttcctggcacacatgaaagtcttttgggacttacggtgatacctaagctccaaccattgaaaaatttgctgaagccttcaacaatgtgaaatttgcaccttgtt

SEQ ID NO: 249306 - DNA, 572 bp, Glycine max
  unsure (1)..(572): unsure at all n locations
tgttttnnnnnnnagcgggnnnccacgcagctcacgaccgactgacgtaccggtccggaattcccgggtcgacccacgcgtccgcaagaatttccattgcatgcaaagcaaatacgcattatattactagttttaatttgtttggtcgtttgcttctgtctttgattaatgatgactagctttaaggttgcatgtgtggttgcgatgatgtgcatggttgtggccatgagtgttacacccatggcacaggccgcaatcacgtgcgggcaggtcgccggcgacgtgtctccgtgcctcagttatcttcgaagcggcggaaaaccgtcggacgcctgctgcaacggagtgaagtcgctcagcggcgcggcgaagaccaccgccgaccgccaggcagcctgcaattgcctgaaaaaccttgccaataatatgggacagagtttgaatgccggcaacgcagcctctcttcctggcaaatgtggcggtaacatcccttacaagaacagcaacttcaccaactgggccaccattaaagtttttgaaggtggatctagtataanggaagaactggaggg

SEQ ID NO: 249307 - DNA, 442 bp, Glycine max
  unsure (1)..(442): unsure at all n locations
cggaattcccgggtcgaccgacgcgtacgcccacgcgtncgaaacatggctttcttaaagctcccttagtgctgctcccttgcagctctaatgggtgtcctctcaaagtgcttggcaaactatcgagaatccccccagtgtacaaagccttccacttgagaaaaccaccagtnttataaagcccctcagttgagaaagccttcctgtgtacaaacccttcagtttgaaaacccctccaatttataatgcctccagtagagaagccaccagtgtacaagcccccagttgagaaacccccagtgtacaagcccccagttgaaaaaccaccagtgtacaagcccccagttgagaaaccaccagtgtacaagcccccagttgaaaaacctccaggttacaagcccccagttgataaacccccagtgtacaagcccccagttgaaaa

SEQ ID NO: 249308 - DNA, 433 bp, Glycine max
  unsure (1)..(433): unsure at all n locations
gaattcccgggtcgaccgacgcgtacgcccacgcgtncgcccacgcgtncgggtgttttcacattcgaggatgaaatcaactcccctggggctcctgctactctgtacaaggccctagttacagatgccgacaacgtcatcccaaaggctcttgattccttcaagagtgttgaaaacgttgagggaaatggtggcccaggaaccatcaagaagatcactttccttgaggatggagaaaccaagtttgtgctgcacaaaatagaaagcattgatgaggcgaacttgggatacagctacagcgtggttgggggtgctgcattgccagacacggcggagaagatcacattcgactccaaaatggttgctggtcccaatggagggtctgctgggaagctcactgtcaaatacgaaacaaaaggagatgctgagccca

SEQ ID NO: 249309 - DNA, 506 bp, Glycine max
  unsure (1)..(506): unsure at all n locations
cggaatncccgggtcgaccgacgcgtccgcggacgcgtgggcggacgcgtgggttacagagtgaagattttatttttctttctttctgtggaggataaagaatgggtgctaagtccgaaaccgcttgcgttactggggcttctggttacatcggatcatggcttgtcatgagactcatcgagcgtggctataccgttcgagccaccgtactcgacccagctgatatgagggaggtgaagcatttgctggatctgccaggtgcagagagcaagctgtctctgtggaaggcagaacttacagaagagggaagctnttatgaagccattaaagggtgcacaggtgttctccacttggccacccccgttgactctaagtccaaagacccagagaatgaaatgataaagcctacaattcaaggagtactaaacatcatgaaagcatgcctgaacggcaaaactgttcgaaggctagtattcacgtcctcagcccgaactaccaacattact

SEQ ID NO: 249310 - DNA, 398 bp, Glycine max
  unsure (1)..(398): unsure at all n locations
cggaattcccgggtcgaccgacgcgtccgatattattctcacgactagtgctatatctaaggcgatatcttccaaggttgaaacaaacagatgctcttttctcttatgatggcttctcacaacatcaaaatccacgaccacttaagggtttcccctccctcagcaacagaaatatccctctctctcactttcttcgacctgttctggctcaggttccaccccgtggaacgcatcttcttctacaccctccctacaccccattcaaatccatccattttctattccaaacttgttccaaagctcaaaacatctctctctcgcactctccaacacttnccccctctcgccggcaacgtcgtttggcctgataacaccccaaaccccaccgtccaatacac

SEQ ID NO: 249311 - DNA, 548 bp, Glycine max
  unsure (1)..(548): unsure at all n locations
agagggtnntaacgtagccccctaagactgacttaccggtccggaattcccgggtcgaccgcacgcgtccgaagacatcaaggaactcatctggagagaatctgtgaagttcaatcctgttccaccaggctactgagattttgtatttatgttgtatatgtttagtgaaatatctgatgactaatatatacattttatgaccactacttggcaagttgcagcgcacagaagatatgaaaacgtattggagatactgagattcactgagtttgttgaaggtttctttcgttttagtctcatctcagatacttggataatcatattgttgagatgtactgaggaaagaaaggatcaaaatatgtttcagcagaatatcctaaagctccaactcctttgtgtacttctatccttctttttagaatcaagtccataagttagtgcaaaananaaaaaannaaanaaaaaaaaaaaaaaaaaaanggggcggccgctctaaaggatccaagcttacgtacgcgtgcatgcgacgtcatagcttttctatagtg

SEQ ID NO: 249312 - DNA, 510 bp, Glycine max
  unsure (1)..(510): unsure at all n locations
gatgcgagtgnctagtcttctaacttagcattcatattcgcgccgccctggtaaaacagggtcgacggacgcgtacgcccgcgcattgagaaggaaggacgctttcttattcgaaaggccatgccgagataccagatgagatccatgtatctgcgatcgggaaaccgtatccaagctccgcggctagtctgcgctctctgaactggtaaaacttacccaactgaaacatcttactacctaaaggaagggaaatcaaccgacaccccgttagcaccaacgagcgagagcagaccggggtttgaagaaaaacaaacactacgcaaaggttctctttcgagtatgataaattcctcagcaccaaagtgtggacttcgctcaaaacaagtttcaggccacatgttttggatcggatgatggaaaaaccaccgagttgctctcatttaagggccgcaaagaactttttttgtcaaaagcctagatgacctggacaaattaagttattgggcccgc

SEQ ID NO: 249313 - DNA, 501 bp, Glycine max
ggactgattgtcgttggactgcacgcaccggtccggaattcccgggtcgacccacgcgtccgacagaggaagttttggggtttgaatctatttattagaatcaaaccaaattgaaagaagatgggtcgatcgatcgatggctctggtcgcagttgaagtgaagcatgcgtcggatggcgcacctgaagagaattgctccagcgagcccacccatcatggcaagggcctgcggcactactattctcacaacattcacgagcatcaggtccttctccgtcaaaagacgcataacctacaccgtcttgaggctcatagaaacgagctcaattccagggtgaggatgctgcgcgaagaattacagcttttgcaggaaccatgctcttatgttggtgaagttgtcaaagtcatgggcaagaacaaagtccttgtcaaggtccacccagaaggaaaatatgtcaatgatattgaccaaagtattgacattacaaagattacttcatc

SEQ ID NO: 249314 - DNA, 497 bp, Glycine max
  unsure (1)..(497): unsure at all n locations
aattgataactagtaggactgccgtaccggtccggaattcccgggtcgacccacgcgtccggaacgctcgctcgcactgtccagatcttaatcaagaggagtgagttttgtttttccaggcatgacgccgctgatcctgcatgctgggaaaaccaacaaaaattcttacaagacactcattgcagccgagtatgctggcgtccaagttgattttgcccctaattttgagatgggtgtctccaataaaactcctgaatttctcaagatcaatcctattggcaaggttcctgtgctggaaacccccgatggtccaatattcgagagcaatgccattgctcgctatgttacccggctgaaaggtgataacactttgtatggatcttccttgattgaatatgcccacattgaacagtggattgatttttcatcattggagattgatgctaatattatcaagtggtatgccccaagagttggacgaggaccatatcttcctn

SEQ ID NO: 249315 - DNA, 492 bp, Glycine max
gctcacgatcctcatcgtactgacgtaccggtccggaattcccgggtcgacccacgcgtccgcggacgcgtgggcggacgcgtgggcggacgcgtgggcggacgcgtgggcaaaaacaaaaacaaagtaagagttcactcaatctcactgtgttgtgagttgtgtgtgagcaccaaccaacaatggtgtctctgactccgttatgtttctttattaccttgttgatcgctggtgcagacgcagcggcggagccccaaacggtgcgttttgacaccggggggttgagcagagacacctttcccaaaggattcttattcggaacggccacgtctgcgtaccaagtggagggtatggcccacaaagacggtcgcggcccaagcatttgggacgtcttcatcaaaaaacccgggattgtcgcaaataatggcacgggagaagtttctgttgatcagtaccatcgctacaaagaagatatagatctcatggccagcc

SEQ ID NO: 249316 - DNA, 514 bp, Glycine max
  unsure (1)..(514): unsure at all n locations
tgatgcgantgacttgcngctacnngctgatacgactgacgtaccggtccggaattcccgggtcgacccacgcgtccggttcaaaataaatagttatcaaagttagttttttttttcttttccctaaagagttaggctctattggaccgtacgattaagatcgttcggtgaaattgatcacgctggtgccgcataccctagcgttcctgttattctattgtggctgaaacaaaacagtgttgaacggcgaggtagaacgacgacccccttctgcgttttgaccttcaatctcaatcatggccaaagctgaaggtggcaaggaaccaataaatgaacaagcagtagcaaatatgtatgctgcaatgaggtctgagctcaaccaaatttactccaaaataactgaactggagatggaagttagtgagcacacattggttaccaatgccattcaaccacttgaccaatctagacgatgctatcgtatgattggaggggtgcttgtggagagaaccat

SEQ ID NO: 249317 - DNA, 523 bp, Glycine max
  unsure (1)..(523): unsure at all n locations
ttatggtntnagtngattccagctactcgtacttactgactgtcccggtccggaattcccgggtcgacccacgcgtccgggagagcagggaatcattgaggttgctcgtcacccagatgcagtcagtgtagtcacaggagtggtaggctgtgcaggactgaagccaacagttgctgcgatagaagcagggaaatacatagctttagccaacaaagagacattgattgctggaggtccttttgttcttcctcttgctcagaagcataatgtaaaaatacttccagctgattcagaacattctgccatctttcagtgtatccaggggttgccagagggtgcacttaggagagttattttaactgcatctggaggtgctttcagggattggccagttgataaactgaaagatgttaaagttgctgatgcattaaaacatcctaactggaatatggggaaaaagataactgtggactctgctacccttttaataagggtctagaagtaattgaagcacattacttgt

SEQ ID NO: 249318 - DNA, 456 bp, Glycine max
ttccagggtcgacccacgcgttcggtgaagcatcccccggttgtggtgagtggaatatgccaatgaagaggaatccagcttacagagggaaatggcatgccccgctaatcgaaaatcctgcttatatgggaatcctgaagcctcatgacattccaaaccctgactactttgaaattaaaaaacctgattttgagcctattgctgatattggcatcgagatttggacaatgcacgatggtatattggacgacaacatcttgatagctaaagatgataaaattgccgactactaccgggacactacatgctaatcccaattttaccgtcgagaaagaaaaacagaaggaagaacattcggaagctgcatcaagttgtcttgctggcttccagaagaacgtatttgacctgttatacaagatcgcagacatttccttactgagtgcatacaagcttaaa

SEQ ID NO: 249319 - DNA, 507 bp, Glycine max
  unsure (1)..(507): unsure at all n locations
gtgtgcgtcntggctgngcctagcntcattcagtagacgcaccggtccggaattcccgggtcgacccacgcgtccggccacgcgtccgtttatggatgagatcgatgctattggaggtcgccgcttcagtgagggaggaggtgcagatcgtgagattcagagaacgctaatggagctgcttaatcaacttgatggatttgatcaacttggaaaggttcaaatgataatggctacaaacccacctgatgtacttgaccctgctctcctgcgtcctgtgagattggatagaaaaatagaaatccctgtgcctaatgaacaatccaggatggaaattcttaagattcatgctgctggcatcgctaagcatggtgaaatagactatgaagctgttgtgaagcttgcacagggatttaatggggctgatcttcgaaatgtctgcacagaagctggaatggcagcaattcgtgcagagcgtgattatgtgatccatgaagagtttatgaatgc

SEQ ID NO: 249320 - DNA, 501 bp, Glycine max
caccgaagtcggtcgagcagcacgcaccggtccggaattcccgggtcgacccacgcgttcgccttcttagacacatatgattgatacggactttatcatggacatgaaattctgagagcaggggctttaaaagagcttgctcgggaaaaagcccagtcggctacaaaattagccacttgttagatctgatggcgcgttagctggggtcaaaggtactcctgaatatgtgcggcagtgctgtgaatgtagtcttaagcgccttgatgttgaatgcattgaccgatactctcatcattcagttgacacttgagatccaaatgtagacaccgatatgggagctcaaaaagctggcaatcgaaggacagatgctgaatactggctagtctcacgctagtactgacactatcaagagagcacatgctgtacactctatttctgatgatcacatggaaaatgcattatggacccgtgacactgtggaagacatcataacactttgcg

SEQ ID NO: 249321 - DNA, 507 bp, Glycine max
  unsure (1)..(507): unsure at all n locations
tgtatgcntntatcctgtttcagttcgcctcagtactgacgtaccggtccggaattcccgggtcgacccacgcgtccgcccacgcgtccggaagaacaaaaagatcctatgaggagaaatgaggaggagagtagcaagagtagtaaggtgactctgtctgggttgttgaattttatagatgggatttggtctgcttgtggaggtgagaggatcattgttttcacgacgaattatgtggagaaacttgaccctgctttgattaggagagggaggatggataagcacatagagatgtcttattgttgctatgatgcattcaaggtgctggccaagaactacttggatgttgagtctcatcatttgtttggtgcaattgggggattgttggaagaaacagatatgtccccggctgatgttgctgagaatctgatgccaaagtctgtggatgaagatgtggagatttgcctgcacaaattgattaaggctctcgaagaggccaaggaggan

SEQ ID NO: 249322 - DNA, 515 bp, Glycine max
  unsure (1)..(515): unsure at all n locations
tgtgccgaatgactagnngctgctactaatagtactgtcgtaccggtccggaattcccgggtcgacccacgcgtccgcacacacacagctagcagatattacatacacgtgaatcactaattaagccatggagaagaggtcaatagctgggttgtgcttcctcttccttgttctctttgttgctcaagaagttgtggtgcaaactgaggcaaagacttgcgagaacctggctgatacatacaggggtccatgcttcaccactggcagctgcgatgatcactgcatgaacaaagagcacttgctcagaggcagatgcagggacgattttcgctgttggtgcaccaaaaactgttaaatggatccattcactccaacgtgaagaagatgcatgcatcgctattttataaaaaataaaactactatatactatatataataagactggcgctgcatcaatgacctatgtattatagtatatattattaccgatgtcagaactatagatgcatgtactg

SEQ ID NO: 249323 - DNA, 512 bp, Glycine max
  unsure (1)..(512): unsure at all n locations
gatgcgtntgtctgccgctgagagctgtaggactgacgtaccggtccggaattcccgggtcgacccacgcgtccgcgcacactgtcacaggtgtagcggcgaaactgaggtcgtagaaagaatggcgaaaacgacgtcgttgttgctctttacactgctcctcttcggaaccttagctctcatccaggcgaagaaatcgaaggaggatttgaaggaagtgacccacaaggtttactttgatgttgagattaatggaaaagaagcaggtcgtattgtgatgggtctttttggaaaggctgttccaaaaactgcagaaaactttcgagctctttgcactggggaaaagggaactggtaaaagtggcaagcctctccattacaaaggtagctcattccatagaattattcctagctttatgctccaaggaggtgattttacacatggcaatggtatgggtggagaatcaatttatggagagaagtttgctgatgagaacttcaagttaaagcata

SEQ ID NO: 249324 - DNA, 320 bp, Glycine max
cccactcgtccgaaaaaaaaaaaaaaaaaaaaaaaaaaaaaaaaaaaaaaaaaaaaaaaaaaaaaaaaaaaaaaagagaaaaaaaaaaaaaaaaaagaaaaaaaaaaaataaaaaaaaaaaaatacaaaaaaaaaaaataaaaaaaaaaaaaaaaaaaaaaaattactataatcaaaaattaatcaattaaaaaaacttaaaaaataaaaaaagactcttcaaatcaattcatcaataatcaaataactatttatccaaaacaacctcctatagaaaaaattaaaccacaaatttcacaaattgaacaaataaaactaac

SEQ ID NO: 249325 - DNA, 477 bp, Glycine max
ccggtcttgaattcccgggtcgacccactcgttcgcccacgcgtccgattcaggaaaaaaaaaaaaaaacatggtggtgaaggtgtatggtccaacctatggatcccccaagagggtcctggtgtgtctgattgagaaggaaattgagtttgaaacagtgcatgttgatctcttcaagggagagaataaggaacctgagttccttaagctgcagccatttggatcccttcctgttattcaagacggtgattatactctctatgaatctcgtgcaataatcagatacttagctgagaagtataaagaccaagggactgacttattgggaaagacaatagaagaaaagggtctagtggaacaatggcttgaagtggaagctcataactttcacccaccactctacaacttggttattaatgttctgtttgcgccattaacgggggctccttcggaccaaaaagtgatagaagaaagtga

SEQ ID NO: 249326 - DNA, 524 bp, Glycine max
  unsure (1)..(524): unsure at all n locations
cgtatggtntnactagattaaagcctactgtatgtatctactccaccggtccggaattcccgggtcgacccacgcgtccgtgcctgctgttagctggtcaaatgaaaagtattacttggagcagattctgccactttttggcgagcataaggtggtacatttcaacaaaacagatgcacgtctagcaaacaatggtctcccacttgatctacagaaacttaggtgtcgtgtaaatttccaggcattgaaatttactcctcaacttgagaatttgggccaaaaattgattcggatacttcgtgaaaatggaccctttctggcattgcatctgagatatgagatggatatgctggctttctcaggttgtacgcatggttgctctattgaagaagctgaggagctcaagcagatgaggtatgcattcccttcctggagagagaaggagatagtttctgaagaaaggagatcacagggtctctgtcctttgactccagaggagtctgccttaattctgcaagccttgg

SEQ ID NO: 249327 - DNA, 508 bp, Glycine max
  unsure (1)..(508): unsure at all n locations
cgatgcggtntagctgngcctggcgtcattcgagagacgcaccggtccggaattcccgggtcgacccacgcgtccgcccacgcgtccgcccacgcgtccgattctcgttctctctcttcttaccgacatacatgctggtcgccacacttctgtgggggaactcgattccattattctaataatcatatctgatagagacagtgtttgagattgagggaagatgctgaccaagttcgtgaccatacgtaatagagtgaatggactgagtctccacacgtagagaccctgtatcctctcgagtcttcacagagacgtgagacacctatgggattaccgcatgggtactgttagtgacagagtcgatgagcatgatggtgctgtcagaggtgttcatgctcataatgaccagcccctgtaggtctttggaggggatgattaccagattaatgcttggaactatgtgacgcctaggtgcttggtcactattctaggtcaccttgcttacttc

SEQ ID NO: 249328 - DNA, 510 bp, Glycine max
  unsure (1)..(510): unsure at all n locations
tgtatgcngtctnctntgcngtcagtnnactacaagagacgcaccggtccggaattcccgggtcgacccacgcgtccgcttgcaattccattaactcaccgtggcattgcaaatagtgtgagattcctcacagggcatgcaaggaaaggaggatccgatcctctctttgtatcggaaaatgctgctgatccggattctaccttggtggtttacatgggcttggcgaccttcccttcacttgcacagaagctaatgcatcatggtctgtcccctcagaccccaactgcagccattgagcgaggaaccacacttcatcagcgcacggtgtttgctgaactaaaggaccttcacgagaaaattacatctgctcagctggtgtcaccaacgctgattattataggaaaagttgttgaactatcaccattttggccaattcctacaaaagaagaatcatgtttaatgcaggcatgatggatgttgtcaagagatattattgtgaagcttggtggc

SEQ ID NO: 249329 - DNA, 513 bp, Glycine max
  unsure (1)..(513): unsure at all n locations
ggtgggnttnctgatgctacttgtcatcgactgacgcaccggtccggaattcccgggtcgacccacgcgtccgcatcagcgcacgggtggtgtttttgaacgtgaggcctcaaccaaggcctggaaaaggtgtgacaaacacttgtgaagtctgcgagcgtagccttcttgactctttccgcttctggtctcttggttgcaagattgttggaacatctaagaacttccagaagaggaagaagcagtcaatggcaatgtcatcagattctgaggactcgtacagtagcatacagcgtacatggtcttaagaaaaactgcaaagttcagagcttcacaacatccactccactctcaacttccgttgattacaaaacggcctatagaagaaagggaatacctcaccgtgccccaatggtgggactaatcatagaatattagtgatagtgggtatttataggctatttgctataatgctcttacggagtctcaaaatactactatactaatgcgagg

SEQ ID NO: 249330 - DNA, 505 bp, Glycine max
gaagcggctgactagcctcagctcggtaccgactgccgtaccggtccggaattcccgggtcgacccacgcgtccgcccacgcgtccgcccacgcgtccgcaacaacacttgaaagttgaaacagaaaaacaccaatccctcatcgtactgttccgttatcaattctcgtgtttaaggacacaatttgcttgatacattttcaagttttcatctccatgttttgattttgaagaataaggagtatgcaattgactactacagatatggttttactataagtggcctgtatatggttttgggtcttgcaagtgtaagcagtatggaggatattcaattggatatcagttgggacgatgctgtctgtcccatatgcttggattttcctcataacagtgttctccttcggtgttcattttatgataaaggatgtcgtgcttttgtttgtgacacaaatcaattgcactctaattgtttggatcgctttaaaaattcatgtggcatgcca

SEQ ID NO: 249331 - DNA, 515 bp, Glycine max
  unsure (1)..(515): unsure at all n locations
tttgcgtctgacttgtccaacnacatactcgactgcggtaccggttcggaattcccgggtcgacccacgcgtccgctctctctttctccgactcattgccgatcttccagcaatggccacacacgtgagtcacgggatattatcggcatgcattgggggctacttcttctgcctatctgtatattcttctccatataccattctcaccgatccgctgcaatcaacctcttaactgccactcccacacgcttagaatacgcgttctatgcgcttagagtttttcagatgcttgtaatcgaagagaataatactcctgtgaacgaggacacgattcagaaagttgtcgaaagtctagcctcggcttctcctatcaaggattagttctatgccttgaaagttaacgccattttaaaatgcaatgtcaatgggaacgtttttaaggatattggtctcagacttaaagccactgaacatgaagcgagtgctttgattgacatctactattcaattggagg

SEQ ID NO: 249332 - DNA, 527 bp, Glycine max
  unsure (1)..(527): unsure at all n locations
tgtactggtntgnntntagacaagcaactctatggagctgactgctccggtccggaattcccgggtcgacccacgcgtccgaactttgatcaaataggccttgctcaaaagattgaaaagcatgagcttcttgagatgagacgtgttgctgcttatatttacaagaaggcaggtaggtggaagcagtctattgctttgtcaaagaaggataacctttacaaagatgccatggagacagcctcccaatccggggagcgtgaacttgctgaggagttgcttgtttatttcattgatcagggaaagaaggaatgctttgcctcatgtctatttgtttgctatgatctcatacgggcagacattgttcttgaactagcttggatgcacaatatgattgactttgcctttccatatctattgcagtttattcgtgagtacactggcaaagtcgatgaactagtgaaagacaaaattgaagcacaaaatgaagtgaaagctaaagagcaagaagaaaaggatgtaattgcaca

SEQ ID NO: 249333 - DNA, 523 bp, Glycine max
  unsure (1)..(523): unsure at all n locations
ggatggtntgactngtgacacgcatcctgancgtattgctcgcccggtccggaattcccgggtcgacccacgcgtccgcccacgcgtccgagtacctgactttcagcctaagaaagatgtgaaaatagtgacagatgagaaggccaccagtctctctacagcttctatagatgatgcagcggttattaatgatctagtaatcaagttagagaggtgccgggcaaatcttccaccagtgttcatgatgaaaccaattcaatttgagaaggatgatgacacaaactaccatatggatgtgattgctgggcttgccaacatgagggcccgcaattacagcattcctgaggttgacaagcttaaagccaagtttattgctggaccgatcattcctgcaattgcaacctcgactgccatggcgactggtcttgtctgcctggagctgtacaaagttttggatggagggcacaaagttgaagactacagaaacacatttgctaacttggcactgnctctcttttcaatg

SEQ ID NO: 249334 - DNA, 451 bp, Glycine max
tccagggtcgacccacgcgtccgccaaatccgctaaaagaaggccatgatctattcaaaaaaggacttttaagtgaaacagttgtgggattggaagctgtagtcctaaaaaaccctgtgaatgctgaagggaggagactgattggaatagctcatgcagagaatgatgatgatcaacaggctattgcagcaatgatgcgtgcacaggatgctaacccaacaaacctggaagtgcttctagctcttggtgttagtcatacacatgaactggagcaaacagctgatctgaaatatctatatggatggttgcgccatcacccaaaatatggtacacttgccccgcctgaaatggctgattctgtgtactatgctgatgttgctaggatatttaatgaagcatctgaactgtcacctgatgacacatatgtccacataggtttaggggtcatgta

SEQ ID NO: 249335 - DNA, 478 bp, Glycine max
ggtccggtattcccgggtcgacccacgcgtccgttctttctttttcattttgttttgctaccctaatagacacgaggactatttaaaaacccggacgcgtcgtatcgttccaccggcgccgtcaacctccaaggctcgaaccaccatccttccactcaaccgcgcacttgcactcgtcggctcaagctaccaccgcagcacgcctcagccgccgccagttaacaagcatttgctcataaagaaggaaggaagatggtgtttgggcaagtagtggttggtcctcctggctctggaaaaacaacttactgcaatggcatgtctcagtttctcagtcttattggaaggaaggttgctgctatcaatttggatcccgctaatgattcgttaccctatgaatgtgctgtgaacatcgaggatctcgtgaaactaagtgatgtaatggtggaacattcgcttggaccaaatggaggtcttgtgt

SEQ ID NO: 249336 - DNA, 515 bp, Glycine max
  unsure (1)..(515): unsure at all n locations
ggtgcntttnctgtcgcctaacgaacttaggactagacntaccggtccggaattcccgggtcgacccacgcgtccgaaaagaggagtttgagaatggcaacgatcttcgcggttcaggtggagttcctggagtttgcggcgttggttacttcaccagccttcggcatgacctatttcctcggctgcgcaggggagagaggattgactattgaggggaagttcataaagttcacaggcattggagtatacttggaggataaggctgtgccatcactcgccgctaagtcgaatggtaaaacttcagatgagttagttcacaccctccacttatacagggatatcatttcaaggccgcatgataagctaattacagggtcaaatattctgccattggctgacgctcaatactcttagaaggtgatggataactgtgttgtacacattaagtctcgtgggacttacggtgattcttaagccgcatccattgaaaagtttgctgaagccttcaagaatgg

SEQ ID NO: 249337 - DNA, 513 bp, Glycine max
ggagcgtttgacttgctcacagatctcgtcgcgactgacgtaccggtccggaattcccgggtcgacccacgcgtccggagaaacaagcccttggagaagtgagtcctgagcttctggagacccaagtgaatcctgctgtgtgggaaattagtgggcacatggtgctgaagaggaagaaggactatgaggaggcatctgaagccaatgcttggaggcttcttgctgaggtttccctctctgaagagaggcttctagaagtcactgctcttgtttttcaagccattacatcatcggttgagatgaatgtcaagcctcaacgtcttgaggaagttgatgccgttagcccaaacgcacagcatgccatggtggctggttcacatgaatgccttgttctccagtaacaaggctatgaacaaattcgtagtgattatgaactaaatattgcttgccatgttacgtttcagttctaataagtgtagtaccttatattatggtccagttactggagtctga

SEQ ID NO: 249338 - DNA, 510 bp, Glycine max
  unsure (1)..(510): unsure at all n locations
gatgccnattgcatagcncctagcntggctaagtactcacgtaccggtctcggaattcccgggtcgacccacgcgtccgcccacgcgtgcgatttctattacatacatttagcagctaggatgagcaagttactactgggtcttgttgctgggttcgtggcaacctctgtcaccatggagatgataatggtacccaaaaacgtgagttcccaaaacatatgtgattacattttcactcaagacttatacaatagtataatcagtcaggctgatgatggttgcgcttggaagaacttctactaacaatatgctttctttaatgctcacaatacctacaatgagtttggtaggctcggtgatcacgatgactgctagcgtgaaggaatacctggttttgcccatataaccctttaaacaagacatttttgctacatagactagattaactgtgcatcatgggactactgtgacgagagcagcaccgattacccaattgcccctaacaaaagg

SEQ ID NO: 249339 - DNA, 525 bp, Glycine max
  unsure (1)..(525): unsure at all n locations
tttgcgtctcanctgttcccacnntcatcagcactgtctgtaccggttcggaattcccgggtcgacccacgcgtccgaaaaaacaaaaaaaaaaaaaaaaaaaatttttaacaaaaaaaaacaaaaaacaaactaaggggcacattcatacaaacgtgcacattcttctataatatcaccatatactatattcactgccccttcattttacaacttccatgacttgttaataaccctttcactacctaactaaatcgctcttacaatacatatcctctttctccagatgcccttatatcaaccagtcccattcatatcacacttcaaaacctttacgcagcctctatcactaacttaacaccccctgttgctgttctttaagatccacatgtatgctcttttctcgcatcgcaaccttttcaataactacctttctatctccaactcattataatttctcaccttactacttcttctcttttcaacgtctttccctatcaaatctttcatctactgctctactta

SEQ ID NO: 249340 - DNA, 451 bp, Glycine max
aattccgggtcgacccacgcgttcgtctttgcgcagttccctacctctcctttcaagatgcagatcttcgtcaagaccctcaccggaaagaccatcacccttgaggtggaaagctctgacaccatcgacaacgtcaaggccaagatccaggacaaggaaggaattcccccggatcagcaacgtctcatattctccggaaagcagctcgaggacggccgtaccctcgccgactacaacatccagaaagagtcaacccttcaccttgtccttcgtctccgtggcggcatgcatatcttcgtcaagactctcactggcaaaaccataaccctagaggtcgaaagctctgacaccattgacaacgtcaaggccaagatccaggacaaggagggaatccccccagaccagcaacgtctcatcttcgccggaaagcaacttgaggacgggcgcaccc

SEQ ID NO: 249341 - DNA, 446 bp, Glycine max
cgacacacgcgtgcgcacactttagctaactcttgaacaagtgtttaacgtacatgaaacacatgttggatgagggtgcgtctgtctaacacctagtgctagcattgcattctgataacatatttgcacaacattatcaccaagattcttcttcttagggtgaaaacttttaaggatgctgtacaacctgttcatgtacgataatgactgaccaatcataatccataggatatatatgtatcattgtacaagtatcatgatgacctgactgcacttgctaggcgtgtcaagctacatatcgtcatatgtcgagatgaataaattccgcgctgtatccagatattatacacgagagcaacaaacactgcttctattacagatggacctgatgtgatgaaaactgcattagctgaaagattatctcaacgtatagtgcctgcagatgt

SEQ ID NO: 249342 - DNA, 508 bp, Glycine max
  unsure (1)..(508): unsure at all n locations
tgatgcgctgnctggttaccgaatcttgatggactgctgtaccggtccggaattcccgggtcgacccacgcgtccgcgcattttagctccctcttggacaattctcgaaagtacaagaaagaaatgggggatgagtatgtgtctgtggaacaccttttgctagcatttcattctgataagagatttggacaacagttgtttaagaatcttcagcttagtgagaaagctttgaaggatgctgtacaagctgttcggggaagtcaaagagtgaccgatcaaaatccagaggggaaatatgaagcattggacaagtatggaaatgatctgactgaacttgctaggcgtggcaagcttgatcccgtcataggtcgagatgatgaaattcggcgctgtatccagatattatcaaggagaacagaaaacaatcctgttattattggtgaacctggtgtggggaaaactgcaattgctgaaggattagctcaacgtatagtgcgtggtgatgttc

SEQ ID NO: 249343 - DNA, 515 bp, Glycine max
  unsure (1)..(515): unsure at all n locations
tgagggcttnctctgngttcagtnccgctcnagtactctctgtaccggttcggaattcccgggtcgacccacgcgtccgtaagagagtggaaggagttgttgccatgtatcagcactttgtgcttgtacatggcataggtggaggaagttggtgctggtacaaaatccggtgccttatggagaattcaggctgcaaggtctgatgcatagacctacaaagtgctggaattgatcaatctgatgctgattccgagctatctttagatgattacaataaaccacttatggatttcatgtctgatttgactgagaacgaacaggttatattggtggtgcacagcgctggagggttgagcattactcatgcctgtcacaagtttgcaaacatgattcgtttaactgcttatgcggcagcaactatgctcaagttcagattcctgaccgatcaagatcttaaagatcgtgtgccagatttatccgagtatggggatgtgtatgaactgtgattcgcgaag

SEQ ID NO: 249344 - DNA, 226 bp, Glycine max
ggtttctgtagcctccaaccataaagagaggtttatggctcccaaacatactattacacgtttgtgtgttttatagaacaagggtcacattgtcaccaataaggagattccttcactcccttcagatcgcaaggggaaaacacgcactcgagtgcactctgtgaggaacctcattcgagaggttgcctgctttgcaccttattaaaaacgaataactgagttgctc

SEQ ID NO: 249345 - DNA, 524 bp, Glycine max
  unsure (1)..(524): unsure at all n locations
tgtatgtgttnactgaatccagctacctcatgtattgtctcgcccggtccggtattcccgggtcgacccacgcgtccggatacaattgtttatgcttacagatcaggtgaggtgattcggctaccaaaaggggtttcaattccagtgacactaaaagttctggagtttgagcttttccacttctgtccaatccaagaaatagctccaagtatatcatttgcagcaatagggctactggatatgttcaacactggaggagcagtggagcaggttgagattcataaccgagcagcaacgaaaacaatagctcttagtgtaaggggaagaggcagatttggagtttactcctcccagagaccactgaagtgtgtggtaggtggcgctgaaaccgacttcaactatgactcagagaccgggttgacaaccttctccattccagtttctccagaggagatgtacagatggtcaatagagatccaagtttgagtcctttntaagacttggggtttgatgcattgttgtan

SEQ ID NO: 249346 - DNA, 519 bp, Glycine max
gttggttgactgaatccagctactcactcattgcacgtcccggtccggaattcccgggtcgacccacgcgtccgggattctcagcaaacaatgaactcctgagaccagtagttgagtctagttgtttcccttaaagccatggaatattctccattgtccattgttattaccttctttgtgttcttgctcttgcattggctagttaaaacttacaagcaaaaatcgagtcacaagttgccccctggcccatggaggttacccatcattggtaacctccatcagctagcattagcagcttcacttcctgatcaagctctccaaaaacttgtccgcaaatatggacctctcatgcaccttcaactaggtgaaatttcaacacttgttgtgtcctcccccaagatggctatggagatgatgaaaacccatgatgttcattttgtgcagaggccccaacttctggctccacaatttatggtctatggggcaacagatattgcttttgctccatacagtgattat

SEQ ID NO: 249347 - DNA, 506 bp, Glycine max
  unsure (1)..(506): unsure at all n locations
cgaggtntnngtgtttcaatctcatggactgacgcaccggtccggaattcccgggtcgacccacgcgtnncgccacgcgtncggccacgcgtccgaatctcggtctctctcttcttacctacatacatgctgaggggcacacttctgtcggggaactcgatttcattattctaataatcagatctgagagagacagtgtttgggattgaaggaagaagctgaccaagttcgagacccaaagtaatagagtgaaaggactgagtttccacaagcagagaccctggatcctcgcgagtctttacagtggcgtgatccaactatgggattaccgaatgggtactctcattgacagattcgatgagcatgatggtcctgtcagaggtgtccatttccataattcccagcccctgtttgtctctggaggggatgattacaagattaaggtttggaactataagatgcataggtgcttggtcactcttctaggacaccttgattatatccgn

SEQ ID NO: 249348 - DNA, 518 bp, Glycine max
  unsure (1)..(518): unsure at all n locations
tgaggtnttgcnttacgtcaggtgaccttcgactgacgcaccggtccggaattcccgggtcgacccacgcgtccgtctacacgttcgactatatgttataccatataaaccactattctaatggacgaacgcggtggtagcaacacgttgtaacggccgaatcggtttcagactcggaattggtgtacaagagcgcgacgatgacacgggttcgaggcaggatcctaagtacggtccacaaggaacatgataaatgggtcccactgaccatactgagctggatagcgaaggacggaagaattcttagccttgatcagatctacctacactagctcccgatcaaggagcaccatgatcatcgacacgctagtatgttccaccatgcaagactatgtgatgaagatcacgccagtccctaaacatacctggaccatactaatgaccccgatcaggtactatctagaagttggatacgagttcggccactatagtcttggagctaaatgcagtaaggaagt

SEQ ID NO: 249349 - DNA, 515 bp, Glycine max
  unsure (1)..(515): unsure at all n locations
cgatggtctgtctcgtgccaacnatctattgacctgctgtaccggttctgaattcccgtggtcgacccacgcgtccgcacacattaactcacctcttcaacaactctttaactctctacatacctacatacatactgagtagtctctctaatgtcgggtgagactttacatcattatcttaatatacacatctacaacagacactctttattattgagctaagatacttaccaatttctggacctcaactaatatatcgaagaaactcaattttcacagctctaaaccctgaatcctcactagaattctcagacacgtgttccaactatctgacttccctatctatactctcattgacacattccatgatcattatagatctttcaaatgtgtgcattttcctcatttcctcaccctgtacatctctctatgccatgattactcgactaacgtttgtaactatatcatccatagctgctcgttcactcttttatgacacccttattttattcccg

SEQ ID NO: 249350 - DNA, 513 bp, Glycine max
  unsure (1)..(513): unsure at all n locations
agtggtntngctgcgcctttccccctcngacctgcagtaccggtctcggaattcccgggtcgacccacgcgtccggcattcgttgcttacaatgaaggctactttgaagggacagtacgatgtcgacaaaagcggcgctgtctttgccaacatcgacgcccagaaacccggttccttcatcgtcgactacaacgttcccaaaaaggactttccgattcagtctatgaacacggttagggttgcagagagtccggagaatttgacctacgcgcacagcatgggcgacatctgcaccatcttggatggaacctctgagtatgaatctgccaacacggtatctgccaattactcgctctactcatggaactgcacgcttaagtacacctatgttcacacggggattaccacgttcgagcaccgctatgacctggccaataacacgtgtgactttttcagtttatcgaagttctacggcattaacgacacgtttagggccttcttatcataatacag

SEQ ID NO: 249351 - DNA, 516 bp, Glycine max
  unsure (1)..(516): unsure at all n locations
agagtcgnttntnttngtctaacgccgctgacggactcgccgtaccggtccggaattcccgggtcgacccacgcgtccggcctctttttggaattttccagataccctcatttatggacataatcactgacctcgccgtgttcattactccgctatggattgcggttatcgtcggcgtcgtcgtgggctgggcgtggaagcccaaatgggcctttcaccccaaagacgctcttctcaagtttcgctctcctcgccctaccaatccccaaaacgacaccgcttttacctactgcgccaccagatcctccgcgcgtgagaaagacgcgagtgggagtcctgtggtgacggaagacgatttgctgcatctgtggaagttggttgaggaaaaagacggagggcgggcatggattcagatgatggaccgttctaccccgaccatgacctatcaagcgtggcgtaaggatcctgagagtggaccgncgcagtaccggagcagaacggtgttcgaagacgcga

SEQ ID NO: 249352 - DNA, 462 bp, Glycine max
tcccgggtcgacccacgcgtccgcccaacgcgtccggcacccatcaatggcaggcgtttctctcaagtgcggtgactgcggtgctcggctgagaaccgtagaagaagcgcaagagcacgctgaactcacctcccactccaacttctccgaatccaccgaaccggttctcaacctcatctgcaccgcttgctccaaaccctgccgatccaaaaccgagagtgatttgcacacgaaaagaaccggccataccgagttcgttgacaagacttccgaggccgttaaaccgattagtttggaggctccgaaggtggatgcaactgcttcatcggaaaacccttccgctgctgcatccactgaccaaaatgaagaaatggttgctcctgaagtggacaaaaagctgcttgaggaacttgaatccatggggttttcaacggcacgggcaacgcgggcgcttcattactc

SEQ ID NO: 249353 - DNA, 439 bp, Glycine max
ttcccgggtcgacccacgcgtccggccacgcgtgcgcatctccataatgaagtgcgatgttgatatcatgcaggacctgtatgggtgcattgttctctcaagaggaacaaccatgttccctggcattgctgtcagaatgagcaaggaaatttctgcatttgcacccagcaacttgaagatcaaggtttttgcaccacctgagagaaaatacagcgtctggatcggtggatctatcttggcatctcttagcaccttccaacagatgtggattgctgaggctgaatatgacgaatctggtacatccattgtgcacagaaagtgcttctaaactgtttcgattgatacggttattgaaaggcaagacttctatcattacgatttgtctggaatcaatgcattgcatactgtaaccctttgattctagcttttggtatccttt

SEQ ID NO: 249354 - DNA, 495 bp, Glycine max
  unsure (1)..(495): unsure at all n locations
tgcatcngtcatgngatgtactaccggtccggaattcccgggtcgacccacgcgtccggtcacgagacccatagtgctgccaaattatattaactctctttctctatctgaagaagaaggagttctgaagaagcatgtgtggaggtgctatcatctcagacttcattggtgtgaagcgtggccgcaacctcgccgcgcaggaactgtggtccgagcttgaccctttctctgacctccttggcttcgataccaccaccaccaccaccaaccaaccaccccttccagacaaaaaaagtggtgtcatcatgtgagaagaagaagaagaaaagtgtgagtgcagaaaagaagagtggtgggcgagctcggaagaacgtgtacagaggaatcaggcaaaggccgtggggcaagtgggccgcggaaataagggacccacataagggcgtccgcgtctggctcggcacctttcccaccgtcgaggaagccgtccgagcctat

SEQ ID NO: 249355 - DNA, 450 bp, Glycine max
aatacccgggtcgacgccacgcgtccgaagaggttcaagtttcccgagaacagtgttgaactttatgctgaaaaggccaacaatagggtgctttgcactatagcacaggctgagtctatccgctacaagctccttggtggcctagctgagcgcaaggcttgctatggtgtcttgagagtttgttatggagagtggcgctaagggatgcgaggtcattgagagtggaaaattgatagcccatacagccaaatctatgaagttcaaggatggttacatgatttcttctgggcaacctgtcaaagattacattgactctgcagtgagacatgtgctccagagacagggtgttcttggcattaacgtgaaaatcatgcttgattggcatcctaaagggatacaaggtcctaaaactacccttccagatcttgtcacaatccattcttcaaaaga

SEQ ID NO: 249356 - DNA, 511 bp, Glycine max
  unsure (1)..(511): unsure at all n locations
gagcgtatgacgtgagttcaatgagcttagnacagatctaccggtccggaattcccgggtcgacccacgcgtccgcgcagttcaagaattgaattcgttaatattttttcttctcttttatctgaatggcgaagcgcaggcttgaagacgggaagaagggcgtggtcgatctcatgcctcttttcgccaaggaactcctcgccggtggcgtctccggcggctttgccaagaccgtcgtcgctcctctcgaacgtgtcaagattctctttcagacgcgaaggaccgagtttcagagcacagggttgattggatcagctgttagaattgcgaaaacggaaggccttttgggtttctacagaggaaatggagcaagtgttgcaaggattattccttacgcagctattcattatatgtcctatgaggaataccgcagatggattatacaaacttttcctcatgtttggaaaggccctacccttgaccttgtggcaggctcactctctggaggcac

SEQ ID NO: 249357 - DNA, 518 bp, Glycine max
  unsure (1)..(518): unsure at all n locations
tgagccacggttgtctcgncctacttgtcattggacagacgcaccggtccggaattcccgggtcgacccacgcgtccgggaaatcctggaaaagctggtgctggggctattctacgagctaatgatggaagtttgatgtgtagattgcgtgaaggtgtgggtatagcaacaaacaatgctgctgaatatcgtgcaatgatattgggaatgaaatatgctcttaaaaagggatttactggtattcgtatccaaggtgattccaaacttgtttgcatgcagattgatggttcctggaaggtcaagaatgaaaacttgtctacattgtataatgtggcaaaagaactcaaggataaattttcctcattccagatcagtcatgttctaaggaacttcaactctgacgctgatgctcaagcaaatttggccataaatcttgcagatggccaagttcaagaagagtgtgtgtaattcactcatggcagctgatgattatgttttgggtttgttgcaaaacacat

SEQ ID NO: 249358 - DNA, 511 bp, Glycine max
  unsure (1)..(511): unsure at all n locations
gatgccgctggactgnncctagcntggcttagtactgctgtaccggtctcggaattcccgggtcgacccacgcgtccggcgtcaagagaagatagatgagattatataccctgaaatatcttcatttctgatgctgaggagggataatgataggcatgtgaggcgagctgctgttttggctctcagcacatttgcacacaataagccaaatctcatcaaggggcttcttcctgatctgctgcctcttctatatgatcaaactattgttaagcaagagctcataaggacagttgatcttggtcctttcaagcatattgtggatgatggacttgaattgaggaaggcggcttttgaatgtgtagacacattactggatagttgccttgatcaagtgaacccgtcatcattcattgttccttatcttaaatctggtttggatgatcattatgatgttaaaatgccatgccacctgatactctcgaaactagctgacaagtgtccttctgcagac

SEQ ID NO: 249359 - DNA, 512 bp, Glycine max
  unsure (1)..(512): unsure at all n locations
gtgcatnttactgcacgctaatgtcgatggactgacgctaccggtccggaattcccgggtcgacccacgcgtccgcccgggcattgagaaggaaggacgctttcagaggcgaaaggccatggggagataccgtctgtgatccatggatctccgatcgggaaaccgtatccaagctccgcggctagtctgcgctctttggacttttaaaacttagcgaactgaaacatcttagtagctaaaggaagggaaatcaaccgagaccccgttagtagcggcgagcgagagcggattggggtttgaagaaaaacaaacacgaagcttcgtttctctttcgagtatgataaattcctcagcagcaaagtgttcacttctttttcgccaggtttcattcgatttgttgtggattggatgatggaaaaaccagcaagcccctttcattgaaagggcgcagtgaactgtaattgtgaaaaggttggaagatctggccaaagaaggtgatagccctgtagatn

SEQ ID NO: 249360 - DNA, 513 bp, Glycine max
tgtggcgttgagtgaaggctacctgtcatgcgactgacgcaccggtccggaattcccgggtcgacccacgcgtccgctcctgcacgcaaagtagcaaacttccctggttatggctatggagaacgccgggaatttggaggcggccatagaacaagtgctgaatgcggagaagcaagcgaggctcgccggcgacgtcgccgccaccagaaacgccgtcactgaaattttacggatgtgcttcgaagcgcgtgcctggaaaaccctcaatgaccagattgttctcttgtccaaacgccgtggccagcttaagcaggctgtgacagcaatggtccagcaggctatgcaatatattgatgagacaccagatcttgaaactcgtatagaactcatcaaaatcttgaacagtgtatctgcaggaaagatatacgttgagattgagagagctcggttgatcaagaaacttgcaaaaatcaaggaagaacaaggacttatagctgaagctgctgatttgat

SEQ ID NO: 249361 - DNA, 515 bp, Glycine max
  unsure (1)..(515): unsure at all n locations
gtgccntnttctgtgttcagttctccctcagtaccgccgtaccggtccggaattcccgggtcgacccacgcgtccgcccacgcgtccgcttggttgcagcttcagcagcagcggcaagcaactccatccgcaatgggaatcgatttgaaggcaggaggtaagtccaagaagaccaaacgtacagcccccaaatccaatgatatttacctcaagctcctcgtcaagctgtaccgttttcttgttcggaggactggtagtaacttcaatgccgtcatcctcaaacgccttttcatgagcaaggtcaacaagcccccgctatccctctctagattgattcgttacaccaagggaaaggaggataagatagctgtggtagtcggggccgtgaccgatgacattagggtgtatgaagtccctgctctgaaggtaactgccctgaggttcactgaaactgccagagctagaattgagaaggctggtggcgaatgcctcacctttgatcaactggctcttaa

SEQ ID NO: 249362 - DNA, 512 bp, Glycine max
  unsure (1)..(512): unsure at all n locations
tgtgcgtatgagttgttcctacntgactaagtactgtcgtactcggtctcggaattcccgggtcgacccacgcgtccgcccacgcgtccgctgacgcgtgggcaagatacgacgccggggccggaaatcttgttgtagcagaagtttgcaaagcgggggtggtggagcttacaatggggcggggggccgaattggaggaggttggaagagaggttgagggattggaggttgcaggcgactggctctctggactgtttgtaacttaaatgccgtcatcctcatacgcgttttcatgagcaatgtcaacaagcccttgttatccctctctagattgattcgttacaccaatggaaaggaggataagatagctgtggtagtctgtgccgtgaccgattacattagggtgtatgaagtccctgttctgaagtaactgtcctgaagtttactgatactgctataattagaattgataaggctgttgttgaattctttacctttgatcaactgtcttg

SEQ ID NO: 249363 - DNA, 517 bp, Glycine max
  unsure (1)..(517): unsure at all n locations
gtaggnttgtattaatgacgactatgaagtaacgtcgcggtccggtattcccgggtcgaccgacgcgttcgcgatcctaagggacgggggaagcccgtctgatagcgctctgtgcgcgtactccgaaaggggagcgggttaaaattcctgaaccgggacgtggcggctgacggcaacgttagggagtccggagacgtctgcgggggccccggaaagagttatcttttctgtttaacagcctgcccaccctggaaacggctcatccggaggtagggtccagcggctggaagagcaccgcacgtcgcgtggtgtccggtgcgcccccggcggcccttgaaaatccggaggaccgagtgccttccacgcccggtcgtactcataaccgcatcaggtctccaaggtgaacagcctctggtcgatggaacaatgtatgcaagggaagtcggcaaaatggatccgtaacctcgggaaaaggattggctctgagggctgtgcacgggggtcccagtcccgaacc

SEQ ID NO: 249364 - DNA, 443 bp, Glycine max
  unsure (1)..(443): unsure at all n locations
cacgcgtccgggattnnntatatcttttaatggagtattttcctggtggagatatgatgacattgctgaggcggaaggatatactaacagaagatgaggccaggttctatgttggggagactgtcctagccatagagtcaattcataaacataattatatccacagagatatcaagcctgacaacttgctgctagatagaaatggccacatgaaattatcagattttggattatgtaaaccgctagactgcagtaatcttcaagaaaaggacttctctgttggaattaacagaagtggagcccttcaaagtgatggacgtcctgcagctcctaatcgaacccaacaggaacaactgcagcattggcagaaaaatcgacgaatgcttgcctattctacagttggaacacctgattatatggcttcagaagttcttctgaagaaa

SEQ ID NO: 249365 - DNA, 455 bp, Glycine max
  unsure (1)..(455): unsure at all n locations
acccacgcgtccgnnttgttttgtttacctttttgtctccattccttctttatttatttgttgttacttgttgctgttgtccctctccctgggagaaaaaagaagaagaagaagaaagagtttgaagtgaaatgtgagatatgggaagtggagtttcaacactctgttggtgctctgggaccaacaacgagcccgacgttattttcagcgccaccgacccactggacgaaaccctaggccactccttctgctacgtcagatcctccgcacgcttcctctctcccactcactccgatcgcttcctcagtccttctacttcccttcgtttctcttcgacccatacccgacccgaatttcacgaaaccgggttcaaagccatttccggagccttcgtcagcgccaacagcttccttncgacaacagtcattcacttggacgaagaggtgaacggagtt

SEQ ID NO: 249366 - DNA, 341 bp, Glycine max
acccacgcgtccggtgccatctatcttacttccttttcacatttcttagctgaagaaattgacaatcctgagtaccaaatgttgaggtgtagagtcaactatcatgctttaagatttaagccacatatcgtgaagttaagtcaatcaatagttgaaaagctacgcgaacaaggtcccttcatgtccatacatcttcggtttgagatggacatgttgtcatttgctggatgcttcgatatatttacacctgaggagcaaaagattttgaagaagtaccgaaaagaaaattttgcacctaaaaagacttgtctattatgaaagaaaggcttttgggaaaatgc

SEQ ID NO: 249367 - DNA, 414 bp, Glycine max
ttttaagcttggaagcacatgcactgtttttgtggttctgctacaccgctaaacacagagaaaggcacagcacgatgacgatgaagataatggtagcgattaagcgagtggtggactacgccgtgaaaatcagggtgaagggcgacaagacaggggtggtgacccataacgtgaaaatgtcgatgaaccccttctgcgagatcgcgctggaagaggccctccgcatcagggagtctggcttggcctccgaggttgtcgccgtcaccatgggaccctctcaatctgtagacactctccgaaccggtcttgccatgggagccgacagaggcatccatgtcgagtcaacttgctttctctaccctgtctctgatgccaagaatttgagaaaactcgtcgagattgagaaacccggtc

SEQ ID NO: 249368 - DNA, 281 bp, Glycine max
acgcacgcctcaacatccggtctgtgctccattcattatgtctccgtcgttggatcttccccccaagggtggcttcagatttgatctatgccgaagaaacgcaatgctacaaaacaagggcctcaaagccccaacctttctcaaaactggcaccactattgtcagtttagttatccaggatggtgtcattcttggggctgatactaggtcaactgatagacctatagaggcagataaaaactgtgagaaaattcattatatggcacccaacaatatattgc

SEQ ID NO: 249369 - DNA, 284 bp, Glycine max
  unsure (1)..(284): unsure at all n locations
acccacgcgcccccttcgncctttaaatagagaaacaaatttcagcactgggtggctttaccgacgtcaggggagcacagaacagcatcgatatcgaaaatctcgctcgctttgctgttgatgaacacaacaaaaaagagaatgcagttctggagttagtgagggtgattagtgcaaagaaacaagtggtttctggcaccttgtactatatcactatggaggcaaatgatggtgtgactaaaaaggtttatgaaactaatgtgttggagaaaccatggttgaac

SEQ ID NO: 249370 - DNA, 357 bp, Glycine max
  unsure (1)..(357): unsure at all n locations
acgcgtccgcccttgcgtccgcccattcgnccgcggacttgtgggtccgagagagcatcaaaagacatggacactttcttgcttcacaacttggactgaagccagggcagaaggttttggatgttggatgtggaattgggggaccattaagagaaatttctcgattcaggtaaacaagattgatttcatataggtttcctcttcctttgtctttcactgtttaactttactagctaataaaaatcaaggggtatctgtgcagcataacttcaattaccgggttgaataacaatgaggtccagattacaagatgaaaggaacctaatcgcattgcttgagtggacaagacttgcaatt

SEQ ID NO: 249371 - DNA, 397 bp, Glycine max
tgatttgacttccggttcacgcaatctttcctctacgctggataaggtccttctttgggagaagaaactctttaatgaagttaaggcggaggaaaagatgcgggtcatgcacgataggaagtgtcacaggttgaagcgtttggatgataggggttctgattttcataaagtcgattcgactcgaactttgattaggaatctgtccacaaaaattagaatggcaattcaggtggttgataagatttctatgactataaataagataagggatgaagaactgtggccacagctgaaggaattaatccaggggttgaccagaatgtggaaatccatgcttgaatgtcatcatgaacagggtgaagcaattaaagaagccagaatactgggttccattgga

SEQ ID NO: 249372 - DNA, 349 bp, Glycine max
aaacttcactgcaatgtctgccatattggtgcttgttggaatgctatcgtccattacagttgcacaatccataggagtttgctatggagtgattggtgataatctaccatcaaggcaagaagttgtggacttatataaaacaaatggcattggtagaatgcgtatatactacccagatgaagaagcactccaagcccttagaggttcaggcattgagttgattatggacgtggctaaggaaacccttcaatcattgacagactccaatgctgctacagattgggtcaataaatatgttacaccttacttgcaagacgtcaattttaagttcattgctggtggaaatgaa

SEQ ID NO: 249373 - DNA, 452 bp, Glycine max
gcgtccgccctttcgtccgaatattttccattctctttgtgtatttccctacctctcccttcaaggtgagtcgatttcttctgtttttcttcttcgttctttccatgaattgtgtatgttctttgatcaatacgatgttgatttgattgtgttttgtttggtttcatcgatcttcaattttcataatcagattcagcttttattatctttacaacaacgtccttaatttgatgattctttaatcgtagatttgctctaattagagctttttcatgtcaaatccctttacaacaagccttaaatgttgattcattaatcgtaaattagggcttttttcattgattacttcaaatccgttaaacgttaccatagatcaaggctttttcatgaattacttcagattcgttaaacaacagccttattttttatacttctgtggtttttcaagaaat

SEQ ID NO: 249374 - DNA, 422 bp, Glycine max
cgaccgccacgcgtccgataaaacgatgaggaaataaaaaaaaaaaaaaaaaaaaaaaaaaaaaagaaaaaaaaaaaaaaaaaaaaggaaaaaaaaaaaaaaaaagaaaaaaaaaaaaaaaaaaaaaaaaaaaaacaaaaaaaaaaaaaaaaaaaaaaaaaaaataaaaataaaaaaaaaaagaaaacaaaaacaaaaaaaaaagacaaacaaaaaaaagaaaaacaaaaagaagaaaaaaataaaaaacaaataaaagaaaataaaaaaaagtaaaaaaaagaaaaaaaaaaaaaaacataaagaaagaacatacataaaaacaaaaaaaaaaaatgggcaaaaaaaaaaaaacataaaagaaaaaaaaataaaaaaaaaaaaaaaaaaaaaataaacaaaaaagctaacaaagatataag

SEQ ID NO: 249375 - DNA, 337 bp, Glycine max
gaagaacaacgttaatggcaggtcttggtgtgcatgcagatcattctgctccattaacatccacctccgacccaccttctatttttgatggcaccaccaggttgtacatcagttattcttgcccctatgcacaacgtgtatggatcgctcggaacttcaagggactaaaagacaagatcaattaggtccctataaaccttcaagacaggccagcttggtataaggagaaagtctacccttaaaataatgtgccatccttggagcacaatggcaatgtgttggaagaaagatttgatttgatcaaatatgtagatgaaaactttgaatggacacctat

SEQ ID NO: 249376 - DNA, 417 bp, Glycine max
  unsure (1)..(417): unsure at all n locations
cgtncgcacttacacagctagcatatattacatacttttgaatcactaattaagccatggagaagaggtcaggttctgggttgtgcttcctcttccttgttctctttgttgctcaagaagttgtggtgcaaactgaggcaaagacttgcgagaacctggctgatacatacaggggtccatgcttcaccactggcagctgcgatgatcactgcaagaacaaagagcacttgctcagaggcagatgcagggacgattttcgcttgtggtgcaccaaaaactgttaaatggatccattcactccaacgtgaagaagatgcatgcagcgctattttataaaaaataaaactactatatactatatataataagactggcgctgcattaatgacctatgtattataagatatattattaccg

SEQ ID NO: 249377 - DNA, 310 bp, Glycine max
ataaaaaaaaaaaaaaaaaaaaaaaaaaaattaaaaatatataaaataagaataaaattaaaaaaaaaaaaaaaaataaaaaaaaaataatataagataaaataaataaaaaataataaaaaaaaaaaaaataaaaaaaaaaaaaaaaaaaaaaaaaaaaaaaaaaaaaaaaaaaaaaaaaaaaaaaaaaaaagaaaaaaaaaaaaaaaaaaataaataaaaaaaaaaaaaaaaaaaaaatataatatataataataaaaaataaaaaaataataatataaaaatagaaatataaaaataaaaataaaaa

SEQ ID NO: 249378 - DNA, 212 bp, Glycine max
acgcacgcgtccgcccatacgaccgctggtaccgcgatgactttggcgcccactcaggcctacaacgcgttcgtcgacactaccaagaggaagactacgaacctgcgtgccgcggaaggggtagcgctcttcgacacgtgctacgaccagacggctctgcaaagcgtgcgggagccaacagagacatttcacagcaactgcgacaggacgtg

SEQ ID NO: 249379 - DNA, 441 bp, Glycine max
cgtccgaccagcgtccggcttttcttccttcaaattgaggtctctaagtttcactttctgggcagagggcaacctcctttctctgagactctgagtatcgtatcgatttattattatttctaattctctcttatcaggtccattgaatatgtctccgtcgatggatcttcctcccaagggtggcttcagttatgatctatgccgaagaaacgcaatgcttcaaaacaagggcctcaaagccccaacctttctcaaaactggcaccactattgtcggattagttatccaggatggtgtcattcttggtgctgatactagggcaactgaaggacctatagtggctgataaaaactgggagaaaattcattatatggcacccaacatatattgctgaggaacaagcacaacatctgatacagatgctgtaacaaacaaggttaa

SEQ ID NO: 249380 - DNA, 218 bp, Glycine max
aaaaaccaagaaaaaaaaaaaaagggaaaggaaaaaaaaaaaaagaagaaaggaaaaaaaaaaaaaaaaaaaaaaaaaaaaaaaaaaacaaacaaaaaaaaaaaaataaaaaaaaaagaatgaaacaaaaaagaaaaaaataaaaaaaaacaaaaaaataaaaaaataaattaaagaaaacaaagaacaaaaacaacaaaaaaaaaataaaaacaaaa

SEQ ID NO: 249381 - DNA, 358 bp, Glycine max
  unsure (1)..(358): unsure at all n locations
gtccggccgtctnctgcatcagtttcaactgcactttcaaattcgccaccagtttcccccaagtggttctcaccgccgcttccttcgacccaaacctctggtaccaaatcagcaagactattgggaaggaagcgagggcggtgtacaatgcggggcaagcgacggggatgacgttctgggctccgaacataaacgttttcagggatccacggtgggggagagggcaagagactgcaggggaagaccctctgatgaatgccaagtatggtgtggcgtatgtgagagggcttcaaggggattcctttgaaggagggaaactgggtgagaggcttcaagcttcggcgtgttgcaagcactt

SEQ ID NO: 249382 - DNA, 510 bp, Glycine max
gcgtccgaaaaaaaaaaaaaaaaataaaaaaaaaaatttaaaaaaaaaaaaaaaaaaaaaaaaaaaaggaaaagggtaaaaaaaaaaaaaaaaaaaaaaaaaaaaaaaaaaaaaaaaaaaaaaaaaaaaaaaaaaaaaaaaataaaaaaaatataaaaaaaaaaaaaaaaaataaaaaaaaaaaaaaaaaaaatatatataataataaaaaaaaaataaaaaaaaagataaaaattaagaaaaatataatataataaaaaaaaaaataaataaaaaataaaaaaaaaaaaaaaaagaaaaaaaaaataaaaaaaaaaaaaataaatatataaaaaaaaataataataataaaaaaaataaaaataaaaataataaaaataaaaaaaataataaaaaaaaaatataataaataaataatataaaaaataataaaataaaaaatataaataatatataaaattaaaaataaattaaaatatagataataaaaaaataataaagagaaataaa

SEQ ID NO: 249383 - DNA, 251 bp, Glycine max
acccacgcgtccgcccttgcgtcctcaaatttatcgtttatctttgcttgcatcgcgtccgcaagctggcctgcgactgcaccggcctacaaggcttcctcgtcttcaacgccttcagcagtggcaccagttccggtctcggatctctcttactcgagcgtatcttcgtcgattactgcaaaaaatccaaattagggttcaccatttaccttttctcacaagtttcaaccgcaatcttagaaccctacaac

SEQ ID NO: 249384 - DNA, 404 bp, Glycine max
  unsure (1)..(404): unsure at all n locations
cccacgcgtccgantttcnncattcnnttttgncctccgagtttcttgactacttgaacattccctgtgacagatgaggtggttcttctggatttctggccaagtccatttgggatgagggtcaggattgcacttgctgaaaagggtatcgaatatgagtacaaagaagaggacttgaggaacaagagtcctcttctcttacaaatgaacccggttcacaagaagattccggttctcatccacaatggcaaacccatttccgaatccctcattgctgttcagtacattgaggaggtttggaatgacagaaatcccttgttgccttcagacccttaccagagagctcaagctagattctgggctgattatgttgacattaagatacatgatcttggaaagaagat

SEQ ID NO: 249385 - DNA, 302 bp, Glycine max
acattaacattagcttttctgtttgggattttggtggccaggacaagattcgggccttgtggaagcactacttgcagaacacccagggtcttatttttgttgtagacagcaatgatagggacagagttgttgatgccagagatgagttgcataggatgttgaatgaggatgaactgatagatgcagtattgcttgtgtttgccaacaaacaagatcttcctaatgcaatgaatgctgctgagattaccgacaagttgggtctacactctttcaaacagtgccactggttcatttaaagcatc

SEQ ID NO: 249386 - DNA, 123 bp, Glycine max
tgggatgagggtcatgattgcacttgctgaaaagggatcgaatatgagtacaaataaatacttgatgaacaagagtcctcttctttaaaatgaaccctgtcacaagaagattccgttctatca

SEQ ID NO: 249387 - DNA, 441 bp, Glycine max
cgcgtccgcccacgcgtccgcccattcgtccgtacacttacagctagcagatattacatacacgtgaagcactaattaagccatggagaagaaatcaatagctgggttgtgcttcctcttccttgatctctttgttgctcaagaagttgtggtgcaaactgaggcaaagacttgcgagaacctggctgatacatacaggggtccatgcttcaccactggcagctgctatgatcactgcaagaacaaagagcacttgctcataggcctgatgcagggacgattttcgctgtaggtgcaccaaaaactgttaaatggatccattcactccaacgagaataagatccttcctcgctatattataaaaaataaaactactaatatctattatatataaagactgtcacttgcattaatgacctatgtataataatatatattatt

SEQ ID NO: 249388 - DNA, 407 bp, Glycine max
aaaattaaaacataaataaaaaaccaaaaaaaaaaaaaaagaaaaaagttaaaataaaaaaaaaaaaaggaaaaaaaaaaaaaaaaaaaaaaaaaaaaaaagaaaaaaaaaaaaaaaaaaaaaaaaaaaaaaaaataaaaagaaaaaaaaaaaaaaaataaaaaaaaaaaataataataaaaaaaataaaaggaaaaaaaaaaaaagaaaaaaaaattaataaagaaaaaaattaaataaaatataaaaaaaaaaataagaataaaaaataaataaaaaaaaaataaaataataaaaaaaaaaaaataagataagaaaaaataaataaaaaataaaaaaaaatataaaaaataatataaaatgaaaaataaaaaaaaataaaaaaaaaaataaataaaaaaaataaa

SEQ ID NO: 249389 - DNA, 336 bp, Glycine max
  unsure (1)..(336): unsure at all n locations
ctgngtcagagtttgtgaagggaatcgcataattatgaagaaaggaaacttgtgacttggtctcaaactctcagttcctgtgtctgatcaatctaattttgccaggttcctgactgaaagtgggacttttaaggatggggatctgcttgtcaacagggatggagttcgaaatgtctctcataatgatgtcgaagctccacctccaatcaagcctacagacaaccagttaactttggcagacatagatgtaatcaaaagttttggaaagggaaatggaggggtatatcaattggtgcatcacaaatggacttctcattttttagcgtttgaaagtaa

SEQ ID NO: 249390 - DNA, 387 bp, Glycine max
gcgtccgctggatgatgtgattcatagagtaaataatacactctatggccttgcagcaggggtgttcgcaaagaacattaacacagctaatactttgactagagcattgagagctggaacagtgtgggtgaactgctttgatacatttgatgcagcaattccctttggagggtacaaaatgagtggtcaaggaagagaaaaaggagaatacagtctcaagaattacttgcaagtgaaggctgttgttacatcctagaagaacccagctttggctttgaacatcattagctttagaattatttgatgaaaagattaataaataggctccaattattaaaatcattaaattggggtattccattcaaagtttctgataatgattaaaat

SEQ ID NO: 249391 - DNA, 299 bp, Glycine max
ggaaatttatagtgtatgttataactatttgaaaatagatggttcacctgtgaaaggtgtattactgacctggaagtcgaagtccatctttctgatttgtagtttctcaagaattattattgttatccctgttcctagttcctacacctagttgattatcttgaataatatcttaaatatattacttatatttataatgtttattttaatatattaactatttttttctatcatttgacattcttaaatttttttttagatactataccttatgtttttatttataaatatatatattt

SEQ ID NO: 249392 - DNA, 448 bp, Glycine max
gcgtccggaaataaggtggagggcttccagcaaaaccttactccagatctgtataaaaacaaaaacgctggctgtgaaaccctaataagcttcatcaatctccgaactccgaagcccttcagcaaccatgtcgaggagaaaggttagggagccaaaggaggaaaatgtcactcttggtccagccgttagagacggtgaacatgttttcggcgtggctcgcatctttgcctccttcaacgacaccttcatccatgtcactgatttgtctgggagggaaacccttgttcgcatcactggtgggatgaaagttaaagctgacagagatgaatcatctccatatgctgctatgcttgcagcacaggatgttgctgccagatgtaaagaactgggcataactgctcttcatatcaggcttcgtgccactggtggaaacaagaccaaaacacct

SEQ ID NO: 249393 - DNA, 355 bp, Glycine max
  unsure (1)..(355): unsure at all n locations
cgttcgangttaacatgttcggtttaattttgcgatcgatggcggcgttgataaggtcaggggcggggatactggcgatcctgacgatctcggcgtgcatcgcgtgtacggcgtcgtacgggggattggtcgggggaaggtcgaagatccctgacgtgaaggcgaacaagaatgtgcatgatctagggcagttctcggtggaggagcataaccggatgctgatgcatgcgcataaggaggaggagcaagtaacgttagtggaagtggtaaatgcgcaacaacaagtggtgtttgggaacaattactacatgaagatatttgccacgcaggatggcgactgtggagattccagaat

SEQ ID NO: 249394 - DNA, 432 bp, Glycine max
ccacgcgtccgaatcattcataatgggtgttttcacattcgttgatgaaatcaactcccctgtggctcctgctactctttacaaggccctagttacagatgccgacaacgtcatcccaaaggctcttgattccttcaagagtgttgaaaacgttgagggaaatggtggcccaggaaccatcaagaagatcactttccttgaggatggagaaaccaagtttgtgctgcacaaaatagaaagcattgatgaagcgaacttgggatacagctacagcgtggttgggggtgctgcattgccagacacggcggagaagatcacattcgactccaaattggttgctggtcccaatggaaggtctgctgggaagctcactgtcaaatacgaaacaaaaagagatgctgaacccaaccaagacgaactcaaaactgggaa

SEQ ID NO: 249395 - DNA, 389 bp, Glycine max
gattaatcagggaaatagccaccgagtgtggagtggactttgatgaggatcctgctgctgtggttgtggatcattcggcatatgcagtctctgctactgaaggagatcatacattgattgctagtgatgattttatcaagtctgacgtcatatttggaagcaaaaaaattgaggctccagtacttttccaggggattgggcattcactaaatcctaccaatagcctggtgttgaaagttctttttgcatctccttcagccttttctgctaacccaaaatctaaagtgacaagtcctccatcactcactggaacttcaatctcattagtttcaattatacaggcaagatataatgcccggatattgatctctggcttaatgagcttgttc

SEQ ID NO: 249396 - DNA, 305 bp, Glycine max
tgcgatctctccttcctcaaacacaggcatttacctcaatttctggcctgagatctgcttcaatttccagctttgggagaaagaatgtttcttttagcttgcagccacgctcgattcgccttaaaatttcctgtgctgctaaaccagagacagtagagaaggtgtgcaaaatagtaaagaagcagctggctatgcctgaaactgatgttgagacgggggagtcaaaatttgcaactataggtgctgatatccttgacacggatgagatcgtgatggctcttgaggaagcatttggtattgccatt

SEQ ID NO: 249397 - DNA, 217 bp, Glycine max
aggacctgttggacccggttgaggaccttaaaaacgaggcctacaagtggatcctacaccactgcaagcgatacaaagaagccgaggggataatcgggaacagcttctaggagctcgaaccgtgagcctgtaacgagctgcataaggaagaacaaggtatgcctccggattacgcggtgggaccgcttgtaagaatggaagctagtcatgcctactt

SEQ ID NO: 249398 - DNA, 441 bp, Glycine max
acccacgcgtccgcccacgcgtccggttcatgaaactcttcttcgtcactgtggttgaaaatcgaatgctttcgctctctctctctctaggcaataaagtgaaacgcatcagagaaattcaattcaatggatgcaaatcgcgagcaaattgtggacgttgggtcggtggtggaagccgtttctgctgacgacggtgacgctcctctctacagcctcgaaagtctctgcatgcgttgcggtgaaaacgggacttcaagatttttattgactttaattcctaactttagaaagattttgttgtcagcttttgaatgtccacactgtggtgagaggaacaatgaattacagtttgctggtgaaattcaaccacgtggttggagttactccttggagatcccattatgcgaacaaaaaatgcttaatcgacaagtggtaaaagct

SEQ ID NO: 249399 - DNA, 287 bp, Glycine max
  unsure (1)..(287): unsure at all n locations
acccacgcgaccgcgntgccagaataaagattgaactttaaggtcacttgccatagagtagagttagcgccaggctcacgtagatcaatctggtgcctttagtcaagtttacctgcctgcagatgaacgtgttgaaagttctattaggctgctagcaaaggcttatgtagtagtgaatgactcgagctatcatcaactagtcagccattggttaaacactcatgcaaatgatgagccattcatcatagcaacaaacatgcatctaatagttgttcaccctaatttat

SEQ ID NO: 249400 - DNA, 440 bp, Glycine max
acccacgcgtccgcccacgcgtcttcagactttgaaatatcacttatttctctctggctgtgatttgcgattagggaaaggcgataacaaatctggtcctctctggtctaaaaaatgtcactgaaagagggttctgggtcatgggggctgctcaaggtctgcagaaactggtgtcacttactgttacttcctgcaggggaataactgatacaagcatagaagccattggtaagggttgcatcaacctgaagcagttgtgccttcaccggtgttgctttgtttctgacagtggattggtagcattcgccaaagctgcagtatctcttgagagcttgcagctggaggagtgcaacaggttcactcaatctgggattattgttgcccttgcaaacatcaaaaccaaattgaaaactctttcccttgtgaagtgcatgggagtc

SEQ ID NO: 249401 - DNA, 397 bp, Glycine max
ccggtaaagtggacgggagaggccggttgccgcttccgccatttacttcctcaacctccgcggcgacgttctcatcaaccgcctctatcgcgacgatgtcgggggaaatatggtggatgcttttaggacgcatattatgcaaacgaaggagcttggtacttgcccagtgaggcagattggtggatgctctttcttttacatgaggatcagtaatgtctacattgtcattgttgtcagcaacaacgccaatgtcgcttgcgctttcaagtttgatgttgaggctgttgcattgatccgatcatactatggtggagcttttgacgaggatgcaattcgcaataaattttgtactcatttatgagcccctagatggaactatgggacttggttacccaca

SEQ ID NO: 249402 - DNA, 303 bp, Glycine max
  unsure (1)..(303): unsure at all n locations
gacaaaataaaataatctgtggccaagttaccatctactgtactacttgttctatataaattctacccatcccttgctctcatgtcacattgtatttgcactacgaccatttcaggaagaaagaagtgcaatggacatcggaacctatggctatcctacaccagcagtgaaaaagattgagtcttactatgatgtgccagagggagtggatattcggggaagatatgatgcagagtttgcaaaaatcctcacataagatgctttgaaattcgttgctgactngcaacgtgagttcatgaacca

SEQ ID NO: 249403 - DNA, 428 bp, Glycine max
  unsure (1)..(428): unsure at all n locations
cccacgcgtgcgnaatactnngaagagctttcgcatcaaccttaggagctagggtacgacccgaacgtttgtgcccgactcggtaaaatcttttgtggttcacctgtaccgtcacatccgtgaaaagaacgtgtacgagatccaccagatgtacgagagctccttccagaccctctcggagcgtctcttcaaggataccccgtggccctccgtggacgccgtcgcgcactacgtcgacaacgaccacgtcttctgcctcctctaccgcgagatgtggttccgccacctctacgctcgtctcactccgacgctccgccagcgcatcgactcgtgggacaactactgcagcctcttccaggttgtccttcacggtgtcgtcaacatgcagcttcttaaccagtggctatgggacatggtcgacgagttcg

SEQ ID NO: 249404 - DNA, 397 bp, Glycine max
ccacgcgggcgaaataaaaaaaaaaaaataaaaacaaaggtttaaaaaacaaaaaaaaaaaaaaaaggaaaaaaaaaaaaaaaaaaaaaaaaaaaaaaaaaaaaaaaaaaaaaaaaaaaaaaaaaaaggggcggccccgaaaaaggacccaaccaaacacacccgcgcagccaacgcaaaaacccaacaaaagggcaaccaaaagaaaaacaacgggccgacgaaaaaaaaacgcagaacgggaaaaacccgggcgaacccaaacaaaaaccccaggcaaaaaaacccccaggcgccagcgggcgaaaaagcaaaaagccccgaaccaaacgcccacccaaaaaaaggccaaacccaaagggcaaaggggaccccccaagaaacggcccaaaaaccc

SEQ ID NO: 249405 - DNA, 431 bp, Glycine max
acccacgcgtccgccctcgcgtccgctcgcttacaaagccggttcctccatctacacgcgcttcatcgcgctgggcgggttcgaaaacggtgtcgttcccgaaaccgttctcgccctaacaccccaacagcttcgccagattggggtttctgggcggaaggcgagttaccttcatgatttggcgaggaagtatcagaacgggatactctccgattccgccattgtgaacatggatgataagtcgctctttaccatgctcaccatggtcaatggcattggctcttggtctgttcacatgttcatgattttctcactccacagacccgatgttctccccatcaatgaccttggcgtcaggaaaggagttcagcttctctacaaccttcaggacttaccccggcccttgcagatggaccagttgtgtgacaagt

SEQ ID NO: 249406 - DNA, 221 bp, Glycine max
ggacatgcaacaaaaatgacagtgaggaaaatgttcttccaaatgggactgcttggattcctaatctagtccaaacaatcacagatattgcattgaaccaaagtgagtctattcacgttgacaagaatttgattgaagggccaaatccgaatcagagaggaaaattatggactcctcttgtgattattatattattaatctatattatttttaatatatta

SEQ ID NO: 249407 - DNA, 347 bp, Glycine max
  unsure (1)..(347): unsure at all n locations
ccacgcgtccgcaactttggnagnngatgtgccttngcgattaacgtttcagaatgttcatcaagggtttgtcaccgaaactttaatgcggtttctaaaagcaagggactgggatccttgcaaggcacataaaatgttggttgactgtttaaattggaaggtgcaaaatgagattgacaatatattatctaaaccaattgttcctgctgatttatacagagcggtgcgtgattcacaactcataggattattaggttactcaagaaagggtctgcctgtctttgcaattggtgttgggcttagcacatttgacaaagcatctggtcattattatgtgcagtcacaca

SEQ ID NO: 249408 - DNA, 298 bp, Glycine max
acgcgtccggctttaacagtccccttttactggtaaaagttgcaaatgaggtgacttatcgcaggatgaaaagacccttggatcagttgagtaaagagtgcacaagggttctgcctctgatctgattcctgtcttgtttggggaaaggccaccaacagtgttcaagaaggatgtatctttcactccctttaataaaaatcttgatcactcccagaaagaagcagtttcaaaagctctatcatcgaaaaatgtgttcttgttgcatggaccacctggaacgggaaaaacttcaacagtt

SEQ ID NO: 249409 - DNA, 231 bp, Glycine max
cttttaagcaggggtttaaaatccgagctctctcgtggtgatgtcgaaagggttacattttacacaacaatcatacaaagcaagtgactcattcccattcaaatggataaacaagaagtggagagaaagttttcatgttacttcaatggctactgcatgaaatcatatatatgttgatatgttacgaaatgcttaatttattgatcaagtttttgaacttgattatctcta

SEQ ID NO: 249410 - DNA, 202 bp, Glycine max
atgaagcaggagttagaatattggtatttaattgatcttcgagattctggtaaggatctcatccagaatcatcttaccttctgcatttacaaccatactgcaattatggccaagcatcactggccttccaggtttagatgcaacggacacattatgctcaattctgagaaaatgtccaagtccactggaaatctcaggactt

SEQ ID NO: 249411 - DNA, 365 bp, Glycine max
tttgctgttagggttttagctcagcttcttctagatttaaggaggatgggtaaggaaaaggttcacatcagtattgtggtcattggccatgtcgactctgggaaatccactaccactggtcacctgatttacaagcttggaggcattgacaagcgtgttattgagaggtttgagaaggaagctgctgagatgaacaagaggtctttcaagtatgcctgggtgctggacaaacttaaggctgagcgtgaaagaggaatcaccattgatattgctttgtggaagtttgaaacaacaaagtattattgcacagttattgatgcgcctggacataaggatttcattaagaatatgattactgggacatc

SEQ ID NO: 249412 - DNA, 250 bp, Glycine max
agtttaaagggagtacgtgaaacaacggacatgttgattaagcaacggacttcaaatttcaacaactatgcgatgggttctcatgtgatgcaatacggtgacacaaacatcacagctgaaaagctttatttataccaatgttttgatcctgacgctgtgaacttcccttcacataactgatggctagatactaaaatggaagtcgataaccaaatagattcataacttttcttcatgtggcaaatgtatt

SEQ ID NO: 249413 - DNA, 265 bp, Glycine max
agtttcgggactggttctgaccatattggataggtagattgaatctgggcagattcggcctggctatctatacttgcatataaaaataaagataaacttgaagacaagcttgtcactgttgaagacatagttcgccagcattgggctacttatgggcgccattattatactcgatgactatgaaaacgtggatgcatgtgcagcaaaggaactgatggcatatttggtcaagctgcagtccttaattataaaagtcaatcagatt

SEQ ID NO: 249414 - DNA, 369 bp, Glycine max
ccacgcgtccgcttggcttcatttcttttcaatctctcttaatacatatcactttcttcaccgttcgctctgtctttctcccctacacaaaacatggctttgcccaatcagcaaaccgtcgattaccccagcttcaagcttgtcatcgtcggcgacggtggcacaggaaagacaaccttcgtgaagaggcatctcactggtgaattcgagaagaaatatgaaccgaccattggtgtggaggttcatccgttggattttttcacgaactgtggaaagattcgcttctattgttgggatactgctgggcaagagaagtttggtggcctcagagatggatattatatccatgggcaatgtgcgattatcatg

SEQ ID NO: 249415 - DNA, 323 bp, Glycine max
gcattgagttgattatggacgtggctaaggaaacgtttcaatcattgacagactccaatgctgctacagattgggtcaataaatatgttacaccatactcgcaagacgtaaatttcaagtacatcgctgttggaaatgatatttatcccaataccaatgaggcacaatatattctatctggcatgaccaacattcagaatgcaatttcatcatcaaatttacaaattaaggtgtcaacagcttatagactctacttttgattactaactcttaccctctcaatgatggcgttttcaatagcgatgcttatgccatacatttaa

SEQ ID NO: 249416 - DNA, 529 bp, Glycine max
  unsure (1)..(529): unsure at all n locations
gattattatgtgtatatccactgaggatgtccacgctccaccccactcaccgcgtttcgtctgcgtccgcgtgcgnncttgcgtnttgnngttttatgcttggcttatagtttcagccatgcatgtgtaagtatgggctaagttagactgtgaaactgcgaatggctcattaaatcagttatagtttgtttgatggtatctactactcggataaccgtagtaattctagagctaatacgtgcaacaaaccccgacttctggaagggatgcatttattagataaaaggtcaacacaggctctgcctgttgctttgatgattcatgataactcgtctgatcgcacggtctttgtgccggcgacgcatcattcaaatttctgccctatcaactttcgatggtaggatagtggcctaccatggtggtgacggttgacggataattagggtttgttttcggttagggaacctgagaaactggtcccacattcaaagaatgctttttgcgcccaaattacctaatcctgacactg

SEQ ID NO: 249417 - DNA, 253 bp, Glycine max
gccaatcttcttctctaggagtgggtggtgttggcaagacgcagcaacttgtgccaaaactgtgggaaatagtatgagaacaacatgggatattgaagataactggtatagtatgacttccatagcagatgcaaatgacagatggtcattatatgctgtaccgggaggatggaatgaacctgatatgctgtaagttgtaaatggatggatgaccacataataatatcgtgcccattatatcatatgggcttta

SEQ ID NO: 249418 - DNA, 274 bp, Glycine max
accacaaggcctgacatggttctttttcttcttttggactcattctttcttgcataatatcaactgatgcttctggtctgtctaatggctattgttctgttcaatatgacaatgaatatgctgcacacaatgctatatacaagctaaatggcatgcttatcaatgattatcaagtctatgtatgccattctctgctaaagtaatacatttagaattcttttatcatgactaaaatttaataatgtttattttaaaaacttattatattcaacca

SEQ ID NO: 249419 - DNA, 451 bp, Glycine max
  unsure (1)..(451): unsure at all n locations
acccacgcgttcgcactttgnggtttnncttgactctttggtttttggacagtgggaagatcgcatgcggagggggcttttccgctatgacgttacagcctgtgaaaccaaggtgattcctggggagtatggtttcattgctcagctgaatgagggtcgccacctcaagaagagaccaactgagtttcgtgttgataaggtcctccagccctttgatgaaaacaagtttaacttcactaaagttgggcaagaagaggacctgtttcagcttgaggctagcaatgatggggaggctcaattctttccaaatgcacctattgatgttgagaattcttctagttttgttgccatcaatgtgagtcctattgaatatggtcatgtcctgatgaatccactgatttttaagtgtttaccttaaaggaatgaccatgcaagcctcttgcttgcactt

SEQ ID NO: 249420 - DNA, 375 bp, Glycine max
cacgcgtccgggagtatcgctgcatgctttgctcaaacttttcatgaaaccacaggcggctgggcaagtgctccagatggaccatatgcgtgggggtcttggtatatcaacgtacacatccaggctacttatcgagatggagggaattggccatgtgctgctagtcaaaaatattatggccgatgaccaatccaacttacacacagctacaattacaggcaagctggcaaagcactgggtctggattagataaacaatacggatcttgtagccacagacgcaaccgtgtcattcaagacagccctatggttttggatgactgcacatggaaacacgccattaagccatgatgtgatcactggaagatggactcca

SEQ ID NO: 249421 - DNA, 521 bp, Glycine max
  unsure (1)..(521): unsure at all n locations
gattgctctcctcatacatangantgtccatgtcaagtcaaaccaacacgngtacnttacgancgacgcaaacaacctgtcatcaanacagtttatcccaccctttttcgacccaccataccgacataccaactagaatccttttatctccgatcgggaaacccaataccatctccaacgctacaataccctctacttacttacaaaacttagctaaccgaaacatctaattaactaaacaaacacaaatcaacctacaccccctcataatactccaacaatagctactagcatacttcaagaacaacaaacacaactcttcacttctctccccaatattataaattccacaacagcaaattcaacactactaaatccccacatatcatccaatataatacacaatgcacaaactaaaaaccaacaaacccctttcaactacccatcacaattaacaacaaactcctaacataaacaagatcaatccaataaattacataccccatcatacccacaaatac

SEQ ID NO: 249422 - DNA, 364 bp, Glycine max
acgcgtcctaactttgatcaaataggccttgctcaaaagatttacaagcatgagcttcttgagatgagacagcgtgctgcttacatttacgagaaggcaagtatgccgaagcagtctattgctttgtcaaagaaggataacctctacaaagatgccatggagacaacctgccaatcctgggagcgtgaactcgctgaagaactgcttgtgtactttattgatcacggtaagaaggaatgcttttcctcatgtctatttggatgctattatctcatactggcagacattgttcttgaactaacttggatgcaccacatgattgactttttccccccatatctattgcagcttattcctgagttca

SEQ ID NO: 249423 - DNA, 366 bp, Glycine max
  unsure (1)..(366): unsure at all n locations
acgcgtcctaactttgatcaaataggccttgctcaaaagatttaaaagcatgagcttcttgagatgagactgattgctgcttatatttacgggaaggcaggtaggtggaagcagtctattgctttgtcaaagaaggataacctttacaaagatgccatggagacagccttccaatccgtggagcgtgaacttgctgaggagtcgcttgatcatttcattgatcagggaaagaaggaatgctttgcctcatgtctatttgtttgctatgatctcatacgggcagacattgntcttgaactatcttggatgcacaatatgattgactttgcctttacatatctattgcaggtcattcgtgagtacact

SEQ ID NO: 249424 - DNA, 234 bp, Glycine max
ctctctacaaggtctatacattatgcacaggttattaatgatctactcatcaaattagacaagttcccgtcaaatctttcaccaatgttcatgattaaacccattcaatttgagaaagattatttcacatactaccatatggatgtgattgttcggctttccaacatgagggcccgcaatttcagcattacctaagtttacaagcttaaaaccaattttattgcttgactgatc

SEQ ID NO: 249425 - DNA, 378 bp, Glycine max
cactcgtcctgcttcctcagcatacacttaactactaagtcttttgattcagtctaccaaaatcccttaaaagcgtcctaatactctacattgtccattgttattaccttcactgtgttcttgctcttgcattgtctacttaaaacttacaagcaaaaatcgagtcacaagtttccccctataccatggaagctacccatcactggtaacctccatcacctttcattatcatattcacttccctgatcaaactctacaaaaactcgttctcaaatatttacctctcattcacatccaactatgtgaaattttaacactctttgtgtccttcccccaagaatattataccacatatgaaaacccattaagttcattttt

SEQ ID NO: 249426 - DNA, 395 bp, Glycine max
gttctattattatatatgtcgtgtttattttcctcagagagcagaaacctagagggagtagctggtggtgccggagagaaacccattccacttggtgagaacgttctgcagaagcatgctgcattctttgacttgaataaagatggtgtcatctacccatgggagacttttaaagggttgcgtgaaatcgggactggggttttgctgtccgttggaggtgctattttcatcaatgtgtttctcagtcagagtactcgttccggaaagtgtgcatctatacttttttcaattgaaatttaaaatatccaacgcggcatacactgcagtgacactggagtctacgattctgaaggaaggtttgtacctttaaaatttgaagaaatttttaacatgca

SEQ ID NO: 249427 - DNA, 316 bp, Glycine max
ctacggcgtagacactgataggcagcgttctaatggtagctacgatggtgacactaataaacatcatggaactactggtggctataatgatgacaccaatagacatcatggaactaccggtgtctattttatatacaccgataggcaacaacatgggactactggtggctattccggtgacactggtaggcaacatgggaacattggtggcccttactatggaaccaacaccgcaaacaccggtactggtcccagaagtggaaccactggctggaccggttatggaagcaactgtggcactgattattgaacaact

SEQ ID NO: 249428 - DNA, 277 bp, Glycine max
tttacatctgcatcttcaatattgcttctggtttattagcttcgcgaactagaacaaataaccctatacagatccattccatagccatgtcacgtgttgtccctctatctcacgattgagaacccgtcgttcttcttaagaaggctcccaccgtcgacgccaagaatgacgagaaagccgtcaactcctgccggcgctccgacgcgcaaattgaaaccctaaaaaagtataatgctggtacaaataaagcatcatctagcatcacttcattgaacac

SEQ ID NO: 249429 - DNA, 476 bp, Glycine max
attcccgtgtcgaccgacgcgtcctcccacgcgtccgtacctttcttattttaaatttcttttctttcataatacttctgcatttgttctatattttcggtggtcatcaacattccactatagcaaactttcatacctacatgctttaacattattatttgtgactttccattcttatattcttctgttttttcttttcttcctttttgaaatctctatttcttttagtctagctacattgcaaatctatacattttatatttaaataccctcttccttactacctactgtcttctgtaattatgacaattattcataaacacaatagaatcctaaataaaatctggtgattatttctgaagattcttacattggctctctgtatctcaatgaatcatttaaattcctaatgacatctctcaactatggttttcctctttctatatctgttatgacctctaatctataatgttcat

SEQ ID NO: 249430 - DNA, 294 bp, Glycine max
cgggtcgacgcacgcgtccgcccacgcgtccgcacgaaactcaagaagatggagaaagcgatcaacagacagaagattttgcttcatcatctcaacccttcatcatccacccaccccaacgaatcatcctccctccatgcttcagcatgtgtggcgggggatagcgctgcttatcaaaggacatcgacattcggggacgatgttgtgatcgtggctgcttatcggactgctcattgcaaagctaaacgaggtggtttcaaagacactcttcctgatgatctactgcctcctgtt

SEQ ID NO: 249431 - DNA, 464 bp, Glycine max
ggtcgaccgacgcgttcgcgcaagaggaagtgcaagtggaaagtattacttcgagagactaatgaaagaagtgagggaggggcaagaggagctacaaaagaagttcctggaagccatagagaaacgcgaggacgacagaatagcaagagaagaagcatggagagtacaagagatgaaaagaatcaatagggaaagagaaatcttagcacacgaaagatccatagccgcagccaaagacgcagccgttatgtcattccttcaaaaaatagccgaacaacaaaacctcggtcaagtatcgaccaacatcaacctcgtacaacaaccacaacctcaattacaaccgcagccaccactacaacaacaagtgacacaacctagtattgcagcagcacaacctcccgtacaacagccaccgtccgtggttgatacacagtccgtggtgctgacagtggtgtcacaagtga

SEQ ID NO: 249432 - DNA, 470 bp, Glycine max
gaatccccgggtcgacgcacgcgtccgtgagaaacaatgaaaggaaataattggtctttgaaaatgcagggaggaaagaaagctgtgtagtccatcaaggggacagctgcaaacattggtgcttctgccaaggctggcatggagaaaaccaaggccactgtccaggagaaggcagaaagaatgacggcacgtgatccgatgcaaaaggagttggcaacccagaagaaagaggcaaagatgagccaggcagagctggacaagcaggcggcgcgtcagcataacacggcggcgaagcaggctgccacggcagggcacatgggacaacccatggggacccatcagacgtcagctatgcccggtcatggaaccggacagcccacgggccatgtcaccgagggagtggtgggctcacaccctattggaaccaacagaggcccgggtgggactgctacggcccataatacccgtgc

SEQ ID NO: 249433 - DNA, 439 bp, Glycine max
  unsure (1)..(439): unsure at all n locations
ggaacccccgggtcgacgcacgcgtccgcccacgcgtccgcccacgcgtccgcccactcgtccgnccacgcgtccgctcaagtttctgagtctccggaactcggggctaccttcacttcgcacatctcgaaccctttctttccggcaactaggttaaagttcatcaatggcaggccgtggcaaacccttagaatccaccgccgccaaaaaggccacctaaaggaccaccaaacccggcctccaattccccgtcggccgaatcgcccgtttcttcaaggccggaaaataccccaaccccttcgaccccgttcttcccgttaacttcgccgttgtcctcgaatatctcgcagccgaggttttggagttggctggaaacgctgcgagagacaataagaagactcgaattgtgccgngccacattcaattggcggtgaggaac

SEQ ID NO: 249434 - DNA, 442 bp, Glycine max
gtccgcaatatgctcttttccttctaaatttgatttcttagttcagcattctattattatgtatgggttctttaccttggtgagaaaacaaaaacctagagggagtagctggtggtgccggagagaaacccattccacttggtgagaacgttctgcagaagcatgctgcattctttgacttgaataaagatggtgtcatctacccatgggagacttttaaagggttgcgtgaaatcgggactggggttttgctgtccgttggaggtgctattttcatcaatgtgtttctcagtcagagtactcgttccggaaagtttccatctatactttttccaattgaaattaaaaatatccaacgcggcaaacacgggaatgacactggagtctaccatacttaaagaaaggttgtacctttaaaaatttgagaaaattttaacaagca

SEQ ID NO: 249435 - DNA, 431 bp, Glycine max
aatttcaagtttatctttgatggtttggttattcatcccaataccaatgatgcagaatggattctatcggccatgaccaacattcagaatgcaatttcatcagcaaatttacaaattaaggtgtcaacagctatagactctactttgattactaactcttaccctcccaatgatggcgttttcactagcgatgctgagccatacataaaacccataatcaacttcctagtgagcaatggggccccacttcttgccaacgtgtacccttactttgcttatgcaaatgatcaaagcattcctcttgcctatgctctttttacccaacatggaaacaactacgttgggtaccaaaacctctttgatgctatgttacattcaatatatgctgctttggagaaagtgggagcgttcaatttgcaaataatggtttc

SEQ ID NO: 249436 - DNA, 463 bp, Glycine max
  unsure (1)..(463): unsure at all n locations
ggaatccccgggtcgacgcacgcgtccggcttaggaaaaaggcctatgttcaacaactagagtcgagtaggattaggctgagtcagctggaacatgagctacagcgcgctataactcagggcatgttcttgggtggaggtgcactatagggtggagagcaaggacttcctgtcactatgaataccattagcacggaagctgcaatgtttgacgtataatatgctacatggcaagatgagaaccaccgcataatgtgtgagctaatagctgcagtgcaagagcacctttctgagaacgagcttagactntttgttgacaattgtttggcacattatgaccaagtgatgaacctgaacagcttagtggccaaaacagatgtgttccatcttgtcactggcatgtggtataccccagctgaacgttgctctatgtggatagatggattcaggccatctgaactcat

SEQ ID NO: 249437 - DNA, 288 bp, Glycine max
  unsure (1)..(288): unsure at all n locations
cggaatccccgggtcgacgcacgcgtccgaattttttttttatttgaaataatgtgcgggatcatccacaagattgaagagagcctccgtgtnngaaggcacaagaaagaggagcacaaaggagaacaccatggtgagcacaaaggtgaacacaaaggagaacaccatggtgagcacaaaggtgaacacaaaggagaacaacaccatggggagcacaaagagggacttgtggantagatcaaggacangatccatggtgatggccatgacaagggtgagaaaaagaag

SEQ ID NO: 249438 - DNA, 417 bp, Glycine max
attgattttcagttgcgttttcgatttggcagacaaggagatccaggaaggtccggctttttctggagtgtggaagataacatatttcgtatttttggtggagatcgaattcagggcctaatgcaagcgttcagagttgaagacctacctattgaatccaagatgttgaccaaagctttagatgaagcccaaaggaaagtggagaactatttctttgacattcggaagcaatttgttgagtatgaagaagtacttaacagccaaagagatcgagtttatacagagagaagactagcccttgaatctgacaatcttcagtctctttctaatgaatatgctgaattgacaattggatgacattttagaagcaaacattggttcttatgctccaaaagacagctgggaatcttgaaaaac

SEQ ID NO: 249439 - DNA, 472 bp, Glycine max
gaattcccgggtcgacgcacgcgtccgcccacgcgtccgttcacagttttgcaattgtaatggcttctgcttctaatgccggcatcgaatgcacctcttcgtcttcttcttcgtttgagtatgacgtgtttgtgagcttccgcggtgaagacacacgcaacagcttcaccgcttttctttttgaagctctgaaaaaacaaggcatcgaggccttcaaagatgataaagatatcaggaaaggcgaatccatagcaccagagctaatacgagccattgaagggtctcatgttttccttgttgtcttttccaaggactatgcttcctcaacttggtgcctgcgtgaactagcacatatctggaattgctttcaaccatctaccagacatcttctgcctattttctatgatgttgatccatcacaagtgcgaaaactgagtggagactatgagaaagcctttgcccaacaccaaca

SEQ ID NO: 249440 - DNA, 417 bp, Glycine max
ccgggtcgacgcacgcgtccgttcaggagcttagagcactgaaactttccccacagttttacatgcaaatgggcccacccgggacgctcaccatgtgcccctcttgcgagcgtgtggctgttccgtcctccgccgtcgatgctgccacgcgtcatcatcccatggcccaagcccatgcccatgcccagattcagcacaagcccattggcccgtgggctttcgactctcccattacgcaccggccgtttgatgtcttccaccactgatcttgaaggtgttttggtcattgggaaattattattatttactattctgggcctacttgtaccaacctgtaagtgtgtaaccccaaaaggggaagaaaattgggggaaacagaaagaatgaaggaaccgtcgaaacaacctgctttggaat

SEQ ID NO: 249441 - DNA, 417 bp, Glycine max
gtccgaaagtatttgtttgctgttatctataggaagttgcttgctcgaaggcttctctttgacaagggtgccattgatgagcatgagcgaagtattttgacaaaattgaagcaacaatgtggtggacagtttacctcaaagatggaaggaatggttacagatttgacactggcaaaggagaatcaaactagctttgaggagtatttaagcaataatcccaatgcagaccctggcatagacttgacagttacagttctgactactggtttctggcctagttacaaatcttttgatctcaatcttcctgcagaaatgattaggtgtgttgaagttttcaaagaattttatcaaactaaaacaaaacacaggaaacttacatggatttattcggtgggtacctgtaatataagtgggaaa

SEQ ID NO: 249442 - DNA, 380 bp, Glycine max
taccttttcaactttcaagggcagatctttttgagacgccactggtaagacaatcacccttgaggtggagagttcagataccatatataatgtaaagtccaagattcaagacaaggaagggatcccaccagaccagcaacgtctcatttttgctggcaagcagcttgaggatggacgtacacttgctgattacaacatccaaaaggagtccactccttacttggtgctgcagctccgtggtggaatgcaaatctttgttcatacattgaccgtaaagacaatcactcttgatgtccagagctcttacaccattgacaatgttaaagctaagattcatgacaaagagggtatcccaccagaccaacaaaggcttatctttg

SEQ ID NO: 249443 - DNA, 241 bp, Glycine max
ctaaaaaaaaaacataagaaaaaaaaacaaaaaaaaaaaaaaaaaaaaaaggataaaataaaaaagggaacaaagaaaaaaaaaaaaacacaaaaaaaaaaaaaaaaaaaaaaaaaaaaaaaaagaaaaaaaaaaaaacaaaaaacaacaaaggattcaaataacaaaaacaacgaaacaaaataaactaccaagcaattagaagatagaaaaacacatgatcattacaacatacaaaagg

SEQ ID NO: 249444 - DNA, 469 bp, Glycine max
gaatccccgggtcgaccgcacgcgtccgttcttcttcgtcgttatcttcttcttttgttgtttgtgtgtttgttttttctctgacctgaaaatgtcttgctgcggtggtaactgtggttgcggaagcgcctgcaagtgcggcaacggctgcggaggctgcaagatgtacccagacttgagctacaccgagtcaaccaccaccgagaccttggtcatgggagtggcaccagttaaggctcaattcgagagtgctgaaatgggtgttcccgctgagaacgatggctgcaaatgtggagctaactgcacctgcaacccctgcacttgcaagtgaggtgttggagagctaaagcttcaagcagagatggcccttagaaataatgataaaaactatatgtagtttcaaaacttcaaaattatgtagtatgtattaatgtgcactctggtgttttgtgtctaaacaaacaccctt

SEQ ID NO: 249445 - DNA, 411 bp, Glycine max
  unsure (1)..(411): unsure at all n locations
gggtcgaccgacgcgttcgcccacgcgtcctttttttttgtttttggtttctgtttttggtttttcgctgaagcgantgcaatacatcatttggaaacataataaacagcagcacttaaaccagagatgcaaagcacaagttcaagggagacactgaacaaacagataagacatatgagaacacttcataaaagggattccccttagcaaccaccacgaaggcgaaggacaagatgcaaagtggattccttctgaatattngaatctgccaaggtacgaccatcttccaattgcttcccagcaaaaatgagcctctgctgatctggagggataccttccttgtcctgaatcttagctttcacattgtcaatagtatcagagctttccacctccaaggtaatggtcttccct

SEQ ID NO: 249446 - DNA, 379 bp, Glycine max
tcgtccgatagatagagccttccatttatagcctcgcttataaaatgaagagtactacctctttggctcgctttggactttgtgcgcctagacttcatcatatcagccttcagccaccgctgatattgtattcgacaccgaaggcaatcctattcgaaacggcggcacatactatgtgttgccagttataagaggaaagggcggcggaatagaatttgccaaaaccgaaacagaaacatgccctctcactgttgtgcaatctccctttgaggtctcaaagggtctaccactgataatttcatccccatttaaaatccttgacatcaccgaaggacttattttgagcctcagtttcacttatgtacccccctgtgcctta

SEQ ID NO: 249447 - DNA, 526 bp, Glycine max
  unsure (1)..(526): unsure at all n locations
agtctattagctcttttcgttcagctcagcaaacgacctaacntccgagtactagttacggtacagtccgactcgtacgcactctcgaacgttcctttccaccttgggttcaatgaccagatagctagtcccatgatccgttcatattgcatggagggaagcctctgtcaaacctggcccaaaacctctcaaccaagccaaatcatcagacaaacaaaggcacatataccaagcgtacattcttactaatatgcttcagctcctattacagctcacgtaatctaagagacacttaaatgaaaaccactctcaataaccctaaaaatgaatcaacaactcctctaaaactaagataaattactatcgagatacgaacaatcaaatatgttaaaaccaacctgtcatactacagtctaaacccagctcacattccctatggacgcttgaacaatccaacacttatagaatcctgcttcacatacataggaagagccgacatcgaatgatcaaaaagcaacgtctctaa

SEQ ID NO: 249448 - DNA, 448 bp, Glycine max
  unsure (1)..(448): unsure at all n locations
gtccgccattttcgtggtagatttgaaatttcgctttatcaaccggaaaagtttttgcaggantagtagcatttgcaacgggggcatagtacccttcttaatatgccttctcttgttgggggaaaccataagcagttttctgcccagcagcaaaatccccttttgcagcaagtgcttcttgtgtatcaaatttgtcttcactttgcttattggttctttattggaagattcattatgtccaacaaaattgagttgtctagcctaaacatgcatttcatgcatgttcttctaatattaagctttgaccctcttgataatattccaagctaaatttgaattcaattttttgttttctatgtttctctaccttaaatgatggagaaagtttaagggggaaaaggaagaaaattcatatttttccttttctgctggttttaatttactgcct

SEQ ID NO: 249449 - DNA, 316 bp, Glycine max
ttgtctttgtctacgtcgacgacaacttcaacaccgtcacgctttattcgcaagtcggggtgttgaacatcaactggtttcagaaacagcccaactgcaatgaccaggtcagcatgacacttaatatatctgcagatttgcttttcctttttacattgaacacacaataactttttgactttctaactgctgactttgaaactcccaacaattccttgcatcatatatccctgcggtatggaatcactcccttttaagagcattccaaattttcgattcatacatctaattaataccacttcatttaccaaaccag

SEQ ID NO: 249450 - DNA, 166 bp, Glycine max
aagtataccaagggggagggttatattagggctggggtggtgggcaatataaccgatgatattcgtgtttatgaagttccagccttaaaggtcacagcactcatgtttacagagactgctctttcaataattgataatgcaagtggtgaatgcttgacgtttgatc

SEQ ID NO: 249451 - DNA, 467 bp, Glycine max
attcccgcggcgaccgacgcgtccgatttttgtatgcatttatccaacttaattcatacggtatgcattagtgatattttgctgggcttaggcgagttgtgttgtcttgaaaaccctctcccgccaacacacttcttcttcttcttttttgtgttttgtgaatactgagatgagtgctgtgaacatcaccaacgtcaccgtcctggacaaccctgcttcctttctgaccccctttcagttcgagatttcctacgagtgtctcaccgctctcaaagatgatttggaatggaagctcatttatgttggatctgctgaggatgagacctatgatcaattattagagagtgtccttgttggtcctgtcaacgttggaaactatcgttttgttttacaggcagatccaccagatccatccaagattcgtgaagaagatataattggtgtcactgtgcttctgttgacctgct

SEQ ID NO: 249452 - DNA, 225 bp, Glycine max
ttttatttttcttttttcttttttttttttttttttttttttttttttttttttttttgttttttttttttcttttttttttttttttttttttgcttttttttttttttttttcgttgctttttcttttttcttttttttcttttttttttttttttttttcttttttttttttttttttgttttttttttttttttttttcttttctttttttttcttttttt

SEQ ID NO: 249453 - DNA, 566 bp, Glycine max
  unsure (1)..(566): unsure at all n locations
attattgggtataggtttagacgggtaggtgtcaactgaaccctgaggcaatncgtaccgctccggaattcccgggtcgacccacgcgtccgaccacgcgtccgatcttgattccagtagtgctctctatggtatgggttgcactcctgagtatgtagtttatcatgagttaatcctgaccacaaaggagtacatgcattgtgcaacagcggtggagccccagtggctggctgagctgggacccatgtttttgtctgttaaagattctgatacatcattacttgagcataagaagatgactantcaagagaaaacagccatgatggaggagatggagaacttgaagaaggtgcaagcagaggttgagaaaaaaaaaccctttatttaatacttataaaaaaaaagggcggccgttctagaggatccaagcttacttacgcgtgcatgcgaatgcttagctcntttattgtgatacctaagattcaatgaactggccttggttgtacaacgtcgtgactggaaaaacctggcggttcccaattttattaggcttcgattccattttc

SEQ ID NO: 249454 - DNA, 384 bp, Glycine max
gtaccgtctcgattcccggtcgacccagcgtccgaaagctcttttccttctaaatttgattccttagttcagcattctattattatgtatggcttcttcaccttcctcagaaaacaaaaacctagagggagtagctggtggtgccggagagaaacccattccacttggtgagaacgttctgcagaagcgtgctgcattctttgacttgaataaagaaggtagcatctacccatgggagacttttaaagggttgcgtgaaattgggactggggttttgctgtccgttggaggtgctattttcatcaatgtgtttctcagtcagagtactcgtcccggaaagtttccatctatactttttccaattgaaattaaaaatattcaacg

SEQ ID NO: 249455 - DNA, 544 bp, Glycine max
  unsure (1)..(544): unsure at all n locations
tgctgtgtcgctttcctggaaactgatgcgtacgacgccgtaccggtccggattcccggtcgacccacgcgtccgcccacgcgtccgcccacgcgtccgaaacaaagtaagagttcactcaatctcacgtgtgttgtgagttgtgtgtgagcaccaaccaacaatggtgtctctgactccgttatgtttctttattaccttgttgatcgctggtgcagacgcagcggcggagccccaaacggtgcgttttgacaccgtggggttgagcagagacacctttcccaaaggattcttattcggaacggccacgtctgcgtaccaagtggagggtatggcccacaaagacggtcgcggcccaagcatttgggacgtcttcatcaaaaaacccgggattgtcgcaaataatggcacgggagaagtttctgttgatcagtaccatctgtacaaagaagatatagatctcatggtcagcctgaattttgatgcctaccggttgtcaatctcgtggtccaaaaatttttcaaatgggacttggacaagtaan

SEQ ID NO: 249456 - DNA, 388 bp, Glycine max
  unsure (1)..(388): unsure at all n locations
ggaattcccgggtcgacccacgcgtccgcccacgcgtccgataccacctattcctttgtctcagccctgctttgttagttgaaaatggaaaattcctcctttctgctaagaggacaaggagaacaacttacactgagtacgttatttccatggatgctgacaacatctctagatcaagtaacacttacattggaaagctgagatcaaattttcttggtacaaagttcattatatacgatacacagcctccatactcttctgcccatatatgccctcctgggactgggaagacgagccgcagattttattccaaaaaggtctcgcctaaggtcccatctgggagttacaacatagctcangtaacatatgaattaaatgtgcttgggac

SEQ ID NO: 249457 - DNA, 563 bp, Glycine max
  unsure (1)..(563): unsure at all n locations
tgttatggtattggttagcgcatgggtgtctgctgagcctgcagtcngtctgtaccgcttcggaattcccgggtcgacccacgcgtccgcttcaaggtggaaagaaaaacccacccactatcccaattccaataaataccttcctctggatattttcgcacaataccctctcacccttcaacgatgagttactacaatcagcagcaaccacccgtcggtgttcctcctccccaaggttacccaccgtcggattcttacggaaaggacgcgtacccttcgccagggtacccgccgcaaggaggatacccttcgcaggcgtatccagcacaggggtaccctccaccctacgcgcctcctcagtacgctcagcctccgccgcaacaacaccagaattcatctggcccaggttgcttagaaggatggtaagtctctctctctctctctctctctgcatatntctgagtgaaagtgttcgtggcaactcagatcgggattcactcgattgattgcngttgcaattacgggtgcaccatcatctatagtgcgccccgtccgcgggtgaa

SEQ ID NO: 249458 - DNA, 542 bp, Glycine max
  unsure (1)..(542): unsure at all n locations
gtatggtcctgttcactgagccttanctcatacgactgccgtaccggtccggaattcccgggtcgacccacgcgtccggaagttgttgggttgagttggattggatttctaatctaatctatacctttcttttttcgtatgcttttaaggcacaaacccttctttcttccctcttctttcttcttcttattgttattccttgcctttaccctttagggaaggaagaaggaacaactatactactattatccttattattgttattattgtaattaatctttttattatagttattgttgttgttattattcctcaaatatggattcgttgtgcctctccaacgactcagttgtttctggattcaaagacaaggagtcaatggttgacccctttttggtcgaggctctccagaaccctcgtcaccggctcaccattttgaggatggaactggacatccagaagtttttgaataatgctgatcagcagcattttgagtttcaacatttcccttcttcctaccttcgacttggtgtacaccgttn

SEQ ID NO: 249459 - DNA, 537 bp, Glycine max
  unsure (1)..(537): unsure at all n locations
tagaggctgnctgatccctgacgctcatgatcgnacgtacnggtccggaattcccgggtcgacccacgcgtccggtgtacttggcgaagctgtcggagcaggcggagcggtacgaggagatggtggagttcatgcagaaggtggtggtggggtcgacgccggcgtcggagctcacggtggaggagcgcaacctcctctcggtggcctacaagaacgtcatcggctcgctgcgtgccgcgtggcgcatcgtctcctccatcgagcagaaggaggagggccgcaagaacgacgaccacgtctccctcgtcaagcactacagatccaaggtcgagaacgagctcactcaggtctgcgccagcatcctcagcctcctcgactccaacctcgtaccctccgncttcgccagcgagtccaaggtcttctacttgaagatgaagggcgattaccaccgctatctcgccgagtttaaggttggggacgaaagaaaaaccgctactgaggataccatgttgtcttacaaggcttgccaggatattg

SEQ ID NO: 249460 - DNA, 432 bp, Glycine max
accacgcgtccggtaagggctgctgatgtgcatgctgattctgatgacctcgaaaaaagtggtcatgagcggagcaaaactactggaaatgctgctggcacagtagctcgtggtatcattgatctgcaaggataaactaatcacatgaggatggaaccgtgctttataattgtggaataaagcatcacccatttaaacccgtttggttaggtccggtctgtgtacggctgaattctgtgttttgcttgtatcgcatatgacggttatatgtcgacacttgatgcttaatcaaattgttactttgcctgaagtatgtgttagtggttatccttaataaaacaagcagttcaaggtcttctacttgaagatgaagggcgattaccaccgctatctcgccgagtttaatgttggggacgatagaaaaaccgctac

SEQ ID NO: 249461 - DNA, 534 bp, Glycine max
  unsure (1)..(534): unsure at all n locations
agagcggntnttctgactccactcctagatatgacgtctcggtccggaattcccgggtcgacccacgcgtccgcggacgcgtgggcggatctctcttgttagagcgtctctccgtcgattacggcaaaaagtgcagattagggttcaccatttacccttcccctcaggtttcaaccgcagtcgtggagccctacaacagcgtcctctccacccactcccttctggaacacaccgacgtggctgttctcttggacaacgaagccatctacgacatctgtaggagatctctcgacatcgagaggcccacctacaccaacctcaacaggctcatttcccagatcatttcgtcgctaaccacttccttgaggtttgatggcgctatcaatgtggatatcactgagtttcagaccaaccttgtgccataccccaggatccacttcatgctttcttcttatgctccggttatctctgccgccaaggcctaccacgagcagttgtcggtgccagagatcacgaatgccgtgtttgagcccg

SEQ ID NO: 249462 - DNA, 553 bp, Glycine max
tgatggtactttttccattgacttactgtctgaacgtaccggtccggaattcccgggtcgacccacgcgtccgcccacgcgtccgcccacgcgtccgcccacgcgtccgaaaaaaaaaaaaaaaaaaaaaaaagaagaaaaaaaaaaaaaaaaaaaaaaaaaaaaaaaaaaaaaaaaaaaaaaaaaaaaaaaaaaaaaaaaaaaaaaaaaaaaaaaaaataaataaaaaaaaaaaaaatataaaaaaaaaaaaaaaaaataaaaaaaacatatacgatataaaacaatatatactattaaaaaaaatagtgttatttaacattatacatatcatagataatttctaagattattaccatgttttactaatttactaaaagtttttataatactatcaatttccatattatctatgtttcataatttatatttggccttattctagaaactaatcaaatactacgtgtttatgctcctgattattattatcgatactttttttaaatttatttctttttattgccatttaattttaaattcctttatttatttt

SEQ ID NO: 249463 - DNA, 376 bp, Glycine max
tcggaattcccggtcgacctacgcgtccggaaaaaacaggaaggagacaacgggaaggaagagttgaaagaactggaaggagagaaaggaaaggaagagttgaaagaactggaaggagaaaaaggtgaggaagagttgacagatactgtgaccgagataggaacagggagtgggagcgagatcgagaccgtgaaagatacagagatcgtgacttggacagagatcaggatagggacagaatcaggagggataaggagcgtgaaagagagatagagaggagttttgattatgacaagaggtctaagtacacagagagagaaagcagccgggattatgacaatggtagtaagcactatcgtaagagcaggagtcggag

SEQ ID NO: 249464 - DNA, 421 bp, Glycine max
cggaattcccgggtcgacccacgcgtccgctaattctcatttcttcatcgttcgattcttctcctcctaaagatgcagatcttcgtgagaactttgaccggtaagaccatcacccttgaggtggagtcctccgacaccatcgataacgtgaaagctaagattcaagacaaggaagggatcccacctgaccagcagagacttatctttgcgggtaaacagcttgaggatggtcgaacccttgccgactacaacatccaaaaggaatccactctccacctcgtgcttcgcctcaggggtggcatgcaaatctttgtcaagactttgactggcaagaccatcaccctcgaggtcgaatcctcggacaccattgataatgtcaaggccaagatccaggacaaggagggtatccctccagatcagc

SEQ ID NO: 249465 - DNA, 555 bp, Glycine max
  unsure (1)..(555): unsure at all n locations
tgaggagcagtgtcgctnttcaactgatgattttanctcctaggcacgccgtaccggttcggaattcccgggtcgacccacgcgtccgttgttgttgtaactcgttcttcttcttttgttgttctgtgtttgtgtttgtgttttctgtcacctgaaaatgtcttgctgcggtggtaactgtggttgcggaagctcctgcaagtgcggcaacggctgcggaggctgcaagatgtacccagacttgagctacactgagtcaaccaccaccgagaccttggtcatgggagtggcacctgttaaggctcaatttgatggtgctgaaatgggtgtgcccgctgagaacgatggctgcaaatgtggaccaaactgctcctgcaacccctgcacttgcaagtgaggtgttgggagagcaagcttcaagcagagatagcccttgattaggaataatgataaactattaatgggtagctgaaaacttatggattatggctgtggatggtttcgtgcactctggtggtttgtgttaaaacaaacatccttggaattaaggggtcg

SEQ ID NO: 249466 - DNA, 564 bp, Glycine max
aggtatggtaagattgagccggtgggtgtcgactgatgtatgatactcatagtactgctgtaccggttcggaattcccggctcgacccacgcgtccggcttcagctgccattatgactgttaattctggcattagaaaaattcttccaggttctgagatttgtgactttgactttgagccatgtggttattcaatgaactctgttgaaggtgctgctgtttctaccattcatgttaccccagaagatggtttcagttatgcaagctttgagactgttgggtatgacttcaaagtggtgaatctgaacgaaatggttaagagggtattggcatgttttctcccaactgagttctctgttgcagttcatgtggatggtgcaagcaagttgtttgatcagacgtgttttctggatgttaagggatactgtcgcgaagagaggagccacgaagggcttggaatggttggttctcttggctaccaaaaatttgccaagacttgtgactgtgggtcacctagatcaactttgaaatgctggaaagagggagatgaagaagagtagttttc

SEQ ID NO: 249467 - DNA, 533 bp, Glycine max
  unsure (1)..(533): unsure at all n locations
ggagtgctactactcccatccgtcatcgctctgacgtaccggtccggaattcccgggtcgacccacgcgtccgggcgccactcgatgtttccatttgcctgcatgcctttggtattgtggggtgtggttcgtttagtggtgtcaagtcttgcgaacgtgagggtgcatgagtggtaatcgggatgtttttgttgcacggctccatgcttgcgcatgcaacgtgtgacatgcatccttttcattgtcaccttagccttcgtggcttaggtgctgacgattggttcctgtgttgcctacctaccaaacggtattcgtgtggctagtcagacccattccatccaggcctctttgttggggacgctggaggatttcaaagtcccacacgtgaaccacgttagtcgtccatcataacggcttcctgtggcacacgtgtggtgattgttctctcggatgcggtgcatgcagtgaacgtgggtggtctagtgcccncacattgttccttaaaatcggttgtctcggatgacgcttgcccn

SEQ ID NO: 249468 - DNA, 459 bp, Glycine max
gaattcccgggtcgacccacgcgtccgcccacgcgtccggtcacgagactcatacattgtgctgccaattatagtaactctctattgcggtttccatctctcaagttctgaagaagaaacatgtgtggaggtgctatcatctcagacttcattggtgtgaagcgtggccgcaacctcgccgcgcacgaactatggtctgagcttgaccctttctctgacttccttggcttcgataccaccaattccaaaaaccaaccacccctgcagaaaattccagacaaaaaagtggtgtcatcatgtgagaagaagaagaaaagcgtggtgggtgcagaaaagaagaagagtgatagtgggcgagctcgtaaaaacgtgtacagaggaatcaggcaaaggccattgggcaagtgggccgcggagataaggacccacacaagggtgttcatgtctggctcggcacct

SEQ ID NO: 249469 - DNA, 464 bp, Glycine max
taccgcttcggattcccggtcgactacgcgtccgtgaaaagggaccatggaggcaaattcaggtgccagcgaccgaatttcgagaatcgccgggcacctgcgcccccagagagaggatgatgtttgtttgaagcgtagcgattgccgtgcaaaaggtggggtctccggattcaaggtggccatattgggtgccgcaggaggcatagggcaacctctggcgatgttgatgaagatgaatccactcgtttcacttctccacctctactatgttgttaacacccctggcgtcacttctgatataagtcacatggacaccggcgctgttgttcgaagatttttggggcagcagcagcttgaggatgcacttataggcatggacttggtgatcattcctgctggtgttcctcgtaaacctggaatgactagagaagatctcttcatttaaatgctggaattgttaaaca

SEQ ID NO: 249470 - DNA, 228 bp, Glycine max
ggaattaccgggtcgacccacgcgtccgaaaaaaaaaaaaaaaaaaaaaaaaaaaaaaaaaaaaaaaaaaaaaaaaaaaaaaaaaaagggaaaagaaaaaaaaaaaaaaaaaagaaaaaaaaaaaaaaagaaaaagaaaaaaaaaaaaaaaaaaaaaaaaaaaaaaaaaaaaaaaaaaaaaaaaaaaaaaaaaaagaaagggaaaaaaaaaaagaaaaagagagggac

SEQ ID NO: 249471 - DNA, 556 bp, Glycine max
  unsure (1)..(556): unsure at all n locations
agtatggatggtnagccgttactgtcgactganactgaggacctagctatgccgtaccggttcggaattcccgggtcgacccacgcgtccgcccacgcgtccgaggagactgagaaaacagaactatacaaaatggaagatacactttctgcgttgaggtctttgatgctttctcagtctccaccgcttgatgccttagttgttccttctgaagattatcaccagagcgaatatgtgtccgcacgagacaagcgccgcgaattcgtttccggcttcactggaagtgccggcttggcacttataacaaagaatgaagcactgctgtggacggatggacgatattttttgcaggctgagcaagaacttagtgctcagtggaagcttatgcgtattggtgaagatcctgctgtagatatctggatggccgataatttgccaaaaaaggcatccattgaggttgacccttggtgcatttcaattgatactgcttcaaagatggagcgtgcttttcccaaaaacagcaaaagctggtccaaccttaaaaaattggaggatg

SEQ ID NO: 249472 - DNA, 565 bp, Glycine max
  unsure (1)..(565): unsure at all n locations
atggaattgtatagagattgagtattagtgtacactgctaactgcagntgtacgtaagacgtaccggttcggaattcccgggtcgacccacgcgtccgaacataaggaacttctatcgtgttcaagaggttcctcatgaagggcccatgtgcgatctgttgtggtctgatccagatgataggtgcggcttgtgaatttcttcttgtggtgctggatatacatttggccaggatatatccgaacaatttaatcactcaaacaagctcaagttaattgctagtagctcattagctggntatggatgtatttaactaggctcatgaatgaaaggtggataccatttttagtgcacctaactactgttatcgatgtgggaacatggcttccattttggaggttgatgatatcaagggccatacgtttatacagtgtgatcctgcttccaatgaaagttaacctgatttcacccataaaacgtctgaatacttattatgatttaaatccgcatattatacttttggaacagttacattttaatcttaatatatttttattactattgtat

SEQ ID NO: 249473 - DNA, 537 bp, Glycine max
  unsure (1)..(537): unsure at all n locations
cgtgttgagtagtgccagctcgcacatcgnattgcctgtaccggtccggaattcccgggtcgacccacgcgtccgcaaaccccaacatctctcgatgcagagcacccctccgacaacgaccagcacatgggcttgcgggcgcggagcctgagcggagagtctcgggcggagcaagcgtgggcccattggaccaagctgggccggcccaggttcatagtggccccgatggtcgacaactcggagctgcctttccggatgctgtgccgcaagtacggtgcccagggcgcgtacacgcccatgctccattcccgcattttcaccgagaccgaaaagtataggaacgaagagttcaccacttgcaaggaggatcgaccgttgtttgttcaattctgtgccaacgatccggatgtgttgttggaagctgcacgcaaggtggaacgtttttgcgattatgttgatattaatcttgggtgtcctcagcgcattgctaaacggngatactatggtgccttcttgatggataacctttctcctggg

SEQ ID NO: 249474 - DNA, 535 bp, Glycine max
  unsure (1)..(535): unsure at all n locations
gaggatgctatcatcgatagactttcgnactgacgtactcggtccggaattcccgggtcgaccgacgcgtccgcaaaccccatcatctgtcgatgcatagcaccccttcgacaacgaccagcacatgggctggggggcgcggatcctgagcggagagtctcggtcggagcaagcgtgggcccattggaccaagctgggccggcccaggttcatagtggccccgatggtcgacaactcggagctgcctttccggatgctgtgccgcaagtactgtgcccagggcgcgtacacgcccatgctccattcccgcattttcaccgagaccgaaaagtatatgatcgaagagttcaccacttgcaaggaggatcgaccgttgtttgttcaattctgtgccaacgatccggatgtgttgttggaagctgtacgcaaggtggaacgtttttgcgattatgttgatatttatctttggtgttctcagctcattgctaaactgtgatactatggtgcccttttcgatggataacctttctttggt

SEQ ID NO: 249475 - DNA, 530 bp, Glycine max
gtgcgattgttgcctaagatcctcgatcgaacgtaccggtccggaattcccgggtcgacccacgcgtccgcccacgcgtccgcccacgcgtccgcccacgcgtccgctcttagtcccaattttctagggttttattcattttccgatggcttctgcagatgttgagtaccgttgctttgtcggtgggctcgcttgggccactgacgaccatgccctcgagagagccttctctcagtacggcgaaatcgttgaaacgaaggtctgtttgttgcaggcatcacatctgatctcacacgattcggattcggaattttctcgatcccgttctgatctgtgatctctgatctgtttgcgttacttgatcttatgatacttgtgttactatatgattcttttattactcacgccaataggtacgttcatcttcttcctttcaccaaaggcgaagatcgatcggcttctattcggttctggttttgttttttcgtgctgttttgctttagatctgataatggttttactgtcttatg

SEQ ID NO: 249476 - DNA, 482 bp, Glycine max
gaattcccgggtcgacccacgcgtccggcaagaattgggctcccttgtttgcttattatgcgtgcctttatggggattgggtgttgccatgcctgctatgaataatatgctttccaagtggattcctgtttcggagagaagcagatcacttgccctagtatatagtggcatgtacctaggttctgtggttggcttggcattctcaccattgctaatccaaaaatttggttggccatcagtgttttactcctttggatctcttggaagtatctggtttgccttgtggttgagaaaggcatatagctccccaaaagatgaccctgatcttggggtagaggagaaaaggctcatactggaaggcaatgtatcaaatgcacctgtttcttccattccttggaaattaattttatcaaaagcacctgtttgggctcttataatcttccacttctgtcacaattgggggacatttattctttaacctg

SEQ ID NO: 249477 - DNA, 561 bp, Glycine max
  unsure (1)..(561): unsure at all n locations
tgatagttttttaggtgtggcntgagtgatcctagtttacttagcactctcgtaccggtccggaattcccgggtcgacccacgcgtccgcagggaacagcatccgtggttcttgctggactagttgcatctctgaagttggttgggggtaacttagctgatcacagattcttattccttggtgctggagaggctggcactggcatagcagaactcatagcacttgaaacatcaaaacagacaaatgctccactggaggaagtgcgcaagaatatttggctggtggactcaaagggattgattgtcagttctcgcaaagattcgctccaacattttaagaagccctgggctcatgagcatgaacctgttaaaaatcttctagatgctgttaataaaattaagccaacagtgttgattggaacatcgggacaaggaagaacttttactaaagaagtgattgaggcaatggcttctattaacaagagacctattattctttctctttccaaccctacgttacagtcagaatgcactgcttgaggagcttacaaagtgggccagg

SEQ ID NO: 249478 - DNA, 564 bp, Glycine max
atatagagatagaatatgcgtcctgaagcctagcctgatgctacttcgacagcttcggaattcccggctcgacccacgcgtccgaaaaaaaaaaaaaaaaaaaaaaaaaaaataaaaaaaaaaaaaaaaaaaaaaaaaaaaaaagaaaaagaaaaaaaaataaaaaaaaaaaaaaaaaaaacaaaaaaaaaaaaaaaaaaaaaaaaaaaaataacaaaaaaataaaaaaaataacaaaaaaaaaatgaaataaaaaaatcaagacaatacaacaagataaaagacatgcaaaacaagaaaacaactataaaaaatctactaaaaagaaaaacaccacaaaacgccataaacaacaaaaaaacaacatacaagccaaaaagtaaacgcccatgataaaagcaagaaaacccaaaaaccataaaggaaaaacacaaaaaaaccactataaaaaacaaaacactaaaaaaaaataaaaaaagaaaaaaaaaataataaaaaaaacaagtgaaacttaaaaaaaaaaacataaaaaaaggataataaaataaaaataataacaaaaag

SEQ ID NO: 249479 - DNA, 462 bp, Glycine max
cggaattcccgggtcgacccacgcgtccgcgctcgcaaccaccatgccttcccgaagaagaactctcttgaaggtcatcattctcggggacagtggggtggggaagacatctttgatgaaccagtatccttcggtttctgtctacaaactccgtgttctttacttttttttttttaatttgcgtttcaatttgttttctattgtttagtactgcatgaaaactatgtattttcccctaacatacgcaatttagatatgtgaataagaagtttagtaatcagtacaaggcaaccattggagcggattttttaaccaaagaagtgcaattcgaagataggcttttcaccttacagatttgggatacagctggccaagaaagattccaaagccttggagttgctttctatcgtggtgctgattggtgtgttcttgtatatgatgttaattcgatgaaatcatttg

SEQ ID NO: 249480 - DNA, 557 bp, Glycine max
ggtagcgtagggtagccctcctgtccatttattgatccctcagctacgctgtaccggttcggaattcccgggtcgacccacgcgtccgcccacgcgtccgaaagaatagtagaatcgtgtggatcgtttgcagaagaagaggtaaagagaaggagtgaccgaagcgaagatgttacccacagcttccaaaggacgttcttcttcctcctcctcttcctctcgacctaacaatcccatgctgcttccctacctccgcagaatcatcaagtggcaacaaatggatattgaatatactttttggcaaatgcttcatctatgtacgtccccgaaagttgtctatcagcatactaaatatcacaaacaaaccaagaatcaatgggcacgtgatgatcctgcatttgttgtgatctgcagtcttcttttggcagttgcaactttggcttattgtgcggcgtatgaccatagtactgcacatacacttcttggtatcttctcagtgttggttttccactttatattgactggtggatttctggcaacaatttggtgggtcctga

SEQ ID NO: 249481 - DNA, 552 bp, Glycine max
tgggagcggtcgctatcaactgtgactgtatcactcagctactgccgtaccggtccggaattcccgggtcgacccacgcgtccgctgggagggaaacccttgttcgcatcactggtgggatgaaagttaaagctggcggaggtgaatcatctccatatgctgctatgcttgcagcacaggatgttgctgccagatgtaaggaactgggcataactgctcttcatatcaggctccgtgccactggtggaaacaagaccaaaacacctggtcctggtgctcaatcagctcttcgagcccttgcacgttcaagaatgaaaattggtcgtatagaagaatgtactcccattccttccgataggacacctagaaagaatggtagaaggggtagaagactttaaacctcgtatgggataccactggaggtggtaaattttaccttccatggccaaaaaaaatggtggcctttgaagctcttctaggtaatattagaacttttggctttcttgaagtgttataaccggatatttaattgacggggtaaattggaaaatt

SEQ ID NO: 249482 - DNA, 564 bp, Glycine max
  unsure (1)..(564): unsure at all n locations
aggaatgtgatcgtatagcggttcctgtcgatcganatctatgctcatacgcacgccgtaccggtccggaattcccgggtcgacccacgcgtccgcccacgcgtccgcttctcaaactagtagtattattcttccattcataatgggggttttgacattcgaggatgaaatcaactcccctgtggctcctgctactctttacaaggccctagttacagatgccgacaacgtcatcccaaaggctcttgattccttcaagagtgttgaaaacgttgagggaaatggtggcccaggaaccatcaagaagatcactttccttgatgatggagaaaccaagtttgtgctgcacaaaatagaaagcattgatgaggcgaacttgggatacagctacagcgtggttgggggtgctgcattgccagacacggcggagaagatcacattcgactccaaattggttgctggtcccaatggaaggtctgctgggaagctcacttgtcaatacgaaacataaagagatgctgagcccaacccagacgaacttaaaacctggaaaacccaggcttn

SEQ ID NO: 249483 - DNA, 545 bp, Glycine max
  unsure (1)..(545): unsure at all n locations
accggtctcgtgaattcccgggntcgactccaacgcgtctcgtgaggggttggctgcttttgggcntttctcttaaaanntagcaaaacaaggcnnaggggttgggttcttaagcggatactgnttacgttctttaanttccaagggcttttgtacgctacnncagtatgatcctgacannaaaatgtgcaggatgcaantgatacccatatatggaangnntcacttgtggatgaattcannaagaaaaccatcgatgaaanatttagaatctcatcatntgatgatttacttagtacccaatgtggatctcaggctttggcggtcatcgtgaggcatcatgtcttggcccttacagacattattcaaggacgaaagtttcatgaggttgggaagcatttaaagagattatggtctggaacatttcgtgtaatggatgacataaaggaaactgttagaatttctggtgaaaaattatgccgtgctgtaacttccttgacaacaaggctctgtgatgtctctctaactgatatgtcagatgcgca

SEQ ID NO: 249484 - DNA, 420 bp, Glycine max
taccggtctcggaattcccgggccgacccacgcgtccgatttcgatcatctttattttttagaatattcccacttaacatggatcagttaacactaggatttccatttttactaacacttcatctgttagtatcaggtgtagtagcaacaacatcgttcacactggttaacaaatgctactacacattgtggccagacattctctcaaacgcaggaatcgccacgcttacaacaacaggtttcgttcttcaaaccggagagtccaaaaccgtgaccgctccaacctcttggggtggccgtttctggggccgcacactctgcacgcactactccgacgtgaaaattctgttgcctcagcggcgagtgcagctccggcaagctcgaatgcgccggaaacgccgacaggccgactgctacctt

SEQ ID NO: 249485 - DNA, 442 bp, Glycine max
tcccggctcgacgcacgcgtccggatacgcgctcctataggcttccttagattcttttcacaagcgaacgtaagccttaagcgagacttacatcctttaatgacaaggcttgtacgctacctgaatgatcctgacataactgtgcacgatgcaatgatacatatatggaagtcacttatgaatgattcacagaaaaccatccatcaaaatttacatcatatcattgaatgatttactaatgcattaggtatccaacctattgagctcactttgaggtaccatgtcttgctcttacatacatattccaatgacgaacttttcatgacgttagaaatcatttaattatattatggactagaacattaagtctcatggatcacataaaggaaactgttagaataactgttcaaatattctaccgaactataacttcctttacttc

SEQ ID NO: 249486 - DNA, 563 bp, Glycine max
aagttataggttgtctttggtgtcctgtccatcgtattgatgctcttgccatgccgtaccggttcggaattcccgggtcgacccacgcgtccgcccacgcgtccgtctttatataacctaattgcaaagatgaataccaagcccgtgttctggttgtgcttcctctgtgcactgcttctcatctctgttgtggcaactgagccatccaaagatgagacacaagcagaagaaccaaagacacagccagatgcctggggaagaggtggaagtggggggcatgatggaagctggggacacggtggagactgggggcatggctgaggaggacacggtggaagacatggcggaggaggacacggtggaagacatggcggaggatgcagatgctgcggtcgaaagggctgcaaatgttgctgaagtaaaaatcacaaatatatgaactgaacacactcatatacttgagtgtactccatgtaataactaagatataatttaagatataagaaataaaagcatggacctctatccgtgcttgggctagcctaggtggatggttaccggca

SEQ ID NO: 249487 - DNA, 564 bp, Glycine max
  unsure (1)..(564): unsure at all n locations
aagttatgggaagtngttgccggtcgctgtacactgattatgtatctcatagtactgctgtaccggttcggaattcccgggtcgacccacgcgtccggtgcttatccttattgagagaaaaaatggccaaatcaatcaaattctttgagtggaacacaggggccaagattccttctcttgggttagggacttggcaagctgaacctggtgttgtagctgaagctctcaccacagccattcaggttggatacaggcatattgactgtgctagtgcgtataagaatcaagcagagattggttctgctcttaagaagctttttgatgatggtgtggtgaagcgtgaggacttatggatcacttccaaactctggtgttcagatcatgcaccagaagatgtgccaaaagcattggataaaacattacaggaattgcaacttgactatcttgacctctatctgatccactggccagtccgcatgaaaagtggaacatttggactcaataaagaatatcttgagcaaccagacattcccaatacatggagagcaatggaagcactttatt

SEQ ID NO: 249488 - DNA, 372 bp, Glycine max
gaatcccggtcgacccacgcgtccgcgaaaacctatcaaggtcatgatgaacatgaggccattaaccgccgtctacaacaaggcgatccgggatctttgcaatcgagaactcggccaccttcccccaaggaatttcgctctccgtcttggcgcctccgaggatcttgtccttcgacttgaattactgaggaatctgcaaaaacacagaggttgtgtcaacactgtgagcttcaatgcagatggtgacactctagtctccggttccgacgattggggggttattctctgggactgggaaactggccgcattaaactctacttccattctggtcattctaacaatgttttccaggccaagttcatgccctactc

SEQ ID NO: 249489 - DNA, 386 bp, Glycine max
ggaattcccgggtcgacccacgcgtccgcccacgcgtccgcccacgcgtccgcccacgcgtccgcccacgcgtccgctcaagtggccagccatgctcagaaatatttcatcaggcaaagcaatgtgtccaggcgaaaaagacggtccagcttgtttgatattgttgcagatgaagcagctgacactgcaatggtacagcaagacttcttgtctgctaatgagttaccaactgaaacagaaggcaataaccccttgcctgctcctccttccctcgatgaagagtggtgaatcaatgggattcacaaactcaaatgatggagagcctgccccatcaaagccagaaaacacacatccatcttatcctatgttatatcctgcgtattatt

SEQ ID NO: 249490 - DNA, 459 bp, Glycine max
ggaattcccgggtcgacccacgcgtccggaattgcagttcgcaaccaatcatttaggccattttctcttgacaaaccttttattaggaactatgaaaaaaacagtaggggtatgcaaccaggaaggaagaatagttattctatcatcagaggcacacagatttgcttatcgtgaagggattcaatttgataagatcaatgatgaatcagggtaatggtctggttggaatgataaatcaatgataaaccttttccctatttggctattttctactaagctcttgctataaaaattcataataaatgtatattattcatgtccaatgttttgagtccccaaaattgcataatttccttctctatctgagttttatacaggtatagcaggtaatttgcttatggacaatcaaagcttgctaatatcttacatgcaaatgaacttgcaaggcgcttgaaggaa

SEQ ID NO: 249491 - DNA, 465 bp, Glycine max
tccggttcggattcccggtcgacccagcgtccgtgattcgtccacgacggagcagaaagcgccgccgccgaggcaatcaccggcggtggcgaggccgcagcaatggctgccgatgcagtaccctgcggcggcgatggtaatgccgcaccacatgttgccgcctcagcattacgcgccgccgccctacgtgcccttccaccaccaccaccaccatcaccagtacgcggcgccgcacgtgccgaaccaacatcagcagcagcagcagcatcaccaccatcagaacggatccggcggcgagaacaaaaccatctggatcggcgatttgcatcactggatggacgaaaactatctccatcgctgtttcgcttccaccggcgagatttcctccatcaaggttattcgcaataagcaaactggcttatcagagggttatggatttgtggagttctattcacatgctacagc

SEQ ID NO: 249492 - DNA, 558 bp, Glycine max
aggtatgtatgagagccatgcgctgcgctgattatgatctcttcgtatgccgtaccggttcggaattcccgggtcgacccacgcgtccgtggactcctgtgcgggcacgtgcctacctcttgatgcaggatgcgacaccggggatagaccctcaccgcattgaccgtatccctagagggggtacgatctgacaccatcgacaacgtctaggcctacagccaaggcatggaatgaattgcgaaggaccaccaacgtgtaagaaagcacgctaagcaactgggagactgaccgacactagctgactgcagcatcaataaagagacgcctcctcaactaggactacgtcaacatgatggcatgcaaatctacaataagacactcaccggcaagaccataaccctagaagctgcatgctccggcaccatcaatgactggaagggcaagatccaacacaggtgacggaattcctcaggacagctacggatcatgtgaggctgagagtaactacgcgactgatcgagactcatcatatgctgcatggaaaatgaaataaaacgt

SEQ ID NO: 249493 - DNA, 537 bp, Glycine max
  unsure (1)..(537): unsure at all n locations
gatagcgatactgtcgccgtcggacgatcgnatggaacgtactggtccggaattcccgggtcgacccacgcgtccgtcaggtttcaggttcttatcatcactgtctctgtggtttccttctttgtagccgtaggtggttgcatgtacgtgcttccaagccttagccgcgcgtttttcaatggccaagttcccttattatctgaacataacagcaacggatcagtgagagaatgtgatgtctttgatggaagctgggtgcaggttaaagatcacaccttgtacaatgccacagagtgtccttttgtggaacgaggattcgattgtttagggaatgggaggggtgacagggattatcttggttggaggtggaagccgaggagttgtgatattccaaggtttgatgtgcgtggtgtgttggaaatgttgagaagcaaaagggttggttttgttggtgattcaatgagtaggacgcagtgggagtctcttgattgtatgctcatggctggtgttgaagataagaggggtgtttatgaaatg

SEQ ID NO: 249494 - DNA, 534 bp, Glycine max
  unsure (1)..(534): unsure at all n locations
tgggcttattaccaaatacngtgatcgattgacgtaccggtccggaattcccgggtcgacccacgcgtccgcccacgcgtccggttccttttgaaggttagaagtgctacaatacaaacaatggcagctactcaggaagatgtgaagcttttgggtattgtgggaagcccatttgtgtgcagggtccagattgcccttaagttgaagggagttgaatacaaatttttggaagaaaatttgggcaacaagagtgatttgcttctcaaatacaaccctgttcacaagaaggttccagtgtttgttcacaatgagcagcccatagcagagtctcttgtgattgttgaatacattgatgagacatggaagaacaaccccatcttaccttctgatccttaccaaagagccttggctcgtttctggtccaaattcattgatgataagattgtgggtgctgtatcgaaatctgttttcacggttgatgagaaagagcgtgagaagaatgttgaagatacatatgaggctcttcagtttctt

SEQ ID NO: 249495 - DNA, 487 bp, Glycine max
gaattcccgggtcgacccacgcgtccggttcttgctttcaacgataaacctgtgaagaatctgaagagcttggccaacatagttgagagctgtgatgatgattatctaaagtttgatctggaataccaacagaaggtagtgttgaagactagcactgctaaggccgcaaccttagacatcctcaccacacattgtataccttctgcgatgtctgatgacctgaagacataaaaagttttggtgaaagttatttaaattactcccattggcctcatcttaatttttttttaagtgttattacacctagttcactataagattgcggtactattggatctgcactagtcaatgagataaaaaggcttcacatacagatgattagagaatcagaggatggggaaggaattagcataatacaacttacgcttcattaaattatcattaagtttatctctttcgagttggggtgttctgtactctatttata

SEQ ID NO: 249496 - DNA, 471 bp, Glycine max
ggaattcccgggtcgacccacgcgtccgggtgaactgaggagagagagagagaggatgagaggggtgaagagagcaatgtttgtaggcatagccctgagaagcaattccaacagcggcgtgtctgcccatggccatggctgcttgaccccatcaaatccaaatccaaatccaaatccttgtgtttctgttactgggttcagatacctttctgcttatgctgctgccacgtctcttgtccaagacgctctgaccaatgccgttaaacccaaagaacttgcctctttcaatactaggcctagccattctgcaacaagcgtttctggactattatgatattccattcaaagcggttgaggtaaatcccatctacaagaaggagatcaagtggtccgactacaagaaggtgcctatcctcaccgttgatggtcaacaaaaggtcgactcttcagacataattgataaattgatca

SEQ ID NO: 249497 - DNA, 471 bp, Glycine max
ggaattcccgggtcgacccacgcgtccgtggggttgtggctgtgaacaacaacatcaacaactatgaatccaaggcaacttccaccgtcaccattaagggcattctcagccttctaatggaaagcattgatgatgagaattgtgatggtggtggaagcaagaagagagttatttctcttggtatgggtgacccaactctcaccacattgttccacacaccaaaggttgttgaagaggctgtcgctgatgctcttcaatctcgcaagtttcatggctatgctcccactgctggacttctccaggctagaattgcaattgctgaatatctatctcgtgacctttcttatcaattatcacgagatgatgtcttcatcacttgtggatgcacacaagccattgatgtttcggtggccatgcttgctcgccctggtgcaaacatcttgcttccaaggccaagctttccaatctatg

SEQ ID NO: 249498 - DNA, 342 bp, Glycine max
accggtctcgattcccggtcgacccagcgtccggcattttatacccggtctcgttagcataaggatgactgcactgctaacaggtggataggtgctgcaaaagccatgcataccaatcaagagggctacagacttgttagggcacacacgcttagagccgtacgatatacaattgctggatgctgccatacagagactctaatcgactatagaggaagagtagctatccaattgaaaggatgcatgttcacgactgcctcagtgtatgatattgccattccttatgatcactggactaatcacgatctccggatgagagcttctgctaattattccttgacc

SEQ ID NO: 249499 - DNA, 536 bp, Glycine max
  unsure (1)..(536): unsure at all n locations
cgcggtaactgtcaaatacnacaattcgactgacgtaccggtccggaattcccgggtcgacccacgcgtccgagaaaatgttcaaaaaattttcaggtgaagatgtatctgcacagaaccaagtgaaggcatctgtgtcaacgaaaaatacggcaaagtattgctgaagagtatccgggtcttgaacctgtgttggatgatatacttcccaagaagtcccctctaatagttgctaaatgtcagaaccatctcaatctggttcttgtgaacaacgtgccactgtttttcagtgtccgtgatggaccatacatgcccaccttgcgtcttctccatctatatccaaatataatgaaaaagttacaagttgaccgtggtgcaattagatttgtcttggcgggtgcaaacataatgtgtcctggtcttacatctcctgggggtgttttggatgaggaagtaggggcagaatgtcctgtggccatcatggctgaaggaaaacagcatgctcttgctattggctttacaaaaatgtcagcaaa

SEQ ID NO: 249500 - DNA, 538 bp, Glycine max
  unsure (1)..(538): unsure at all n locations
gtatagagggtntntcaaatagngtcctcgtctgacgtaccggtccggaattcccgggtcgacccacgcgtccgccaccgcgtgaggctctgtttctagggtttgttgggtctaaaaaatcgaagcgatttcgatggcggaagagcgattcacgggcgtggtgcagtggttcaacaatggcaagggcttcggcttcatcaagcccgacgacggcggcgaggatctcttcgttcaccagtcctccatcagatccgacggctaccgcaccctcctcgagggcgaccgcgtcgagttcgccatcgccaccggcgacaacgacaagaccaaggccgtcgacgtcaccggcgtcgacggcgcccctctccagccccgcgcagccgccggcaacaacaaccgcgccgccggctctggcttcggtttcggcgccaggcgcaatggcggaggcggcgccgcgtgctaccagtgtggcgagtttggacacctcgccagggattgcaacaggagcagtaattctggtggcggcggaggcggcagcggn

SEQ ID NO: 249501 - DNA, 517 bp, Glycine max
  unsure (1)..(517): unsure at all n locations
tgcggtntgnctggcgactgaaactcatcggactgcccgtaccggtccggaattcccgggtcgacccacgcgtccgtgttctttttttttgccctatctaattagggttcccgcgatttcaaaccttaatttcttggattactctctctttccatctcatgcgttcttgctctcaacaacaatcacccaccgccatcgaagtcttcgttcttttcttcttcttcactctccttttttctctcgttcgagggttctttcgtggggaaccctgcagatttcaccactcgtgcacatgtccaaagttctcggcttttccggagttgacgatttttgcccgatgggatcaatatatgccaaccccaaggaagcaagtttcttcttgcctcttggccctcaagttgatgtatactttccttctcggaagagatcgcgtgtcaacactccattcgttttcgatggagaatggtttgagccaaagccgaaaacctcttgtgaaagcctgccagatgagtgtctc

SEQ ID NO: 249502 - DNA, 452 bp, Glycine max
gacccagcgcgtccgtgttcttttgttttgccctatctaattaaggttcccgcgatttcaaaccttaatttcttggattgctctctctttacatctgatgcgttcttgctctcaacaacaatcacccaccgccatcgaagtcttcgttcttttcttcttcttcactctccttttttctctcgttcgagggttctttcgtggggaaccctgcagatttcaccactcgtgcacatgtccaaagttctcggcttttccggagttgacgatttttgcccgatgggatcaatatatgccaaccccaaggaagcaagtttcttcttgcctcttggccctcaagttgatgtatactttcctcctcggaagagatcgcgtgtcaacactccattcgttttcgatggagaatggtttgagcaaaagccgaaaacctctgttgaagccttgccagatgagtg

SEQ ID NO: 249503 - DNA, 519 bp, Glycine max
  unsure (1)..(519): unsure at all n locations
gtatgcgctgacgtgaggctgcnaggctaagnactgtctgtaccggtccggaattcccgggtcgacccacgcgtccggtttttgcaacatcaaacagcagaggtaccattgttgattctggaacaactttggcgtacgttgcggaagaggcttatgatccctttgtctctgcgattacagcttcaattccacaatctgtacacactgttgtttccaggggaaatcagtgttatttaatcacatccagtgtcactgaagtttttcctcaagtaagtctgaactttgctggtggtgcatctatgattttaaggcctcaggactacctgatacagcagaattccattggtggtgcagcagtgtggtgtattggctttcagaaaatccagggtcaagggataacaattctaggagatctcgtattaaaagacaaaattgttgtttatgatctggctggtcaacgcattggatgggctaactatgactgttctttgtcggtgaatgtctctgcaacaactggca

SEQ ID NO: 249504 - DNA, 387 bp, Glycine max
cggtctggaattcccgggtcgaccgacgcgttcgcggacgcgtgggtttcttcattatttcagcttttgcattggtgtcatagctccttgctgcggggggatacaaaggcatgaaggcagatgattgttgggtccaacttaaattataccatcatggaaaaattggttccaaggctttaacatttgctacatgaattaaagctctggctcattatgttcatgggaaaggtttgaagactttgatatattcacatgcatgaaattcaactctgatgaaacgcatgcctggatcacttggacacgaagaacaagatgccaaaacatttgctttttggggagtttactacttggagtaatgataattgtgaaaatattggtttatttgcc

SEQ ID NO: 249505 - DNA, 541 bp, Glycine max
  unsure (1)..(541): unsure at all n locations
cgagtggtnttntcacggtcaccnacctaacgactgacgtaccggtccggaattcccgggtcgacccacgcgtccgcccacgcgtccgaaatgagtggtttttgagcagaagcagttaaaagagaaagggattgagggaagatgacatcggttggtgtggcaccaacttcgggtttgagagaagccagtgggcatggagcagcaggtgttgatagattgccagaggagatgaacgatatgaaaattagggatgatagagaaatggaagccacagttgttgatggcaatggaacggagacaggacatatcattgtgactaccattgggggtagaaatggtcagcccaagcagactataagctacatggcagagcgtgttgtaaggcatggatcatttggagttgtcttccaagctaagtgcttggaaactggtgaaactgtggctatcaaaaaggttcttcaagacaagaggtacaagaaccgggagctgcaaacaatgcgccttcttgaccacccaaatgtcgttgctttgaaacactggt

SEQ ID NO: 249506 - DNA, 557 bp, Glycine max
  unsure (1)..(557): unsure at all n locations
tggaatgatnacttattgccatttcgatcgatcgcatccgacgtgacagtaccggtccggaattcccgggtcgacccacgcgtccggggatattctcatacttaatagttgccggattgtgtcactgaattgagctgtttgtgtccgcttgagtttatttcagctggcaaagttagggttgggtttgaattttgaggcatgactggttgagctttcggggtctgggagtttgttattattgttatttttcattctacatatgtatttgttgcgagtaatgggtcatgttggttggagggtgcagtccagaaagtcaagaactatatacgaacgttttggtaccgacttgtttgagtttcaaaaaaaaaagaatggtactttttcaaccccaaaaaacaagaaatacccgaacgggtctcgacccaacagaataactgggtcgggttattggaaagccaccggaaccgacaagaacattaccacctaaggtttaaaagtttgcataaaaaaagcccttcgtttctacgtttgcaaaacccccaaaggcaccaaaacca

SEQ ID NO: 249507 - DNA, 465 bp, Glycine max
aattccctggtcgacccactcttactaaaaaaaaaaaaaaaaaaaaaaataaaaaattaaattaaaaaaaaaaaaaaaaaataataagtgaaaagtataattaaaaaacaagtatataaaaaataaatattttatataacctcttcttatattttctattctttcctctttttttttcatacttttatttttataatacttttttttcacttcatttttttttcttattatttataatttttttatatattattatccttttaattactccttcttttattatcttttcttttaaaaactttttttaatttcttattttatatttttacattctttttttatctttcttttttccctacttttttttcttttttaaactcaattttaacctcttcttttttaccttccttttatcctcttttttttgttttttcttcttttttttactctttattttctcttttt

SEQ ID NO: 249508 - DNA, 520 bp, Glycine max
  unsure (1)..(520): unsure at all n locations
tgatgggntgacttgagccagcnaccctacgtactgtatgtaccggtccggaattcccgggtcgacccacgcgtccgcggacgcgtgggtttcttcattatttcagctgatgcattggtgtcatcgggccttgctgctttgggatacaaatacattaatttagatgattgttgggccgaacttaatcgagaccatcagggaaatatggttcccaaggcttcaacatttccttcaggaattaaggctctggctcattatgttcatgggaaaggtttgaagttggggatatattcagatgcaggaaatcaaacttgcagtaaacgtatgcctggatcactaggacacgaagaacaagatgcaaaaacatttgcttcttggggagttgactacttgaagtatgataattgtgaaaataatggtatattagccacagaaaggtatccaccaatgagtgaagctttgttaaaaactggaaggccaatcttcttctctatgtgtgaatggngatggcaagacccan

SEQ ID NO: 249509 - DNA, 524 bp, Glycine max
  unsure (1)..(524): unsure at all n locations
agcaggcagcctgacttgccggccagtcngcagctcgcatngtacgtaccggtccggaattcccgggtcgacccacgcgtccggcagaagattaggagtagaatggcgaaggatatagtgaaagagcttcttcctctaattcgagtggacaaggatggcagcgtggagcgtcttctaagctctgaaaacgtggcagcctcccctgaagatccccaaactggagtctcatccaaagacatagtcatcgcagacaacccctacgtctccgctcgcattttccttcccaaatcccaccacactaacaacaaactccccatcttcctctacttccacggtggcgcctttgcgtcgaatccgccttctcctttttcgtccaccgctatctcaacatcttggcctcagaagccaacataatagccatctccgtcgacttcagactcctcccacaccaccctatccctgctgcctacgaagacggttggaccaccctcaaatggattgcttcccacgccaacaacaccaac

SEQ ID NO: 249510 - DNA, 514 bp, Glycine max
  unsure (1)..(514): unsure at all n locations
ggggtcttgtggtccatccgtcatcgnattgnacgtacnggtccggaattcccgggtcgaccgacgcgtccgtccgctacttggattcattggaaggctggatcaacagaaaggcattgatctcatagccggggcggttccttggatagtgggccaggatgtgcagctagtcatgttgggaactggaaggccggacttagaagatatgcttaggcagtttgagtcccaacaccgtgacaaagtcagaggatgggttggcttttcggtcaagatggctcaccggataacagcaggtgcagacatattgctgatgccatcaagatttgagccatgtggattgaatcaactctatgccatgaattacggaacaattccagttgtacatgctgtcggtggattgagggatacagtgaagccttttaatccatttgaagagtcgggccttgggtggacatttgacagtgcagaaactaacaagttaataaatgcattagggaactgcttgttgaccttn

SEQ ID NO: 249511 - DNA, 516 bp, Glycine max
gaaggtatgccatgggtcgctgagacgaatacgatggactgacgtaccggtccggaattcccgggtcgacccacgcgtccgcgcaggcgttgggactccagctgcagctgcagctgcagcaacagacgctaaggcaggcaagtatggagctgctgcaggcttagtgcctgttgggccatgctttgtcccggtagtagttggtgtcccaggagctggcgttccaggtgttggtgtaccaggagctgtgattccagttgtcccaggtgctgggatcccaagtgctgcggttccaggggttgtgtcaccagaagcagctgctaaggcagctgcaaaggcagccaaatacggggccaggcccggagtctgagttggaggcattcctacttacggggttggagctgggggctttcccggctttggtgtcggagtcggaagtatccctggagtcgcaggtgtccctggtgtcggaggtgttcccggagtcggaggtgtcccgggagttggcatttcccccga

SEQ ID NO: 249512 - DNA, 520 bp, Glycine max
  unsure (1)..(520): unsure at all n locations
tgatggcgtttctgcggcctaccgcgnacgataggactgacgtaccggtccggaattcccgggtcgacccacgcgtccgctctctctctctctctctctctgcttcactttctgacttttgcattgtcttgtcaggcagggaatcctcagaaccaggatcggtgcccttctggctctgatctctcaaagctgcaaattctgcttgattggcttgcttgccagtttggagtatgatatcacctccgactgtagttacgcgagatgatgggctcaacaacctgtcgtctaccgggtcgtgcgactctaagcagtccttgaaccatttctctcagaatggcgctgcattgacagaacgaaattacttagggttatctgatcgatcatcagttgatagcactggcctctactgccccatagcttgtgtgatgacaaaaaggagaacatgaatgtgagtgctactgatgtcaggcgtggtctctcactatcccaatcccctgaaatggagccggatcttatctcn

SEQ ID NO: 249513 - DNA, 549 bp, Glycine max
  unsure (1)..(549): unsure at all n locations
agtagtggnnttatgatgttcagtncagtgacgtactgccgtaccggtctcggaattcccgggtcgacccacgcgtccgcccacgcgttcggccgtattttctgttggtatatgaaggtggtgaagagagaagaggaaggagaatggtgacggaccaggatatagcgaaaggggtggcgtctctactgcgtcactctgacccaaactccataactacggttaacggtgtcgatcagcatctggaggccaaactagggttagacctctctcacaaggccagtttcatcagataccagatcgaccatcttataccgtcaaaagcccaagcctttggtcctcaaccttcttcaattcacaaagactattttgccccttaaccccaaccggaatttccgaccacccactttacttaccattttgccctacatgacgagatcaacttacagcaacacccccgagcttctccaccgtgcaaagttgaaacctttccttctcaaaatgctcacacttgtgcccctactaagtgcccaaagaaagtgttcaaactgn

SEQ ID NO: 249514 - DNA, 543 bp, Glycine max
  unsure (1)..(543): unsure at all n locations
cgtgtgtctatgatcgctagccnctgcatcggactgcctgtaccggtccggaattcccgggtcgacccacgcgtccgcagatcagcagaggctgattttcgctggtaaacaacttgaggatggaagaacccttgctgattacaacattcagaaggaatccacccttcacttggtgcttcgtttgagaggtggcatgcagattttcgtcaagactttgacaggaaagaccatcaccttggaggtggaaagttctgatacaattgataatgtgaaagccaagattcaggataaggagggtattccccagaccagcagaggcttatctttgccgggaaagcagctggaagatggaagacccttggctgatattaacatccaaaaggatctaacttgcaacttggtgttcgacttcctggtggcaatgcaaacttcgggaaaacttttaccggaaaaaacataactttggaagtttgaagctcttacaccattgataatggtgaagcaaagattcaagacaaggaaaggtttccaacagaccaacan

SEQ ID NO: 249515 - DNA, 439 bp, Glycine max
taccggtccggaattcccgggtcgagccacgctatgctaggcgtaaccattaatccgtgcatgtatagagatgaactagttcagactgaccatctgtggatggctcattatatcagacattgagagagcgatagtgtatactactggggttaccgagaatattctagaacttataccatcaacaaacgcgaactcttctaaggtatgcacacattatattaaatgtcaacacatgctttgtctgctgtttcgatcattcatgatcactcatgcgatcacactgactacgttccatgaactcattactacaatacttgctgtatgaactttcgactgtctgatagtagactaccatactatacacaattgacctgaaactgagacctgatagctgatcatgatccatagaactctctatcacattgctcgtatgctacat

SEQ ID NO: 249516 - DNA, 515 bp, Glycine max
  unsure (1)..(515): unsure at all n locations
gtgtgcttngtgatgccaaccgattacgnatngacgtaccggtccggaattcccgggtcgacccacgcgtccgcccacgcgttcgccgtgaaacaacttcacaactttttggagaaaaccagagtaatggatggagtgccattgacaggaggacgcatatccagactaaccttgatcatcctaagtcttccaatgttgaggaaaatacctctgttgaaagtcctgttgtcttggattctcaggagttcgataatttatcgttagtatggggaaaaccaaggcaaccccctttgggttctgaagagtggaatgccttcttggattctgaaggacgagtcacagattcagaagctttgagaaagagagtattttatggtggacttgaccacgaattacaaaatgaggtatggggtttgcttttgggatattatccatatgaatcaacatatgctgagagagaattcctgaagtcagttaagaagttagaatacgagaacataaagaaccagtggcag

SEQ ID NO: 249517 - DNA, 580 bp, Glycine max
  unsure (1)..(580): unsure at all n locations
tcaatttttttttttaacttatnattttacttttcattatttntcattatantctatcgatttttttgggggtgcgtctgtgtagtacaganatttatgaatgctctaccggtccggaattcccgggtcgacccacgcgtccgcgcaaattaaagcgcaaaaaccattctccttcggtgctcttgataacatgggaaaacagagcacagaattctctgccctcaactgcatcgacctctccaaccctgacatcaaccaatccgtcaatttactcaaacaggcatgtttggattccggttttttctacgttgtcaatcatggaataagccaggaattcatggaagaggtttttgcacagagcaagaaattcttctctcttcctcacaaggagaagatgaagattctcaggaatgaaaaacacaggggatacacccctgttcttgatgagttgcttgatcctgaaaaccaagtgcatggagactacaaagaggggtattatattggagttgaaaaaggtgaagatgacccagaatcgaataaacctttttatggaccgaataactggcccgcaccaggtgtt

SEQ ID NO: 249518 - DNA, 513 bp, Glycine max
cggtgcgtgtgagcactgccagcgctgatcgaccgccgtaccggtccggaattcccgggtcgacccacgcgtccggctagtgatcaatcatcaacacagagctgagtgtgttgctctgtgaatccaccttgttcgtccattggaggaccattgcctcctggaatagaaatactaccacacttttcttttttcacttctctaagttgctaagttaattgctccttcattttttcactcttcgttctcgcgtacccgtgtcacggtaactcgtggtgaagtgttcgaaaatgactgtcacacctaagatctcagttaacgatgggaaacttgttgtccatggtaagaccattctgactggagtgccagacaacgttgtgctgactccaggttctggaaggggtcttgtgactggtgcttttgttggtgccacagcttcacacagcaaaagtctccatgtgtttccaatgggtgttttagaggggctccggttcatgtgttgtttccggttcaagg

SEQ ID NO: 249519 - DNA, 518 bp, Glycine max
  unsure (1)..(518): unsure at all n locations
tgagtcttngtgcggctgcaagccacgtgacgactgccgtaccggtctcggaattcccgggtcgacccacgcgtccggcttcctctgccgccatcgacggcgcctgctgcggcggcgagcggcggagcgagcgggcgggcggcgcagcaggtgagtccctttctcggagctggagagactgaaccgcatcgggagcgggagcggcgggacggtgtacaaggtggtccaccgcacgagcgggcgcgtgtacgcgctgaaggtgatatacggtcaccacgaggagtcggtgcggcggcagatccaccgggaaatccagatcctccgtgacgtggacgatgcgaacgtggtgaagtgtcacgagatgtacgatcagaacagcgaaatccaggtgctgctggagttcatggacggaggttctctggaggggaaacacatcacgcaggagcagcagctggcagatctgtctcggcagattcttagggggctggcgtacctgcaccggcggcacatcgtccaca

SEQ ID NO: 249520 - DNA, 457 bp, Glycine max
aattcccgggtcgaccgacgcgtccggtcagcaactgggacgatatggagaagatttggcatcacacattttacaatgagctacgtgttgcccctgaagaacaccccgtacttcttaccgaggcaccactcaatcccaaggccaacagagagaagatgacccaaattatgtttgagactttcaatgtgcctgccatgtatgttgcaattcaggctgtcttgtctctgtatgccagtggacgtactacaggtattgtgcttgattctggtgatggtgtgagccacacggtgcccatatatgaagggtatgctcttcctcatgcaattcttcggttggaccttgctggccgtgatttaacagagtacttggtgaaaatccttaccgagagaggatactccttcagcacctctgccgaaaaggaaattgtccgtgatgtgaaggagaaattggcatacgt

SEQ ID NO: 249521 - DNA, 189 bp, Glycine max
attcccgggtcgaccgcactcgtccgttcataatgggtgttttcacattcaaggattaaatcaactcccctgtgactcctgttacgctttactttgatctagtgacagatcctgacaacttcataccaaacgctcttaattccttcaaaaatatttaaaaccataacttaaatggtaccctaagaacca

SEQ ID NO: 249522 - DNA, 519 bp, Glycine max
  unsure (1)..(519): unsure at all n locations
tgatggntnngtngtgctcagactagtactgnactgactntaccggtccggaattcccgggtcgaccgacgcgtccgcccacgcgtccgctccaaacaaaaactactacttgcttagcacacaatattatgaaaaccgccgcanaggttgtttcatctcattgtcttgttgtagcagagtgctctcaatccagccccacacaactttctgctatggaacctcagattctgaatttggggtgcatgcattacagaaggagatgcaagatcagagcgccgtgctgtgatgaggtttttgactgtaggcattgccataatgaagctaagaattctgaggaggttgatgctgtggatcgtcatgatgttccacgccatgaaattaagaaggttatctgctccttatgtgatgtagagcaagatgttcagcagtactgtataaactgtggaatatgcatgggcaagtacttttgtactatatgcaaattctttgatgatgatatttcaaagaatcaataccact

SEQ ID NO: 249523 - DNA, 518 bp, Glycine max
ggaggagcgcgtctgacgatgttcagctctctcatagtaccgccgtaccggtccggaattcccgggtcgacccacgcgtccgtgcaatttctcaattactacatcgtattctgcaaattcaaactgggtcttggtttgctggaagatgggaggtggcaaggacaagcaccatgatgaatctgacaaaggaattttttcacagcttgctcatggggtagctggtgcagcacatggtggacatgggtacccacctggggcttacccaccaccacctggggcataccctgcgcaccaagggtaccctccacaacatgggtatcctccggctgggtaccctccacatcaaggttaccctcctgctggttacccaccagctggttatcctggttcatctcatgcaccaggttctcatggtcacggcggcatgggagcaatgctcaccgtgggtgctgccgcggctgctgctgcttatggtgctcaccatgtctctcatggctcccatggctcctatggccaat

SEQ ID NO: 249524 - DNA, 512 bp, Glycine max
gcgtcttctggcgacttcagctactcctgactgacgtaccggtccggaattcccgggtcgacccacgcgtccgcccacgcgtccgctcaaagattaagccatgcatgtgtaagtatgaactaattcagggtgggaaactgcgaatggctcattaaatcagttatagtttgtttgatggtatctactactcggataaccgtagtaattctagagctaatacgtgcaacaaaccccgacttctggaagggatgcatttattagataaaaggtcaacacaggctctgcctgttgctttgatgattcatgataactcgtcggatcgcacggtctttgtgccggcgacgcatcattcaaatttctgccctatcaactttcgatggtaggatagtggcctaccatggtggtgacgggtgacggagaattagggttcgattccggagagggagcctgagacacggctaccacattcaaggaaggcagcaggcgcgcaaattacccaatcctgacacggg

SEQ ID NO: 249525 - DNA, 484 bp, Glycine max
gtcttgaattcccgggtcgaccgcacgcgtccgacaaaggtgaagctcaggctcaggattggagaggcagaccctccaaccctgccaaacactgtggaatgattcccgctggttgtgttcttgggttgcaagcttttgagataatggcaatagccgcagtggggaacaatctgataacctacgtgacgagtgagatgcacttccctttgtccaaggctgccaacctagtcactaactttgttgggaccatctttctcctcgccctcctcggcggctatctttccgactcttacctcggcagcttctggaccatgctcatctttggtttcggtgaactttccggcttcatattgctttctggccaagctcatggtcctcagttgaagccacccccatgcaatatcaacgaattatgagaacaatgctcataagccaacggcatgaagaccatgatattcttcgtagccctcgacttggtggcatt

SEQ ID NO: 249526 - DNA, 545 bp, Glycine max
  unsure (1)..(545): unsure at all n locations
tgaagtggtnntngggccatccgatcatgctacgactgccgtaccggtccggaattcccgggtcgacccacgcgtccgcttaaaaatgcacaatctgataccaattttatatgtaaatgcagccaaacaatggaggaggatattgaccaactggttacgctggcagagaagttatctgagcttatgagtgaaaatcttggtttggagaaaaactacattaaggaggcattttctggaacaaatggacctgctatgggaacaaaagtggccaagtaccctcaatgtccacaccctgaactggttagaggacttagagaacacacagatgctggtggcatcatcctattgctccaagatgaccaagtgcctggcctagaattcttcaaagatggcaagtgggtggagattccaccctccaagaacaatgccatttttgtgaacacaggtgaccaagtagaagtgttgagcaatggcttttataaaagtgttgtgcacagggtcatgcctgacaaaaacggaagtagactcttcatagccagcttttn

SEQ ID NO: 249527 - DNA, 514 bp, Glycine max
tgcggctgcgtggccagccgactaccgatctgacgtaccggtccggaattcccgggtcgaccgacgcgtccgataaggctttgcatttcatttgagagagagagcgtcttacctttccattatcaaaatgggtgggtcggctatcacaggagcgaggctaaccctagggatagggttggcgatacctctttcctctcccacgcgctctcgaaccgtcgcaatggccgtatccgtcgaccccaagaccgacaacaaactcactcttaccaagtccgaggaagctttcgctgctgccaaggtacgcatgacctccctcttccttccttccttcctcctttcaattttgatttttgatttttgatttcaggagctgatgcctggaggtgtcaactccccagttcgtgccttcaaatccgtgggtggtcaaccaattgtgattgattcagtcaaagggtctcgtatgtgggacatcgacggcaatgagtacattgactacgtcggttcttggggtccc

SEQ ID NO: 249528 - DNA, 516 bp, Glycine max
  unsure (1)..(516): unsure at all n locations
ntaggcgtctgngtgcggctacncgagtttgatnngacgtactggtccggaattcccgggtcgaccgacgcgtccggctcagtgataaaggaggtaggggtgcagagacaaccaggaggtttgcctagaagcagccgcccttgaaagagtgcgtaatagctcactgatcgagcgctcttgcgccgaagatgaacggggctaagcgatctgccgaagctgtgggatgtaaaaaagaatcggtaggggagcgttccgccttagagggaaggacccgcgcgagcagtgctggacgaagcggaagcgagaatgtcggcttgagtaacgcaaacgttggtgagaatccaatgcctcgaaaacccaagggttcctccgcaaggttcgtccacggagggtgagtcagggcctaagatcaggccgaagggcgtagtcgatggacaacaggtgaatattcctgtactaccctttgttggtcccgagggacggaagaggctaggttagccgaaagatggttatcgn

SEQ ID NO: 249529 - DNA, 519 bp, Glycine max
  unsure (1)..(519): unsure at all n locations
tgacggctgnctngtgctagctgatgattgnattngatgtaccggtccggaattcccgggtcgacccacgcgtccgcccacgcgtccggtcagtctcatggagattgaaactagatcccgagcacagacccctgcgtcatctgctgttgcagttaaagcacgtttaaaagatgttagtaatgctttaatgacatccaaagagctacttagaattataaaccgcatgtggggtcatgaagatcgtccttcatctagtatgtctcttatctcagctctgcatactgagctggagagggctcgcctacaggtcaatcaacttatccaggaacagcgctcagatcagaatgagataaattatttgatgaagtgttttgctgaagaaaaggctgcttggaaaaaaaaggaggaagaaattgttgaagctgcaattgaatctgttgctggtgaactcgatgtagagaggaaactcaagagacgattagaaagcttgaacaagaagcttgggagagaacttgctga

SEQ ID NO: 249530 - DNA, 519 bp, Glycine max
  unsure (1)..(519): unsure at all n locations
tgttagctgccgtgtgacgactgccagctnactcatagtactgccgtaccggtccggaattcccgggtcgacccacgcgtccggtcttgatgttgaatacattgatctctattatcagcacagagtggacacatctgtgcctgtagaggaaacagtgggtgaacttaagaaattggtcgaagagggtaaagtcaaatatattggattatctgaagccagcccagatacaataaggagagcacacgcaattcatcccatcacagctgtgcaaatagagtggtctttgtggactcgtgacattgaagaagagatagtccctctctgcagggaacttggtattggaattgtaccatatagtcctcttggtcgtggcttttttggcggcaaaggagttgtggaaaatgtgcctacaaatagctccctgaaagcacatccacgctttcaagccgagaacttagacaagaacaagaatatatatgaacgaattgaaggccttgctaagaagcatcaggccactcc

SEQ ID NO: 249531 - DNA, 515 bp, Glycine max
tgaggttgactgcgaacttcagtcatcgtaggactgacgtaccggtccggaattcccgggtcgacccacgcgtccgaaaatgactcaagcccagattcaaccagttaaacttggaacccaaggctttgaggggtcgaaattgggattcggatgtatgggccttactggagcgtacaatgaccctctccaagaacaggatggcatatctgttatcaagtatgcgttcagtaagggaatcacattttttgatactgcggatgtttatggagccaatgctaatgaacttttggttggaaaggctttgaagcagctgcccagagaaaagattcagatagccacaaaatttggtattgcttcacgaggttttcctgatatgaagatcaagggttcgcctgaatatgtgcgatcatgctgtgaagctagcttgaagcgtcttgatgttgaatacattgatctctattatcagcacagagtggacacatctgtacctatagaggaaacagtgggtgaactta

SEQ ID NO: 249532 - DNA, 517 bp, Glycine max
ggtagtagccttctgacgactgactgcgatcaataggactgacgtaccggtccggaattcccgggtcgacccacgcgtccgcccacgcgtccggattaagccatgcatgtgtaagtctgaactaattcagactgtgagacggcgaatggatcattaaatcagttatagtatgttagatggtatctactactcggataaccgtagtaattctagagctaatacgtgcaacaaaccccgacttctggaaaggatgcatttattatataaaaggtcaacacaggctctgactgtcgctttgatgattcatgatcactcgctggatcgcacagcctttgtgccggcgacgcatcattcaaatttctgccctatcaactttcgatggtaggatagtggcctaccatggtggtgacaggtgacagacaattagggttcgatcacggagagggagcctgagaaactgctaccacatccaacgaaggcagcaggcacgcaaattactcaatcctgacacagtgag

SEQ ID NO: 249533 - DNA, 542 bp, Glycine max
  unsure (1)..(542): unsure at all n locations
gagtatgtgntncttcatcgattgatagactaccgacctgctgtaccggtccggaattcccgggtcgacccacgcgtccgcccacgcgtccgtttctctctcttcaaatcaaaacccatcacaattcacaacaacatgcagatcccaaatcctatcttttctcttctcatataaaagaacccttctttcgaatccttcccgctcttttccctctgatttaattcatgcgcagatccaaaccctaatccatctctccgagctctttgatttttgagttaataaaaaaaaaaaaaattagggtttgatggctgaccaaggattggaagggagccagccggtggatctacagaagcatccttctgggatcgtgcctacccttcaaaatattgtgtccacagtcaatttggactgtaagttggacctcaaaacaattgcacttcaagctcgtaatgcagagtacaatcccaagcgttttgctgctgtcattatgaggataagagatcccaaaacaactgcacttatttctgcttctggcaagatgg

SEQ ID NO: 249534 - DNA, 279 bp, Glycine max
tcttgaattcccgggtcgacccactcgtcctctgactcttgggcttactcttggtaaaaaaaatataaaaataaataaataaaaaaatgaaggaaaaaaaaaaaaaaataataaataataatataaataataaataacataaaaaattataacttatattattattttaatataccatctattcatacttcttttttaaattttatttctttcatttacctttatttattttaatattatcttttctaatattacaacttttctacctaattaactctc

SEQ ID NO: 249535 - DNA, 540 bp, Glycine max
  unsure (1)..(540): unsure at all n locations
tgagtggntggtccttaagacagtcgtagtaccgacgtaccggtccggaattcccgggtcgacccacgcgtccgaaacaatcaacaatagcttgctagctactcctgttgctgtgagaaccgttgatgtagatgctttgcaagcaagatttagagactccaacaataaaagccatgcttaacacctaccatgcctccaaactctcatcaaaccagtgtggttctagccttgtgcaaacaatagatgcacctttacctctcgtatggtccctcataaggcgctttgagtatccacaagggtacaagctctttgtgaagaagtgcaaccttcttgatggggatggtggcattggaagcgtgcgtgaggtcatgatcacatctgggttacccgctggtgttagtgtggagaggttggacaagctcgatgatgacaagcatgtcttgaagtttagcatcattggtggtgatcacaggcttgtcaattatagttcaacgattactttgcatgatgaggaagaggaatacggtgggaagacggtgn

SEQ ID NO: 249536 - DNA, 543 bp, Glycine max
  unsure (1)..(543): unsure at all n locations
gtatgcggtgttatgatgctcagcncagtgacgtacctgccgtaccggtccggaattcccgggtcgacccacgcgtccgctgttttgccggtcctggttcccggttgccggtgatgttaagggcattctgatcatcatgcacgggctcaatgaacacggtggaagatatgcggactttgcaaggctattaacatcatgcaactttggtgtctatgcaatggactggataggtcatggaggcagtgatggattgcatggttatgttccatctcttgatcatgtggttgcagatacgggggctttcctggaaaagattagatcagagaatcctgggataccatgctttctctttggtcactccactgggggagctgtggtcttgaaagcggcttcccatcctcatattgaagtaatggtggaaggaattatattaacctcaccagctttacgtgtgaagccagctcatcctattgttggtgctgtggctccaattttttctctggtagctccaagattcccattcaaaggagcaaacaaaagtgc

SEQ ID NO: 249537 - DNA, 516 bp, Glycine max
  unsure (1)..(516): unsure at all n locations
tgcgtctgagtgccgaccgactgcgacacgatcgnccgtaccggtccggaattcccgggtcgacccacgcgtccgcccacgcgtccgctggagtgtgggatgtatcttggttgagttatgcacgggcggagcttggtttgagactcacgaaaattgggagcatcttgccatgatggaaagggtacttggtccattaccacagcccatgttgaagagagtcgaccgacatgctgagaagtatgttagaaggggtagattggactggcctgacggtgcaacctcaagggagagtatcaaagctgtaatgaagcttcctaggcttcagaaccttgtaatgcagcatgtagatcattcagctggcgatctcatacatctcttgcaggggttacttagatatgacccctctgaaagacttacagccaaggaagctcttagacattccttctttatgagagatcaatttagaagataattcactttctaagctgctgcatcatcgttgaccttcctaagggn

SEQ ID NO: 249538 - DNA, 468 bp, Glycine max
  unsure (1)..(468): unsure at all n locations
cggtccggaattcccgggtcgaccgacgcgtacgcccacgcgtccggcttcgcaaaagttgcaactacttccacagaaagaaaaaaagtttctaggtgaangaaatccagagtgaagaaaaaaaaatggccggtgacggtgcagctacatgcatagacatccttcttgccattattctccctcctcttggtgtctttctcaaatatggttgccaggtggagttctggatttgtttggtgctgaccctttttggttatatacctggaattatctatgctgtctattctatcaccaagtgatcgtcaccctttaacttttgtggacaataaacaaatgtcatgggcgtttctgtctttcaactcagatattactgtttcttcaatctatcgttgtcaatgttgccattttcttttgttctgtttttaaaaacccttctgtttttagcttaagcgagagtggaatgtgtag

SEQ ID NO: 249539 - DNA, 521 bp, Glycine max
  unsure (1)..(521): unsure at all n locations
tgttatgcatgtgagtgatgcctgccgcgtgcctnatcgactgtaccggtccggaattcccgggtcgacccacgcgtccgctgcctcgatcatggagaggaaaacatttgggtttttgttcttgctcctccttgtcttaggttctgatgtgacggtgaagagagcagaggcgaaagattgcttgacaaggaggcacgggttccagggtagatgcttattcgacaggcaatgtgcacatgtgtgcaggagcgatggtttcatcggtggtcagtgccgaggccctcttcgcaaatgcttttgcagcaggccatgttgatcgaaattactactgccaaagaggccatgaaataaacaaacaaacaaataaataaatagctctaaccgacacatatgtacgtagtgtcggggttctagctagctaggtaggtacgtgtgtcttttgtatggccactatacttttgatctcctctgaagttgcacccgatgatgcataccagaattttgacaaaacagatgggaag

SEQ ID NO: 249540 - DNA, 515 bp, Glycine max
ggcgcttctgaggcagcctacaccgattgactgtaccggtccggaattcccgggtcgacccacgcgtccgcccacgcgtccgtccacgcgtacgccttcgtcagcgccaagaagaaggagctggacgggctacgcgccgagatgccggtggcgctggcggagtgcgtcgatccggcgaaattcgtgctggaggcgatctcggaggtgtttccggtcgacaagagaggggagaaggccggccacgacttgggctgggcctgcgtccttgtcctggagtcgttaattccggtcgtcgtcgaccccgtcatcggaaaatcgaggttgttggttacccctaccgtgaaggagcatgccacggagatcgcggagacttggaagagcagcctggaggatcgtggcggcgtggaaaacctgaagacacctgacgtccacactttcttgcagcacgttgttaccttctggattgtcaagaacgatgacttcgatttgtaccggaagcttgttattgcttccgc

SEQ ID NO: 249541 - DNA, 517 bp, Glycine max
  unsure (1)..(517): unsure at all n locations
ggaggagcntatanggatatcagctctcatgcgacctgacgtaccggtccggaattcccgggtcgacccacgcgtccgctttgtagtgcattggaatggaagatcagggtcagcagcagcagcagcagcatcaagtgggggcaaagagtccaaggcaaggcaccgagaggagtgaagcggttcggtcaaggtggactccaaagccagaacaaatcctcatactcgagtccatcttcaacagtggcatggttaaccctccaaaggacgaaaccgtcagaataaggaagcttctcgagaaattcggcgccgtcggcgacgccaacgtcttctactggttccagaaccgccgctccagatcccgccgccgccagcgccagatgatgcaacagcaggctactgccaccgccaccgccaccgtcaccacctttgatcaccctcagcctcagactcagactcttgttaatgttggtggtgcaattccacatgatcaccacaccttgggaaaccttgttgttgn

SEQ ID NO: 249542 - DNA, 520 bp, Glycine max
gtggcatatgaccactgaagacactcatcgcaccgacgtaccggtccggaattcccgggtcgacccacgcgtccgcccacgcgtccgtccacacgtacgaccacgcgtccgaaaacaaagacaaaaagattgaggagaaaaaaactaagtttatgaaaagaaaaaaggaaaggaaagaaaaaacattatacagaagaaaaaatagatcaaactgagaaaaaagaagaagaaagaaatgagaaatagaagagaaagaaaaaataaagaatatgttgaggaaactgagtagcatctcatggatggctgaaactggtacagctggagtagaatgtgttaaagatgcatcaacttcactcctggaggagacagcttgtggttcttttggaagaacattctgtaagtgttgggcatgcaatcctagtcatagagccctattgatgactgtagtgaggtctgtggtgcctatgttgtgtcatttggccaatgtgccaatgggtatgcagctgttgcttccctactg

SEQ ID NO: 249543 - DNA, 514 bp, Glycine max
tgtatgcgtctgagactgttagcccatgatcgacctgctgtaccggtccggaattcccgggtcgacccacgcgtccgatggggtctgcgtccatttgtactactcaggaggttcgtgctgtggggcgtggtcaggcgagctgctgtttacaaggtctcgtccattgcttataaaagtggtgttcctgtgattgctgatggtggcatctcaaactctggtcatattgttaaggctttgtcattgggagcgtcaactgatatgatgggaagcttcttagctggtagtcttgaggctactggggcttatgtgtatcacaatggtcaacgtgtgaaaaagtacacatgaatgggttccctagaagccatgactaatgggagcgatgcaaggcacttgggtgatacagcagagctaaaaattgctcatggagttgtaggagctgctaaagataagggctctgtctagaatttcataccatacaccttgcaagcagacacgcaaggatttcaggatatcg

SEQ ID NO: 249544 - DNA, 547 bp, Glycine max
tgatgtcttatcacgtcagcccagtaccgactgacgtaccggtccggaattcccgggtcgacccacgcgtccgcccacgcgtccgcttcattggaagggtagttataatagatgtggagatctttcttcgctctggtcatataaaggaataatacttttctattaatttccttatctttgtatctctctgttcctttttgctaaactcaaataaataaaactatataaatgtgtaatttgtttcatcaaaaaaaaaaaaaaaaaaaaaaaaaaaaaaaaaaaaaaaaaaaaaaaaaaaaaaaaaaaaaaaaaaaaaaaaataaaaaataaataccatactataatatatttaaaaactaatattaaattcaatagctcatgcttacataacctaattttgtctatataaaaaagtttaaccttttttattttaaccctaatagattatatttttaaaaaccttgtcattctatcaaaaaggcctattcctctaatttaatccacttctatgatctaacacatattgttaatgttcttttaccttatt

SEQ ID NO: 249545 - DNA, 445 bp, Glycine max
  unsure (1)..(445): unsure at all n locations
gtccggaattcccgggtcgaccgacgcgtccgcccacgcgtccgggacccttatctctctctctctctatctctcccgaattattgttcgtgcgggccttttacttagtgttccctgtttccggtattcgctcccttttttctgcattctggttttacttagatctctgtcccgcaccagatctggtgcagggtgagagggttgggttcattaattntgtatcaatcttccttctgagcggtaggcgtggggataccagagtcttttcgggaagcaggagagggttctctccgttttcaatagatctctcactgtcttcttttgagggggaagccggggcctcggcctcggcggctttcaaagcccccaccttcacagccctatcaacaaaaaaccctaaccctatttttttcttcattttctaattcttttttgatcgtcgccg

SEQ ID NO: 249546 - DNA, 543 bp, Glycine max
  unsure (1)..(543): unsure at all n locations
gagagcgtnattatgccatggcacatcgatngacgtaccggtccggaattcccgggtcgacccacgcgtccgcccacgcgtccggttaacaaccaattgattggagcagaaattctttcactagctgaggaagatgtacctcctgaggatctcgtcttccacaagttctacacaaacaaaatgagtttgtcttctaaaccgaagaaaaagaaaaagaagtcagctgatgaggaagcagctgaggagttgtttgatgttgataatggtgaagttgatggtggggatgagagtgacaatgaagagattgagaatctgttggattccactgatccaactttgggaccagacagtgactatgattatgatgatttggatgaagtagccgatgaggaagatgaggacttgattggtgatgttagtgatgcagagattaattcggagatggatatagatataccctctgatattgatgaggaagagactgatgatgctccaattgatgatgacgacgacgacatcattgatattcaggttggagatgtn

SEQ ID NO: 249547 - DNA, 518 bp, Glycine max
tgtatgcatgctgtctgacgactgaccagatccatcgtcgtaccggtccggaattcccgggtcgacccgcgcgtccgcccacgcgtgcgcctggatacaagttatgccttggaatggaagagaattccgaatcagctgggtgtacgaacaaggaagctgtgaagtaatgcaactaggaatctcatggagagttcgatcctggctcaggatgaacgctggcggcatgccttacacatgcaagtcggacgggaagtggcgtttccagtggcggacgggtgagtaacgcgtaagaacctacccttgggaggggaacaacagctggaaacggctgctaataccccgtaggctgaggagcaaaaggaggaatccgcccgaggaggggctcgcgtctgattagctagttggtgaggcaatagcttaccaaggcgatgatcagtagctggtccgagaggatgatcagccacactgggactgagacacggcccagactcctacgggaggcaacagtggggaatttt

SEQ ID NO: 249548 - DNA, 465 bp, Glycine max
  unsure (1)..(465): unsure at all n locations
gtccggaattcccgggtcgaccgacgcgtacgctgtgctattagttcatactaagttctgaaaatgagttccaaggttttgcttgttctacgtatgttcttggccactagacgtctgatctcctctgaggttgcacccgatgatgcatacgagaattttgacaaaatagatgggaagcctagtgcagatggggtagatgaaagcaagtattggcgtggcggctatggtggcggctatggtggtggttatggaggtgggcgtggaggctatggaggtgggcgtggaggctatggagggggacgtggtggatatggcggcggacgaggtggctatggtggcgggcgtagtggctatggcggcaggcgtggtggccggcgtggtggctatggtcctaatgaacataacgaggcttgggttgatgctaaccctcacaactaagaatgcaactntctaaagcttatatat

SEQ ID NO: 249549 - DNA, 526 bp, Glycine max
  unsure (1)..(526): unsure at all n locations
tgagtgagtntgagtgaacttagtcacatgactgnactgnctcgtaccggtccggaattcccgggtcgacccacgcgtccgcccacgcgtccgcccacgcgtccgagaaaacctaagcttagaattagaaacaaagaaaagaggagaggaaagaattgatcgttgaaaatgcagggaggaaagaaagcgggagagtccattaaggaaacagctacaaacattggtgcttctgccaaggctggcatggagaagaccaaggccactgtccaagagaaggcagaaagaatgacagcacgtgatccggtgcaaaaggagttggcaacccaaaagaaagaggcaaagatgaaccaggcggagctggacaagcaggcggcgcgtcagcataacacggcggccaaacagtccgccaccacggctgggcacatgggacatggccaccacaccaccggaaccgggactggaaccgccacgtattccaccaccggggaatatggtcagcccatgggggcccaccagacgtcggcan

SEQ ID NO: 249550 - DNA, 521 bp, Glycine max
  unsure (1)..(521): unsure at all n locations
gttggntnnntgagcctagctgtgattgattgctcgtaccggtccggaattcccgggtcgacccacgcgtccgcaggtatctggatccgaacgaggttgagagccatggcctctacaatcacgaattgtcagtggcagatatgacccacagacgtaggaaccattatcctgaaaatgttagtggagtggatgacacatcatctgagagcagctgattcttgcaagaaaggttttctcaaggtcacgatccgcatgatatggagccttctagacatcttacacctaatggagctcttgcacccctaaatcccaaaggtgcagatagagatggggcacaaaccatcaggatatttgaaagtgacgggccagatacatcatgctgctatcactgctgttagaaagcaatttggaaggcattatcatggaagatggtacactacttggcatacaattcgatgcactgtcttcagggcatttgaatgccgaactgcatatacagctaatgaaccgtactcttgtgt

SEQ ID NO: 249551 - DNA, 511 bp, Glycine max
  unsure (1)..(511): unsure at all n locations
agtagcntctgncgatgtcagcactgatgcaccgctgtccggtccggaattcccgggtcgacccacgcgtccgacaatttctctgagttgttttgtgagataatagcacatagcataacaagggaaggagtattaacaaccgcaaacctgaagagaaaaagagcagcagaagaagaaacaccaacgatgggtgtggattactacaagatcttgcaggttgataggagcgccaaagacgatgacttgaagaaggcttataggaaacttgctatgaaatggcaccctgataagaaccccaacaacaagaaagaagctgaagctaagtttaagcaaatttccgaagcatatgaggtacttagtgatcctcaaaagaaagctatctatgatcaatatggggaagagggtctgaagggtcaagttcctcctcctgatgctggtggtgctggaactggaactactttcttctccacaggagatatgccgggatcgtttcggttcaatccgaggaatg

SEQ ID NO: 249552 - DNA, 518 bp, Glycine max
  unsure (1)..(518): unsure at all n locations
cgaggcgcctntatgcggctgattcgagatcgatggactgacgtaccggtccggaattcccgggtcgacccacgcgtccgcaaatatggagtctctgggtacccaacaattcagtggtttccaaaaggatctctggaaccgaaaaagtatgaaggggcgcgcactgctgattcacttgctgagtttgtaaatacggaaggaggaacaaatgtgaagattgctacagctccttccaatgtagtggtgcttacatctgaaaattttaatgaggttgtcttagatgaaaccaaagatgtcttggttgagttttatgcaccctggtgtggacattgcaaaagtcttgctcctacttacgagaaagttgccacagcatttaaattggaggaagatgtagtaattgcaaatctggatgctgataaatataaggatctggctgaaaagtatgatgtgagtggatttcctaccttgaagttcttcccaaagggcaacaaagctggtgaagagtacggaggtggaag

SEQ ID NO: 249553 - DNA, 537 bp, Glycine max
gagcggttctgtgcctccagtcctcgatggactgacgtaccggtccggaattcccgggtcgacccacgcgtccgcccacgcgtccgattgtgagcaaagaaagatagtgagtgaagtaactgaagagaagggaggatgccgtgcctcaacctgagcaccaacgtgtccctcgaaggcgtcgacacctcttccatcctcgccgaagccacctcctccgtcgccagcataatcggcaaacccgaagcctatgtgatgattgtactgaaaggatcagtacccatagcttttggtgggaatgagcagccagcagcttatggagaattggtttccattggtggtcttaaccctagtgtaaacaaggaacttagtgctgcaattgcttcaattctggaaaccaaattgtcagtgccgaaatcgcggttcttcttgaaattctatgacacccaaggttccaactttggatggaatggatctacattctgaaatccgaattccatgttacattgggtggggtaccctggatggtggatggagtgg

SEQ ID NO: 249554 - DNA, 521 bp, Glycine max
  unsure (1)..(521): unsure at all n locations
gccgggtnnctacgattgaagaggatagtattgctctaccggtctggaattcccgggtcgacccacgcgtccgcccacgcgtccgaggaaatagctagtgagactaatccatcgcacaaacctcaccgattcagtgacctctaagctaattgcttccaatctccgtcaccaaatcacaaaatcagcccaaaacctccgccgccagctcctatccacggcggcggcggcagtgccggaacacgatgggaacaactccaactctttgggaatgacgatgaagggcgttcgaatctccggaagacccctttacctggacgtgcaggcaacatctccggtggacccgcgcgtacttgacgcgatgctccctttctacatctctcgctacggaaaccctcactctcgcacccacttctacggctgggaatccgacgaggccgtggagcacgcgcgcgctcaggtcgcttccctcatcggcgcttcccccaaggagatagtcttcaccttcggcgccaccgagtccc

SEQ ID NO: 249555 - DNA, 518 bp, Glycine max
  unsure (1)..(518): unsure at all n locations
gatgccgttgagtgccgcatcnagtcatagnattgacgtaccggtccggaattcccgggtcgacccacgcgtccgcggacgcgtggggagagaagtagcaagaatccttaatgacatatttgagattcctgatatgcccttgaaggcaagaaaatttgtggtgaaggtgtgtgatgtggtgactcgtagagctgctcgattggcagctgctggtattgttggtatcctgaagaagattggtagggacgggagtggtggcatcacaggtggacggagtagaagtgatatgaaaatgagaagaacagttgtggcaattgaagggggattgtattctaaatatgcattgcttacggagtacttgcgtgaagctctaaatgaaatattgggagaagatattgccaagcacgtaattctaaaggtcaccgaacatggatccggcattggggctgcactgcttgctgcctcttattcatcctaaactgtggatagagggtacacctgctattaaaatatatatg

SEQ ID NO: 249556 - DNA, 463 bp, Glycine max
tcccgggtcgggtcgacccacgcgtccgcccacgcgtccgccgcagtctcttctctctcagaaaccctaatggcagagcgcgggggtggcgaacgtggcggcgaccgtggcggtttcggacgcggcttcggcgggcgagggcgcggaggcgacaggggccgcggccggcgtagaggtccccgccgcgaggaggaggagaagtgggtcccggtgactaagctgggacgcctggtgaaggaaggaagaatccgaagcctggagcagatctacctccactcgctgcccatcaaagagcaccagatcatcgacacgctggtgggccccaccctgaatgacgaggtgatgaagatcacgccggttcagaagcatacccgggccgggcagagaacccgttttaaggccttcgtggtcgtcggcgacaacaacggtcacgtgggtctaggcgtgaagtgcagcaaggaag

SEQ ID NO: 249557 - DNA, 372 bp, Glycine max
aattccctggtcgacccacgcgtccgcggacgcgtgggaaaaaaaaaaaaaaaaatttaaaaaaaaaaaaaaaaaaaaaaaaaaaagaggaaaaattaaaaatcgaaaccgtccttctatagaatccatacttacatacacatcctataaaaattaatacctttcatttaaatatcccctaaattaatttaattgcccttctttttacacctttgtttctgtcaaacccctttcttttcccattttaatccccttctttaacatccccttttccccaattgccttattatctataagtcccctccctttcccccttcccaccattttctcatcctgattgttaaataaaacccccctttttactgcccttta

SEQ ID NO: 249558 - DNA, 520 bp, Glycine max
  unsure (1)..(520): unsure at all n locations
gtatgtgctgcttgcgtgtcgatgcacagtaagncngactgtctgtaccggtccggaattcccgggtcgacccacgcgtccggttttcattatcttcttctgatgcgaaagtgaagactgaagagaagataagacaatgctagcgctactccagaactgctccatgcccctcgcacgtgcggtgcggtctccacctcgcacgcacgtgcgaccttgtttcacggccgtggcctacgcatccatttcctcacgtgctaactcccagtctcaggttctcctcggcttgtccgagaaggagctgcaacaactcgcccttgacctcaatcaggaaacctataggggcaaacaacttcatcattttttataccagaggaagctcagagaaattcaggatttcactcaattgcctcagggatttaggaatactcttgaggaaactggatggaaggtgggccggtctcctattttaaaactgtaactgcagctgatggaactgttaagtngttgttgaagtggaggn

SEQ ID NO: 249559 - DNA, 318 bp, Glycine max
gttcggaattcccggctcgacccacgcgtccgctttcttctattttctgccgaggaaaataaagaaagaaaagaaaaaacagcgccctagattggctcttctttgcttcggaagaaagagaaaaacatataacaatggcgttcgcttcttacctcggcatagttctattcgcttccgtcttcatactctctgctaaccaagaatttaacgaatttggagttgatggtggacctgcagcaaagcactcagacctaattttgatgcctgtacacaatgagtgcattcttaagttggctgtcaacttcttgagattgagct

SEQ ID NO: 249560 - DNA, 518 bp, Glycine max
  unsure (1)..(518): unsure at all n locations
gggatgtgccttttgacaactgaatgcattctcatcgctactgccggtaccggtccggaattcccgggtcgacccacgcgtccggtcttggaacgcggctgggacgttgcttgcaacttgtagtagagataagtctgtttggatatgggaagtgctgcctgggaatgagtttgagtgtgtgtcagtgctgcaaggacactcgcaggatgtgaaaatggtgaagtggcatcccacagaggatatcttgttttcatgtagctacgataatagtgttaaggtttgggcggatgaaggtgatagtgatgattggcagtgtgttcaaacgcttggggaacccaataacggtcatacttccactgtttgggccctctccttcaatgtgagtggtgacaaaatggttacgtgtagtgatgatcttacactgaaggtatgggaaacagaaagtgtaaggacgcaatctggtggtggatttgcaccttggacacatctttgcactctttcanggtatcatgatcgga

SEQ ID NO: 249561 - DNA, 496 bp, Glycine max
  unsure (1)..(496): unsure at all n locations
gatcgactgcatactgtcggncagtaccggtccggaattcccgggtcgacccacgcgtccggcagggcagaggagaaggccttgtgattcatcatgacgaatgaacccaacaacaagtgacgaggtttttctgtgtttagttggcccagatacccgctacaccttcgctggtaatctctataatgctttgcgccgcaacagaatcaatacctttttcacagaagataatcatcatgatgagctactactcatgaatggcgaccaaatttcaccctttgctctaagagcaattaaagaatcaaacttgttaattgttgttctctctccaaactacgcatcatccccaaggaatcttgatgaatttgtggccatcgttcggtgtataaagaggaagaagcaactgctgcttcccgtcttttacaaagtggaacgaggggaaataatggatgcaatatttagtggacctgatcaacaagcgctctgtgtattcgaagaa

SEQ ID NO: 249562 - DNA, 522 bp, Glycine max
  unsure (1)..(522): unsure at all n locations
cgtaatgccgttgggtgtcgattgaaatcanagcgattgctgtaccggtccggaattcccgggtcgacccacgcgtccggcttatcttgatttgtcccataattctcttcatagtgaaataccttcttcattggcagatttgacccaattagagttcctaatcatctctcacaacaacattcaaggctcaattcctgagttgttgtttctaaaaaatctcactgtcttagatttgtccaataattcacttgatggtgagatacctcgtccggcaaatcttatccaattacagagcctaatcctttctaacaacaaatttcaaggtcccattcctcgtgagttgtttctaaaaaatctcattgtcttagatttgtcctataattcacttgatggtgagatacctcgttcgacaaatcttaccccattacaaagcctaatcctttctaacaacaaatttcaaggccccattcctcttgagtttgttgtttctaaaaaatctcactgtcttagatttgtcctatn

SEQ ID NO: 249563 - DNA, 517 bp, Glycine max
ggtagggtcgggtgccttgtcgctggactgcatacaatcgtacttcggtaccggtccggaattcccgggtcgacccacgcgtccgcgaaaaaaataatggcaaggaaggtgggtttgaattttatagggtgctccatcgttggaatggttttcataattggtgtggctgaagcaacagattatatcgttggtgaaggcttcggatggagcgttccctccaatgagagcttttatacagactgggctagcaccaagagattcttcgttggtgacaatctcattttcaacatcagcggagagcattcggtgggaattagaacagaggctacttattatgagaattgcaacaccagcttattaactggtttcacgttcataggcgtcaatgggagtaattcgatgtttcgacataatattattcctccaactgggcctcgctatttcctctgcaccgttggaaatcactgtgaaagaggccagaagtttagtattcagcgttgagtctcatcctgattcg

SEQ ID NO: 249564 - DNA, 521 bp, Glycine max
  unsure (1)..(521): unsure at all n locations
cggatgtgcctattgacgtcaggactgcantgctantcgtactgtcggtaccggtccggaattcccgggtcgacccacgcgtccgcccacgcgtccgcggtggtctgccttgtcgttttctctgaaactcaagaaccgggttgttttatgaataaaatataggtattttttttgtgtgtgtggtggttttttggtttggtttgaaggagagagaaataaaaatgaagtttatgaagttgggttcgaagcctgatgctcttcaaagtgatgaaaaatctatcaggtatatatcatctgaattggttacagatattatcataactgttggtgaagttaagtttcacctgcacaagttccctctactgtccaagagtaatcgtttacaaaagttgctgtcaaaggctattgaagagaatgctgattaaattcaattggatgattttcctggtggtccaaaggtttttgaaatttgtgcaaagttttgtttatgaaagactgatacttttaaggtttacaatgtg

SEQ ID NO: 249565 - DNA, 462 bp, Glycine max
taccggttccggaattcccggcgtcgacccacgcgtctcgctaagtctcctcttcatatgcggtagcaaatgttgtacaaaacggcccttgctaggggtggcacaggtatggctggtcttggcagaactaaagtttcccttccttctcaattttcctcagctttcagctttcttagaaaattcgccatttgcttgagttcttccactatgacaaatggtgtcatgttctttggtgatggcccttataattttggttatttgaactctgatctctccaaggttctcactttcacgcctctcattacaaatcctgttagcactgctccaagttatttccaaggggaaccctcagtagaatacttcattggggtgaaatccattagagtctctgacaaaaatgtaccattgaacacaacccttttgtctatagatagaaatggcattggtgggactaagattagt

SEQ ID NO: 249566 - DNA, 475 bp, Glycine max
gaattcccgggtcgacccacgcgtccgaaaaaataatggcaaggaaggtgggtttgaattttatagggtgctccatcgttgcagggggtttcataattggtgtggctgaagcaacagattatatcgttggtgaaggcttcggatggagcgttccctccaatgagagcttttatacagactgggctagcaccaagagattcttcgttggtgacaatctcattttcaacatcagcggagagcattcggtgggaattagaacagaggctacttattatgagaattgcaacaccagcttattaactggtttcacgttcataggcgtcaatgggagtaattcgatgtttcgacataatattattcctccaactgggccttgctatttcctctgcaccgttggaaatcactgtgaaagatgccagaagtttagtatcagcgttgagtctcatcctgattccgctgctcctactacactgtc

SEQ ID NO: 249567 - DNA, 481 bp, Glycine max
aattcccgggtcgacccacgcgtccgcccacgcgtccgcccacgcgtccgctcagatctttctctcactctccaacaatcgggaggcaaaaccctaccaacaccacactcaatcgaaattcttcattctcttctcatcgatggggcagaagtctctgatctacacgttcgtgtcgcggggaacagtgattctcgcggagtacaccgaattcagcggaaacttcaactccaacgccttccagtgccttcagaagctccctgccaccaacaacaagttcacctacaattgcgcacacaccttcaattacctcgtcgacaatggctacagttgggagtgtgataaagagtccagaaatatctggtcttgtccctactctacttaaggaactttgtcatcctaatgagcatacaaaatattcctttaatattcttcatcaagcttttaataatgttttcagttgtggtatcacttgctaaacaat

SEQ ID NO: 249568 - DNA, 508 bp, Glycine max
  unsure (1)..(508): unsure at all n locations
ggcgttcctgtgtcgctgcatgcatncgatcgncagtaccggtccggaattcccgggtcgacccacgcgtccgcccacgcgtccgctggaatcataattaataatccaacttattttgtctcattactatggttgctctagatggaagctaaaactaagtcatgcgtagttctaccttttcttctattggttgcaattttcatgcaacaatgtgtccatggagaatcgcaagtgccctgcctttttgtctttggggactctctgtctgataacggaaataataacaaccttgcaagcactacaaagtccaattacaaaccatatggcatcgacttcccaaccggcccaacaggacgatttacgaatggacaaacatctattgacctaattgctcaactactgggatttgagaatttcatcccaccctttgcaaacactagtggctcagacacacttaaaggtgtgaactatgcatttcgagcagctgggattctaccagagagtggtc

SEQ ID NO: 249569 - DNA, 519 bp, Glycine max
  unsure (1)..(519): unsure at all n locations
tgagtgcctatgngtgttgccagctcgcacacgattgccgtaccggtccggaattcccgggtcgacccacgcgtccgcccacgcgtccgcccacgcgtccgctctcactcagattcagcaattttctattttctgctctcatggcttcagattccaaaaaggatttccctgctgatgacaaagctggaacagcagagaataaagcatccaaagatgaaacgtcatctaaagattctccagcagcacaaagagctactacagctacttctggacctgcaactggttttccaggcaacccttttgatttctctgcaatgtctggcctgctcaatgatccaagtatcaaggaattggctgaacagatagcaaaagatccatcattcaaccagatggctgagcagcttcagaaaacttttcaaggagctccacaggatgctatgcctagctttgataatcaacaatatttttcaaccatgcaacangttatgcagaatcctaattttatgaccatggctgaac

SEQ ID NO: 249570 - DNA, 517 bp, Glycine max
gttaggcgtatctatgcccactgctatcatgccctccgtaactgccggtaccggtccggaattcccgggtcgacccacgcgtccgcccacgcgtccgcccacgcgtccgggaaaagaaggagatgcaactccttttacagatgttactgtggacaatatcagtaaagctctacacaaatgtgggtaccaaatgcgtggttttgagactatgtacaatggtcatacagggagacgtctaagtgcaatgattttccttggccctacatattaccaaagactgaagcatatggttgacgacaagatccattctcgtggaaggggtcctgtgcagatcctcactaggcaacctgctgagggacgctcacgagatggaggtctccgatttggagagatggaacgagattgcatgatagctcatggagctgctcacttcttaaaggaaaggttgtttgatcaaagtgatgcatacagggtccatgtatgtgagcgttgtgggttgatagctatcgcaaatcta

SEQ ID NO: 249571 - DNA, 510 bp, Glycine max
  unsure (1)..(510): unsure at all n locations
tactcggttccggaattcgccgggtgcgacgccacgtcgtcacgcaccacgccgtcacgacagaaaccgtattgaatttatcgtctcgtttcccgcggtcctaagatcgtgagcgagtttgcgaaacccctaactggctctcacacaacgacatcacgcactctctctcgatcaactactctctttncgtcgctcctaagtcatggacacgaattgcaccccgagggatcacagntttgatgcatcgtcaatatgcataccacagatgacatgagctgcttactgtccgatggtcaggatttcgttcacatcactagatgatggtttatgactaggttatgatgcatatgggcttgcaagtataatcgttctgagaggctattgatgcatataggttgtcgacaagccatcagcttattcagcagaggggaatagttccattctgcaagggacttgacgttatacaacaggcccagtctggaactgggaaaacagcaactttctgctctg

SEQ ID NO: 249572 - DNA, 531 bp, Glycine max
gtagagatgtccttttgactacggtacgtatcgctatgtcacttcggtactcggtccggaattcccgggtcgacccacgcgtcctaaaaaaaaaaaaaaaaaaaaatttaaattaaaaaaaaaaaaaaaaaaataaaaagaagggataaaaaaaaaaaaaaaaaaaaaaaaaaaaaaaaaaaaaacaaaaataaaaaaaaaaaaggggttgtcattttaaaggtccaaattttacttactattgcttgtcaataaataaattttttttaggttcatctaaatctaattaatggacctaattttaaaaacagtttaaattgttaaaaaccttggtcttaccaaatttaatagttttaaagaaaatcctttttttacaagttgggataaattcaaaaagcccattactaatcgccttttcaaaaattttttaatcttttaattttaaatgtaacccccccttttataatgcaataaaaattctaaacttttttaatatcattcaatattcccatttaattttaaagcctttaa

SEQ ID NO: 249573 - DNA, 536 bp, Glycine max
  unsure (1)..(536): unsure at all n locations
gtagtggnnnntaataacggtcagcngcgctcagtactgcctgtaccggtccggaattcccgggtcgacccacgcgtccgcccacgcgtccgttcgtttcttttcgtgaatcaaacgaaaacacaagattacgttctgggatgtcgggcatggagaggcttcacaggatgttcgcgggtgcaggtggagcgctgggccatcccccaccggattcccccaccctcgattcctccgagcaggtctacatctcctccctcgcccttctcaaaatgctcaaacacggaagagctgtggtacccatggaagtgatgggtctgatgttgggagagttcgcggatgagtacaccgttcgcgttgtggatgtgttcgcgatgcctcagagtgggaccggtgtcagcgttgaagctgttgatcatgtttttcagactaatatgctcgatatgatgtagcaaactggaaggcccgagattgttgtggagtggtatcactcgcactctggattagggcgttgccttctcgactggacattaataccc

SEQ ID NO: 249574 - DNA, 492 bp, Glycine max
tcggtctctgaattcccgggtcgacccacgcgtccgcacagtaacaatcaatcaaggttttctttttcaaggcatgaggaatccataatccatagtgttttattcacatgcatgttatggtgtcagcctttaactaccatatctaacagtcttcctcaattgtgcataaagagacttgtatattgatttgtatgtcatttcatatttattttataccattgtcttttaggatgcgttatataaatttagtgttctcaacatgttactttttctgaattttttcgttcattttatttgtttctttttttaactttcttgtttttttttttatgtttattttttttacctttatttattattcttattatagataatctcttttttctttttttttttatattacttatttttcttataattttttatattttatttattttatttttttcatttttacttatttttttttcactttttatctatttctttttt

SEQ ID NO: 249575 - DNA, 178 bp, Glycine max
gtccgaattcccgggtcgacccacgcgtccgcccacgcgtccggtgagaagagcagtctcaaacagcaacagaacaaggtccttcacggattggtcattcttgtctgcatcagcacgcttcctgagctcctccatgattgggttctcacggttgatctccaaggtctttttgcttgac

SEQ ID NO: 249576 - DNA, 514 bp, Glycine max
  unsure (1)..(514): unsure at all n locations
ggtgatgcntgctgaacctacngaattcgcatngtagtccggtttcggaattcccgggtcgacccacgcgtccgggagtgagtctcggggcatcaaagaagtcagatgggagacgtggcagataaattggcgtatgtacaagcgattaccggtttagaagatccggaactatgtacagaaatcctggctgaccacaattgtgacctgaaactcgatatgtctacttttacctctaccttaaactctaacaaccatccaccgactcctgctctggcttggaaactcattaccctactcgtttccgtaatctacgccagtataggcttaagtttcggcgctatcggcttgggcctatgggccgcggtatgcgtcctctcctattccctcggcctcgtgggcctgggctcgcccttgggctcattggtttccgtaacggacgccgctttcgacgcgatggatttcgtggccgatttcgagagggactacggcttcggttggcccaatttcgtgcgcc

SEQ ID NO: 249577 - DNA, 516 bp, Glycine max
  unsure (1)..(516): unsure at all n locations
tgttttaggcgtntcggtgacgccaacgcgtacncgcatcgtgtaccggtccggaattcccgggtcgacccacgcgtccggtgctttggttgtagttcccacccgcgaccttgctttgcaggttaagcgcgtcttcggcgcgcttgcatcgccgctgggtctccgtattggcttggctgctggtcaatcttcgcttcgccacgagctttctagcctcatttatctacctggagaagacgatggtccagatcctgggtttttgtctccgttgtggttccaaagcaaggtcgacatattggtagcgacccctggaaggctagtggaccatgtcaacaagttgtcattgaagcatcttcgttatctcgtggttgacgaagcagatcgattgctacgtgaggactaccagtcctggttacctactgtgcttaaattaactcagtctaggctggcaaagatagttttatctgctacgttaactcgggacccaggaagacttgctcaacttaatttgcatan

SEQ ID NO: 249578 - DNA, 224 bp, Glycine max
  unsure (1)..(224): unsure at all n locations
tactcggtccggattcccgggtcgacaacgcgtccgcttanaacacactgcatgtctggcatatttctgttggtggaatgctatcggccgttcaattgcacaatccataggagtttgctatggagtgattggtgataatctaccatcaaggcaagaagttgtggacttatataaaacaaatggcattggtagaatgcgtatatactacccacatgaagaagcac

SEQ ID NO: 249579 - DNA, 521 bp, Glycine max
cgagtggcctaatgacgaactgccagcgcccgctacgtactgccggtaccggtccggaattcccgggtcgacccacgcgtccgcccacgcgtccgcccacgcgtccgcacacacacagctagcagatattacatacgcgtgaatcactaattaagccatggagaagaaatcaatagctgggttgtgcttcctcttccttgttctctttgttgctcaagaagttgtggtgcaaactgaggcaaagacttgcgagaacctggctgatacatacaggggtccatgcttcaccactggcagctgcgatgatcactgcaagaacaaagagcacttgctcagaggcagatgcagggacgattttcgctgttggtgcaccaaaaactgttaaatggatccattcactccaacgtgaagaagatgcatgcagcgctattttataaaaaataaaactactatatactatatataataagactggcgctgcatcaatgacctatgtattatagtatatattattaccgatg

SEQ ID NO: 249580 - DNA, 507 bp, Glycine max
  unsure (1)..(507): unsure at all n locations
cgtatggcctgttgtgctgaacgtagcgtacgtactgctgtaccggtccggaattcccgggtcgacccacgcgtccggaaattgtggccgttcaaggtgattcctggccctgctgagaaacctatgattgtggggaactacaagggggaggagaaacagttttccgcggaagagatatcctccatggttcttatgaagatgaaggagattgcggaggcgtatctaggttccaccataaagaatgcggttgtcactgtgcctgcttacttcaacgactcacaacgtcaagccaccaaggacgctggtgtcatttctgggctcaacgtgatgcgaattatcaacgagcctacccgggctgccattgcttatgggctcgacaaaaagccactagctctgggaagaagatgttctcatttttgatctcggggtgggaactttgatgtctctcttctcacaatcnagaaggtatttttcaagtgaaagccacttgtggtgatcctaactggg

SEQ ID NO: 249581 - DNA, 514 bp, Glycine max
  unsure (1)..(514): unsure at all n locations
cgtatggcctgtgccggcagtaagcantcatcgtactgcagtaccggttcggaattcccgggtcgacccacgcgtccgaccgtagtaattctagagctaatacgtgcaacaaaccccgacttctggaagggatggagtttattagataaaaggtcaacacaggctctgcctgttgctttgatgattcatgataactcgtcggatcgcacggcctttgtgccggcgacgcatcattcaaatttctgccctatcaactttcgatggtaggatagtggcctaccatggtggtgacgggtgacggagaattagggttcgattccggagagggagcctgagaaacggctaccacattcaaggaaggcagcaggcgcgcaaattacccaatcctgacacggggaggtagtgacaataaataacaataccgggctcattgagtctggtaattggaatgagtacaatctaaatcccttaacgaggatccattggacggcaaatcttgtgccagcaaccccgg

SEQ ID NO: 249582 - DNA, 531 bp, Glycine max
gtggtgtgactgcggtcagcacacctacgtactgccgtaccggtccggaattcccgggtcgacccacgcgtccgggagttggagagcatttgtaaccccatcatagcaaagatgtaccaaggagctggtggtggtgcgggtggagccatggatgaggatggtcctgctgctggcagtggaagcggtgctggacccaaaattgaggaagtcgattaagcagaccaattgtcatgggttgttcttgattttgcgaagacccttttgaagtttagataataacctgtcttgtcattatgttttggatttggattttacttttctcgtttttttaatgtacttttccccgtttcaacttaacaatgatataagttgcatatggtctaaaaaaaaaaaaaaaaagggcggccgctctagaggatccaagcttacgtacgcgtgcatgcgacgtcatagctcttctatagtgtcacctaaattcaattcactggccgtcgttttacaacgtcgtgactgggaaaaccctggcgttag

SEQ ID NO: 249583 - DNA, 531 bp, Glycine max
gatgcgctgtctgaccgctagcgtctgactgtacgtcgtaccggtccggaattcccgggtcgacccacgcgtccgcccacgcgtccgcccacgcgtccggtggaagtggaaatggcaactctactggaaccacggctgggggtggtatcatagttgttggatcattagaacatcctttgtcaagtttgtctattcaaggttatgtaaaagctaatggaggaaattttgaaccgcaaatcagaaacgaaaaatttgcaatatttgacaattttactggaggtcccgggggtggatctggtggcactatactaatgtttctacatatgctcaccattgggaaatcagctgttctttctagtatggggggatatagcagttctaatggaagtggtggtggaggtggtggaagaattcatattcattggttcgacatttccactggtgatgtttatctgccaattgctagtgtgaatggagacatttagatctggggaggaaagggtaagggccattgtggctctggagcaaatg

SEQ ID NO: 249584 - DNA, 535 bp, Glycine max
  unsure (1)..(535): unsure at all n locations
ctgtagtgatattactttcgttagcnatctactgcactgacgtaccggtccggaattcccgggtcgacccacgcgtccggaattttgacaaaatagatgggaagcctagtgcagatggggtagatgaaagcaagtatgggcgtggcggctatggtggcggctatggtggtggttatggaggtgggcgtggaggctatggaggtgggcgtggaggctatggagggggacgtggtggatatggcggcggacgaggtggctatggtggcgggcgtggtggctatggcggcgggcgtggtggcggtcgtggtggctatggtcctaatgaacataacgaggctggggttgatgctaaccctcacaactaagaaggcaactttctaaagcttatatatgggtttaagttatcgcaataaataaaacttcatgagaaggttagttgtaatagaagtggaaaactttgtaaaggaataatacctttcatgaatttccttataaaaaaaattattataattttaattaaaaataaatggcggcc

SEQ ID NO: 249585 - DNA, 520 bp, Glycine max
  unsure (1)..(520): unsure at all n locations
gtcctaggcgtatgnctgtcgctgaactgcatncgatngtcagtaccggtccggaattcccgggtcgacccacgcgtccgcccacgcgtccggaaacttaatgaagctgaaaaggcgaagaaagaactagaacagcaggaagtggtttgatccaaagttggctgatgatgagagagaaaaaggaaatgaattcttcaagcagcagaagtatcctgatgctgtgaagcattacacagagtctatacgaagaaatccaaaagatcctagggcttatagtaacagagcagcatgctacactaaattgggggcaatgcctgaagggttaaaggatgcagagaagtgcattgaacttgatccaacctttgtaaagggttatacccggaaaggtgcagtccagtatttcatgaaggaatacgacaaggctttggagacatatagggaggggttgaaatatgactctaacaaccaggagttgcttgaaggcatcagaacatgcatacaacanattaacaaggctagc

SEQ ID NO: 249586 - DNA, 515 bp, Glycine max
  unsure (1)..(515): unsure at all n locations
gatgatgcatgcgtgatcctacgtgatancgtctgctgtaccggtccggaattcccgggtcgacccacgcgtccgtctcaatcgttttctacataatacaaacctctctaatttttgaagcttattataccgaatctcgatatgcagatcttcgtgaaaaccctaactggcaagacgatcaccttggaggtggagtcctctgacaccatcgacaacgtgaaggccaaaatccaagacaaggagggcattcctccggatcaacagcgtttaatcttcgccggaaaacagctcgaagacggcagaaccctcgccgactacaacatccaaaaggagtccacgctccacctcgtcctccgcctccgcggcggcatgcaaatcttcgtcaaaacccttactggcaaaacaatcacgctagaggtggagtcctccgacacaatcgataacgtgaaagccaagattcaagataaggaagggattcctccggatcaacaacgtttgatcttcgccgggaaaca

SEQ ID NO: 249587 - DNA, 510 bp, Glycine max
tggccttgtctgactctgactgcatacgatggccgtactggtccggaattcccgggtcgacccacgcgtccgcccacgcgtccggcacctttctcttcctccgatggctaatctctcactcttgttcttggggggcctcctattctccgctgccgtagccaccgtcgaacgaatcgacgatgaagacaaccttctgatccgtcaagtggtgccggacgcggaggaccaccacctgctcaacgcggagcaccacttctccgacttcaagacaaagttcgccaagacctacaccacgcaggaggagcacgaccaccgtttccgtatcttcaagaacaacttgctccgcgccaagtcgcaccagaaattggacccctgcgccgtccacggcgtcaccaggttctccgatctcactccgtctgagtttcgcgggcagttcctcggcctgaagccgctccgtcttcccttcgacgctcataatgctccgatccttccgaccagcgacccttctag

SEQ ID NO: 249588 - DNA, 521 bp, Glycine max
  unsure (1)..(521): unsure at all n locations
agtgccttgatgtttcatcagcantcgattgcagtaccggttcggaattcccggctcgacccacgcgtccgaaaaaaaaaaacaaaaaaaataaaaatttaaaaaaaaaaataaaaaaaaaaaaaaacgggaaaggaaaataaaaaaaaataatgaaaaaacaaaaaataaaaaaaaaaaaaaaataaaaagggggacccttttaaagaacccaaactaccgcaccctcgcttacaacaaaaaacttttttattaggtacacttaaattaaattaattggcccaattttaaaaaccacaaaatgggaaaaacctcggagaaacccattttaatgcttctaggccaaatacccttttatccattgggcataatttcaaaaaggcccaacccttttacatttccaaacatttgcccagcctaaatgcaaatttgttcccccccttatatttgcactttaaactctcacacatttggtggtacccccccaaattttccattcaaattttaaattcccataattc

SEQ ID NO: 249589 - DNA, 506 bp, Glycine max
gtaggccttgcgctgaacgaaaccctccgtactgcggtaccggtccggaattcccgggtcgacccacgcgtccgctcgcccttctcaaaatgctcaaacacggaagagctggggtacccatggaagtgatgggtctgatgttgggggagttcgtggatgagtacaccgttcgcgttgtggatgtgtttgcgatgcctcagagtgggaccggtgttagcgttgaagctgttgatcatgtttttcagactaatatgcttgatatgttgaagcaaactggaaggccggagatggttgtggggtggtatcactcgcatcctggatttgggtgttggctttctggagtggacattaatacgcaacagagttttgaggctttaaatcaacgggcagtggctgtggtggtggaccccattcagagtgtgaaaggcaaagtggtaattgatgctttccggctgattaatccacaaactatgatgctaggtcaggaaccacgacagacaacttcc

SEQ ID NO: 249590 - DNA, 531 bp, Glycine max
tggagatgtggccgattgaccgcctgaatgctaactgcatcgtaactgtcggtaccggtccggaattcccgggtcgacccacgcgttcgcccacgcgttcgctttggtttgctcaaccgatctccgcagcaatggtgaacgtggcggagacaaagaagacctactgcaagagcaaggagtgcaggaagcacacgctccacaaggtcacccaatacaagaagggcaaggacagcatcgccgctcagggaaaacgccgttatgaccgcaaacagtccggttacggtggccagaccaagcccgttttccacaaaaaggcgaaaaccaccaagaaaattgtgttgaggctccagtgccaaggatgcaagcatgtctcgcagcacgctatcaagaggtgcaagcactttgagatcggtggtgacaagaagggaaaaggaacatctctcttctagatggaatattagaatttgcaatttcacacactctgtgtacttttctcagtttgattgccatcttcggctttttaattattga

SEQ ID NO: 249591 - DNA, 418 bp, Glycine max
accgggctctgaattcccggatcgacccacgcgtccgatttcgatcatctctagctattagaatatccccacttaacatggatcagttaacactaggatttacatttttactaacacttcatctgttagtatcaggtgtagtagcaacaacatcgttcacactggttgacaaatgctactacacagtgtggccagtcattctctcaaacgcacgaatcgccacgcttacaacaacaggtttcgttcttcaaaccggagagtccaaaaccgtgaccgctccaacctcttggggtggccgtatctggggccgaacactctgcacgcatgactccgactgaaaattctcttgcctcagcggcgattgcagctccggcaagctcgaatgcaccggaaacgccgtcacgccgactgctacctt

SEQ ID NO: 249592 - DNA, 514 bp, Glycine max
  unsure (1)..(514): unsure at all n locations
gtttaggcgtatgggtgtcgatggaagtacncgattgttgtaccggttcggaattcccgggtcgacccacgcgtccgatttcttgcagttgaagccttattatacagatgcctgcaatcgacttccaccatctgctcaggagtacccaattctgggtcttaacctgttgagattacttgtgcagaataggattgctgaattccatactgagttggaattgctttcatctgctgctcttgagaatccttgcattaagcatgctgtggagttggaacaatcttttatggaaggggcttacaatcgtgtctagagtgcacgacagacagtgccacatgatacatacgtttattttatggatcttttggcacagactgtcagagatgaaatatctggttgcagcgagaaggcctatgactatgtttcaattaaggatgctaagcaaatgttgctgatctcctctgaccaggaactacttgaatgtattaaagaggagcatgctgagtgggagattaan

SEQ ID NO: 249593 - DNA, 476 bp, Glycine max
taccggtctcggatattcccgggtgcgacgccacgcgtctcgcccacgccgtccgggggagatgtagtttgaagaacctggaggatgatgagggacgaagtagggagatgaggacgaagatgaggacgaagaggatgacgaggacgaagacgatgaagaggaggatgacactaagactaaaaagaagaagagtggtaaggcacaggctggtgatggtgatggtgagcgacctccagagtgcaagcagcagtaattgtttgtttcttcggagtatcatgtggctgatgggtgtttttgaggtcctatggtgcctgacgggaaagtgggtttcaatttcatgcaatttttcatagtccttgattcattttcctccctagatccgatagtctgaatttattgagtcaatttctcctttttcccatattttgggagaatgtggttatatatttgtagtcagggatgctgtgatttgttac

SEQ ID NO: 249594 - DNA, 518 bp, Glycine max
agaagtggcctatgccccctcgaactgcatgcactcagtactgccggtaccggtccggaattcccgggtcgacccacgcgtccgcccacgcgtccgcccacgcgtccgggaaggtcctgttactggaagggcagctgatgtgattgctgctgctaatactgctgctgaggtggccttgaggcttgtcaggccgggaaagaagaacaaggatgtaagtgatgcaattcaaaaggttgctgctgcctatgactgtaaaattgttgagggtgttcttagccaccaaatgaagcagtttgttattgatgggaataaagttgtgcttagtttgtctaatccagacacaagggttgacgaagcagagtttgaggagaacgaagtttatgcaattgatatagtaacaagcactggggatggcaagcctaagctgttggatgagaagcagacaactatttataagagggctgttgacaagagttatcacttgaagatgaaagcgtctaggttcattttcagtgaaa

SEQ ID NO: 249595 - DNA, 523 bp, Glycine max
gggtgtggcctatgccctactgcacgtagctgcatctgtaacctgtggtaccggtccggaattcccgggtcgacccacgcgtccggacagaatcatcaagcagcgtgaagaggaaagaaggaacaacaaggaaatcgggggaacgcgtcagtttaaggatatacttgatgttttgttggacataggcgaagatgacagttctgaaatcaaattaaccaaagagaacattaaggccttcatcatggatatatttgttgccgggactgacacgtcagctgcaaccatggaatgggctatggcagagttaatcaacaatccatgtgtgttggagaaggcaaggcaagagatagatgcagtggttggaaatagtagaataatagaagaatcagacattgtcaaccttccttacctacaagccattgttagagaaacacttaggattcacccaggtggtccattgattgttagagagtcatcaaaaagtgttgtggtttgtgggtatgaaattccagccaagacccag

SEQ ID NO: 249596 - DNA, 435 bp, Glycine max
cgggccgacccacgcgtccgatagaatcccattccactagaacactgctttggtgacccaaccagctagccacatcgacgcatccacacgcatttcctctaccaccgacaccgctccctgtcactgaaggaggaggatcgtcgcgactacctcgcctgcgcacactccactggatcttgatggcaaccacatcgtgcccctcaccatatgcatgatcgacaccggcggcttcataggctcccacctatctcagaagctaatggccgatacgcaccacacacgtctcgctgttgacgactactgctacaagatccgtcaccttgtcgaccccgagccgccgtacctttccaggcgcatctcattccaccgccttaacataaaaaacgactccaggctaaaggtgctcattaatattgccgatctgaccataaacct

SEQ ID NO: 249597 - DNA, 534 bp, Glycine max
tgtgcgatgactgacggctagcccactacgtactgccgtaccggtccggaattcccgggtcgacccacgcgtccgctcacgcgtacggttaagacatggcctagtacattgattgggtcattaaaaacaacactgctgtgtctgccatatatgagcttgcaggtatgctatcgcacattacagcagcgcagtacataggaatgtgctatggaatgatgggtgataatctaccatcaaggcatggaagctgcatacttatataaaacacaaggcattgttggaatgcgtatatactacacagttgaggaatcactagaagtgcttagaggttaaagcattgtactgattatggacatgtataatgtaacacttcagtcatagacagacttgaatgcttgtacagactgcgtcattcaatatgggacaccttactcgcgagacgccaatttcaagttcatcgatgttggtaatgaaattcatacgagtaccactgtggcacaatatattctatgtgatatgacgaacagctataaa

SEQ ID NO: 249598 - DNA, 340 bp, Glycine max
gaattcccgggccgacccacgcgtccgctcacgcgtccgtttaagacggggattcgtacaacgatacatgcaatgctaacagggcgggattatctgccacatatgatgctagaggtaagcccactgtcatgccatggccacaaatgaccttgactttgactgggaatgattacccatttgtcgacgataattatattcaacttgagtgctgagctgcttcaacactcccctgttcacaacaaggtttcatcgctatttcacaatgagcagaccatatcagagccttctgcgattgtttaatacttttattagacatggtagaacaaccagtcttattacc

SEQ ID NO: 249599 - DNA, 508 bp, Glycine max
  unsure (1)..(508): unsure at all n locations
gagcgttgatgatcatgaggtancgactgctgtaccggtccggaattcccgggtcgacccacgcgtccgcccacgcgtccgggaagagaacgggttttgaagaagaagcagttcaattgatcaactcagatttcagggacctaagtctagctgctaatagactcgcccatcatgccatcaaacttggtggcattggctttggagcctcttttttcggattgtttgctgccattgctgctatttatctgttgattttggatcgtacaaactggaaaacaaatattctcacagcactactcattccatacattttcttcagcttgccttcattaattttcgacgtcttcaggggagagcttggaaaatggattgctgcagttgctgttgtattacgccttttccttccaagacacttccctgattggctggaattgcctggtgctctgattcttcttatcgttgtagctccttctctaattgcaagcacctttagagacaacattgttgg

SEQ ID NO: 249600 - DNA, 515 bp, Glycine max
  unsure (1)..(515): unsure at all n locations
cgagtgcctntactgtccatgatcgtacncgactgctgtaccggtccggaattcccgggtcgacccacgcgtccgcaagaacataagggaaccacagcggcggtaacagaagaacaagcagagaatgggtcgagtgagaacgaagacggtgaagaaatcctctcggcaggtgatagagcgtcactactcgcgcatgaccctggacttccacacgaacaagaagcttctggaggaagtggcgataatcccgtcgaagaggctaaggaacaagatcgcggggttctcgacgcacctgatgaagcgcatccagaagggccctgtgcgcggcatctccctcaagctccaggaggaggagcgcgagagccgcatggacttcgtccccgacgtctccgccatcaacaccgaccacatcgaggtcgacaaggaaaccctcgacatgctccactccctcggtatcaacgacatccccggcatcacccaggttgatcctgtncctgttcagcagaacttcccct

SEQ ID NO: 249601 - DNA, 516 bp, Glycine max
  unsure (1)..(516): unsure at all n locations
tgtgtggctctgtgatgaagaattgcacncgattgctgtaccggtccggaattcccgggtcgacccacgcgtccggctggcagcttgctcttataatccttgctttggtgcctcttctaggactaaatggagatctgcaattcaagttcttaaaaggattcagtgcagatacaaagaaattgtatgaggaagcaagccaagtggcaaatgatgctgtggggagtataagaacagttgcttctttctgtgctgaagagaaggtgatggaattataccaggaaaaatgtgaaggaccaattaagacaggcaaaaggcaagggataataagtggaattagttttggagtatcattctttgtgctgtattcagtttatgcaaccagtttttatgctggagctcgactggtcgaggatagaaaagcaacattcacagatgttttccgggtcttttttgctctcagcatggccgccataggaatctctcaatctggctctttggtccctgattcaactaaaa

SEQ ID NO: 249602 - DNA, 513 bp, Glycine max
gtcgctcctatcactccgaatgcattctatgtcactgccgtaccggtccggaattcccgggtcgacccacgcgtccgcccacgcgtccggagaaacatggcttccttaagctccttagtgctgctccttgcggcgctaattctatcccctcaagttcttgcaaactatgagaatcccccaatgtacaagcctcccactgagaaaccaccagtttataagcccccagttgagaagcctcctgtatacaaacctacagttgaaaaccccccaatttataagcctccagtagagaagccaccagtgtacaagccctcacttgagaaaccctcagtttataagcccccagtttagaaaccaccagtgtacaagccctcagttgaaaaaccaccaatgtacaagcccccaatttaaaaacccacagtgtacaagctcccattgtaaaacccccagtgtccaagtccccaattgaaaatccccccatttaccagcccccaattgaaaaaccaccagttt

SEQ ID NO: 249603 - DNA, 512 bp, Glycine max
gtaggcggttctgtgacaatgatgcaatcgtcgtcacgcgtccggtccggaattcccgggtcgacccacgcgtccgctcaataaataacagaacttcatctgttttctttgtcctcaccaagccagagagagagatggaagaagcatcatgtgtatgcttagttgtcatactgatacttgctctaacattggcatggagggtgctgaactggttatggctaaggccaaagaggttagagaggctcctaagagagcaaggccttcaaggaaatccctacaggcttttggttggggatttaaaggagattatgaatatgcaaaaggaagtcacatccaaacccatgaatctctcccatgatatagtgcctcgtgtcttttcctttctccaacacactctcaacacacatggcaagaattcttttattcggtttgggcgaaaaccaagggtgatcatcacagagcctgagttaatcaaagatgtacttaataagatgcatgatttcccaaagcct

SEQ ID NO: 249604 - DNA, 533 bp, Glycine max
tgagtggtactattttccaggctcaccgacgtacgtctgtaccggtctggaattcccgggtcgacccacgcgtccggcaatgaataaattgaaaaggatggcattgcgtgttattgcggagaggctatctgagggagaaattggcggcctgaaagagttattcaagatgattgacacagacaacagtggaacgataacgtttgatgagttaaaagatggcttgaatcgagtaggatctgaacttatggagtgtgaaatcaaggatcttatggatgctgcggatattgataatacgtgggacaattgattatggtgaattcattgctgccactgtgtatttaaataatctatagatagaggataacctagtgtcagcctattacgtattttgacattaatggcaagggttacataacccttgatgagatacaattggccctgatatgactttggtttagatgatgtccatttttatggctgattaaggtaattgtttagaattctttgggcacatatattggtgcttatttttt

SEQ ID NO: 249605 - DNA, 517 bp, Glycine max
aggtgccgatgggtgaccactctcatcgcgctacgtcacgcagtaccggtccggaattcccgggtcgacccacgcgtccggagcgagcagtttcagacacagagagaggggtttgggattggagggattgacgctgcgtctcttcctcttctctttcgatccatccctcattcctaatcctccaatccaaccacctcagcctcacactcacatatacacatatctgaacgcgtatcgtccctcctatggcttcaaagcgcatcctcaaggagctcaaggacttgcagaaagacccaccaacttcttgcagcgctggtccagtagctgaggacatgttccattggcaagcaacaataatgggtcctgctgatagtccttatgctggaggtgtattcctagtcactattcacttccctccggattatcctttcaagcctcctaaggttgcctttaggactaaagtgtttcacccgaacatcaatagcaatggtagcatttgtcttgatatcctgaacga

SEQ ID NO: 249606 - DNA, 514 bp, Glycine max
gggatggcctgtgagcctgttaagtatctcatcgtactgcggtaccggtccggaattcccgggtcgacccacgcgtccgcccacgcgtccgagaggttcgagaaggaggctgctgagatgaacaagaggtcattcaagtatgcctgggtgcttgacaagctcaaggctgagcgcgaaagaggaattaccattgatattgctttgtggaagtttgaaaccaccaagtactactgcacagtcatcgatgcccccggacatcgtgactttatcaagaacatgattactggtacctcccaggctgattgtgctgtccttatcattgactccaccactggtggttttgaagctggtatttctaaggatggacagactcgtgagcatgctcttcttgctttcacccttggtgtgaagcagatgatctgctgctgtaacaagatggatgccactaccccgaagtactctaaggctaggtatgatgaaattgtgaaggaagtctctttctacttgaagaagg

SEQ ID NO: 249607 - DNA, 501 bp, Glycine max
  unsure (1)..(501): unsure at all n locations
gctgactgcgtatcatcgtcacgtcngtaccggtccggaattcccgggtcgacccacgcgtccgcccacgcgtccggttggcaccctccttggtcatggctttggttctcactactggggagggttcactccggttgctcctgggtttctctacttaagagtttacaggtctattagagatgtgatgttcttgacagatgaaattgtatctcttttaatgctttcagttagagatatagcaaatggtgggttgcccaagggtgaagtggagaagctaaagaagactaagtatggaatgagatatggacaggtttctctttctggatcgatgacacgtgttaagcatgccgctcttcttggggcttcgtttctttggatatctggtggttcaggtttggttcaatctttgattacagaaactctgccttcatggtttttatcagcccaagggttagagcatgaagggggagaatctggagttgtggttgctatgctgagagg

SEQ ID NO: 249608 - DNA, 534 bp, Glycine max
cgtgcgatgactgaggtcagctcccctaccgactgacgtaccggtccggaattcccgggtcgacccacgcgtccgaggcagcctcggatgttgttgttgtcgtcgtcgtgttcttaggttttgttctgagacgcggtttttcattcttctaatggcccagtccttcggtcagaccgagatcaactgggacaagctagataaaactagattctatgtcgtaggagctggactctttacaggtgtttcggtggcactttatcccgtttctgttgtgaaaactaggctgcaggttgccacaaaggatgctgtagagagaaatgtgttttctggtgcaaaaggactacttaaaacagacggcatccctggtttgtatagagggtttggcacagttatcactggtgcaattcctgccagaatcatattcctctccactctagagaccacaaaggtgactgccttcagaatgcttgagccatttagactatctgaaacttctcaggctgccattgcaaatggagttgcatgcatgacatc

SEQ ID NO: 249609 - DNA, 534 bp, Glycine max
  unsure (1)..(534): unsure at all n locations
ggggaactttcacttgattgccatcgatggtacttcgtaccggtccggaattcccgggtcgacccacgcgtccggcacaagtgagggaggttgaaggcggcgtgagaagcatgttggacatcaacctattcagggaggagaagggccacaaccctgaattcatccgcgaatcccagcgccgtcgtttcgccagcgtcgaagtcgtcgacgaggtcatcaatctcgacaaagaatggcgaaagcgtcaattcgagttggagaatctccgcaaagaatttaacaagatcaacaaggaagtctccaaactcaagcgtgctggcgaggatgcaactaagttcatcagtgaatcagaggaaaccaagaaatcgataggggagaaagaggttgaagttcgggaaactctgaatctcttgaattccaagttggaaactattggaaacctcgtncacgattccgttccaattagccaggatgaggccaacaatgttgtcgttagatcgtggggaagagaagagagtggagccttagctgaag

SEQ ID NO: 249610 - DNA, 431 bp, Glycine max
gaattcgctcagatttgaaaatgtgggttaagggtgctcttcttctccttgcagcactttgtgtttgtcacttagccggagcttctcttaatcgtagcagtttttcaccagatttcttctttggaacagcttcttcagcttaccagtatgaaggtgcagcacgtgaatgtggcaatggacctagtatatgggacaccttcactcatagccacccagatagaatagcagaccacagtaatggggatgttgccattgattcataccaccgctacaaggaagatgtggccatgatgaatgatattggattcaatgcctacaggttctccatctcttggccaaggatactacctcgtggaaacctgcatggaggagttaaccaataaggcatcacatattacaacaatctcataaatgaactgatagcaaatgga

SEQ ID NO: 249611 - DNA, 417 bp, Glycine max
gacccccgcgtgcgcccactcgtccgaccacgcgtccgtttttttaaaaaaaaaattccttgaaaaaatgaataagactaggttcttcgctctctgtgtgggttgtgccttcacctcatacctaccttcagccaccgctgatactatcttcgacataaatggtgattttgtccgaaacggtggcacatactacatcttgccagttataagaggagactgaggtggaatagaattcgccgcaacaggaaacgaaacatgccctctcactgtagtgcaatctccccttgaggtctctaagggtctaccactaatcatttcatcaccattcgaaatccttatcatccaagaaggccttattttgaacattgggttcacttttgtgcccccctgtgccctaattccttctgagtggactac

SEQ ID NO: 249612 - DNA, 398 bp, Glycine max
accgacgcgtccgctcgtcacactggtgtgatggttggcatggtccaaaaagatgcatatgttggtggggagtgacaatctaagagggggattttgactctcaagtaccccattgaacatggaattgtgagcaattgggatgatatggaaaagatttggcatcataccttctataatgagcttcgtgttgccccagaagagcatccagttctcttaactgaggcccctcttaaccccaaggctaatcgtgagaagatgacccaaatcatgtttgagaccttcaacacccctgctatgtacgtagccatccaagctgttctttcactgtatgcaagtggtcgtacaactggtattgggttggattctggtgatggtgtcagccacactgtacctatcta

SEQ ID NO: 249613 - DNA, 518 bp, Glycine max
  unsure (1)..(518): unsure at all n locations
ggtatttggagcgagtgaagctgaatacgactgctcactgcactgtcgttctcggtccggaattcccgggtcgaccgacgcgtccgcccacgcgtccgcccacgcgtcctgtagtacctcggatctcgcactgacctgcagtgtctgctataccaacctgatcatgctctcagcctcattcaccttgctctcataattcacttggtacgcctccagcattggaaatcttctcctcatttgctgaatccacgactcgtcttcttccaggaatatcgtccttcccccgtgattcagcgcattccacatcaggctgtcgtgccccaacccgaacaccaggaaattgcacggcgacttcttctccagaactcttgctgtcactgatatctctttcaccgtttgctgtggggttatgcttgatgttgagtagtggatcagtgcttccgacaccgatcccggtatcttcatcttgttgcaactcccatcactctntactgataatgcctactgctgcttcactc

SEQ ID NO: 249614 - DNA, 372 bp, Glycine max
  unsure (1)..(372): unsure at all n locations
tcatccacccaccgcaacgaatcatcctccctccatgcttcagcatgtgtggcgggggatagcgctgcttatcaaaggacatcgacattcggggacgatgttgcgatcgtggctgcttatcggactgctcattgcaaagctaaacgaggtggtttcaaagacactcttcctgatgatctactggctcctgttttgaaggctgcaattgagaaaaccaatgtgaacccaagtgaagttggggatattgttgtaggtagtgtattggctcctggagctcaaagagctagtgaatgccgaatggctgcattntatgctggttttcccgaaactgtgcctgttaggaccgttaataggcaatggtcatctgggctc

SEQ ID NO: 249615 - DNA, 465 bp, Glycine max
aattaccgggccgaccgacgcgtccgaaataatagcataaaatattataaaaaaacttatatattataaagataaatttctcatcaagaaaagacttttatcaattaggtaaaatacaaggaatatttcagctttaacataaggggtattcaaggttggtttaagttggatttaactaaatcttttattcaattcgttcaaaattatattggttgagttgaatttatgtgattttgttgttaaatttaaactgaatcaatctagtcacaaataaattgacttgggttgagtaagtcaggtctaagcttttatagttattttaagtgtcctaaagaataattttttttcttaccaatttttacatattctatagttaattattgtatatttaattaaaaataaatgcacattctaaagatattgaattttatcaacgttgcatacttgtactaaacaataaattaa

SEQ ID NO: 249616 - DNA, 464 bp, Glycine max
ggtccgaccgacgcgtgcgacctcacatcctatatatttcaacaaataattaatcttatatattacatcaaatcattaagataaggcacaataaaccggagtgtaatctaagaatatatatactgataacataatgatacattcagagtaaactaaatttggacctacttaaatttatctattaatactcatacataatattattaattgaattgaatttatgttaatatttgcacctacatataaacaaaatctacctattcacaaataacgttactctaattcaataattcattgctatgcttatacagataatcctactattcaaaataatatttattaatattactattacctacatattctatatattcacattgcccatttacttactaatatatgcacatactaaatatactccattatatctacataccatacttgtactaatcaataaatgaata

SEQ ID NO: 249617 - DNA, 440 bp, Glycine max
gaccgactcgtcctctttgctagctcaccgttagcatcttgatttccggtgagttaattgttcattttgcaaatgccaccttatataggtaggttattaacaatttaacttattgttctgtacattactttgtgttttccaaactctaccttcctctacttttgcacttttgatacctactatactgtaaatttataacgtaaattttttaaaatgctattttttaaatcacacttattgacaatacaaaagattgcattatgaaattgacaagcattaatgcggtctggatacattttcacgtagttatgaaaaatttggcttacaacgcatgtattatatctagagtttaatatcttacatgtgcacatctttggttcataaattatttatgtcaaattcctaagatgataaatagcttaatcaatcccacatatcta

SEQ ID NO: 249618 - DNA, 413 bp, Glycine max
  unsure (1)..(413): unsure at all n locations
cgcgtccgctttgctagctcaccgtgagcatcttgatttccggtaagttaattgttcatttttcaaatgccaccttatataggtagtttattaacaatttaacttattgttctgtacattactttgtgttttccaaactctaccttcctctacttttgcacttttgatacctactatactgtaaatttataacgtaaattttttaaaatgctattttttaaatcacagttatggacaatacaaaagattgcgttatgaaattgacaagcatgaaggcggtctggatacattttcacgtggttatgaaaaatttggcttccaacgcaggtattatttctagagtttaatatcttacatgtgcacatctttgnttcataaattatttatgtcaaattcctaagatgataaatagc

SEQ ID NO: 249619 - DNA, 470 bp, Glycine max
tcggtcctgaattcccgggtcgaccgacgcgtccgctttgctagctcaccgtgagcatcttgatttccggtaagttaattgttcatttttgaaatgccaccttatataggtaggttattaacaatttaacttattgttctgtacattactttgtgttttccaaactctaccttcctctacttttgcacttttgatacctactatactgtaaatttataacgtaaattttttaaaatgctattttttaaatcacagttatggacaatacaaaagattgcgttatgaaattgacaagcatgaaggcggtctggatacattttcacgtggttatgaaaaatttggcttccaacgcaggtattatttctagagtttaatatcttacatgtgcacatctttgtttcataaattatttatgtcaaattcctaagatgataaatagctaaatcaatccaacatatctattgctgatc

SEQ ID NO: 249620 - DNA, 467 bp, Glycine max
aattcccgggtcgaccgacgcgtccgctttagtgttttctcttgtcacataaaagtcatctaagaagaattacaagatcatcatcaggatagcaagatgagttcaggaattagagcatggagtgtggcagcaagtgttggaattgtggaggccttgaaagaccaaggcatatgcaggtggaatcatgccttaagatcagctcaacaccatctcaaaaaccatgttggctcattctctcaggctaacaagctttcttcttctgctatgatatccacaacactaaaacatgagaaggcaaatcaatcagaagagtctttgagaactgtcatgtacttaagctgctggggtcccaactagatatcataagcccaacaacaaaatattcttttctcttttcaattctaggaatcaagcaagcttaattagtctcaaatgatgatgagtattgaaagaatattgcttgtctt

SEQ ID NO: 249621 - DNA, 474 bp, Glycine max
cggtctggaattcccgggccgaccgacgcgtccgggccaccctctccgcatgcgcttctcctccatggccaaaccctgattctcccaagtcaaaggcaaaccctaattgcctccccgaccaatctcaaaccctcgacttcgactccctcatgcctccgcaacccgaatccccaccgcccaaccatcaccactcccccgacgcctctccaccggaatcctccccgtcgccgccgcctccgtcgatcctctacctctccttcaaccaggaccaggcctgcttcgccgccgccgccgacaacggcttccgcatctacaactgcgaccccttccgcgagctcttccggcgcgagttcgacggcggcgggatcggccacgtggagatgctcttccgctgcaacatcctcgccctcgtcggcggcgggcctaaccctcagtacccgcccaacaaggtcatgatctgggacgaccaccagg

SEQ ID NO: 249622 - DNA, 461 bp, Glycine max
cggtcttgaattcccgggtcgaccgacgcgtccgtaagggttattaagagagagaaagagatacatagttagagagagagcagagacaccgttcggtgctccgctgaattcggttgtggcccctgcgctccgctgcaattttacactcaaaaggacctcatgtctaacatagaggagaacaaagatctgggacagatggacgtggatgcatctgatgagtcagctaacatgccatcaccccaaaagcaggaggagtctgtaaagaaaaagtatggaggaatgctgcccaaaaagccaccactcatatctaaggaccatgaacgtgcttacttcgattctgcggattgggcacttggaaagcaaggcggagagaagcctaagggaccacttgaggctcttcggcctaaattacagccaacgcatcatcaaacacgttaccggaaatctccttatgctccttc

SEQ ID NO: 249623 - DNA, 348 bp, Glycine max
tctaatctataaattcacccacatattttaaaaattcattccaaggatttactagaggcactgtttatcataacaggtatactactaatctatactaaaactccatccaatgcacacaaatattctcacaaaacaacaccatagcatgctcaaaatttaacacttttatataacaacaccattacgatcacaactatatacttttgtataacatcaaggacaagatccattatgatatccatgacaagtgttacaaaaataacaacaaggacaagaataacatggatcatttacatcaccatcatcgtcatagcatcatcattgacattgattatatcttatatgtta

SEQ ID NO: 249624 - DNA, 447 bp, Glycine max
ttaccgggccgaccgacgcgtgcgcttatcccttcggctgcagctggtgaatccactgtgttttactataagatgaaaggagatgattatggttatcttgccgaatttaaggcaggcaatgagaagaaggaagctgctgatcagtctatgaaagcatatgagtctgctaccactgcagcagaggctgatttacctccaacacatcccatccgattgggtctagctttaaatttctcagttttctattacgagatcttgaactctccagaaagagcctgtcatcttgcaaaacaagcttttgatgaagctatttctgagcttgacaccttgaatgaggagtcatacaaagacagcaccttaatcatgcaacttctcagggacaacctaactttgtggacttctgacatcccagaagatggagaagatgcccagaaagtgaatggcact

SEQ ID NO: 249625 - DNA, 461 bp, Glycine max
  unsure (1)..(461): unsure at all n locations
gaattcccgggtcgaccgacgcgtccggttgaggatagcacaaagaaaagtaaacactgccacagcaagagtgttcaaatgggagagggaaaaggaagaatttgtgtcactggaggcacaggattccttggttcatggataatcaagagcctccttgaacatggatatgctgttaataccactataagatctgacccaggacgcaagagagatgttagcttcctcacaaacctacctggtgcatcagaaaagcttaaaattttcaacgctgatctcagcgacccagagagttttggtccagcagttgagggttgtgttggaatttttcacactgccaccccaattgattttgcggtgaacgagccagaggaagtggtgaccaaaagagccattgatggagcactaggcatattgaaagcaggcctaanagcaaagactgtgaagagggttgtttacacttc

SEQ ID NO: 249626 - DNA, 521 bp, Glycine max
gaagtgtctaagctgacaccgatctgactcattgtcgtaccggtcttgaattcccgggtcgaccgacgcgtccgctcacgctctctactcttacggcactttccataaacatggccataaggtctggctcactggatcgatggccatacgaggaacctacatccgtcatactgacgctcgacgaacggacttcaatgagatacggaaatgttatcagaaaacctcgccagcatcgtcgacacctacgaccggcacgcgtacctctgctacaagagtcacctgtcctgtccctctcgcatctaggcctgcgacgacgatcccttccgcaagcgcgtcgccgacaccttcaaagcccgcaagaacgacttgcccctcaagacgaaaatcaccgtgtgcgaggtgcgtgaggaggctggcttactcgacggtgacgtgttgattctccccgacatgatcaaatacaggggtttggaggaatcaaatgttgatagctgtatcgaagatgttgtggtgaatggtaa

SEQ ID NO: 249627 - DNA, 476 bp, Glycine max
cggtcttgaattcccgggtcgaccgactcgtccgctcacgctttctactattcttgcaatttccataaacatttacataaaagtatggagcactggatctatggccataggagaacctacaccgtctacgacgccgacaacggacttcaatcaatacggaaatgtttcaacggaaaaccatcgccaagcactcgtcgaaacctactactcggcaagtgtacctctgctacaagagtcacctgtcctgtccccctcgcatctaggcctccgactcctatcccttccccaagcgcgtcgccgacaccttcaaagcccgcaagaacgacttgcccctcaagacgaaaatcaccgtgtgcgaggtgcgtgaggaggctggcttcctcgacggtgacgtgttgattttccccgacatgatcaaatacaggggtttggaggaatcaaatgttgatagctttttcgaagatgttttggtgaat

SEQ ID NO: 249628 - DNA, 522 bp, Glycine max
  unsure (1)..(522): unsure at all n locations
cgtaaaggatgcgtntcgagctgaattcagccgccctacgcactgacgttccggtccggaattcccgggtcgaccgacgcgtccggtctcatcaagatcaacggctgccccattgagctcgtggagccggagatcctccggttcgaggccttcgagcctatcctcctgttgggtaagagccgcttcgccggcgtcgacatgcgcatccgcgtcaagggtggcggccacacctcccagatctacgccatccgccagagcatcgccaaggcgctcgtcgcgttctaccagaagtatgtcgacgaacagagtaagaaggagatcaaggacattctcgtgaggtacgatcgcaccttgctcgttgcggatcccaggcgctgcgagcccaagaagtttggtgggcgtggcgcacgtgcgaggttccagaagtcttaccgttgaagaagaatggtggtggtgttttcgtgtttttggcttttggtttcggttcatgttttatgctgtggaaaaaatgaatacttagag

SEQ ID NO: 249629 - DNA, 412 bp, Glycine max
atttaaccctgttttaataataatcctcgccactctaccgtatagatgcacctgatcgacatttctcacacccctctacatcatcagaacctcaaacttgcaaacacaaacaccttactaacctgcaatcaacgagcgctactgcttttcaaatggagagcacacattttcgatatactccactgacaaacctcatatgcatagcactcatactaatcctcgaactgatattcacatctctggatacgattatacattccgtgtatgacactttcaaagctttttatacgtgcctactagcacaaacaaactctgcatccaacaagtgttccatacataaacttcttacacaatctcatatacatccatctcttgtgctactactaatcattacctatctcatactctttaa

SEQ ID NO: 249630 - DNA, 169 bp, Glycine max
ggataagtctccaagcactctgttctcaacttaagttgccttccaatgtatccaatctttgctttcgtctttccttttcgcagataattgtgagacttatgatatatctgtatctcacttcatcaataataaattataataaagatgagcaatcattacaacttttgtt

SEQ ID NO: 249631 - DNA, 467 bp, Glycine max
gaattaccgggtcgaccgacgcgtgcgggacgtagaggaatttgcctgcacaagatacaaggccgcgtatcccatttttggaaaggtgcgtgtgaatggacctgatacagcacctgtctacaaattccttaaagcaaataaatcaggatttctgggttctaggataaagtggaatttcaccaagtttttggttgacaaggaagggaatgtcctccggcgttatggttcaaccacctcaccgttttccattgaaaatgacatcaagagagcattgggggaggcttgaaaaactctacaatcacttcaaattggtgctcttgttgaagatgattgaaacataaggaatgtatatttgtagatgtttcttctagtgattatttcttaaaaatttcatgtctaggtttttttgtgtttgttgtattagaaatctgttttggaatcgttatttaaaacttaattaatgggca

SEQ ID NO: 249632 - DNA, 397 bp, Glycine max
  unsure (1)..(397): unsure at all n locations
ggtcgacgcacgcgtccgagaacatcaacgactacaactaccaaaccttgaaggacaacgtggacatgttggagctgagccaattaggtctgactttctccgacgagaatggtaacctccctacctgcggcacggagagcacctgcatctggcaattcaacttccgcgagttcaacatcagcgaagacatcttcgcgagcgactcgatcgagttgctgcgccagtgcgggatcgacttcaagaagaacagcgagaaagggatcgacgtgaaccggttcggggagctcctcatgtcctncgggatcgtcgtgaacgacgccgtgcactgggttaccttccacagcgggtacgatttcgggtaccctctgaagctgttgacatgccggagcttgccgga

SEQ ID NO: 249633 - DNA, 456 bp, Glycine max
cgggccgaccgacgcgtgcgatttacagcggcccacatatgttcctgatactggtttgctttgtgatctcctttggtctgggccgggcacagatgttcaaggatggggaatgaatgacagaggagtttcatttacatttggtgctgataaggtctcagagtttcttcagaaacatgatcttgatcttatttgtcgtgctcatcaagttgtggaagatggatatgagttctttgctaatcgacaacttgtaacaatattttcagcacctaattattgtggggaatttgacaatgctggtgctatgatgagtgtcgatgagacactaatgtgctctttccaaatattaaagccagctgataaaaaagcaaagctcaattttggaagtacaaccactgctaagcctggaaactccccagctggtgtaaagtgctttctgggtgcgaaagtatgaaatta

SEQ ID NO: 249634 - DNA, 159 bp, Glycine max
gaatttccgggtcgaccgactcgtgcgcccacgcgtccgaaaaaaaaaaaaaaaaaaaaaaaaaaaaaaaaaaaaaaaaaaaaaaaaaagaaaaaggaaaaaagaaaaaagaaaaaaaaaaaaaaaaaaaaaaaaaaaaaaaaaaaaaaaaaaaaatga

SEQ ID NO: 249635 - DNA, 455 bp, Glycine max
cgggccgaccgacgcgtccgaccacgcgtccgtgcttctcagtttctgattttcccaatcgcagctaaaaaatcctttggggcctttaacctattgtgaataagcagaaattagggaacgcaacaatggctcaagcggttgaagaatggtataagcagatgcctgtcatcacgcgctcttatctcaccgctgctgttgtcaccaccatcggatgttcccttgatataagtaatccgtatcattagcacttgaaccctagattggtggtgaagcaatatcaggtcaggcgtctggttactaatgactcgtactttcgtaacatggacttggatttcctgtgacatatgttgcctcttgcacgttactgcatgcttctcgaggagaactcgttcacggggaggactgctgatttgttttacatgctcttattaggtgccactgtattgactggaatt

SEQ ID NO: 249636 - DNA, 521 bp, Glycine max
  unsure (1)..(521): unsure at all n locations
gggtaaggagcngtctatttcgtatagggcacgattactgtattgctcttccggtctggaattcccgggtcgaccgacgcgtccggcgaaaagagattcgaatccaaggaagggaaaggaaagtaagagaagagaagaatggccgaagagggacaagtgattggtgtccacagcgtggaggagtgggaggaacatctcaagaagggacaagagtccaagaaattgattgtggtggattttactgcttcttggtgcggcccatgccgtttcattgccccaattcttgcggatatggctaaaaagttgccgaatgtcaccttccttaaggtggatgtggatgaattggcgactgtttccagggagtgggaagttgaggctatgccaaccttcctattcttgaaagaaagcaagctggtgaagaagcttgtgggtgccaagaaagaggagctgcaagacataatagtcaaacttgctgcaattgatgctgcctgaagtgccatatgaatatgttgagaataatt

SEQ ID NO: 249637 - DNA, 344 bp, Glycine max
gcgtacgcctattcgtccggtaattttttgattgcttaattctctaaaattcgaaattctaatttcgttagggtaaagagagtgtttgtgtgtgagtgagtatggctggaaaaggcgagggtcctgctatcggaatcgatttgggaacgacgtactcttgcgtcggcgtgttgcaacacgatcgtgttgaaatcatagccaacgatcaaggtaacagaactaccccatcctacgtggctttcaccgacacagaacggttgatcggcgatgcggcgaaaaaccaggttgctatgaacccaccaacaccgttttttgatgctagccgtttgattggatggcgtttt

SEQ ID NO: 249638 - DNA, 451 bp, Glycine max
accgacgcgtgcgtgaaagccctaccctatatataacatccgtgctgattacacaaggtcaattcatttgggcgctgtcgctgttccaaaaccctaatccttcgtcttccagaaaatggctgattctccccttgcaaggaattcaaggtccccttccccgtggaaagctcagtcgagatctaggtctaggtcaagatctaggtcgaggtctaggcctagacaaaggccaagatcccgttctagaagtcatggcaggtcaagatcaccaattcatggaaggtcaaggtcacccattcatggaaggtccgagccttcaaatcctggtgacacactttatgtaaccggtctatcttcaaaggtcactgaaagagacctagaggagcatttctccaaggaaagaaaagtttcttcatgttttcttgtggtggagccccgtacacggatttctcgt

SEQ ID NO: 249639 - DNA, 438 bp, Glycine max
cgggccgaccgacgcgtgcgcccacgcgttcgcccactcgtccgctcactcttgcgaccggctattggtgtatgagtctaggcctagggggagcttatagatccatctatttagaagaggacctcaaccactctcttggtcggtgaggatgaaagtggctattggtgctgccagaggactctcctttcttcataatgccaaatcacaagtcatataccgtgattttaaagcttctaacatcctgctggatgctgagtttaattcgaaactctctgactctggtttagctaaggcgggtcctactggtgatagaactcatgtgtctactcaagtcatgggtactcaaggatatgcatcacctgaatatgctgcaactgatcggttgacggccaaaagtgatgtctacagcttcggagttgtgttgcttgaacttctatc

SEQ ID NO: 249640 - DNA, 457 bp, Glycine max
ccgggccgaccgacgcgtccgtggcaaagctatttttgaaacaggcaaagcaatacgcagatgcaagaccaagctagcctccgcaactcttccaaggcattgcttccaagactccctctcactacctcgcttgggacgtcggcactgggagcggccaagctgccaaatctttagctgcaatatacaagaatgtgatagccacagatgctagtgacaaacaacttgaatttgcagccaagctcccaaatgtgagataccaacacaccccttcaaccatgtcgacggccgagcttgaacaaatggtggcatctgagggaaccatagaccttgtgaccatagcacaagccctgcattggtttgaccgcccaaccttctacgaacaagtgaagtgggttctcaggaaacctcatggaatcattgctgcttggtgttactatttgccaagagttagtgatgc

SEQ ID NO: 249641 - DNA, 521 bp, Glycine max
aggggaggatgtgctgattccgattaccgactctcactgcactgccgttccggttcggaattcccgggtcgaccgacgcgtccggttagttgtttaatgaacgcaattcggtcccgttggttgacgagaatggcagaagacatggggaaaagcaacctcgaatcctcttctgcttcaacaacttcccgaggcttctggccttctgtcttacgttggatcccctcttccaccgatcacatcatcaatgctgaaaaacgccttctctctcttgtcaagactccgtatgctcaagaacagtaaggatgattctcctacgctggtgatggttcatggatatgcagcatcgcagggtttcttctttcgcaattttgatgcccttgcctcccgtttcagagtgattgctattgatcaacttggttggggtggatctagcaggcctgactttacatgcagaagcactgaagaaactgaggcatggttcattgattcttttgaggaatggagaaaggccaaaaacctga

SEQ ID NO: 249642 - DNA, 444 bp, Glycine max
gcgttcgccacgcgttcttaaaatgtggtgtttgatgagcatgatcgagaagttgattacgctgacgtgtcagggacagagggtactcgtgcagcttatcctatagagtacattccaaatgcaaagttaccttgtgttggccctcacccaaagaatgtcatacttttggcatgtgacgcatttggtgtactcccacccgttagcaagctaaacctggcacagaccatgtaccatttcatcagtggatatactgctttggtggctggcacagaagaaggtattaaggagcctcaggcaactttttcagcttgttttggtgcagcattcattatgctacaccctacaaagtatgcagcaatgcttgctgaaaagatgcagaagcatggtgctactggatggcttgttaacactgggtggtctgctggaagctatggtaatggaagc

SEQ ID NO: 249643 - DNA, 453 bp, Glycine max
ctttctctctttcttccttggcatatctcctctgaggaatcatcgaagaaaagcatcgtgtctcacatgtggatcagtctaactttcacgacactgtcaacaatcacgatttcatcatcatcgagttctacactccatgatgtcgccactgtaagaaccttgctcccgagtatgagaaagctacttctatctcgagtaatcatgatcctccggtatgacttgactagaattacatgccaatgatgagaagaccatacaccttgcatctcaatattatgttaggggatacccaacaattaacattctaacaaatgatggacagaatgttcatgaatacaaacgtccccgtgaagcatatggcatcgttgactatttgaagaaacaaagtggtcctgcttcaactgaaattaaatctgcttacgaagctactgctttcattggtgaaaataaagt

SEQ ID NO: 249644 - DNA, 439 bp, Glycine max
ccactcgtacgggggatgtgacggaagagtagaaggaagttgaagtgactgaagagaagagggaagctgaagtgatagtagaagagaagaaggaagttgaagtgacggaagagaagaaggaagtggaagtgaccgaaggaaagaaagaagtggaagtgatcgaagagaataaggaaacagaagtgacagaagaaaagaaagaagtggaagtagaagtgagggaagagaagaaggaaagtgaagtgaaagaagaagaaaaaggtcgggaggttgttccagaggagagtagcaagagtagtaaggtgactctgtctgggttgttgaattttatagatgggatttggtctgcttgtggaggtgaaaggatcattgttttcacgacgaattatgtggagaaacttgaccctgctttgattaagagagggaggatggataagca

SEQ ID NO: 249645 - DNA, 413 bp, Glycine max
cgaccgcgcgtgcggaccaatccatagccgaagagaaaaagagacaaggaccgtctagaattgatttcattgaggggggcaggaaccaattccatgtgcagtttctgattcgtcaaacggacaaaggaagtgaaagggtttaaggtgtgacctgagatcaacatgttgcggaggcttctctcttctcacctcaaaaccctagccgccaccgcttcttcttccactccccgatctgctttcgccgtcgccagattcgccgctctctctcgctcctcccgctacttctcaacccagtccgaggatgctactgccatcaaaaagaaggttgaagatgtaatgccaatcgctactggtcacgagcgcgaggagcttcaagctgagctcgagggaaagaatattcttgaaatagacca

SEQ ID NO: 249646 - DNA, 241 bp, Glycine max
aatttccggctcgaccgcacgcgtgcggacaagatgacaacacgctacaagaagaaccggaggacgaggggcctcgacatcactgagggcagcggaatccaattgcacaggaagcaccctatacgacacactaacaccggaagcatgcaccaccacaggatcctcttagacaaataccaccctgagttcttctgtcttgtacgaatgcactatattcacaagcttcttatcatatcactac

SEQ ID NO: 249647 - DNA, 525 bp, Glycine max
  unsure (1)..(525): unsure at all n locations
tgagagcntgtgnctgaatccgaaatactgatgctctatgcactgtcgtaccggtctggaattcccgggtcgaccgacgcgtccgcccacgcgtccgaaaagatgagttccaattccagagagagtcaagttcacccagaaataggagaggtcgaggatgcttacctctctgctgtgttactttgctttagccgggtcctccctgcagtcctaaatgcagctattgatctcaatttgtttgatatcatagcaaaggcacagagttcatgtgactcaagtttctcagcctctgagattgcttctttgcttccaaatcaacacccacaattggctaataggcttgaacgcatattacctttgttggccagttattctcttctaaattgctccattcgcacaaatgaagatggtaagagagaaagagtttatgctctctcacccgttggtgcatactttgcatttgataaggatgaaggaagttctttggctcctctctcttctntaatccatcgcggatttcatgac

SEQ ID NO: 249648 - DNA, 521 bp, Glycine max
agacttgaggatgcgtataacctgacccagcctctcatcgcactgtcgtaccggtcttgaattcccgggtcgaccgacgcgtccgcccacgcgtccgaacagacgagctccaattccagacagagtcaagttcacccagagatagcggacgtctatgatagcttacctgtctgctgtgttacttagatatagccggatgctccctgcaatcctaaatgcagctattgatctcaatttgtctgatatcataacgtaggcacatagttcatgtgactcaggtttctgaaactttgagatagcttctttgctatcaaatcaacacccacaattggctaactgtgctgaacgcatatcacctttggcggccatttatactcttgtaacatgctccattcgcacaaatgacgatggttagagagaaagagtttatgctatgtcacacgtatgtgcatactctgcatgagattacgatgaaggaaagcctttggatcctgtatgtcatgtaatgcatcgcggattac

SEQ ID NO: 249649 - DNA, 379 bp, Glycine max
accggaattcaattctcgaccgacgcgtcccgaaaatcataaagtttaatcttgacaatatttaattttacatttaatttaaccaaatcagaggggttaacaccctataggtgattacacatatttcatacaatttattaaccaaaattcatatacacaatcatatcaacattctgacaaaaatttacaacaactatcacatctatatactcctatcctataattcactcatctaatattaatccacaataacccagatacctatatcgatcatatgttaaacatttcatactcatcaaccactatacaaaatgcacaaatattactagccttttacaattttacatctagaaaattcatatgtatatatataattcac

SEQ ID NO: 249650 - DNA, 448 bp, Glycine max
gaccgacgcggccgcagacgcttaggcagaagtccttttgaaggaagctattcaagaacagatagaactctattgactggtgtatctcgtagggagaaattgattaatcatttaataactatataatttcactttcaaattcttataattagtatcttttaatatcttcatatttcatttgaatataatattaatatataaataaaatgaattctaatgaaaatagaaaataacacaaaaaactatacaataaataaaatagaacgacaaggtataaattgcatatatttgcatatatatgcaaatatatgcaaacaatttgcgtccaataggatttgaacctatacctaaggtttaaaatacctctgtcctatccattagacaatggacgcttctatttttctgtattacttttattccttaaccttattaactaaaaaaggttaaa

SEQ ID NO: 249651 - DNA, 460 bp, Glycine max
aattcccgggtcgaccgacgcgtccgcatcaccaacgccgagggccagagaaccacgccctccgtcgtggcctacaccaagaatggggacaggctcgttggccaaatcgccaagcgtcaggccgtcgtcaaccccgagaacactttcttctccgtcaagaggttcatcggccgcaagatgtctgaggtcgacgaagagtccaagcaggtctcttacagagtcatcagagacgacaacggcaacgtcaaactcgactgccccgccattggcaaacagttcgctgccgaggaaatttctgcccaggttctgaggaagcttgttgatgatgcttccaagtttttgaacgataaggttaccaaggccgttgttacggtgcctgcttacttcaatgactcccaaaggactgccaccaaggatgctggtcggattgctggtctagaggttcttcggaatatcaatg

SEQ ID NO: 249652 - DNA, 528 bp, Glycine max
  unsure (1)..(528): unsure at all n locations
tgttcgacgcgggtnnctgccgctggcaacgtcatcnactgtcgtaactgttctggattggaattcccggggggaccgacgcgtccgcttgaaattgtcgggagggaagcggatggtggccggcgatgtgtcccggtcggaggtggggcttttagagccggtccgccgatcgactctggacattgaccgacgcggattgcgatggtggcccaagcccgggctgttgatatcctcgtgaaaacttaatcatcgcaatggtgattggaaccccccgcctttgcgtgcctcggcacctgcgcgctcctggcgtcggcctgtgggctccccattcggcccgtcttgaaacacggaccaaggagtctgacatgtgtgcgagtcaacgggcgagtaaacccgtaaggcgcaaggaagctgattggtgggatccccctgtgggttgcaccgtcgaccgaccctgatcttctgtgaaaggttcgagtgagagcatacctgtcgggacccgaaagatggtgaactatgcctgagcgg

SEQ ID NO: 249653 - DNA, 523 bp, Glycine max
  unsure (1)..(523): unsure at all n locations
tggattagcgggtctgcgatgataagaactatattgtactgctctaccggtctcggaattcccgggtcgaccgacgcgtccgcggacgcgtgggcggacgcgtggggtaactttttgattcctaaattctctaaaaggcgagattctaatttcgttaggggaaagagattgtttgtgtgtgagtgagtatggctggaaaaggcgagggtcctgctatcggaatcgatttgggaacgacgtactcttgcgtcggcgtgtggcaacacgatcgtgttgaaatcatagccaacgatcagggtaacagaactaccccatcctacgtggctttcaccgacacagaaacgttgattcgcgatgccgccaaaaaccaggtcgctatgaaccccaccaacaccgtttttgatgctaagcgtttgattgaaaggcgtttttccgatgcatcagtacaaggtgacatgaaattgtggccgttcaaggtgattcctggccctgctgagaaacctatgatngtggtgaactacan

SEQ ID NO: 249654 - DNA, 519 bp, Glycine max
  unsure (1)..(519): unsure at all n locations
gggtggnnnnnttnccccagctcaccgaccgactgctgtaccggtctcggaattcccgggtcgaccgcacgcgtccgcacaactactacaagtacttccttacaatcaaaaccaacaacaactatggcaagttatcgaaagcactacgatgatcagggtcgcaaggttgacgagtatggcaacgttgagaagcaaaccgacgaatacggcaaccctgttcatgctgctagtgtcacctatgtagccaccagaactgctgctggtggttacagtgatgacattaataagcaacatgataccaccaatgcctacggcgtagacactggtagacagcattctagtggtggctacgatggtgacactaataaacatcatggaactactggtggctataatgatgacaccaatagacatcatggaactaccggtgtctatggtatagacaccgataggcaacaacatgggactactggtggctatgccggtgacactggtaggcaacatgggaacatcggtggc

SEQ ID NO: 249655 - DNA, 516 bp, Glycine max
  unsure (1)..(516): unsure at all n locations
tgtagggnnnctgnccccagctcagcgaagtactgccgtaccggtctggaattcccgggtcgaccgcacgcgtccgaaaaaaataaaaatcccacttccttttgcttctttttttgttctttgttttttgtttggtgagaaactgcgagaagaaagtaaaaggttcaatttttacccttttttcttcccagaagcgatctctgaagccgacccattttggaattcggaaaacccagtgctgatcgctctctgggtgttcccaaaatgaagcttcggagatcttcgctgtgcgtctttctagggtttctggtgctgttcctttcgccgccgccatctatggcgaaattcgtggtggagaagaacagcttgacggtgacgtcgccggacgacatcaagggcacgcacgatagcgcgattgggaacttcgggataccccaatacggtggcagcatggccgggaacgtgttgtacccaaaggacaacaaatagggttgcaaggagttcgatgagtatggc

SEQ ID NO: 249656 - DNA, 518 bp, Glycine max
tcgtgtggttgcacgatacgaatctcattgcactgctctaccggtccggaattcccgggtcgaccgcacgcgtccgaaattccagaaacatcgtgtgcacagtaccccagaagatcgaacaaggatctccacgaagacaaacctctgttctcaactgtgtttctttacctctcacctactttcagaccataccagattgactaggctgagaagatgcagcagacaccgcctatgattcctatgatgccttcgttcccacctacgaacataaccaccgagcagattcaaaaataccttgatgagaacaagaagctgattctggcaatattggacaatcaaaatcttggaaaacttgcagaatgtgcccagtaccaagctcagcttcaaaagaatttgatgtatttagctgcaattgctgatgcccagcctcaaacaccagccatgcctccacagatggcaccacaccctgccatgcaaccaggattctatatgcaacatcctcaggctgcagcagcagc

SEQ ID NO: 249657 - DNA, 458 bp, Glycine max
aattcccggctcgacgcactcgtccgcacttctataaccatcatcaccacaataatttacattatatgtcatctatctaaatgaatgtctatctcaatggggaactcagcttaaacactatctcaaataatttcacaccattactacatatactaattcttacaatattcatcattacactcgactattattaactattatgaccttcttatcctacctactaacataaacacctatcttattcttaaataccttgataagaacaacaatctgattctgacaatattatacaatcaatatcttgcaaaacttgcacaatttgcccactaccaagctcactttcaaaaaaatttgatgtatttagcttcaattgcttatgaccaaccttaaacaccaaccatgcctccacatatggcactacacccttacatgcaaccaagattatatatgcaacattc

SEQ ID NO: 249658 - DNA, 514 bp, Glycine max
  unsure (1)..(514): unsure at all n locations
gggtggnnnntgaatgtacggtgtgatggaatgctctaccggtccggaattcccgggtcgaccgcacgcgtccggggttctcctgaatccgcaatggccgtttcaaccactttctccggtgccaaattggaggggctattgctcaaatgttcttcctcctcttcctcaccaccgccttcaaggtcatcattcaccacttttcccggccaaaacagaagaaccctcattcagagaggggttattcgctgcgacgctcagccctctgatgcatcatctgttgctccaaataatgccaccgctctctccgctcttgagcagctcaagacttctgcagctgatagatatacaaaggaaagaagcagcattatcgccattgggctcagtgtgcacactgcacctgtggaaatgcgtgaaaaacttgccattccagaagcagaatggcctagagctattgcagagctgtgtagtctgaatcatatttgagaagcagctgttctgagtaccctgcatcgaa

SEQ ID NO: 249659 - DNA, 519 bp, Glycine max
  unsure (1)..(519): unsure at all n locations
gtaggtntngtgtgatgttgggagtatatgtatatgctctaccggtccggaattcccgggtcgacgcacgcgtccgaaaacctaagcttacaatctgaaactaagactagaagaagggtaagaatagatcgctgtggatgcaggtaggagagaaagctgtagagtccattatggaaacagctacgaacattggtgcttctgtacaaggctggcatggagaagaccaaagccactgtacaagataaggcacaatgaatgacatcacgtgatccagtgcagaatgaattggcaacccaactgaaagaggcatagatgaaccacgctgatctggacaagcaggctgcacgtcagcataacacggcggtcaaacagtccgacaccacggatgggcacatgtgacatggtcactacaccatcggaaacgagactggaaccagcacgtttccaacacctgggaatatggtctacccatggaggcctacagacgtctggcatgcctggccatgtaaccggcaaacc

SEQ ID NO: 249660 - DNA, 524 bp, Glycine max
  unsure (1)..(524): unsure at all n locations
ggtatggtgactgcgcaagcctcgagaccgcatntgctgtaccggtctcggaattcccgggtcgacgcacgcgtccgcccacgcgtccgtggagttcctgctgatatggccaagaagaaaacaagtgtaatttcgagtaactggtttcctgtttgggatgaagagtttgattttccttctgactcttatcattctctcgaacttctgtgcgtatgcttaagatcactggttctgacctcgatcattcaaaaagaacctcacagctcggacgcgtactttatatgtctactcatctccagctatatatgatgataaaaacctctgaactagacgatgcgagcgttactgcacaatttcataggtgttgtatctatcttgacacacagcagtgtcacgcacatccatctgacgtgacagcatgggatccgtttcatactactaattttctgctatcaatctactgtctggtatcccagtgttaacgctctttccgtagacgatgcttttacttcctgctaggagat

SEQ ID NO: 249661 - DNA, 521 bp, Glycine max
  unsure (1)..(521): unsure at all n locations
gggtnnaagggggnttggtcgaacagggtttattgaactgctctaccggtccggaattcccgggtcgaccgcacgcgtccgaaaaataatggcaaggaaggtgggtttgaattttatagggtgctccatcgttgcaatggggttcataattggtgtggctgaagcaacagattatatcgttggtgaaggcttcggatggagcgttccctccaatgagagcttttatacagactgggctagcaccaagagattcttcgttggtgacaatctcattttcaacatcagcggagagcattcggtgggaattagaacagaggctacttattatgagaattgcaacaccagcttattaactggtttcacgttcataggcgtcaatgggagtaattcgatgtttcgacataatattattcctccaactgggcctcgctatttcctctgcaccgttggaaatcactgtgaaagaggccagaagtttagtatcagcgttgagtctcatcctgattccgctgctcctacta

SEQ ID NO: 249662 - DNA, 512 bp, Glycine max
ggaactgtgttggatggtgggttaatgggtaactctcgtccggtccggaattcccgggtcgacgcacgcgtccgcccacgcgtccgcggagagagagagagaggttttgacgcaacacactttcactgagaaaggatctctatctaccaaggagcagaataaaacccttctctctggtaagtgaataagagaatggcttcagatcggaaacttcacactttcgaggaggtggcaaagcacgaccagaccaaggattgctggctcatcatttctggcaaggtgtatgatgtcacccctttcatggaggatcatcccggaggtgatgaggttttgttatctgcaacagggaaagatgcaaccaatgattttgaagatgttggacacagtgattctgctagagatatgatggaaaaatactacattggtgagattgattcatcaactgtaccactaaaacgtacctacattccacctcagcaagctcagtacaaatctgacaggactccagattt

SEQ ID NO: 249663 - DNA, 258 bp, Glycine max
aattcccgtgtcgaccgacgcgtacgaaaaaaaaaaaaaaaaaaaaaaaaaaaagattagattaaaatgaaagtgttaataataatgcgaagtgtaaaaatagtatagagagtaaggccaattataaaaaaaaaggtccacatttatattattccataataaaaatattattaaaacaaaatcataataacaaaaataacttacacttaatttaacaaaattacttattgttatactcaacttgtttttaaataacaa

SEQ ID NO: 249664 - DNA, 542 bp, Glycine max
  unsure (1)..(542): unsure at all n locations
gtatttgtagtggtatgccacnctgaacgcactgacgtaccggtccggaattcccgggtcgaccgacgcgtccgcccacgcgtccgcggacgcgtgggaaaaaaaaaaaaaaaaaaaaaaaaaaaaaaaaaaaaagaaagaaaaaaaaaaaaaaaaaaaaaaaaaaaaaaaaaaaaaaaaaaaaaaaaaaaaaaaaaaaaaaaaaaaataaaaaaatataaaaaaaaaaaaaaatttaaaaaaaaatattaaactaaaaataaataatataaaaaatttataaaagtataaaaatataataaaaaaaataaatattaaatagatatagaatattttaaatattaaatttttgaaaaagatatattatataaaaatttttataatggttttagaaatatttaaagttttaaatggtaataaaacattatttaatgnattggaaaaaatttttaatttgtataatagaatttaaatataattaaatgtacttaattagaagtatgttttttaaaaagtgtacattataatatctttaattttat

SEQ ID NO: 249665 - DNA, 401 bp, Glycine max
tccggaattcccgggtcgaccgacgcgtccgaaaaaaaaaaaaaaaaaaaaaaaaaaaaaaaaaaaaaaaaaaaaaaaaaaaaaaaaaaaaaggaaagtgaaaaaaaaaaaggaaaaaaaaaaaaaataaaaaaaaaaaataaaaaaaaaaaaaaaaattaaaatttaaatggatccaaattttaaaaaccaaatttttgaaaattataaattttttaattaaacgttatttaaatttaaatccattaaatcttttttaaaaacagtctttttaaaaaaaaatcttttttaaaaaaatttttttaccttaaataaaaccacttttttaaaaaattcttttattacctaaaagtataaattaaaaggcctttaaaaatttctttcacaataaattgccaatt

SEQ ID NO: 249666 - DNA, 523 bp, Glycine max
  unsure (1)..(523): unsure at all n locations
ggtatataggtgtacgtggcatgatacgatctgcatgacgtaccggtccggaattcccgggtcgaccgacgcgtccggcaacttgttccatttttcttccttcctcattcctcacttgcgtcccgaaaatggcttcgagtggcgttgcgggaactgccacacccgaattctaccagaacgtcgtcgtaatgcgtcacggcgatcgcatcgacaacttcgaacccatgtgggtgtccaccgctacccgaccctgggacccaccccttatccaacagggtcgggtccgagccttcgccacgggtcgcaagttccgcaacaacctccctttcactctccaccgcgtcttcgtctctcccttcctccgatgcatccaaaccgccgccgaagtcgtcgttgcactctctgccatcgccgncggcgacgaccccaacgtcatcgtcggcgatgacgtcccaatcgatccctccaaactcaaggtctctgttgaatatgggttatgtgaaatgatgagcaaggacgctan

SEQ ID NO: 249667 - DNA, 537 bp, Glycine max
  unsure (1)..(537): unsure at all n locations
aggtntantgagggcggnntgngatcgatggggagggtgatagtatctgctctaccggtccggaattcccgggtcgaccgcacgcgtccggtcagaggcaaggtgtgagcgtcattctagtaacattcactcttatttttgctgctagtggccttctgttcgaaagtttcaggtcaatttgatttgcaggtccacaaagctgttgatgcttgcaagaatgttcttagaggattgcatagcaacaaaattacggagagggagttggacagggttagttattgaaatgctcaacttgtttttacattacaatttagtgagcagcacttttagacagtttttctcctatacgtaaaaaaaaaaaaaaaaaagaaaaaaaaaaaaaaaaaaaaaaaggagaagaaaagaaaaaaaaaaaaaagaaaaaaaaaagggaaganaagagaagaagagatgaaaaaaaagaaagaaagataggaggaaataagatggataggggaggaaataaaganaaataattgtgtagggtttttgaattta

SEQ ID NO: 249668 - DNA, 522 bp, Glycine max
  unsure (1)..(522): unsure at all n locations
tggggtaaggcggggtgngtattatgggattatatggactgctctaccggtccggaattcccgggtcgaccgacgcgtccggcattttgcagaaaatggaagaattatggggagcttgacaggaataccaactgataaaattgctgacaaattttggttggtcttccaagcacttggtgacattgcctttgcctatccatactccattctccttcttgagatccaggacactctagagtctccttcaccagaaaatcaaacaatgaaaaaggcttccatggttgcaatcttcattacaacattcttctacctgtgctgtggatgctttggatatgcagcttttggaaatgatacaccaggaaacctcttgacagggtttggattttttgagcctttctggctcattgaccttgctaatgcttgcatcattcttcacttggtgggaagatatcaagtactattaatggtacctatcaaaattaactttaaaaaaagtacaccttaaatgatctttctggggtt

SEQ ID NO: 249669 - DNA, 528 bp, Glycine max
  unsure (1)..(528): unsure at all n locations
gattagaggagcgtgtgncgactgactcgaattatattggactgctctaccggtccggaattcccgggtcgaccgcacgcgtccgcccacgcgtccgggcagagtcacattcaccgggctttctttcctcctcttattttgggtatctatgctgtttaattaggaaggtggttctttatccttcggagcctctactatgttgaagttatctttgtatttccacacgttgattattcggtgatcatatgattgtattttcttttcactttttttcttctttagagacctctgattcaattgagtaaaaagtttatttaaacgaaaaaaaaaaaaaaaaaaaaaaaaacaaaaaaaaaaaaaaaaaaaaaaaaaaaaaaaacaaaaaaaaaaaaaaaaaaaaacaaaccaataaaaataaatcgggataagaaataccagatgcataatctgaacctggacaaacttggtgacgtagtgatcgaacatgacaagtgttgatatactctggagaataagcaagacccccgc

SEQ ID NO: 249670 - DNA, 520 bp, Glycine max
  unsure (1)..(520): unsure at all n locations
gagagtgggtngcgtggccagcctgancacgtactgctgtaccggtccggaattcccgggtcgacgcacgcgtccgaaaaaacaaacaagaaaaaaggagttagggtatgaaaaagagaataaagaaggtacacggggggtatcgcctgtgggagtgaatcaagaaccgatctgctatggctgctctgcaatacttggaatcgctgcgtaattcgcaccctgagctctacgattggcacaattcgctggccgatctgtaccagaagaagctctggcaccagctcactctcaagctcaatcagtttgtggctctcgccgtctttcacgctggcgatgctgcaatacaatcatatcacaatttcatcacagactttgagacgaacatcaaccttctcaagcttgcacattatgctgctctagttgctcggctgtattctgaaaaagaagctgctgatgattatcttggaggggtcattcaaaaacttctagacactatggagcagcgcatagaacaacctat

SEQ ID NO: 249671 - DNA, 519 bp, Glycine max
ggtaggtgtgactgccactgcagttatattgcattgctctaccggtccggaattcccgggtcgacgcacgcgtccggtccatccaaatcttaaaaatattcagtgaagatcaacctcaatggcatctcttggcgtgcgaccagttcttccgcctccattaacttccatctccgacccaacctcttttttccatggcaccaccaaggtgtacatcaattattcttgcccctatgcacaacgtgtgtggatccgctggaactacaaggagctacaagataagatcaatttggtccctattaaccttcaagacaggccagcttggtataaggagaaagtctaccctgaaaataaggtgccatccttggagcacaatggcaaggtgttgggagaaagtcttgatttgatcaaatatgtagatgcaaactttgaagggacacctttgtttcccagtgatcctgccaagaaagagttcggtgagcaattgatatcccatgttgatacattcagcaaagacctgtt

SEQ ID NO: 249672 - DNA, 526 bp, Glycine max
  unsure (1)..(526): unsure at all n locations
tgatattcctggtgggtgtngcctcaccgcntcgcatcgcactaacggtccggaattcccgggtcgaccgacgcgtccggcttaatttctactctctacttctagctaacagagttaagtaaactgtcgcttcagtactggatgtgtatataatggcggtggctgtgacgattctggtgacccttctctcggtactcactactgcatcgcgtgtttgagtggtagacacatatccctgaatattgaaccaacaaccatgtgcaagatcactttccttgcgcattgagctactatattcgtgctgcacagcttataacgcacagctgatgctaacttgcgattcaactgctgcgctgttgagggttctgtattgcatttcacagttttggattatcacattaagctccaaattgagacctgttcccattttattgaatgcccatatgctgactcttaaattctaaacaaaatgagatgctgaattcaagcaagtatatactctttactggagaagcccattctgatt

SEQ ID NO: 249673 - DNA, 521 bp, Glycine max
tgtttttatcgtgtggtgagatagaaagagaatgtatgattaccggtccggaattcccgggtcgaccgacgcgtccgctttcacgcctctattacaaatcctgttagcactgctccaagttatttccaaggggaacggtcagtagaatacttcattggggtgaaatccattagagtctctgacaaaaatgtaccattgaacacaacccttttgtctatagatagaaatggcattggtgggactaagattagtactgttaatccatacactgtcttggagaccacaatttacaaagctgtgtctgaggcctttgtaaaagcagtaggagcccctacagttgcacctgtggctccatttgggacttgctttgcaaccaaagacattcagtctacaagaatgggccctgctgtgcctgacataaatctagtgctgcagaatgaagtggtgtggagcatcattggtgcgaattcaatggtgtatactaatgatgtaatttgcttgggttttgtggatgctggata

SEQ ID NO: 249674 - DNA, 454 bp, Glycine max
  unsure (1)..(454): unsure at all n locations
tccggaattcccgggtcgaccgacgcgtccgcccacgcgtccgaaacaagccaagtgaaagagagaagaaaagtcaaagacaatgtcaggggtcatggacaagattgaggagacccttcatgtgggaggccacaagaaggaggaggagcacaagggtgagcagcaccatggtggagaatacaaaggggagcatcatggtgaacacagtactgaatacaaaggagagcatcatgttggtgagcacaagccggagcaccatggaggagaagagcacaaagaggggttcctagacaagatcaaggacaagatccacggcgaggagggtggcgccaccgccgagggcgagaagaagaagaagaagaaggagaagaagaagcatgaacatggccatgacagcagcagcagcagtgacagtgattagattatctnccactgctgcatcacctatatatct

SEQ ID NO: 249675 - DNA, 520 bp, Glycine max
  unsure (1)..(520): unsure at all n locations
cgggcggtgtgngtctgacggggggagtacgtgattgctcgtaccggtccggaattcccgggtcgaccgcacgcgtccgcttctctctctctcggttgtgagtgcagatttcttgcgcggtttatcatgggggatagtgagtattcgttttctgtcaccacatttagcccttctggaaagcttgttcagattgagcatgctttgacggctgtcgggtctggacaaacgtctttgggaattaaagctgcaaatggagttgtcattgctaccgagaagaaattgccatctatattggttgatgaagcatcagtccagaaaattcagttattaacaccaaatataggtgtcgtatatagtggcatgggtcctgattttcgagttttggttcggaaaagcaggaaacaagccgagcagtatcaccgtttatataaagaaccaattcctgtcactcaacttgtcagggaaagtgccgccgtaatgcaggaatttactcaatctggtgggtgtaggccctttggaa

SEQ ID NO: 249676 - DNA, 523 bp, Glycine max
  unsure (1)..(523): unsure at all n locations
ggggnnaaggcggnntcgactatgggggtatatggaatgctctaccggtccggaattcccgggtcgaccgacgcgtccgcccacgcgtccggtggagctactcttgaaactggaggagatagatttggcaactcaggctgctatattcagcctactgtcttctcaaatgttaaggatgacatgctgattgcaaaggaagagatctttggtccagtgcaaaccatattaaaattcaaggaccttgatgatgtgattcaaagagcaaataacacacactatggccttgcagcaggggtgttcacaaaaaacattaacacagctaacactttgactagagcattgcgagttggaacagtgtggattaactgctttgatacatttgatgcagcaattccctttggagggtacaaaatgagtggccaaggaagagaaaaaggagaatacagtctcaagaactacttgcaagtgaaggctgttgttacatccttgaagaaccctgcttggctttgaacatcattagctt

SEQ ID NO: 249677 - DNA, 519 bp, Glycine max
ggccggttgactgcctacgacatgatgattgcactgctctaccggtccggaattcccgggtcgacccacgcgtccgcccacgcgtccgggcttctcctcttcttactccttacaagatgggcaaattcaatctgtgccatagagttgttttggcaccgctgaccagacagaggtcttacgacaacgtcccacaaccccatgccatcctctactactcccagagaacttccaacggaggccttctcattactgaagccactggcgtctctgacacggctcaaggctatccgcaaacccctggcatatggactaaagaccatgttcaagcttggaaacccattgtcgatgccgtccacgccaaaggcggtgttttcttctgtcagatttggcacgttggaagagtttcagattcagtttatcagccaaatggacaagcacccatatcttctacggacaagccactcacaccccaaattcgaagtaatggcattgatcaagtacaatttacccctccaagga

SEQ ID NO: 249678 - DNA, 522 bp, Glycine max
  unsure (1)..(522): unsure at all n locations
tgggtggtgtgactagncctggggattataatggactgctctaccggtccggaattcccgggtcgacgcacgcgtccggcagagcaaagcaaagcagagccaacaacaagaagaacaaaaccaacatcaacaaccacaggaagaagaagcttgcaaattagaagaatcttcagttgaaagggaagaacacacaagaacaaagagaggaagaaacgcgaatgaagggagaattagagttgccaccagggttcagatttcaccccactgatgaagaattggtgaatcactacttgtgtaggaagtgcgcgggtcaaccaatcgcggttcccatcatcaaagaggtcgatttgtacaagtttgatccatggcagcttccagaaattggctactacggcgagaaagaatggtacttcttttctcctcgggatcggaaatacccgaacggttcacggccgaaccgtgccgncggaagcggctattggaaagccaccggcgccgataaggcgatcggaaaaaccgaag

SEQ ID NO: 249679 - DNA, 463 bp, Glycine max
tccggaattcccgggtcgaccgacgcgtccgttttgcatgtgtcattgttcatctggctgagtgcagttgtctcttcattcttctattttgagaaggtgagcgtgattgccactacagttaccagctctcttggaagaagaaaattgtttgcccagataaatagcttcattgctgattttattcttgttggacaactgtccttgacgtacagggacgcattcttactgttgctggggtgactacagctatatgctcagcacctttcgttggcctcttaaatttagtcgctctagctgtttggccaaaatgggtggtggttgccatttgtgagacgctgagaaaggttattatgacttgcaaatattggttcctttaatagatttcagtaattaacaacatatctagaaatctgtattgtgaaagtagatttagaatatgtataggttcattgtatgatataat

SEQ ID NO: 249680 - DNA, 471 bp, Glycine max
tccggaattcccgggtcgaccgcacgcgtccgggctttacaacgtaccatggggcatgtacaaatcattgatgtacataaaggaacgttatggaaagccaactgtgttcttatccgaaaatggtaacattatatatcaatttcttgctttttcctttttttggcttggtgattctgttgtttcaatgtcatgtgacatattttatgacatgtaggcatggatgatccgggtaacgtgactcttcccaagggtttgcatgacaccacaaggataaactattacaaaggctatttgactcaactaaagaaggcagttgatgatggagctaatgtggttggatactttgcatggtcattgctggataactttgaatggaggttgggttacacatcaaggtttggcattgtctatgttgatttcaaaaccctcaagagataccctaagatgtcagcatactggttcaagcaactc

SEQ ID NO: 249681 - DNA, 525 bp, Glycine max
  unsure (1)..(525): unsure at all n locations
agttntaatggcgggtggncctcgcacagaagttctatgaagtgctcgtccggtccggaattcccgggtcgaccgcacgcgtccgcggacgcgtgggttccgcaaatggcttctcacgacagcatctccgcttctccaacctccggttctgattccgtgttcaatcacctcgttcgtgctcccgaagatcctatcctcggggtaactgtcgcttataacaaagatccaagtccagttaagctcaacttgggagttggtgcttaccgaactgaggaaggaaaacctcttgttttgaatgtagtgaggcgagttgaacagcaactcataaatgacgtgtcacgcaacatggaatatattccgatcgttgggcttgctgattttaataaattgagtgctaagcttatttttggggctgacagccctgctattcaagacaacagggttaccactgttcaatgctngtctggaactggttctttaagagttgggggtgaaattttggctaaacactatcaccaacggact

SEQ ID NO: 249682 - DNA, 522 bp, Glycine max
  unsure (1)..(522): unsure at all n locations
gggagaatgggtgcgtgccatagaacatgattgactgctctaccggtccggaattcccgggtcgaccgcacgcgtccgatcttcgtcaaaaagcttctcattcatggcgacaacgctcatttcggcttactcattcatgggcacacctatcgggtaactccctcaccaccaactatcactgcggaccaggctcgacatcaccaaagtcctcgtacgacttcacgaatataccccaatccactccatatgtcccaacattgtcttccccggaatcgcgactagagccgtacgtcttctctacacgctcgccgatgctactgttgctgctgaccctgcggctgctgcagactctgcggctttcaccaccgatgctgaccgacagaaaagcggatgctgattctgcttcatctcacataccatggaattcgttctcaacgaggccaatgatggcctttctgtcgagcatgtaccttatgcatatggacttgctatcagattgctcactngtatagntaaggccgc

SEQ ID NO: 249683 - DNA, 514 bp, Glycine max
  unsure (1)..(514): unsure at all n locations
tgaaggntntntgatagggaagttttatggactcgctgtaccggtccggaattcccgggtcgaccgcacgcgtccgtgctctccttcgagcgtcgcctgaaggataacatcgaagcgcgccttaaataccctagcgaaccggaccgcttggccgattccgaagtagaactccacgaagagcttcagaagctgaaggtcctcgccggcgcgccggagctctacccggacctcgtcaacctcaacgtggttccctccatcgtcgacctcctcaaccacgacaacaccgacatcgccatcgacgtcgtgcaattgctccaggacctcaccgacgaggacgttctcgacgacaacgacgactccgctagggttttggtcgacgcgcttgtcgacaacagcgcgctcgagctcctcgtgcagaacctgcaccgcttgaacgattccgatcccgacgagaacgccgccgtgtacggctccctcgccacggtggagaatatgatcgacgtgaagcccgcgg

SEQ ID NO: 249684 - DNA, 517 bp, Glycine max
  unsure (1)..(517): unsure at all n locations
tgtagttggtntngtgcatagaatagtacgcactgctgtaccggtccggaattcccgggtcgacgcacgcgtccgccgccggccccgttccggctccaccgccgaacgtgaccccggtgtctgagtacacccagaggaagatttttgtgagcaatgtgaatgctgagattgatcctcagaagctgcttgaattcttcaagcagtttggggaggttgaggatggtcctcttggtttggataagaacactgggaaacctaagggttttgcgctttttgtgtacaagtctgtggagagtgccaagaaggctttggaagagcctcataagaactatgaggggcatactttgtattgtcagaaggctgttgatggtcctaaggggagcaaggggtatcatcatcagcagcattctcatcctcatcaccaccaccaccatcagcctcattaccagaggaaggagaagaacacgtattcctctggtggtggtggaccatcgcatggaagtggtcatttgatggc

SEQ ID NO: 249685 - DNA, 530 bp, Glycine max
  unsure (1)..(530): unsure at all n locations
agtttnttccggtgtggtgtcctcagataagcacgtgtatgctctaccggtccggaattcccgggtcgaccgacgcgtccgcctttgctcactcttcttctcttgcggctagggttttagcgcagcttcttctacatttaaggaagatgggtaaggaaaaggttcacatcagtattgtggtcattggccatgtcgactctgggaaatccactaccactggtcacctgatttacaagcttggaggcattgacaagcgtgttattgagaggtttgagaaggaagctgctgagatgaacaagaggtctttcaagtatgcctgggtgctggacaaacttaaggctgagcgtgaaagaggaatcaccattgatattgctttgtggaagtttgaaacaacaaagtattattgcacagttattgatgcgcctggacatagggatttcattaagaatatgattactgggacatcccaagctgactgtgctgntcttatcattgattcgaccactggtggttttgaagctggtatttca

SEQ ID NO: 249686 - DNA, 460 bp, Glycine max
tccggaattcccgggtcgaccgacgcgtccgggaaactatcctgagtggaaactctacatccaaacattggatcccgaaaacgaagacaggcttgactttgacccccttgatgttactaagacctggcccgaggacgttttgcccctccagcctgttggccgcatggtcttgaataagaacattgataacttctttgccgagaatgaacaacttgcattttgccctgccattattgtacctggtgtatactactccgatgataaattgcttcaaactcgcgtattctcctatgctgatacccagagacacagacttggaccaaattatctgcagcttcctgctaatgcccctaagtgtgcccatcacaacaatcaccatgatggtttcatgaatttcatgcacagggatgaagaggtcaattacttcccttaaggtatgatcctgtccgtcatgcggaaa

SEQ ID NO: 249687 - DNA, 472 bp, Glycine max
gaattcccgggtcgaccgacgcgtgcggcacaacaagtacggcgctttgccttcggcagctgagacttacaactatcgcacaaaaaagacccgttgctgccaaaccgggctcactttcaccaattcattattcccattttctccagaaccacaagaagaagaagtttgtaacaataatgggaatgaagggtgctcccgccactctctccgacgacgacgtcgttctcaagtccccaaacgaccgtcgtttgtaccgcctcatccacctgcccaacggccttcgcgccctgctcgttcacgatcccgagatttaccctgaggggcctccgaagcatgtttcaaacgaggacgaaattgaagaagaagatgatgatgatgaagaaaaagacgaggatgaagaaaaaaaagaagaagatgaagatgatgatgatgaagatgaagaagaagaagaaggaaatgaaatggatggggt

SEQ ID NO: 249688 - DNA, 525 bp, Glycine max
  unsure (1)..(525): unsure at all n locations
tgggtntaggagtncttaaaatagaaaggggaagtattgcactgccggtccggaattcccgggtcgaccgacgcgtccgggaagtctaatgaacctcctcgacaccctggatttattcttcaaacaaaatggaccaaagattctaaaatacgttctttgtcattgtcactggattcattgctggattatacagataaagatgttgaagaatcaaatcttgagctttcattgtttgctgaatcattttatgaaatgcttcagtttcaaatgggttctagaattttgacatttcttcagaaactgcgcataaaatttgtgatcaaaagaaatcagaaaaagaggcagagggaagatgagcaagagaaggatgatgtaaaaaaatctcctgttaagcgtcaaaagggaaatgatccttcagtgaagaatgagcccacaaatatggacacgttaaatccaaccctactagatgatgagaaagctgttgctaggaatgataactctagtaataaggaggatgatgtgaan

SEQ ID NO: 249689 - DNA, 514 bp, Glycine max
  unsure (1)..(514): unsure at all n locations
gaaatgtgtnngtgaataagtgatatatgcactgctcgtaccggtccggaattcccgggtcgaccgcacgcgtccgggagaaagcaaggtgggaaggatgtacttgttccactgagagagcttgaagatgtcattgttcccccatccccagtgacgtttcctgaagatcatgagacctgnaatgttcagttgtttagatccattgatggtggggctgcttttgggttcccggagactcctgaagatgctgccagagctggtcttattagtgggaaggataatatcattgatcgtagcattcaagatgcttatattaatgctattcgacgtgcaaagaacttcatctatattgaaaatcagtatttccttggaagctcttttgcctggagtgctgatgatattaagcctgaagacattggtgctttgcatctaatcccaaaggaactttcactcaagattgttagtaagattgaagctggggaaaggtttgctgtgtatgttgtagtcccaatgg

SEQ ID NO: 249690 - DNA, 523 bp, Glycine max
ggaatttgtgtcttgccacgccatcacacagcattgctgtaccggtctcggaattcccgggtcgaccgcacgcgtccgaaaaaaaaaaaaaaaaaaaaaataaaaataataaaaataaaaaaattaaaaaaaaaaaagagttaaaatacaaaaagaaaaaaaatacacatacaaaaaaaaaggtacaccaatctattgggtccagctttacatccacatccttactcctgtttagatttcttctcatgtagcttaaatgcaatctgctgatcctatgctttaaagcttcttaactggcaaatccctttcattactcatctaatcctcctatttgaatatcccactttataaagcttgcttaactctcataatgcccttacaaatatcctttctaaacttttgcatatcttgactggtgaatggtctcccccttatcatgtcactttatccgcactcttatttgggtatacaacataggtgccattttcactatctagcgcccatactcactgacttttctttt

SEQ ID NO: 249691 - DNA, 475 bp, Glycine max
tccggaattcccgggtcgaccgcacgcgtccggcacaacaagtacggcgctttgccttcggcagctgagacttacaactatcgcacaaaaaggacccgttgctgccaaaccacgctcactttcaccaattcattattcccattttctccagaaccacaagaagaagaagtttgtaacaataatgggaatgaagggtgctcccgccactctctccgacgacgacgtcgttctcaagtccccaaacgaccgtcgtttgtaccgcctcatccacctccccaacggccttcgcgccctgctcgttcacgatcccgagatttaccctgaggggcctccgaagcatgtttcaaacgaggacgaagttgaagaagaagatgatgatgatgaagaagaagacgaagatgaagaagaagaagaagaagatgaagatgatgatgatgatgatgaggaagaagaagaaagaaatgaaatggatggg

SEQ ID NO: 249692 - DNA, 531 bp, Glycine max
  unsure (1)..(531): unsure at all n locations
cgtatattgagtatgcgggtgccaatggccacgcctttcatggactgacgtaccggtccggaattcccgggtcgaccgacgcgtccgcccacgcgtccgcccacgcgtccgattctttcccttcggattaggccctcgaatctgtgtggggcaaaatttggcattggttgaggcaaagattgctcttgctttgatcattcaaagttacagttttgtgctatctccaaactatatgcatgctcctatactatttgtgactttgcagcctcaatatggtgcacaaatcattttcagaaagatatcatattgctgattgttgttgccttttcccacttctccccctgtgtaactttaaactccgtaaatggggaagcattgtagctataaatattgtgctttttttacttgtgaaagcttatgtagcctatgttgataactggtgaaagtttttcaggttaaagcagcataacttaaattggatcatcanatatataaagatttggcatgcaaaanaaaaataaaaaagggcgg

SEQ ID NO: 249693 - DNA, 525 bp, Glycine max
  unsure (1)..(525): unsure at all n locations
ggggtaaggtgcnctntccatgaagggattttatggacctgctgtaccggtccggaattcccgggtcgaccgacgcgtccgcccacgcgtccgcttagagagaaaaaaaaatggctgatacaggtggaggagatgcagtgagaccagtggtaatatgtgataacaagtgtggctgcacacttccatgcactggtggttccacttgcaggtgcacaagtgctggcactgccacaggagggggtgatcacgtgacatgctcgtgcggagagcactgtggttgcaatccatgctcatgtcccaagattgcggctgctggaagtggttgcagatgtggcacagattgtgcatgtgcctcctgccgcacttagtatcacaccttaaggcttaaacttcacgttttattttatgtcttcaaatcttgaatacgttttctatatattagtcttgtttaaagttcaaagtgtggacgtggtttctacttagtactcaaacgtattagtaattggtatcaaaactgtccaacaa

SEQ ID NO: 249694 - DNA, 546 bp, Glycine max
  unsure (1)..(546): unsure at all n locations
agtttaagggnnnnnnnccatgagattaaaccgatgcatgacataccggttcggaattcccgggtcgaccgcacgcgtccgaggaaattaggcatgaccctctttgagtatgctctgcctatttgaaaatttccacacctgttttaattgtcgtaatgatgtgtgaagtgtgtgttattttaaaaaaaaaaaaaaaaaaaaaaaaaaaaaaaaaaaaaaaaaaaaaaaaaaaaaaaaaaaaaaaaaaaaaaaaaaaaataaaaaaaaaaaaaaaatttaaaaaataaaaataataaaataaaaaaaattaaaattataaaaattatttattgaaataaaaaaaaaaattcatttactcttattaaaaaattatataatagnttaaactttaaattttcacaaattaatantaccttctccaaaattacccttttttacaacattatttaaaaacctcaaaaaacctctaaccaatcccccttttccaaaaaattttacaaacccaaaactgtccaattaaaaaccccaccttaatttatgcgattc

SEQ ID NO: 249695 - DNA, 551 bp, Glycine max
  unsure (1)..(551): unsure at all n locations
ggtttttcggggnnnnnanaatcgaaccctacgtactgacgtaccggtccggaattcccgggtcgacccacgcgtccgcccacgcgtccgggagggtaaaagtcaaggtcaaggttcagaaggaggttctgaatggagcaatactcgaacagtcttatcccgtcgagtatgttcaacaagaacatatgtgtgaatcctgttctagggtccaagctaatcctgaccagtgggttgctgctgtgcaactcaggcaacacgtttctcacaggcgtactttcttttatttggagcagctgattctgaagcatggtgctgctgccactgctatacgaatcaagcagatggaacaaggtatcgacttctttttctctaatcgaagtcatggagtcaaatttgtggagtttattgggaaagtttctccggtaaggagccgccatgataagcagcttggttctcatgatccanaagagtnattacttccacttccaatatacattttctggtgaaatcaagcctatttgccgtgaggatttaatctgtctgccttctaa

SEQ ID NO: 249696 - DNA, 542 bp, Glycine max
  unsure (1)..(542): unsure at all n locations
ngtnttgaggggtgcgtgatctagcnccgtacgcactgacgtaccggtccggaattcccgggtcgacccacgcgtccgggccacgaaaaaaagaaaacccagaaaaactctgaagaagagttcgttgctttctgcttgactgcgaagatgaacggaggcccatctggtttcacaaatgctcccgtcacaagggctttcatcatcacttcggcgcttttcacaatcttctttgggatccaaggccgtttcagcactctggggttgtcgtatcaggatatttttggaaagcttcgcctttggaagttgatcatttccatattttccttctcgtcaacaccagagttgatgtttggattgtatcttctatattacttcagggtctttgagaaacagatggttcccaataatacctagtccttaatggggtctccataataacttcactactgcttgaggtccttgctgtagcacttttaaaagatactaccgcaaaccttgtgacttctggaccctattggcctataattgcttcaattctaacc

SEQ ID NO: 249697 - DNA, 333 bp, Glycine max
cggaattcccgggtcgacccacgcgtccgcccacgcgtccgcgagcagcgagagagagaaaccctagcaaaaatgccggctggtcacggtttgagatcccgcaccagagattccttctctcgtcccttcaggaagaagggtaccatcgccctcaccacatacctcagaacctaccacgtcggcgattatgtcgacgtcaaggttaacggcgccgtccacaagggaatgcctcacaagttctaccatggccgcaccggtcgcgtctggaatggtcaccaaacgtgctgttggggtcgaagtcaacaagcaggtcggcaacagaatcattaggga

SEQ ID NO: 249698 - DNA, 550 bp, Glycine max
  unsure (1)..(550): unsure at all n locations
cgatatnccgcggtnnntatngactgagaatgagtgtcatagcactgccgtaccggtccggaattcccgggtcgacccacgcgtccgaacgtgttcagtaagtatgctcgtacagttcctgacaagctcacacttggggaggtctgggacatgacagagggaaacagaaatgcgtttgacatatttggctggcttgcagctaaacttgaatggggggttctgtacattctggctagggatgaggaaggtttcctctctaaagaagctgttagaagatgctttgatgggagcttatttgattaatgtgctaaaatgcatgctactagtgatgccaagatgggttgaaattggattatgtagtactatatagtgtgtatgtatagttacgttatgtgtcaaaaaaaaaaaaaaaaaaaaaaaaaaaaaaaaaaaaaaaaaaaaaaaaaaaaaaaaaaaaaaaaaaaaaaaaaaaaaaaaaaaaaaaaaagggaagaagatataaaggatccaagtttacgtacgcgttcttgcaagtgattaaattttttat

SEQ ID NO: 249699 - DNA, 522 bp, Glycine max
  unsure (1)..(522): unsure at all n locations
agagctanataactgaagccagggaccgatagtactgccgtaccggtccggaattcccgggtcgacccacgcgtccgtgctaatcggggagcccgcctttctgctgctggtatttttggcatcctcaagaaaataggaagagacacagtaaaggacgggaagaaatcagtagtagcactggatggaggattgtttgaacactatactaaattcagaagttccttggagagtacactaaaggagttgttgggagatgaggcagctgagacaattggcattgagcagtctaatgatggctctggaattggagcagccctcctggcagcttctcactcccagtatttggaagtgcaggagtcctgaagatgtggtttaatgtcaaggtaaatcagtgtaacactagtttcatttttttgtatacctactagatcaacagattgaaacagaaaagtcttcgttactagtcctagagagcttttaaccaggaaagtggaccaagtncacaagtgagttatttgtagn

SEQ ID NO: 249700 - DNA, 540 bp, Glycine max
  unsure (1)..(540): unsure at all n locations
cgttttaagcgtgggtnttcccagcccaagcatgtaatggtactcccgtccggaattcccgggtcgacccacgcgtccgatgcgatacagtggttggaggggaaccagttggcggaagtggatgagtttgaggacaagcagaaggagttggaagggatctgcaaccccatcattgcgaaaatgtaccagggtgctgctgctagacctggtggagatgttcctacgggtgatgatgacatgcctggtgctggtggtgctggttctggcgcgggacctaagattgaagaagttgactaagcttgtgcatgtgactaactcaaaaactttggttaggttcttgttatttggtctaataatgtaagttttagtgatgatgtaaggtttcaggaatcgtgaataagtcttttntgcttcatgtgatgagtgtaatatcanagatggagttgagattaatgtaatttttattcaaaaaaaaaaatatnnannnnaantttatatataaattatataatttagtttgttaaaagggaattcctttta

SEQ ID NO: 249701 - DNA, 364 bp, Glycine max
  unsure (1)..(364): unsure at all n locations
cggaattcccgggtcgacccacgcgtccgccttaccctctttgcaactacccttccgcaccacagatatctctcccgccgctccttccgtttgcgccgcttacgactactatctccgtcttcctcaactcagaaagctttggaactccactgattttcctaattggaacaacgaaccgattctaaaaccaattttgcaagctctcgaaatcacgttccgctttctttccattgttctctccgatcccagaaccttcctgaaagcagcagaggactgctacgccgtggagaggatctggaagcttctcgcggaggtggaggacctncacctgatgatggatccggacgatttcttgaggctaaag

SEQ ID NO: 249702 - DNA, 551 bp, Glycine max
  unsure (1)..(551): unsure at all n locations
nggttnaagcgcggctagnttatgatacgggancgtcgatgcactgctcgtaccggtccggaattcccgggtcgacccacgcgtccgcacaaagcgggttactgtctgttcaagctaccatctctctctctctttcttagtgcctgcttgccagaagttaaaatggcccaagaaactttcctattcacatctgaatcagtgaacgaggggcaccctgacaagctctgtgaccagatctccgatgctgtgctcgatgcatgcttggagcaggaccctgacagcaaggttgcctgtgaaacctgcaccaagaccaacatggtgatggttttcggagagatcacaaccaaggccaacgtggactatgagaagattgtgcgtgacacatgcaggaacattggttttgtctctgatgatgttggtcttgatgctgacaactgcaaggtcctcgtcaacattgagcaacagagtcctgatattgctcaaggtgtgcacggccacctcacaaagaggcctgaggagattggtgctggtgaccaaggtcatatgttcgg

SEQ ID NO: 249703 - DNA, 547 bp, Glycine max
  unsure (1)..(547): unsure at all n locations
ggtnaaggcggctgcccacgtataagcacgttgatgcacctgctcgtaccggtccggaattcccgggtcgacccacgcgtccggtgctgatccctctagatcccttaatatcaaattccctaattctcaaaatctcatgtcgtcttctcctctttcaaatgttgaaccaaattctgttactaatgaacactctaacactgtttctgacttaaacagatatccaagtgaactgtccagtacctcttcttctcagtctcacactgtcagttctccttcttataatcatgttcttcccccacaaaatgtccatcctatgcaaaccagattcaagtttggaattcatcaatctaggttgcatccttcactgtttatggcacattgtgaacctaagacagttaaacaggctcttgctgacccttaatggtttgctgctatgaatcaagagtatgaggctcttcttaacaataaaacatgggatcttgttcctcttcccaaagacaaacaagttgtgggttgtaagtaggtcttcagaattaaggagaatgtn

SEQ ID NO: 249704 - DNA, 489 bp, Glycine max
accggttcggaattcccgggccgacgcactcgttcgtagatgatacctgtacatcccttaatgtcaaattccctaattctcaaaaactggggtcgtcttctcctctttcaaatgttgaaccaacttctgttactaatgaacactctaacactgtttctgactaaaacagatatacaagtgaactatccagtacctcttcttctcacactcacactgtaacttctacttcttataatcatgttcttcccccacaaaatgtccatcctatgcataccagattcaagtttggaattcatcaatctaggctgcatccttcactgtttatggcacattgtgaacctaagacagttaaacaggctcttgctgacccttaatggtttgctgctatgaatcaacagtatgaggctcttcttaacaataaaacatggcatcttgatcctcttcccaaagacaaacaagttgtgggttgtaagtaggtcttcacaatta

SEQ ID NO: 249705 - DNA, 298 bp, Glycine max
taattcccgggtcgacccactcgtcctcccactcgtcctaaaaaaaaataaaaaaattttatatcataaaaataaaaaaataaaaaataagttaatcataaaaaaaaaagaaattacaacctaaaaatataccaatttaaattatcatattatcaaccccaaatctattttaattttaattaatataattttaataaactctatctaaaaaaaatctttttaatataataaccatctctattttccactcctaacataacttattttaatctaatctcccaatcttattaaattcttc

SEQ ID NO: 249706 - DNA, 476 bp, Glycine max
cggtccgtaattcccgggtcgacgccagcgcgtccgcgagaatggacaaggaagtggagcttggttcccttgaaggtgaaatggccacccagcacaggtcacaaccacagaagcgcaagggtggtcttgttaccatgcctttcatcattgcaaatgaggcacttgcgagggtggcaagtttgggccttttgcccaacatgatactgtatttgatggggacctacaggcttcaccttgcccaagcaacccagatacttctctggtcccatgctaccagcaatttcacacctgtggtgggtgctttcattgctgattcttatctgggtcgattcctcgctgttgggttgggttcggccatcacttttctgggaatgacactgctgtggttaacagctatgatcccacaggcacggcctcccacttgcagtagcaataaagctggaggctgtaaatcggcaacaggagggcaaatggca

SEQ ID NO: 249707 - DNA, 536 bp, Glycine max
  unsure (1)..(536): unsure at all n locations
tgtnttcccggtgcgtgtatagatatgaaatgactgctctacccgtccggaattcccgggtcgacccacgcgtccggcagttgaaaagtctggaatagccaaagatgttacagaactgattggcaaaaccccaatagtatgtctgaataaaatcgcagacggttctgttgcccgggttgctgccaaactggaattgatggagccatgctctagtgtaaaagacaggattgcctatagtatgattgctgatgcagagaagaagggacttatcacacctggacagagtatcctcattgagccaacaagtggtaatactggtattggattagcattcctggcagcagccaagggctacaagcttataattacaatgcctgcttcaatgagtcttgaaagaggacccattcttctgcctttggaacctaagtgggtcttaccaaatcctcaaaaggaattaaaagggcaagtcaaaaagccgaagaagatttagattagactccaacggctacattcttcaacaattttgaaaccctggc

SEQ ID NO: 249708 - DNA, 546 bp, Glycine max
  unsure (1)..(546): unsure at all n locations
gaattagtgtgcgtgtcgacgtagccagtgctcagtngcacctgccgtaccggtccggaattcccgggtcgacccacgcgtccgcccacgcgtccgctcggtttccttactaattactttaacccaataatccaatagctacgtacaaagttgaacaataccaccatcatagcgcatcatcatcagaattccaaggggaattgttgatgtggtggtgagaatgatgtatggggagtagaactaccaggagggttgttagtgttgaagatgacaagggagctgaaagaggaatgccgagcttcaattctgagttacccaattccaattcatgctatacagaggggaacacaattgattcttttcgtgtttctgactttggagcatttgatcagtcatatcacatagaggatgctgttgacctcagtggaaacccagtttacaattcactaaaggtaatagccaaacaatttctccgggttctgttcacattagtagccttggtcaggtgagtttttctagttattttcatccaatgaacttcctgct

SEQ ID NO: 249709 - DNA, 544 bp, Glycine max
  unsure (1)..(544): unsure at all n locations
ggtntttgaggtgcntttangatgagtaaaggatctcgtcgcaatgcctgtaccggtccggaattcccgggtcgacccacgcgtccgcaaaatgactcaagcccagattcaaccagttaaacttggaacccaaggctttgaggtttgaaaattgggattcggatgtatgggccttactggagcgtacaatgaccctctccaagaacaggatggcatatctgttatcaagtatgcgttcagtaagggaatcacattttttgatactgcggatgtttatggagccaatgctaatgaacttttggttggaaaggctttgaagcagctgcccagagaaaagattcagatagccacaaaatttggtattgcttcacgaggttttcctgatatgaagatcaagggttcgcctgaatatgtgcgatcatgctgtgaagctagcttgaagcgtcttgatgttgaatacattgatctctattatcagcacagagtggacacatctgtacctatagaggaaacagtgggtgaacttaagaaattggtcgaagag

SEQ ID NO: 249710 - DNA, 547 bp, Glycine max
  unsure (1)..(547): unsure at all n locations
cgtnccccgtgcnctttcgatgagtcagcgtgcctacgcactgccgtaccggttcggaattcccgggtcgacccacgcgtccgacaaaaccaagttaatgttgcaatcgcataataataaccatccaaagtttattgagagaaatttgcaagtttgaaaagaaacatggcatctcatcaacaaaacaagcaagagcttgatgaaagggcaaggcaaggagagactgttgttccgggtggcactggtggcaagagccttgaggctcagcaacatcttgctgaaggaaggagcaggggagggaaaacaaggaaggagcagctggggacagaagggtaccatgaaatgggacgcaaaggtgggttgagcactatggacaagtcaggagaagaacgtgctcaagaggaagccattgacatcgatgagtccaagttcaagactggtaataaccaagacaagaaccagaacaagtgatcatgcaacacccttcactatcatatgtagtgtgttcttatgctagcttaaatgctagtgtcttagtgttttagga

SEQ ID NO: 249711 - DNA, 540 bp, Glycine max
  unsure (1)..(540): unsure at all n locations
gggtnntagagcntnttngatgattaagaatctgatagcaccgccgtaccggtccggaattcccgggtcgacccacgcgtccgcccacgcgtccgcccacgcgtccgcccacgcgtccgcccacgcgtccgtgaacaagggggtctctgtctgcttcttcactttctctcgtttcaatcgaaaccaaaacaaaatcatgggcagaaaattcttcgttggtggcaactggaaatgcaatgggaccactgaggaggtaaagaagattgttactactttgaatgaggctaaagtccctggagaagatgtcgtagaagttgttgtgagccctccttttgtgttccttcctgttgtaaaaagtttgctgcgccctgatttccatgtttcggcacaaaactgttgggttcgcaaaggtggtgcttataccggtgaggttagtgctgaaatgcttgttaatttgggaattccttgggttattattggtcactctgaacggaggcagcttttaaatgaatcaaatgagtttgtgggagataaagttgc

SEQ ID NO: 249712 - DNA, 477 bp, Glycine max
  unsure (1)..(477): unsure at all n locations
cggtccggaattcccgggtcgacgcaggcgtccgattcaataccatttaccaaactcactcatcaattctcatctttcttctcactaactattagtggatcatgtcgagcgcagctggccaagtcatcaaatgcaaagctgcggtttcatgggaggcagggaagccacttgtgattgaagaagtagaggttgcgccaccacaagctggtgaagtgcgtttgaagatcctctacacctctctttgccacactgatgtttacttctgggaagctaagggccaaactccattgtttcctcgtatatttggtcatgaagctggagggattgtggagagcgtangtgaaggtgtgactcatctgaaaccaggggaccatgccctccctgtgtttaccggggagtgtggggactgccctcattgcaagtcagaggagagcaacatgtgtgatcttctcaggatcaacactgataagggtgtca

SEQ ID NO: 249713 - DNA, 513 bp, Glycine max
  unsure (1)..(513): unsure at all n locations
gtaatttnnctagctcgtggggataatatggtaactctcccggtccggaattcccgggtcgacccacgcgtccgcgaagccttcgaatctctctgaaacttttctcttctctttgattcttctctatcagttaggcgttagaatgagccgttcacaggatccacacccttcccgatctttcttcccttttggaaatccttttcggatgatatcacctaaaggctctcgcatgtctccacaacttcttgcagtgttgcaagcttttgaggcaacattgtcagagaggctgaaaaatcttatgcctaaaagcaaggatgaaatcctcaccttgtcttggatgactttagctatgaagtcactttgtgaaagtcacaatgacatacggacccttatgactgcccttgagcttcctgtgagtgattgngaggacaaatggattgatgtgtacttggacataagttcaaagttgctagacatttgcaatgcattcagctctgagctttcacgtctgaa

SEQ ID NO: 249714 - DNA, 542 bp, Glycine max
  unsure (1)..(542): unsure at all n locations
tgantccctggtgcgtgtgatttgataagattgtactgctgtaccggtccggaattcccgggtcgacccacgcgtccggctattacgagacgacgcagatttagttcggattgttcgattgcgatggctaggaagatgcttatcgatggtgaagctgaattggctcaaggtggtggagaagaagtgtcgaattttgacttcgacttgtttattattggggctggaagtggtggcgttcgtgccgctagattttcatccaattttggagctaaggtggggatttgtgagcttccatttcatccaattagttcagaaacaattggaggagtcggtggaacgtgtgttattcgtggttgtgttcccaaaaagattttggtctatggagcatctttgggaggtgatcttgaggatgccaggattattggttgggagtgagtgagaaaagtgacttcaattggaagaagctcttgcgaaagaagaccgatgaaattaacagattaaatggactttacaagcggatggtatcccattgggggggttaa

SEQ ID NO: 249715 - DNA, 547 bp, Glycine max
  unsure (1)..(547): unsure at all n locations
tgatttacgatgtgctngatctacgactattattgtactgctctaccggtccggaattcccgggtcgacccacgcgtccggatagatatatagaagagccttccatatatagcctcccaaaaaaatgaagagtactacggctttggctctctttctactttgtgccctaacttcatcatatcagccttcagccaccgctgatattgtattcgacaccgaaggcaatcctattcgaaacggcggcacatactatgtgttgccagttataagaggaaagggcggcggaatagaatttgccaaaaccgaaacagaaacatgccctctcactgttgtgcaatctccctttgaggtctcaaagggtctaccactgataatttcatccccatttaaaatccttgacatcaccgaanggactattttgagcctcagtttcacttatgtacccccctggtgcttaacctcttcttggtggaccggtattcttaagggtctggccgaagaacttcatggcaaacctaattgctatcaaaacacaattgatgggtgg

SEQ ID NO: 249716 - DNA, 541 bp, Glycine max
  unsure (1)..(541): unsure at all n locations
ggttttgagggcnntttgcactgagtccagccctccatagcactgccgtaccggtccggaattcccgggtcgacccacgcgtccgcccacgcgtccggtgatgtctgggaatgcagcagtcaaaaggagtgattgggcctcatgggtacaagtgtttttaacaaacagcaacagtacagagcattttgatgcatgtaagtggacaaaatcggaaccacattcctgggaattgatcttcccaatagaggtatgtggtcctaataatggttttgaaatgtggagttctgagtgggcaaatcaaacttcatggcatttgagtttccttattgacaatcccaaacagtctacagtttttgatattctcttgggaatttctcaagattttgaaattgctggtaatactcttatgccagctttttctgttccacaggctactgccagatcttctgaaaatgcggaatcctctgcatgatctggaatttgtgttttctttcgcttgttcgtttgtttaattcaataaaggaaattaggcatgaccctt

SEQ ID NO: 249717 - DNA, 547 bp, Glycine max
  unsure (1)..(547): unsure at all n locations
tatataagatcgtattgtccatgntctttgccatagcactgccgtaccggttcggaattcccgggtcgacccacgcgtccgtccacacatactcctttcattatttaccttccacttaaatgaatagtattagcgtcagggctattactgtactttgttccctaactttataaaatcatccttgattctcctctaataatgttatctacacctatttcaattctattctcaacatagtcacatactattagtttccaattattagactaaatggcttctcaatataatttgaccaaaccaaaacacaaacataccctctcactgttgagcaatctacctttacagtctcaaacagtctaccactgataatattatccccatttaaaatcctcgacattaccgaaggacttattttgagccctacatttcacttatgttcccccctagtgcctcaaaatccttcttgaggacccgtttttctcatgagtattgccaaaaaacttcttgtcaatactcattttgtcaacaaacactatagattggttgt

SEQ ID NO: 249718 - DNA, 517 bp, Glycine max
  unsure (1)..(517): unsure at all n locations
gggtggttngtctgccctagccccgatgnagagacgcaccggtccggaattcccgggtcgacccacgcgtccggaatctttgaattattgctaagaaagttttgcaggaagcttccagccccaatcgcaccctggaccttgcatcttcccttgacgttggtcccagtggaaaccgagcttcagatgaatgtgctggaaattccagctatatgagatctgtgatgacaatagcatttgaatttgcatttgaaagccatatgcaagagcatgtagcagctatggcacgtcaatatgttcggagcattatatcatcggttcaaagggtaggattagcactttctccttctcatttgagttcacatgcagggcttaggtcaccattgggtactcctgaagcacaaacccttgctcattggatctgcaacagttataggtgctacttgggtgtggagctacttaaatctaataacgaagggaatgaatctttgctcaagtccttgtggcatcactcagatgc

SEQ ID NO: 249719 - DNA, 74 bp, Glycine max
atctaaaggatccaagcttacatacgcatgcatgcgacgtcttaactcttctatagtgtaacctaaattcaatt

SEQ ID NO: 249720 - DNA, 543 bp, Glycine max
cgtctttcgagtgagtgctgccggggccgtgcgcactgcctgtaccgcgtccggaattcccgggtcgacccacgcgtccgcgagcctcaccttcgagctctcctcgccccagactccctcgacggcggcgagaggcgcggagggcgacgtgatggggctgttgctgagagagaggattgtgttcctcgggagcagcatcgatgactttgtggccgatgctatcatgagccagttgctgctgttggatgcccaagaccccactaaggatatcaggctcttcattaattccactggtggctctctcagtgctacaatggctatctatgatgccgtacagcttgtgagggccgatgtttccacagttgcactcggcattgcagcatcaacagcttctgttatccttggtggaggcaccaaaggcaagccctttgctatgccaaatacacgaattatgattcatcaacctctacgaggtgctagttgacatgctatagatgtataaatccaggctaaagaagtttgcacaacacgaataatttacat

SEQ ID NO: 249721 - DNA, 544 bp, Glycine max
  unsure (1)..(544): unsure at all n locations
ggtttaaggatgcgnatgncctgaatccagctctcatcgcactgccgtaccggtccggaattcccgggtcgacccacgcgtccggcttcaagcctgtaaaaatgctcaccacaatgccaccgttgagacccactttcttgttgctgacgaagagtttcttcctatcaaagaaagctctgtggatttggttgttagttgcttgggactacactggactaatgatctgcctggagcaatgatacagtctagattggcattgaagcctgatggcttatttttagcagctattcttggtggagaaacattaaagtgacaatgtttatttttatttcttgaaatttctttggaacagaaatggatgggggcattctaattaatgatatttgtgctgctaccagggagctcagaatagcttgtacgttggcacaaatggagcgtgaaggagggatcagtccccgagtatcacctttggcacaggttcgagatgctgggaatcttttgactagggcaggtttcacccttccaggggttgatgttgatgagn

SEQ ID NO: 249722 - DNA, 491 bp, Glycine max
ccggtccggaattcccgggttttaggttcttcttcttcttcggtgagagttagagagagagagagagagagagaaggctctttttttcttttgggttggtttctcttgtttttttttttgtaggtactgaggaagaaagaccaaaactttatccgcttgcttcacttagctcaagagcgtacaattcaggcaaaggccttgaagtcggagtgtgtgttaaggaatttcttaggagttgcttctgtcttgactgaagaaatggaggtatatggcaaatctatggttgcaggtcctgcaaatgttatttttctgtcaagtattttgggccaagaaggtccagttcccggtcacaaatgcgactggaaatgtcaaaatgaacatgtttgtggaaacatgtatcgctgcaagctaactgggctgactcacatctgtgataaaaactgtaaccagagaattctgtatgacaaccatagctccctttgtcgagctag

SEQ ID NO: 249723 - DNA, 544 bp, Glycine max
  unsure (1)..(544): unsure at all n locations
tgtcataggtgcgtntgngctgagtcacgctctcatcgcactgccgtaccggtccggaattcccgggtcgacccacgcgtccgggggaagcagagcatatcattggagcctggtggtcagtttgaacttagtggagctcctgttgaaaccttgcatcagacttgtgctgaagttaattcccacctttatcaggttaaagctgttgctgaggaaatgggaattggatttttggggattggtttccagccaaagtggggaatcaaagacatacctataatgccaaagggaagatacgacatcatgaggaactacatgcctaaagttggctctcttgggcttgacatgatgttcaggacatgcactgtgcaggtcaatctggactttagttctgaagctgacatgatcaagaaatttcgtgcaggccttgctttgcagccgatagcaacggctctttttgcaaattcaccctttaaagagggaaagccaaatggttttgtcagtatgagaagccatatttggactgatactgataaggaccgcacan

SEQ ID NO: 249724 - DNA, 521 bp, Glycine max
  unsure (1)..(521): unsure at all n locations
agggtggttactgtaggnccagctccccacngtatccgcaccggtccggaattcccgggtcgacccagcgcgtccgcccacgcgtccgattgtgttggccttcgggatcggagtaatgattaacagggacagtcgggggcattcgtatttcgtagtcagaggtgaaattcttggatttatgaaagacgaacaactgcgaaagcatttgccaaggatgttttcattaatcaagaacgaaagttgggggctcgaagacgatcagataccgtcctagtctcaaccataaacgatgccgaccagggatcagcggatgttgcttttaggacttcgctggcaccttatgagaaatcaaagtctttgggttccggggggagtatggtcgcaaggctgaaacttaaaggaattgacggaagggcaccaccaggagtggagcctgccgcttaatttgacccaacacggagaaacatgtaagaagctacaacaaacgggggaaaactttcaattgtctcagatggcagcaa

SEQ ID NO: 249725 - DNA, 519 bp, Glycine max
  unsure (1)..(519): unsure at all n locations
cgggcgggtgactagagccaggctccangcagctatcgcaccggtccggaattcccgggtcgacccacgcgtccggcagatttttgctacatagaagagattaacggtgcatcaggggactactgtgacgagagcggcgaccgagtacccatgtgcccctaacaaagcgtactatgggcgtggaccaatccaactatcatggaacttcaactacggaccagcagggcagagcatcggatttgatggattgaacgctccagagacggtggccaatgaccctgttgtgtccttcaagacagccttgtggtactggatggaacatgtgcgtcctgtcatcaaccagggttttggtgcaaccattagagctatcaatggccgacttgaatgtgatggtgcaaaccctagtactgttcaggctcgtgttaattactacacccagtattgttcacaacttggtgtttcccctggtgacaatcttacttgctaatttatcagtatagatggttccatatgatgacg

SEQ ID NO: 249726 - DNA, 519 bp, Glycine max
gaaggaggtgagtgtggccagcttcacaccgcactgccgcaccggtccggaattcccgggtcgacccacgcgtccggttctacatataatcattcataatgggtgttttcacattcgaggatgaaatcaactccggtgtggctcctgctactctttacaaggccctagttacagatgccgacaacgtcatcccaaaggctcttgattccttcaagagtgttgaaaacgttgagggaaatggtggcccaggaaccatcaagaagatcactttccttgaggatggagaaaccaagtttgtgctgcacaaaatagaaagcattgatgaggcgaacttgggatacagctacagcgtggttgggggtgctgcattgccagacacggcggagaagatcacattcgactccaaattggttgctggtcccaatggagggtctgctgggaagctcactgtcaaatacgaaacaaaaggagatgctgagcccaaccaagacgaactcaaaactggaaaagccaaggctg

SEQ ID NO: 249727 - DNA, 538 bp, Glycine max
  unsure (1)..(538): unsure at all n locations
ggtncccgttgngtgatatagaatattaatgactgctctaccggtccggaattcccgggtcgacccacgcgtccgcccacgcgtccgcccacgcgtccgcccacgcgtccgcagaggagctctcgttgagttctatgctccttggtgtggacactgcaaaaagcttgctccagaatatgaaaagcttggtagcagcttcaagaaagccaaatctgttttaatcggcaaggttgactgtgatgagcacaagaattttgtgcagcaaatatggagtctctgggtacccaacaattcagtggtttccaaaaggatctcttgaacccaaaaagtatgaagggccacgcactgctgattcacttgctgagtttgtaaatacggaaggaggtactgcttgagcttttgaaacctttgtgcttaatttcttgaaagaacanatgtgaagaatgctacagctnctttcaatgtantggtgcttacatctgaaaatttaaatgaggtgcttagatgaaaccaagatgtctnggntgagtttatgcac

SEQ ID NO: 249728 - DNA, 536 bp, Glycine max
tgataagtggtgctagatccagcgatgagtgtactgacgtaccggtccggaattcccgggtcgacccacgcgtccgcacacgacttctgtgagatggctgctaactatcatacagaagagcctcatatgcttgagtacagtaaatatgctgatcttgaggagcgtcaaagatttgtgcaggcatatctgagtacctccggtgagcagcctagtgacagtgaagtggagcagctacttcaagaaattgagaagtatacacttgcaaatcatctattctggggcgtctggagaataatttctgcacaagtgaacactatcgactatgactactaggaggtatgctaacagagatttcaagagtactgggcaaaggaaaccttagctgctaataaactctgaagcgccttctgcttataatgtgcctgagggtacaggagagctagctgcagcagtgcccactaaagtcgagaactctggtatctataggaagatgaagagagtcttgggtctcggcctagtcaggtctaatagctaaa

SEQ ID NO: 249729 - DNA, 463 bp, Glycine max
ctgccgtaccggtccggaattcccggggtgctgtactattacttcatactaagttctgaaaatgagttccaaggttatgcttgttctacttatgtggttgggcactatacttctgatctcctctgatgttgcacccgatgatgcatacgagaattttgacaaaatagatgggaagcctagtgcagatggggtagatgaaagcaagtattggcgtggcggctatggtggcggctatggtggtggttatggaggtgggcgtggaggctatggaagtggtcgtggaggctatggagggggacgtggtggatatggcggcggacgatgtggctatagtggcggacgaggtggctatggcgcttgtcgtgggggctgacgtagtggctatggtgctcatgaacataaccaggctgaggttgatgcctagccttacaacttagaatgcaactttctaaagcttatatat

SEQ ID NO: 249730 - DNA, 543 bp, Glycine max
  unsure (1)..(543): unsure at all n locations
tgtctagcgtgcgttgnaactgcgtacgccctacatcgcactgccgtaccggttcggaattcccgggtcgacccacgcgtccggaaacatggcttccttaaactccttagtgctgctccttgcagctctaattctatgccgggatgttcttgcagactatgataatcccccagcgtacaagcctcccactgagaaaccaccagctgataagcccccagttgagaagcctcctgttaacaaaccttcagttgaaaaccctccaattaataagcctccagtacagaagccaccagtgtacaatgcccccagttgagaaacccccagtttataagccaccagttcatgaaaccaccagagtacaagcccccagctgaaaaaccaccagtgtacaagccctcagctgataaacccccagtgtacaagcccctagttgacaaaccaccagtgtacaagcccccagttgagaagcccccagtttacaagcccccagctgagaagccaccatgttacaagcccccacatgagaagccaccagtgtacata

SEQ ID NO: 249731 - DNA, 537 bp, Glycine max
  unsure (1)..(537): unsure at all n locations
ggttagggcgtntggctgatcagccgcatacgcacctgccgtaccggtccggaattcccgggtcgacccacgcgtccgatttaataaagtttaaattcttttatattttattatattaattattattattatgattataaaatatataatttagttatttatattaatttatatttttatatcttaatttcttataattttagttatattaatttctcattttattttttattctatatgttagttaatgaattgttgcattttaattattaaaataaaaacctaaatatcatgatatatttgatttataattttatgtttactttaaatgttaagaacctaagaaatgatgtttttatgttagtttttaatattataaagttgtggtattatatttatttagtagtataattttatgtattaattattattatattctattaatactagtcaaccacgattcaaacatgattaagtcattaagttttgaactaatattttgatcgattcaatcatcaatccgattttaaaaacatt

SEQ ID NO: 249732 - DNA, 538 bp, Glycine max
  unsure (1)..(538): unsure at all n locations
tgctagcggcncatgcgactagtcagtctgtcatcgcactgccgtaccggttcggaattcccgggtcgacccacgcgtccgaaaccctaatatcaacttcatctgtttcatttgattttgattcgaacccagacggagagatagcctctttctttcgttaggagaaacaaacccctcgtttcaatcattgatcctttcctgttagatacgaattactcttccaatttcatcatggccaaaacctccttcaagcttcagcatcctttggaaagaaggcaggctgaagcttctcgcattagagagaaatatcctgatagaatacctgtgattgtggagaaagctgatagaagtgacattcctgatattgataagaaaaaatacccttgtccctgctgatttgactgttggccagtttgtatatgttgtccgcataaggattaagctcagtgcagagaatgctatttttgttatcatcaataacactctgcctacaactgctgcattgatgtctgctatttatgaagaaaactaggatcaa

SEQ ID NO: 249733 - DNA, 516 bp, Glycine max
  unsure (1)..(516): unsure at all n locations
tgagaggtgtgtcgtgatctgacantaatgtacagctctaccggtccggaattcccgggtcgacccaggcgtccgcccacgcgtccgcccacgcgtccgtatctctctgcgtttctttcagcaattttctatttggtgctctcatggcttcagattccaaaaaggatttccctgctgatgacaaagctggaacagaagagagtaaaacatccaaagatgagacttcatctaaagattctccagcagaacaaagagcgacagctacttttggacctagacctggacctgctgggcatccaggcaacccttttgatctctcagcaatgtctggtctgctcaatgatccaagtatcaaggaattggctgaacagatagcaaaagatccatcgttcaatcagatggctgagcagcttcagaaaacttttcaaggagctccacaagatgctatccctagcttcgataatcaacaatatttttcaaccatgcaacaggttatgcagaatcctaattntatga

SEQ ID NO: 249734 - DNA, 518 bp, Glycine max
gagcggtgtctcgtgcctagctgacatcgcacagacgcaccggtccggaattcccgggtcgacccacgcgtccgctcaagcaatattatgcaacctgtttttctcttattgccgggataattctttttggtggggggcttgcacctagtggggagcttaagcttggactatggggcacatcttatgcagattttattgaaagtttacatcttcctatgcaactgagtcaggttgatcccatagtggcatcattctctggaggagcagttggagtaatctcggcattaatggtggttgagataaacaatgtaaaacagcaggagcagaaaagatgcaaatactgtcttggtactggatatcttgcatgtgctcgctgttcaagcacaggagcacttgttctgattgaaccagtatccacagtcaaaggtggagataagcctgtttcaccaccaaaaactgagagatgttcaaattgctctggatctggcaaggttatgtgtccaacatgtctgtgcact

SEQ ID NO: 249735 - DNA, 517 bp, Glycine max
  unsure (1)..(517): unsure at all n locations
atgggtggtgtntctcgccctagttccgtcggacagacgcaccggtccggaattcccgggtcgacccagcgcgtccgcccacgcgtccgtcggatggagcgttccctccaatgagagcttttatacagactgggctagcgccaagagattctgggttggtgacaatctcattttcaacatcagcggagagcattcggtgggaattagaacagaggctacttattatgagaattgcaacaccagcttattaactggtttcacgttcataggcgtcaatgggagtaattcgatgtttcgacataatattattcctccaactgggcctcgctatttcctctgcaccgttggaaatcactgtgaaagaggccagaagtttagtatcagcgttgagtctcatcctgattccgctgctcctactacactgtcattcagaatcttatctgcatttctctctagcttggctgtgtatttcttcactgttactagttagttactttgtcgtgtaactctacgagga

SEQ ID NO: 249736 - DNA, 552 bp, Glycine max
  unsure (1)..(552): unsure at all n locations
tggtnttagtgtgtgagtagtgctcagctactagactgactgctcgtaccggtccggaattcccgggtcgacccacgcgtccggtcacaaccatggataattccaaccttcaacgtctcttcactctcttccttttttccctgattgcaccctctttggctcaacaatccttcagacccagagccctcgttgtcccagttaaaaaagacgcttccaccctccaatatattactcaaatcaaacaaagaacaccactcgtcccagaaaacctagtacttgacatcggtggccaattcctgtgggtcgattgcgacaacaactacgtctcctccacttaccgccccgcacggtgtggctccgcccagtgctccctcgccagatccgacagctgcggaaactgcttctccgccccanaacccggctgcaacaacaacacgtgcggcgtcacgccagacaacaccgtcaccggcaccgncaccagcggcgaactcgcgcaagacgtcgtcttccttccatccaccaacgggttcaaccctataccaaacgccaccc

SEQ ID NO: 249737 - DNA, 547 bp, Glycine max
  unsure (1)..(547): unsure at all n locations
nggggnaggctgcgctgngatcgataagagattgtattgcactgctctaccggtccggaattcccgggtcgacccacgcgtccgactaaaactaaaactaaaaccccactcagtcttccagtgaaaaaagaaaggcagcgatggaagaagacttcgacatccccggcggcgaggaaatggatctcggcgaagacaaggtcggcgaggagcgggagatcggctcccgcggcctcaagaagaagctcctcaaagaaggtcaaggctgggaaacccccgaagtcggcgacgaagtccaagttcattacacggggactttgctcgacggaactaagtttgattcgagccgcgacagggattctcccttcagcttcacgctcggacaagggcaagtaattaaaggatgggatgaaggtattaaaaccatgaagaaaggtgaaaatgctattttcaccatccctcccgagctagcttatggtgaatctggttcccctccaactattcctnctaatgctacactccaatttgatgttgagctgctgtcatggac

SEQ ID NO: 249738 - DNA, 540 bp, Glycine max
  unsure (1)..(540): unsure at all n locations
tgggagcgtgcnctgtagcctgactctgactctcatngcactgccgtaccggtccggaattcccgggtcgacccacgcgtccgctctccctctctgttcgcactctgtctttcccctgtttccgcgtcactgagtcatggcgattcgcaactcgctcaccggccaattcctccgccgcagctccgtcgccggagcaaggctcatgtcttcttcgtcctcatggttccggagcatcgagcccgctcccaaggatcctatcctcggagtcactgaagctttcctcgccgatcagagtccaaacaaagtcaacgtcggagtgggtgcgtatcgcgatgaccacggaaaacctgtggttttggaatgtgttagagaagcagagaggagggttgccggaagtcaattcatggagtatcttcccatgggtggaagcataaaaatgatagaagaatcgctgaagctggcatttggagacaactctgagttcatcaaggataaaagaatagctgcagtgcatgctntatctgngactggtgcatgtcn

SEQ ID NO: 249739 - DNA, 478 bp, Glycine max
ccggtccggaattcccgggtcgacgccaggcgtccgctcacgcgtccgctcaatcctctgttactcgcaaaacatacacctcttctctatgctccggggggctctctctctcgctcactctgcaactaacaaggcaatcgcaaaccaagacaccgttgtcagagaaatcaagcccaagatcaggacaatcatgcctgctggagggcctgatgatgaggacaataggtggacaccgctgttgaagccactgctgaaagagagctgctatgttcaatgcaagtcgcatgctgattctcacaacatcgaatgcaacatgtatagcttggactgtatgaacggtcctctctgctctctctgcctcgaccaccacacagatcaccgtgcaatccagattaagaggtactcataccatgatgcgatcatggactatgagattcacaaggcgttggacatcactggcgttcaaacctacattatg

SEQ ID NO: 249740 - DNA, 517 bp, Glycine max
  unsure (1)..(517): unsure at all n locations
gaaatgggtggctagcatatgacacgatangcacccgtcccggtccggaattcccgggtcgacccacgcgtccgcccacgcgtgcgctctttggctttccaaagaaaatttattattgtcttttgcacaattcaggggcaaaaccggatctacttcttcaaccgcgtcattcatttcaaccttcaagctacggaagagcgatgaactcatgatattgattagcatctaaaaatgtttattcttcgtcaccatacaaatctcgctatagtcctcactatcttcatagcttgcacaacaagagcacaaaacctcaccacctgcaatggcaaatgcggggagcacacccttcagttcccttatggcttctcccaaggttgtccaatccagcttgactgttccaacgaccaagtccaacttcgcagcgaattcagcgaatctctggtccaaaacgtaacatacagcaacatattcgtaaatctgcctgcaaaatgcaaccgtaccatggaatcaattcacn

SEQ ID NO: 249741 - DNA, 542 bp, Glycine max
  unsure (1)..(542): unsure at all n locations
agtnttttgtgtacgtatctagcgtctgaatgactgctcgtaccggtccggaattcccgggtcgacccacgcgtccggttgggggctcgaagacgatcagataccgtcctagtctcaaccataaacgatgccgaccagggatcagcggatgttgcttttaggactccgctggcaccttatgagaaatcaaagtctttgggttccggggggagtatggtcgcaaggctgaaacttaaaggaattgacggaagggcaccaccaggagtggagcctgcggcttaatttgactcaacacggggaaacttaccaggtccagacatagtaaggattgacagactgagagctctttcttgattctatgggtggtggtgcatggccgttcttagttggtggagcgatttgtctggttaattccggtaacgatcgagacctcagcctgctaaatagctatggtggaggtaaccttcacgggcaagctcttaagagggactatgcccgcttangccacgngaagtttgaggcataacagggctgtgatgccc

SEQ ID NO: 249742 - DNA, 545 bp, Glycine max
  unsure (1)..(545): unsure at all n locations
agttntaaggttgcgtgtctagctctggatgcactgcacgtaccggtccggaattcccgggtcgacccacgcgtccgaaaatttccaaaaagtaatagggacttacagattctttagccattttttaatcatgtttgcttggttatgtaattttcaggttaaaatcatatgagattcttaagagctacaaacctagggcaagcatctttcccagtgttcttgattatacagtttgtccttacacatggcctttctgtcgtcagccactctatgcaggtgccatgcctgtcatcttcaatgccaccattttgaatggaatgggtgttgtcggatatgttgatagtccaccaacatggcatccttctgatgaagaaaggaaatcttctaagcatacattttacttattctgagatcattctgcctttggactgggtatttggcccttcacatgcatatcaaggaaagaaagtgcacaggtttcttgaaagattggaagtaatgtgactctcagggttctagccccccggctcatggagaagacgacc

SEQ ID NO: 249743 - DNA, 306 bp, Glycine max
ccggtccggaattccacgccacgcgtcacgcgtccgcagccctcacaactaagaaggaaacttgctaaagcttatataggatttaagttatcgtaataaataaaacttcattggaagggtagttataatagatgtggagatctttcttcgctctggtcatataaaggaataatacttttctattaaaaaaaaaaactaaaaaaaaaaaaaaaaaaaaaaaaaacaactaaaaaaaaaaaacaaacaaaaaagcaacacaaaggcacaagaagaagaacataaatgaagcgaaaatactaggggaac

SEQ ID NO: 249744 - DNA, 363 bp, Glycine max
taccggtgtaattctcgcgtcgacccaggcgtgcggccacgcgtacggtctccacgaatcatcgatggtaactgccacgttgatgattgaactctggaggatgggcctgagtctgattctgctggaccaacttcgggaagcactgtctgtgctgtcgctattagaaacaaccaacttgttgttgcaaatgctgctgattcgcgatgtgtgatatctcggatgggccatgcatacaatccgcctatagaccacaaacctgatcttgagattgatatggacagaatcttaaaagcttgagcttacattcatgcacgactagttaatgtaagtttaaatcttgctagagctattggtgacatggaa

SEQ ID NO: 249745 - DNA, 463 bp, Glycine max
taaccggctcgacccaggcgtccgggttaagttgaagtctccctccataagatgtatttaaagaatatacttattgcatatacttaggaagtgtggttctgttggtagataacaaaattaaaattgcattaatttgaagttttaataaagaaaagttggaaaatcttactggttaggtaattggatttttagttatctagacaagctaactattgataacacgatcaacaattgtacttactagtgaaatggacctaacctgccctcattttattttgaaatgaatattggcaaaagtatctccgaacttaatgatttggatagaagtatggtacttgatagaacattatggcggaagttgatccatgtagccgaccccacctagtgggataaggcgttgttgttgttgttgttgtatttgcaaaagtatctctggaatggtaacctattgtgttatgaaaat

SEQ ID NO: 249746 - DNA, 513 bp, Glycine max
  unsure (1)..(513): unsure at all n locations
agatggggnnnntcccttcacttgctcatcgntctgaacgtaccggtccggaattcccgggtcgacccacgcgtccgtgccgatcttcaatctctgagccaatcgctttccgatccatctcaccatgatttgctccgcgagattcaattgcgcgttgaggaccttgcgaagcttgcagaggctgcacctgttcgtcgatctaaagttgaggatatgagtgctgatgttgtagatagcaatccttatcgtcggcttatggcacttcacagaatggctattgtggacaactatgaactaatacgcgatttatacggagccatagacggagtaagcggtgtacgaagtgtttcggctgagatgctaactagatgtggcatatgtacactcttgctgaatgattatgacatagtagagctagcgaacctgaataggttgttctttcgtccagatcaagtcggcatgacagagactgatgcatctgtacagactctggtagacataaccctcgaggtt

SEQ ID NO: 249747 - DNA, 496 bp, Glycine max
  unsure (1)..(496): unsure at all n locations
cgtcggttcntgtgttacggacctaccgtctgcacgtaccggtccggaattcccgggtcgacccacgcgtccgcaaacattataatttctattacatacattttgtagctaggatgagcaagttactactcattcgtgttgctgggttcgtggcaacctttgtcaccatggtgatgatgatggtgcccaaaaacgtgagtgcccaaaacataggtgatgacatcgtcacacaagacttcttcaacagcataatcagtcaggctgatgatggttgtgcagggaagaacttctactcacgagatgctntccttaatgctcacaattcctacaatgagtttggtaggcttggtaatcaggatgactccaagcgtgaggttgcagctgctttcgcccatttcacccatgaaacaggacatttttgctacatagaagagattaacggtgcatcaggggactactgtgacgagagcaacaccgagtacccatgtgcccttaa

SEQ ID NO: 249748 - DNA, 501 bp, Glycine max
  unsure (1)..(501): unsure at all n locations
cactgaatactgatagtattgcccgtaccggtctggaattcccgggtcgacccacgcgtccgcgccgatcttcaatctctgagccaatcgcttcccgatccatctcaccatgatttgctccgcgagattcaattgcgtgttgaggaccttgcgaagcttgcagaggctgcacctgttcgtcgctctaaagttgaggatatgagtgctgaggttgtagatagcaatccttatagtcggcttatggcacttcagagaatgggtattgtggacaactatgaaagaatacgcgatttctccgttgccatagttggagtaggtggtgtacgaagtgtttcggctgagatgctaactagatgtggtataggtagacttttgctgtatgattatgacaaagtggagctagcaaacatgaataggttgttctttcgtccagatcaggttggcatgacaaagactgatgcagctgtacagactctgtcagacataaaccctgatgttgtn

SEQ ID NO: 249749 - DNA, 496 bp, Glycine max
  unsure (1)..(496): unsure at all n locations
agtaggtatgacttgcttcagcccangtacgtactgacgtaccggtccggaattcccgggtcgacccacgcgtccgaaaatttcatttggaaaagaatctgtcaattttgcggtgtgatatttaggttggagagaagggaagatgccgttgtaggtgttagaggcgacagtgtctagtttcgatgtggtttttgagaagttccgatcagagtgctctacagaacaaggccaatctcattctcttcttgtcggacaatgacccggctacctatctcagctggtgccctgattgtgtgagagcagaacctgtgatatacaagaagctggaggcttcacctgatgacattgctctattgagagctcatgttggatatagaccaacatggatgaatcctcagcatacatggatgatggatcctaggatcaagctcactggagtgcctacgttgatccggtgagatatcaacaccgtcaaatgtcgcttggaggatcatta

SEQ ID NO: 249750 - DNA, 509 bp, Glycine max
gctggctgactgcggttcagggctcactcacgtacgacgtaccggtcctgaattcccgggtcgacccatgcgttcggaagaagggacgcatggcagctcggtaaaatgcagctgcaacactgttcagcctttgggttatacatgaacacagggttgcacttgcgtctttaggagccataccacctctggtgacactgctaagtgagggtagccaaaggggtgagatagatgctgctactgcactcttcaatttgtgcatttaccagggcaacatgggaaaacgactgtgggctaacgttattcccacactgatgcaactactgaccgaacctagcggaggaatggtggattaagcattagctattttggcaatattggccagtcatgctgaatgaaaggttactattagagcttcagaggcagtgccagtgttactagagttcatagcgaatggctccacaagtacatatagaatgctgctgatgctgtagttcaccattgctgtagat

SEQ ID NO: 249751 - DNA, 498 bp, Glycine max
  unsure (1)..(498): unsure at all n locations
ggagtnttgactgatacaagcagtgtataggattgctctaccggtccggaattcccgggtcgacccacgcgtccgcccacgcgtccggtttgtacagacagacttttagggtgctaagatccaaagtcgagagggaggacagcccagatcgtacgctaaggtccctaagcaatcacttagtggaaaaggaagtgatcgagcgatgacaaccaggaggtgggcttggaagcagccatcctttgaagaaagcgtaatagctcactggtctagctccatggcaccgaaaatgtatcagggctcaagtgattcaccgaagcgacgagaccttgaaagttgctttttcaagtgtcagtagcgggacgttctgtcaatcggggaaggtttttggtgacaacacctggagatatcagaagtgagaatgctgacatgagtaacgataaatcctgtgaaaaacacgatcgcctgccagtggaaggctttctgcgttcagtcaatcta

SEQ ID NO: 249752 - DNA, 469 bp, Glycine max
  unsure (1)..(469): unsure at all n locations
accggtccggaattgctcgaccgacgcgtccgcaatgactaccacccgtgttgctatctgtctttgctttgcattcctttactacgcggctgaaggagccaaggttagtttcaataacaagtgctcatacacggtatggccaggaaccctaaccggtgaccaaaagccccaattatcaacaactggtttcgagttgggtccaggagcatccaactctgtggaccttccatctccatggtccggtcggttctgggcccgaacaggatgctccaacaacaacggaaggttcagctgcgccaccgtcgattgcgcctncggtcaagtcgcatgcaacggtgccggtgcaatcccgccagctactttggtagaaatcacagttgcagcaaacggatggcaagatttctacgacgtgagcaacgtggatggctttaacgtgcccatgtccgtaaccccacaatgtgngagtggc

SEQ ID NO: 249753 - DNA, 497 bp, Glycine max
  unsure (1)..(497): unsure at all n locations
gatatgtgtnntggacatgacaagtaagtactgtctctaccggtccggaattcccgggtcgacccacgcgtccggtttagttacgtacatagcttgaaaacacagtgcttgtttagactagtatcttccatggctgcgaaagatagaatcctggttttgggacccacaggagccattggaagacacatagtttgggcaagtgtaaaggcagggaatcccacttttatattggttagggacacccctgcctctgttaacaagccaaggcttgtcactgctgctaatcctgaaaccagggaagagctcattcagagcttccaaaattctggagttactctaatccagggagatatgaacgatcatgaaagtctggttaatgcaatcaagcaagttgatgtagtaatctgctcatttggtagactactaatagaagaccaagtcaagatcgttgcagcaataaaagaagctggaaacgtcaagagatttttcccatctga

SEQ ID NO: 249754 - DNA, 515 bp, Glycine max
  unsure (1)..(515): unsure at all n locations
gcgcggtnnntngatgtaattgacagtangtactgaccgtacccggtccggaattcccgggtcgacccacgcgtccgcccacgcgtacgcccacgcgtccgggacgattttcgctgttggtgcaccaaaaactgttgagtggatccattcactccaacgtgaagaagatgcatgcagcgctattttataaaaaataaaactactatatactatatataataagactggcgctgcatcaatgacctatgtattatagcatatattattaccgatgtcagaactatagatgcatgtactgtgcataacggctgagttatgtacttatgttaagaataaaatacagtgctgttgttgcaaaaaaaatcatatgcacttcgcatacacaatttcagggcacatcattacaacaacacttaccacttgatgataaaataaggggggactttttaaaggatcccaagattcaaacgcgtcattgctacgtaagaaccctgttactgtgccacgcaaagtta

SEQ ID NO: 249755 - DNA, 464 bp, Glycine max
gcccggactgaattcccgggtcgacccacgcgtccgaaacaacattcgcatcaaaaccacagtggttctagtaatccggcgctgctctaggatggggactagtgaatggcatatcgagcgaagatctagcttcggcactgaatcccccttagcaagacaggcacgaaatgttcctgaaactgggtcactctctattgccgagcttggcgcttctggggatctacgctaagaagaagacatttactgcacttctgcatctataccgtcagttgaatgaaggtgatggtgcattctatggaccatagatagacatcagtgtatctgatgcattgggtaggaaattccagtgtgcaactttgcagcttgacttccagcttactgatcgttttaagttggaattctcagctgaggatgaagccaaaattgacagacctgtaatgatacacagagccattctaagatct

SEQ ID NO: 249756 - DNA, 495 bp, Glycine max
  unsure (1)..(495): unsure at all n locations
cggcggggngtgtacacgaaagtagatagtattgctgctaccggtccggaattcccgggtcgacccacgcgtccgcccacgcgtccgcccacgcgtccggccatatatggatgaaatatttcatataccacaggcagagcagtactgcaagggaaattttggaagttgggaccctatgattaccactcctcctggcctgtactatctttcacttgcccatgttgcttctttgtttccaggcttttactgtgtagaagctgcttcaatttctgacttgtgctctgctgcaattcttcgatcaattaatggtgttttagcagttgtctgtagtttaattctatatgacatagttactcacttgaagccaacacttaatgataggaaggcgatgcttcatgcagtggtcctatccttgtacccccttcactggttcttcacttttctctattatacagatgttgcatctgttactgcggtgctggctatgtatcttgg

SEQ ID NO: 249757 - DNA, 524 bp, Glycine max
gagatctgtttgctgatttcattcactacgtactgacgtaccggtccggaattcccgggtcgacccactcgttcggccatagcatcgcgaaactgggaaaccattcaaattgaagacctcaaaattgatcgcaatgagctgcttgctgtgaactgtctggtaaggtttaagaatttgcttgacgagtcaattgaagtgaacagtcccagaaatgctgttctgaatttaatcaggaagatgaaaccagatatttttgttcacagcgtagtaaatggatcttataatgctcctttctttctcacacgcttcagggaggcactgttccattattcttcaatttacgatatgtttgatactctcatatcccgtgaaaatgaatggaggttgatgcttgagagagaatttttgggccgggagataatgaatgtggtagcatgtgaagctctagagagggttgagaggcctgagacatacaaacaatggcaggctaggaatactagagctggttttaagcagctcccact

SEQ ID NO: 249758 - DNA, 530 bp, Glycine max
gagtcaggtttgactgaagtccgttactcatagtcactgacgtcccggtccggaattcccgggtcgacccacgcgtccgctcacgcgtacgctccgcaccagtttcaccggacgaatatctcgttgcttggagcgatccgagaaaatctctgtaaacatgttggtttaccaggaccttcttacaggtgatgagcttctctctgactccttccgttacaaggaaattgagaatggaatgctgtgggaagttgaggggaagtgggctgttaaaggagcagttgatgcagacattggtgctaacccttctgctgaaggtggaggagaagatgatggagttgatgatgcagctgtcaaggttgacgacattgttgacacattcagacttcaagagcatcccgcattcgataagaagcagattgttaccttcatgaagaggtttatcaagaatctgactgccaagctcgatgcatagcatcaggagctgattaagaagcacattgagggagcaacttattacctgctctataaaa

SEQ ID NO: 249759 - DNA, 430 bp, Glycine max
ccggaattcccgggtcgacccacgcgtgcggtgaagtgtgtgatgcactctatccttctttctcttgaacccataattccatgactcggggtgggtcccactgcagcaacaacggccacaattcccggacatgcccttcgcgtgggggcggatgtgtgaagcttttcggggtcaggctgacggatggatcaatcattaagaagagcgccagcatgggcaacctaaacctctactccgccggcgcacatcaccaattccattcatatgcttcttcttccaacctcgccggcgacccctcatcccccaatccaagctccccatgctacgacccttcccaaggttacttgatcgatgaccccgcccatgtctacaccttcgctaaccgccgcagtgatagaaaaaaaggtgttccatggactggaaaagaaca

SEQ ID NO: 249760 - DNA, 456 bp, Glycine max
cggccggaattcccgggtcgacgcacgcgtccgccacgcgtccgcccacgcgtccgaaatcaaaccaggccagcttcaaaacgctgcgtttcgctgccccgtcctcgcgttgcttcgaaaccctaaccctatccacggcattcctccgctcgccgtcgacgccgtcaccgtcgcgccaactgccgcaaaccgaataaaccgaatcgatctgagagaagaagaagaagaagacgcgatctcggaggtgggagcgaaacgaaacgatgccgtctcacgcggatctggaacgacagatcgagcagctgatggagtgcaagcctctgtcggagtcggaggtgaaggcgctgtgtgatcaagcgagggcgattctcgtggaggaatggaacgtgcaaccggtgaagtgccccgtcaccgtctgcggcgatattcacggccagtttacgatctcatcgagct

SEQ ID NO: 249761 - DNA, 502 bp, Glycine max
  unsure (1)..(502): unsure at all n locations
aggtcgttntntgtngtctgatgggcatatgaagtacgctctaccggtccggaattcccgggtcgacccacgcgtccgccttatgcacatcttcatgcttgttttgttacatatttattatttatatacttatatatggatgatccatagaaataatataaaaaattatgtgatcaataattttatttaccattttttccctttctctttgtgcatgttatccctcactggatccacaacagaaggttgtgttaaaggttatgactatgactgatgacaaaacaaagcaaaaggctatagaagcagctgcagatatctatggggttgattcaattgttgctgatgtgaaggagcagaagttgactgtgattggtcaaatggacacagtgaaaatagtgaagaagctgaagaaagtaggaaaagtggatatagtatcagttggacctgccaaagaagagaagaaggaagaaaagaaagaggagaaaaaggaagaaaaaaaaga

SEQ ID NO: 249762 - DNA, 501 bp, Glycine max
  unsure (1)..(501): unsure at all n locations
cgagatgttnnctcgttcaagacagtntatagtattgctctaccggtccggaattcccgggtcgacccacgcgtccgggaagcttagagagagagagagagagagagagagagaggagagagtattggcgcttcatggagatgggtatttctagggattccatgcacaagaggcgtgccactggtggcaagaaaaaggcttggagaaagaagagaaagtatgagcttgggcgtcaggcagcaaacaccaagttatcaagcaacaagacaatcaggaggattcgtgttagaggtggcaatgttaaatggagggcattgaggctggatactggcaattactcatggggtagtgaagcagttactcgcaagactcgtattctagatgttgnttacaatgcctcaaacaacgagcttgtgcgaactcagacccttgtcaaaagtgctattgtccaggttgatgctgctcctttcaagcaagtgtaccttcagcactatggtgttt

SEQ ID NO: 249763 - DNA, 498 bp, Glycine max
  unsure (1)..(498): unsure at all n locations
cgccggtnnctgttacagacagtatatagtattgctctaccggtccggaattcccgggtcgacccacgcgtccgcccacgcgtccggctacacactttcttcaacggtaaatccctctctgcacttcgtctctgggagggattaatcattattttccgcgcaccaaacagccaaagtcaattttcttctctcttctaagacacaccaatgccagagaagaagaacaagaaagtttctttcaccgaagaagatgctgttacgctcatgcagaggtacgacgcaactacggtgttcactttacttcaggaagtggcgcattaccctcaccccaagattgattggtgcgagttggtgaagaaaagcgcgactgagatttctaacgccagagaatatcaaatgctatggcggcacttggcgtatcgccattctttgcctgaaattttcgaagatggggatgaacctttggatgatgatagtgacctaaagtgtgagctaaaa

SEQ ID NO: 249764 - DNA, 531 bp, Glycine max
  unsure (1)..(531): unsure at all n locations
cgagcatggntacgtgtttcagctaatgantgtactgacgtaccggtccggaattcccgggtcgacccacgcgtccgaagacactgaggttaaggaaacaattgaaggtaaacaagaaaatgaaaaagtggaagctgagaaaccagaagtagatgctatggaagtagagagtggcattccgcagaaggaggggagtgataaaaaggagaaaaaagatgtggcgatggaggaggaggatgaagatgagggtaaggataatattgataagtcaaaagaagaagagaaggcagaagatagtaagggtgagaaaagatcaaaaaaacgtgggagagggaatatcaatggggagaaagtgaaggagaaaagaaaggaactgaagaaaacagagccaagaactcctactattgatcgccctgtgcgggaaaggaaatcagttgagaggttggtagcatcaattgagaaagatgcatcanaagaatntcacattgaaaagggtcgtggtacacctttgaaagatataccaaatgtggc

SEQ ID NO: 249765 - DNA, 499 bp, Glycine max
cgccgtgcgtcttaccgacagtacgtaactgctctctcggtccggaattcccgggtcgacccacgcgtccgctcacgcgtacgctgatgctgtgggaaagttggctgccatcatgaaaatatgccgctcatgagagcatatatttaaagaccatcttgatggcttgccgactgaacgtgataaaatgtataatgtctttgacaatcacatcgccgctgcttaaaaatggttccaatgacattagcacctttcaatggaatatataaagtaacttattactgaatctgatgggtatcaaccacatcttatagctccagaacaaggatatcgatcgctaatcgaatcttacctaataactattatgggccctgctgaagcaactcttaatgcggtacactcgctgataaaagacttggttcacaaagctatcagtgagactttagacttgaatcagtatcctcttctacgggtttaagaaaaagctgcatctcacaattta

SEQ ID NO: 249766 - DNA, 501 bp, Glycine max
gggcgggactcgagaccccgccaactatcgtactgctcgcccggtccggaattcccgggtcgacccacgcgtccgcttccaacgttgcttattcacacaaacggaacaagatagatatatagaagagccttccatgggtagcctcccaaaaaaatgaagagtactacctctttggctctctttctactttgtgccctaacttcatcatatcagccttcagccaccgctgatattgtattcgacaccgaaggcaatcctattcgaaacggcggcacatactatgtgttgccagttataagaggaaagggcggcggaatagaatttgccaaaaccgaaacagaaacatgccctctcactgttgtgcaatctccctttgaagtctcaaagggtctaccactgataatttcatccccatttaaaatccttgacatcaccgaaggacttattttgagcctcagtttcacttatgtacccccctgtgcctcaactccttctcggggg

SEQ ID NO: 249767 - DNA, 500 bp, Glycine max
  unsure (1)..(500): unsure at all n locations
nagcgcgtgtgtcgcgtactcgcactancgtcnaacgtcncggtccggaattcccgggtcgacccacgcgtccgcccacgcgtccgcccacgcgtccgattgcctttccatctccccttccgttcgcggcgccggaggtgtcaccgaccccaacaccgcccgctccaagggttacggcttcgttaagttttctgatgagaatgaacggaaccgcgccatgactgaaatgaacggcgtttattgctccaccaggcccatgcgtattagtgctgctacgcccaagaaaaccaccggtgcttatggtgcacccgccgcgcctgtgcccaaacctgtgtatccggttccggcctatacttcgcctgttgttcaagttcaaccaccggactatgatgtcaataatactaccatttttgttggtaatttggatcttaatgtgtcagaggaggagctgaagcaaaactctctgcaatttggggaaattgtttctgtcaaaattcagg

SEQ ID NO: 249768 - DNA, 501 bp, Glycine max
gggcgttcgcgtgacaaagacattatcgaactgctcgcccggtccggaattcccgggtcgacccacgcgtccgcgggctttctcttcttttcctctggcttcatcatcatctctctatctgcaccccttttgagagacttcaacttgttacttaattactctactctcccctttctagcttctgtgttcttcttcttcggttctctcttcatggggtgctgcttaagtgccaggatcaaagctgagagcccttcacgcaatggtttgagttcaaaggatggtaacaaggaagaagatggcttaagcagcaaggcctcaactccctctgttcctccaactccgcggacggagggagagatcttgaagtcctcaaacatgaagagcttcaacttcagtgagctaaaaactgctacaagaaactttcgtccagatagtgtggtgggtgaaggcgggtttggttgtgtttttaaggggtggattgatgaacagacacttgcaccc

SEQ ID NO: 249769 - DNA, 497 bp, Glycine max
  unsure (1)..(497): unsure at all n locations
ggcgtggtggactcgcaactaggtagtactcctctaccggtccggaattcccgggtcgacccacgcgtccggttttggttttggctgggaaggctcaacaagaggagattggggatggagctaatttagcggtttcatttgctggggaactcctgcagggtgctgaggaacttatcaggatgggtttgcatccgagcgagatcatcagtggatacactaaagcgatcaacaagactgttcaaatattggatgaactggttgagaatggttcagagagtatggatgttcgtgataaggaacaggttgtttctagaatgaaagcagctgttgccagcaagcaatttggccaagaagataccttatgttcgcttgttgctgatgcatgcatccaagtgtgtcccaaaaaccctgcaaactttaatgtggacaacgttcgtgttgcaaagctcttgggagggggcttgcataacagtactgtcgttcgaggattggttctn

SEQ ID NO: 249770 - DNA, 532 bp, Glycine max
  unsure (1)..(532): unsure at all n locations
tgatgagcggnntgactgaattttcagttctgctcgtactgacctgtctcggtccggaattcccgggtcgacccacgcgtccggaagatggagatgtatcagatctggagcaggagaatagcgttgggagcgttcgcgtttggtcggcttttcctatcggcctcagcagacgacgtcgttgtgctctctgaagataacttcgagaaggaagttggtcaggacagaggagctctcgttgagttctatgctccttggtgtggacactgcaaaaagcttgctccagaatatgaaaagcttggtagcagcttcaagaaagccaaatctgttttaatcggcaaggttgactgtgatgagcacaagagtttgtgcagcaaatatggagtctctgggtacccaacaattcagtggtttccaaaaggatctcttgaacccaaaaagtatgaaaggccacgcactgctgattcacttgctgaatttgtaaatacggaatgaggaacaaatgtgaagattgctacagctncttccaatgtag

SEQ ID NO: 249771 - DNA, 530 bp, Glycine max
  unsure (1)..(530): unsure at all n locations
tgagtaccggntnagtgaagtaacgttatcatcgtactgacgtcccggtccggaattcccgggtcgacccacgcgtccgctttgcaattccctcgattctcttcttcctcctaagcttcttaatctttccaaccaaagcagcgccaatttacagttcccatgcgtgcacagactcttctaaataccaaccaaacagcacattccaaaccaacctcgacctcctcctctcttacctttcttccaacgccacccaaggcgtccacttttacaaaacaacagttggcagtgaaacccccaacgccgtcaagggcctcttcctctgccgccgagacaccctcaccgccgtgtgccacgattgcgtcaacgccgcagccaaagacctgacacgccggtgcccagttgagaaagaggccataatctggtacgacgtgtgcatggtacgctactccaaccaaaactacctcaacaacatagtacccgcagtggacatgtctgactccaaaagcgtggctggcgctgatcttgaccgg

SEQ ID NO: 249772 - DNA, 502 bp, Glycine max
  unsure (1)..(502): unsure at all n locations
cgccgtngttggacatgacaataaagaatatctgcaccggtccggaattcccgggtcgacccacgcgtnccgcaagggggaaccgattaaaaaaaggcaaatcaaattcgaaagaaggagagaatttacagaggtgaatgcaagtttgatccagagaaaatagcagttaagatcacacatttcaccaatatccctgctgatgagaaccaaattgccgcatatttagtaaaaaatggtccacttgctatgggcgtgaatgcaattttcatgcaaacatacattggtggtgtctcatgccctctcatatgtagcaagaaaaggctgaaccatggtgtgttacttgcgggatatggtgcaaaaggcttctcaattcttaggcttggcaacaaaccatactggatcatcaagaattcgtggggggagaaatggggagaagatggctattacaagctctgcatagggcatggcatgtgtggaataaacactatggtttctgctgcaa

SEQ ID NO: 249773 - DNA, 501 bp, Glycine max
  unsure (1)..(501): unsure at all n locations
gaccgttgngtgtgtactgacagtgaagtactgactcactcggtccggaattcccgggtcgacccacgcgtccgtgaacaacaaccacactctctacaaaattgatggtcccaccgacgagcgggtgccgcaatgggaggccatgaacggcggtgccaccaccgccaccttccgatccatcctcgacaagcccctcaaccagctcaccgaggatgacatttctcagctcactcgcgaagactgtcgcagattcctcaaagaaaaagggatgcgcaagccttcctggaacaaatcgcatgcgatccaacaggtcatttccctgaaagcgctgctggaaccttccgacgatgatactcctnctnctaccggcatgcaccaccggagtcatgctccttcccctacacctcaacctcaatctcaagtgaattcgactgaacctgctactncgcccaaggcttcgtcacctgaagaatcctcttttcatgctgctgaagacattca

SEQ ID NO: 249774 - DNA, 497 bp, Glycine max
  unsure (1)..(497): unsure at all n locations
cggagggtngctgctaccgacagtataagtatctgctctaccggtccggaattcccgggtcgacccacgcgtccgcaataaaggaaaagaaaaaagagaaatagtactgggaagaaatgttcataccacatgggtagaagtcacagagcccgaggcagatgacgagatcactggggaccgggaagctcatatggcaagtgtgttggccagatacaaaagagccttgactgaaaggacaaagcaccatttaggctacccctataatttggatttcgattatggtgcactcacgcaacttcagcacttttccataaacaaccttggagatccatttattgaaagcaactatggtgtccactcccggcagtttgaagttggtgttttggattggtttgcccgattgtgggaactggagaaaaatgagtactggggctatataacaaactgtggtacagaaggcaatctccatggcatcctagttgggagagaggtctttn

SEQ ID NO: 249775 - DNA, 503 bp, Glycine max
  unsure (1)..(503): unsure at all n locations
agaagttgtgngtcatagaactagtatagtactcctctaccggtccggaattcccgggtcgacccacgcgtccgaggagattgctgctttcttggctcaaacttctcatgaaaccacaagtgggtgggcaagtgcgccagatggtccatatgcgtggggtattgtttatcaacgaacaaaaccaggcaactaatggtaatggtggaaattggccatgtgctgctggtaaaaaatattatggccgaggaccaatccaacttacacacaactacaattacgggcaagctggcaaagcacttggtctggatttgataaacaatccggatcttgtagccacagacgcaaccgtgtcattcaagacaaccctatggttttggatgacttgccagggaaacaaaccattaagccatgatgtgaccactggaagatggacttcatttaaagcccacaatttaaaaggtaggccatctggattgcgggatttaacacaaccttggcttgtt

SEQ ID NO: 249776 - DNA, 490 bp, Glycine max
  unsure (1)..(490): unsure at all n locations
ttcccgggttcgatcccacgtcgtctcgttccatctttcaatctggaatcacatanntcctgaaacataaaacattcttagcantttaatcatactactgagacgaacatgaccatccacattgtgaaagagagtttctcggaagagcaatgaagctctggtnggtgaagtcattggaatgtcantgaagaagaattctggagagttgggtctcaagtttttcttgaaaatatttgagattgctccatcagctcagaaattgttctcattcttgagagattcaacggttcctttggagcaaaatcccaagctcaagccccatgccgtgtctgtctttgtaatgacctgtgattcagcagttcagctgcggaaggccgggaaagtcactgtcagagaatcaaacttgaaaaaattaggtgctacccattttagaaccggcgtatcatacgagcatttcgaggtgacaaagtttgcacttttggagaccata

SEQ ID NO: 249777 - DNA, 447 bp, Glycine max
ccggaattcccgggtcgacccacgcgtccgcgacgcgtccggtactgttctattagttcatactaagttctgaaaatgagttccaaggtttggcttgttctacttatgttcttggccactatacttctgatctcctctgaggttgcacccgatgatgcatacgagaattttgacaaaatagatgggaagcctagtgcagatggggtagatgaaagcaagtattggcgtggcggctatggtggcggctatggtggtggttatggaggtgggcgtggaggctatggatgtgggcgtggaggctatggaaggggacgtggtggatatggcggcagacgacgtggctatggtggccgacgtggtggctatagcggcggacgtggtggcggacgtggtggctatggtcctaatgaacatatcgaggctgtggctgatgctaaccctcacaac

SEQ ID NO: 249778 - DNA, 495 bp, Glycine max
  unsure (1)..(495): unsure at all n locations
ggactgtgctgttttcgtncatcacgtattgacgtaccggtccggaattcccgggtcgacccacgcgtccgcccacgcgtccggctgactgtgctgttcttatcattgattcgaccactggtggttttgaagcgggtatttccaaggatggacagactcgtgaacatgctctgctctcattcacccttggtgtgaaacagatgatttgctgctgtaacaaaatggatgctactacacccaagtattccaaggccaggtatgatgaaattgtgaaggaagtctcttcctacttgaagaaagtaggatacaaccctgacaagattccttttgttcctatctctggttttgagggagacaacatgattgagaggtccacanaccttgactggtacaagggtccaactctgcttgatgcacttgaccagattagtgagcccaagaggccctctgacaagcccttaagcttccccttaggatgtgtacaagattgagggg

SEQ ID NO: 249779 - DNA, 499 bp, Glycine max
  unsure (1)..(499): unsure at all n locations
ggcgtnctggacttgccatatagaagtactcgcccggtccggaattcccgggtcgacccacgcgtccgcaggatctgagcttcagtgggtttttttttttttttacaatggcaacgaattcttctaatggagcaacaaagcaacctgccatgccatctcccttgcgtttttccaagttctttcagtccaatatgagaattctggttactggaggagctggatttattggctctcacctagttgacaaattgatggaaaatgaaaaaaatgaggtcattgttgctgacaactacttcactggatctaaagacaaccttaaaagatggattggccatccaagatttgagctaaattcgcatgatgtcacagagcaaattgtgattgaagttgatcaaatctatcatcttgcatgccctgtttttccaatctctccaaatccaaccctggaaagaccataaggccaaaggtaattgaaccactgaccaatcttggcttgcta

SEQ ID NO: 249780 - DNA, 504 bp, Glycine max
cggactgtgctaagtaataagacaactatagtactgactctaccggtccggaattcccgggtcgacccacgcgtccgggcaataagctaaagatgtctgacgattgcaaaggtaagagctcatggcctgagcttgttggagtgcaagggacagtggcagaggctacaattgagagagagaatcctttggtgaatgctatcattgtgcctgaaggaaacagggtcatcactgattaccgctgtgatagggtttgggtttggatcaacaaagatggaattgtcaaggaagttccacacattggatagaaacttttccctctagctagggttcaaataattgtttccagttttatgttattttattcacaaagtttcagaaatgtcaaaagattaatattataaaccaactatagttggccttgtaaaatgttttagattcaaaatcttgtgttgtcattgcataaaaaaaagttaatataatcatcttttatatgcaaaaaaaaaa

SEQ ID NO: 249781 - DNA, 522 bp, Glycine max
  unsure (1)..(522): unsure at all n locations
agcgcggggnnnnttacatccgacataaagacagtactcccccggtccggaattcccgggtcgacccacgcgtccgtgatggcgttcctggccttcatcgtgggttcaacatctcatgtgttgcaattatagtcgcgtcgtggctctttactactggaatgcatgactccctgaaaccagatagttgctggcttgagcgagttgcatagatgactttctgacgctagaaaacctttcgggatggggaatcacaattggtgctcgtttgcctacatataccattgacactgtgcgtagaataatgatcatcacttgtggagaatctgtcaactacaagatctctttccttgcattacacaccatgcgcgaacatgatgatgccaagtgactctttaaacgtgctgaggctaacatatcgcgtgctgctgcaggtgctgctgtgcttagcaggtatgacaagctgcagatcactatgcctggaaagaaatatggatctggcggcggataacaatgaacacgacc

SEQ ID NO: 249782 - DNA, 494 bp, Glycine max
  unsure (1)..(494): unsure at all n locations
ggcgggtggctgctacagaacatcacgnatcgctctaccggtccggaattcccgggtcgacccacgcgtccgcaattctaacatacttttctttcttttttttcccctctttaaaagtctggcttttggtcctttgattcccaacttcacttgtcacatatcatattatgaagctcacaggtttcctgcaagcggtgactcttgctttggtgttagccaccgtctctgcatcagatcctgatcctcttcaagacctctgtgtcgcagaccttgcttcagcggttaaagtgaatggattcacatgcaaagatgctgccaaggtaaatgcgagtgatttcttctcagacatactagccaaaccaggtgccacaaacaacacctatggctccctagtgactggagccaacgttcagaaaatcccaggactcaacacccttggcgtgtctatatcacgcattgactatgccccaggtggcatcaacccaccttacacg

SEQ ID NO: 249783 - DNA, 508 bp, Glycine max
  unsure (1)..(508): unsure at all n locations
gaactgtggtggtaccgacagtangatgtactcctctaccggtccggaattcccgggtcgacccacgcgtccgattctctttgcgcagttccctacctctcctttcaagatgcagatcttcgtcaagaccgtgaccggaaagaccatcacccttgaggtggaaagctctgacaccatcgacaacgtcaaggccaagatccaagacaaggaaggaattcccccggatcagcaacgtcttattttcgccggaaagcaacttgaggaccggcgtacccttggcgactaccacattcagaaggaatcaacccttcaccttggccttcggcttcgtggtggcattcaaatcttcgtcaagaattttaatggcgaaaccattacccttgaaggctaaaggtctgacaccattggacaacgtcaaggccaagatccaggacaaggaaggaatccccccagaccagcaacgtctaatcttcgccggaaagcaacttgaggacgggcgcaccctccn

SEQ ID NO: 249784 - DNA, 499 bp, Glycine max
  unsure (1)..(499): unsure at all n locations
gtatgttgggtgatcatgcacatcacgtattgacttaccggtccggaattcccgggtcgacccacgcgtccgcttttgagttttctctctcacaaacacactccacttctcttctcggcgtcgatcttacgcgggggcgtgcatgggcgaattccacaaaacccgacccttccggcggcaggccagccgcctgcagagccgcgccccgtcgtcgctccagataaaccgcaccgtcgagtggaacgtcgcgatcccgctgctgtccccgctggtctcgtcgccccctccgccgccgcagaaggacgagccgtcaccgtcgcagcaacaacgcccgccggaaaaagttgtcttcaaaaagtggcagcaccccgccgcaccgttttgctacgaaccaccttcgcgggttcctcctttcgttaacgtgtaaataataaataaaaaaatgaagaaaaattatgaatatttcttctaacatcttttgttcattttcattttcacn

SEQ ID NO: 249785 - DNA, 365 bp, Glycine max
tcccggctcgacccactcttcctaaaaaaaaaaaaaaaaaaaaaaaaaaaaaattataaaaaaaaaaaaaaaaaaaaaaaaaaagaaaaaaaaaaaaaaaaaaaaaaaaaaaaaaaacaaacaaaaaaaaaaaaaaaaaaaacaccaccctaactaaaaaactcctacattacaaaccactccatccaatcttaaaaccctattatctttcccccaaaataaaatccactaatccccttttatacaaccctcaaaatcaaaaaaaccctgcctttccccaacttaaaccctttgaaacaactccccttttcccaactttttcatatcacaaaaaacccccttccaaacacccttcccaacatttt

SEQ ID NO: 249786 - DNA, 291 bp, Glycine max
ggtccggaattcccgggtcgaccgacgcgtccgttgaaaataatgcacaggatgctactgattgttcgtctcactaaggagcacactttcctggtcggttcactgctattgcagagaatactaagttccaaacgatattaccgtccactgagcagatgacaggtctcaatcatctattacatggagccaagcagcatcacaatgtgacaaatgtatatgtatggcatgcactagctaggtattgatgtggagtgataaccagcatcatccagcatggaacattatgacact

SEQ ID NO: 249787 - DNA, 496 bp, Glycine max
  unsure (1)..(496): unsure at all n locations
gagatgctnctgcaaaacgacatagacagtactgctgccccggtccggaattcccgggtcgacccacgcgtccggccatccctcacagggatgtttacctgtctgataaaagtgctccatgggatgattctgttggtggatatagatcttctgcgagtaggactcattatgaaccgtcattatattcaaattctggatcaagtacaggagctcctttagcctttgatgtactctgtccatcaaaagtctactgtggcgtactttcttgtcaattgaattctggatttggcactggatccctatggtccagacagccttttgagcaggtcgacgtgtatgataaaattcataatgctgcaacagacgatgttggaaatacgcctagtgcaactactcatgaaattactgtaggtgtggatattgatggcaagctctttcaatcttttagacactgtatgttgaaactcttaaaattggaacggtctgattggctgtt

SEQ ID NO: 249788 - DNA, 515 bp, Glycine max
  unsure (1)..(515): unsure at all n locations
aggcgtctgtntcgtactagaantantgaggaccgtcncggtccggaattcccgggtcgacccacgcgtccgggatctgtgaaggaagttttaaatgttatgcagcttaaggggcataagagtgctgtgacgtggttatgctttatgccaaactctgagcaaataatcactgcatccaaggatggttcaatgagactatggaatatcaatgttcgttatcatcttgatgaggatccgaagacgctgaaggtgttcctaattcctcttcatgattcttccggtactacactgcactatgaccgcctgagtgtttcccctgatggaaaaattttggctgcgacccatggctccacactgcagtggttatgtgttgagactggaaaggttctggatacagctgaaaaagcccatgatagtgacatttcatgcatttcatgggctcctaaacccattccaatgggaaatgaacaagtttttggtttaaccacaggcagtgctgacaagaaagtgaagtt

SEQ ID NO: 249789 - DNA, 513 bp, Glycine max
  unsure (1)..(513): unsure at all n locations
cggcggtgtgtgtcagcctancattgacggaccgtctgtaccggtccggaattcccgggtcgacccacgcgtccgcccacgcgtccggcaacgtgcgccctcctcgggtcaagctcagtcagcactgcaccggagggttttctttgcccctttcgatgagtaacgccacagactccgccggcgagatcccaccggagacgaggtccgccgagagtgacggtggtgggccccggcccacgattaagatcaatgttacgcacggttcctctcaccacgatttacacctcccggcccaatcaacttttggggatgttaagaaactccttgtcaataaaactggtttagagcctgcagagcaacgacttttcttcagagggatagaaaagggtgataaccagcgtttgcaggctgaaggtgtaaaggataagtcaaaactttntcttttggagggcattggtagcaaagagaggaaacttgaggaaaccaganagaaaatgagatgtctaaagcttt

SEQ ID NO: 249790 - DNA, 497 bp, Glycine max
cggaggtgtggtcgatacacgaactatatagtatcgctctaccggtccggaattcccgggtcgacccacgcgtccgtttctgtgtttatacaaacctcatgtatgtgggagagagagtgtctttcttggctcatagcgtagcatcactatggctcttctgagtcgagcctcttcacgcttccctcagctggtttcccctcaaagagttgtttccctccacacaacgctcccatctcttaacgcatcaacatccacacccacgcccgccccatatgccccggcaccgactccgtccgcttaccctcccgacggcgtgtctaaggccgcggagttcgtgatctcgaaggttgacgatctgatgaactgggcccggcgcggctccatctggcccatgaccttcggactcgcctgctgcgccgtcgaaatgatgcacactcgcgtccgccgctacgatctcgaccgcttcggcatcattttcaggcccagccctcgacagt

SEQ ID NO: 249791 - DNA, 516 bp, Glycine max
  unsure (1)..(516): unsure at all n locations
cgccgttntnttgtcatcgacactacgtaggaccgccgtaccggtccggaattcccgggtcgacccacgcgtccgcagatgatgatagccgaaaggcatggcgaagcgaaactgcttgcacctgattatgcgtgggtgaatggacacccagttttttatcatgaatcgttaactctcctgaatcgccccaaccctcccaagaaacttaatccactgacctattcgcatgaataagtatacgcgttttcatggacagacagacacaagcctttacacattataactcctcatctcgatgttgtacgccccatccaacaagatgccagcaatggaaacactcaagtgttcattaatgggacgaacataacccaactcgagctcataatgttccagatctcaggacttcactgctgcgccgacccacatttctcgatcaatgatgatggttactaccaagaacgattgcacatgaatacaggcgctatcattggcgaaaggcctgaacgaaccttgttc

SEQ ID NO: 249792 - DNA, 450 bp, Glycine max
  unsure (1)..(450): unsure at all n locations
ttcccgggtcgaccgacgcgtccgcattaagctagctctgagttatgccctgtctgttctaaacttaacatcttttcgaagcctaggtgaaactntatgttgggccacctagagatttccagtccagcaaactttatgctcttgagacagcttgagtgtgagaatgatctacattggttgggtatatagtcaaagtaccccatataatgacttcagctatactcttcacttgagctcgctttgaaggttgagttaggctcattgtgttttcatttgtaaccatttcaaagttgggtaacctgataaaattctatactctctgaatccatcttacatgtgttgcatgactatgaagacacaatataccaggctgtttttcctggacttcatagtggtccacacaatcacactatatcaggcttatcagttgcactgaagcaggctatgaca

SEQ ID NO: 249793 - DNA, 527 bp, Glycine max
  unsure (1)..(527): unsure at all n locations
ggatctgcgtgtgtgtagtctagctcctcactgagtaacgtcncggtccggaattcccgggtcgacccacgcgtccgcccacgcgtccgttccaatatattccattctctctgtgtatttccctacctctcccttcgagatgcagatcttcgtcaagaccctcaccggcaagaccatcacccttgaggtggaaagctctgacaccatcgacaacgtcaaggccaagatccaggacaaggaaggaatccccccggaccagcaacgtctcattttcgccggaaagcaacttgaggacggccgtacccttgctgactacaacattcagaaggagagctctgacaccattgacaatgtgaaggccaagattcaggacaaggaaggcatcccaccggaccagcagaggctgatttttgctggcaagcagctcgaggatggaaggaccctcgctgactacaacatccagaaggaatcaacccttcaccttgtcctncgtctccgtggggggttttaagctcgttgtgtaatgn

SEQ ID NO: 249794 - DNA, 433 bp, Glycine max
tcccgggtcgacccactcgtccgcaagaggtctttcctggggtggttgtgcctgatgttagagccttttctgctgcttcaagagatgggttggttcctggggatgtgatccttgaggtcaatggaagtgagttttcaaaaccaggtccaagtgcggtttctgaagttgttgatgttatcaagaggaaccccatgagatatgttttgctcaagattaaaaggggggagcagaattttgatataagggtcaccccatatgagaattttgatggaactgggaaaattggagttcagctatcccctaatgtgaagatagctaatgttaggccaaaaaatttggtgcaagctgtggagtttactgggcaagagttttggggtctggcctctaatgttttacatgggttaaagcagacttttttgaacttctcccagtc

SEQ ID NO: 249795 - DNA, 524 bp, Glycine max
  unsure (1)..(524): unsure at all n locations
gaatgtgcntctgtgtaagtcagttntccctgtagtatcgtcncggtccggaattcccgggtcgacccacgcgtccggagattgtgaagtagaaatcggtgcaagaaattctccactttatctaaaaaaattcggtgagggtgtgaagacaaaaaatcactagctactcaaaaatggccacagtaggaaggaacgttgcagctcctttgctgtttcttaacttgatcatgtattttattgttcttggctttgctagttggtgcctcaacaggttcatcaatggccaaacttaccaccctagttttggtggaaatggtgcaaccatgtttttcttaaccttctccatactagcagctgttctgggcatcgtgtccaaacttttgggtgggaatcacatgaggacatggaggagtgacagtttagcatctgcaggagccacatcaatggttgcttgggcagtcacagctctagcatttgggttggcttgcaagcaaatacacttangagggcatatagggtggaag

SEQ ID NO: 249796 - DNA, 498 bp, Glycine max
  unsure (1)..(498): unsure at all n locations
ggccggatgctgttttcgtngattcangnactgtacgtaccggtccggaattcccgggtcgacccacgcgtccgctcgaatttcctcgaatcgcttaatttgtatttgattagttaaaccgcaacgcggaatctgggttctcgaactggctaactctcaggcaagtggttcggacgctgattccagcaacaagcggctggtgctcgcactgtatgacgccctaaactccggcgactccgacgccgtcgtcaagatcgtcgccgccgacctcgagtggtggttccatggntccgcctcacaccagtttttgatgcgcatgctcaccggcgactccgctgccgacaactccttncgcttncttccgcagtccatcgccgncttcggcttcaacgtcatcgtccagggctggaacaccgcccggaacaattgctgggtccacgcctggaccgtcacggatgggataattactcagatcagagagtacttcaacaccgccct

SEQ ID NO: 249797 - DNA, 452 bp, Glycine max
  unsure (1)..(452): unsure at all n locations
ggtcttgaattaccgggtcgacccacgcgtccgcttagcttaatttcgccaaatcaaccaaagacaaaaaaaaagaatccaaaggaacagaagagaaagcttgaagctatggggaacaccatgggaaggagtaaaaaggccaaggtgatgaaggtggatggagagacgttgaagctgaaaacaccagcgagagcaaacgacgtcgtaaaggactacccgggccacgtgcttctggactccgaagcggtgaaacatttcgggcttcgggccaaacctcttgagccgtaccaggaactgaagcccacaaagatttactttctcgttgagttacccaagattcagcccgaagaggaaaaaacggcgctaccgaggagggtgcgatccagtgggatacgcggcatgaacgcctncgataggctccagcttctcatgctctccaaacgctccgtttc

SEQ ID NO: 249798 - DNA, 493 bp, Glycine max
  unsure (1)..(493): unsure at all n locations
cggcggntgtctgtttcatcccattacgtancgacgtaccggtccggaattcccgggtcgacccacgcgtccgggttaaccatgaggtgtatgtatcttgcattcctacttgtatgtgtttgctgtagccaatggtagcttggaggagcatatgcttcccccagacaagtgattgacacataaggcaagaaagttcgagctggcgtagattactatatccgaccggtcccaacaacccgatgtgatgggcatggaccgtgtgtggcttgaagtggctatattctcatagcacggtgatgcaaccacacttgacctcttagcgttgcagtggtggacgttagacgtggcctatcagtcacattcaacctaggtcaccctaataaaggggtcattagggtgactactgagttgaacatcaaaaccttcctaactaacagacgatggatcgaatccacagtatggaagctagatgcctatgatgattcaactggac

SEQ ID NO: 249799 - DNA, 499 bp, Glycine max
tggatgatgtgactcgatgctagcctcatcactgcaccgacgtaccggtccggaattcccgggtcgacccacgcgtccggaatatttgaaaaacagcgttgagggtttatctcggaggctattctatcttgctcttccacgcttcagtatatccatcaggtggcaagatgatcaagacttgttgcatgaataaatgtaagatgctataatatatggatatgattgcaaatgtttcaaaaggacaaatagctgtttgctgagggagggtgggagatatgaacagcgacacagtgaaccatagctcaacaattgttgagaatgatgctttgtcagacattagtctacacatcatgacagagtccactttaagctcttcattttaacttttatttaaatgttggatacttgtctactttatgcaagatctttttcctgataatactggtgctagacatatagctgctgcttacagctgatgggattctggcttcacaagata

SEQ ID NO: 249800 - DNA, 524 bp, Glycine max
agtggttgtctgatttcagtatcatagtactgacgtcccggtccggaattcccgggtcgacccacgcgtccggaaccatcctggtcagattggaaatggctatgcccctgttcttgactgccacacttcccacagtgctgtcaagtttgctgaactcatgaccaagattgacaggcgatctggcaaagagcttgagaaggaacccaagtttttgaagaatggtgatgctggttttgttaagatgattccgaccaaacccatggtggttgaaactttctctgagtaccccccacttggtcgctttgctgtcagggatatgcgtcaaactgttgctgtgggagtcatcaagaacgtggagaagaaggatcctactggagccaaggtcaccaaagctgcccagaagaagaagtgaatcgtgcggtttggttcatcaggggatgtcgtttcttatggttacaataaatgttggtttcttgcccttgtgtcttcgtttctaggtagcttgtttttcggacatagtttga

SEQ ID NO: 249801 - DNA, 509 bp, Glycine max
  unsure (1)..(509): unsure at all n locations
tttgacgactatagtagtatcgtcncggtccggaattcccgggtcgacccacgcgtccgggcaatgaatctgatgcaggcggttcgctacgacgcctacgggggaggtcctgccggcctcaagcacgttgaagttgccgttcccagtccaaaggcaaatgaggttttaatcaaactggaagcagttagcattaaccctattgattggaagattcagaagggtcttctccgtcctttatttctccccagaacctttccccacataccttgcactgatgtggctggagaaatagttgagatcggaactcaagtcaaagatttcaaagttggcgaccaagtccttgctaaactcactcatcaatatggaggtgggtttgccgaatttgctgtggctagtgagagcttaacagcagccagaccatctgaggtctcaancgctgaagctgcagcattgccaatcgccgggcttacagctcgtgatgccctnactcanattgcaggagtcaagct

SEQ ID NO: 249802 - DNA, 539 bp, Glycine max
  unsure (1)..(539): unsure at all n locations
agatggggtnnttnaattcaggctctctatgaattgccgtaccggtctcggaattcccgggtcgacccacgcgtccggttccctacctctcctttcaagatgcagatcttcgtcaagaccctcaccggaaagaccatcacccttgaggtggaaagctctgacaccatcgacaacgtcaaggccaagatccaggacaaggaaggaattcccccggatcagcaacgtctcatcttcgccggaaagcagctcgaggacggccgtaccctcgccgactacaacatccagaaggagtcaaccccttcaccttgtccttcgtctccgtggtggcatgcagatcttcgtcaagactctcactggcaaaaccataaccctagaggtcgaaagctctgacaccattgacaacgtcaaggccaagatccaggacaaggagggaatccccccagaccagcaacgtctcatctttcgccgaaagcaacttgaggacnggcgcacncttgccgactacaacattcagaaggaatcaacccttcactcgtcct

SEQ ID NO: 249803 - DNA, 530 bp, Glycine max
  unsure (1)..(530): unsure at all n locations
gagcggtgnctgattaccgaagactactgtactgctctaccggtccggaattcccgggtcgacccacgcgtccgcaaaaacaccaattctccaccctctcattgaaaaaaaaaacaaccaaacaaaaaaaatcagtcattttattttatttttctacgaaaatggttgatttacattggaaatcaaagatgcctagttccaaaacaccaaaactctctctctccgacaacaagtccttaccctctttgcaactacccttccgcaccacagatatctctcccgccgctccttccgtttgcgccgcttacgactactatctccgtcttcctcaactcagaaagctttggaactccactgattttcctaattggaacaacgaaccgattctaaaaccaattttgcaagctctcgaaatcacgttccgctttctttccattgttctctccgatcccagaccttactccaaccacagagaatggactcgccggatagagtctctcatcatgcatcaaattgaaatcattgccata

SEQ ID NO: 249804 - DNA, 546 bp, Glycine max
  unsure (1)..(546): unsure at all n locations
ggtcggggtnnntantngactacagacactantgacgtaccgtcncggtctcggaattcccgggtcgacccacgcgtccggaagaaaccaaacgcggccttgaagttgcgagttgcgagttgcagagagagcaatgagtgaggaatcgtttatatatggcttcgtggctcgggggacgatggtgttagccgagtacaccgagttcactggtaatttccctgcaattgcagctcactgtctcgagaaactttcctattacaatatcaagttcacctacaattgcgaccaccataccttcaattgtctcgttcaagatggctacgcttactgtgctgatgtcaaagaatctgttaacaaacatatctctattgctttgctcgaacgtgtcaaagtcggactctaagaaaaagatatgtgtggtgtgaaatgccgacacaagttgtagtcgaaaagtctcaacacgggagtttagacccagtattgaaagaacgcatgaagtatatcatagaccatgctgtacagatggagaagctataaacgtgaagg

SEQ ID NO: 249805 - DNA, 472 bp, Glycine max
gaattcccgggtcgacccacgcgtccggcttcaatggtcactggaagtattgggatgcttccttctgctagcctgggggcttcgggacctggactttttgaacccatacatggttctgcacctgatattgctggacaggacaaggcaaatccatttgccactgttcttagtgctgctatgcttttgagatatggcctaggagaagaaaaggcagctgaaagaatagagaatgcagtgatggacactttgaacaggggatttcgaactggtgacatatattctgctggaacgctggtaggatgcaaacagctaggtgaggagatactgaagtcagttgaatctaacgttcctgctggtgctgctgcaatgtgattttgaaaccaactcgccatagcattttgggttctggtttaggttggaggccactatgactgccaaagccgagaaagtctccctagtctattaagttctg

SEQ ID NO: 249806 - DNA, 541 bp, Glycine max
agtcggtctgactgaattccacgcctgatcatgactgaaacgtctgtaccggtctcggaattcccgggtcgacccacgcgtccgcccacgcgtccgcccacgcgtccgcccactcgtccgggcgcacagatgttgagagacttgggtgtacgatctatgaagctgatgacaaacaatccagcaaaatatattgggctcaaaggttatggtttgacagtttcgggtaggatcccattgttaactcttatcacttcggagaacaagagatatttagagaccaaacgtgtgaaaatgggtcacatatacgccatggaatttaacggccaattgagcactcatgacagtggcaggcaggctctaccaaaaatgttcatcttgattcttgaaacatagtgccatgacaagggcattgctatttcagggttattttttctttggtgccttttagaggttcatcatttctggactctggaagtcattggccctagtttcttcattctttttggtacatttactcatgtatcacagttcctctataatg

SEQ ID NO: 249807 - DNA, 534 bp, Glycine max
  unsure (1)..(534): unsure at all n locations
tagcggttctattgtttagggtncattcangtatcgncgtaccgtgttggaattcccggctcgacccactcgtccgaaagaaaaaaaaaaaaaaaaaaaaaaaaaataaaaaaaaaaaaaaaaaaaaaaaaaaggaagaaaaaaaaaaaaaaaaaaaaaaaaaaaaaaaaaaaaaaaaaaaggggcggccgttctaaaggatccaagtttacttacccttgcttgcaacgtcatagctcttatatagtgtcacctaaattaaattcactggccgtatttttacaacctcttaattggaaaaaccctggggttaccaaacttaatcgctttgtaaaaaatcccctttttgcaacttggcttaatatcaaaaaggccccaaccaatcgcctttccaaacaattgcgcaacctgaatggcaaatggaacgctccctgtaccggggcattaaccacgccggatgtgatggttacccacagcgtgaccgttacattttccagcgccttatcgcccgttcatttgacttcattcccttct

SEQ ID NO: 249808 - DNA, 550 bp, Glycine max
  unsure (1)..(550): unsure at all n locations
ggtnntagcggnntntcttaaaaatcgtactatcnctcatagtancgtctgtaccggtccggaattcccgggtcgacccacgcgtccgcccacgcgtccgatggtggcgacgaacgtgaaggcagaaaccatgtctctgatggacaagcgcagcgccttggaggctgagatgaactccatcatcgcccgcctctcccagcccggcgctcctggcctctccggaaatctcgtcgactctgagggttttccccgttccgatatcgacatccccgttgttcgagccgaacgacgtcgcctggcagagctgcgcagtgaccacaacgaagtaactgagaaaattaacctaaatattcagattctgcattcggcacgactcggaaataggtcattgcccttcaagaattcagatactcagatctcatcaaatatggacactgttgcatcaacaccatcacaaaatgtccttctgatacgatctcccaactcaatggatgtgaacgtgttgattagtagaccatctgcaatggtagatgagatagcagatgcatcc

SEQ ID NO: 249809 - DNA, 530 bp, Glycine max
  unsure (1)..(530): unsure at all n locations
tggagtatgcgntgacgtgctacagcacatgactgaactgctctaccggtccggaattcccgggtcgacccacgcgtccgcccacgcgtccgcccacgcgtccggagagatggcagcttctggttcgtggaagagtgggagtggttcttcgatgggtctggagaggatgagcgtggagcagctgaaggcggtgaaagagcaagccgatctggaagttaatcttctccaagacagcctctccaacattcgcaccgtcaccacccgcctcgagatcgcctccttcgccctcaacgatctctccctccgcccccagggcaaccacatcctcgtccccctcaccgncttcctctacgtccccgccacccttcacgactcccaacacgtcctcgtcgacgtcggcaccggctacttcatcgagaaaaccatgcccgaaggaaaagattactgcgaccgcaaaatcaacttgctcaaatctaactttgatcaactcgtcgaggttgcattcaaaaagaaaaatgtggcagatgaaa

SEQ ID NO: 249810 - DNA, 483 bp, Glycine max
ccggtctcggaattcccgggtcgacccactcgtccgctggattgtccatccttctctggttgcactttgcttcttccatctttggaggttcaacagctctctttaagtttgagttgtactttgggcttttggtgtttgtaggttacattgtagtagacacccaagaaatagttgagagggcacacttgggcgatctggactatgtaaagcatgccttgaccttgtttaccgatttggttgcagtttttgtccggattcttgttattatgttgaagaattcggctgagaggaatgagaagaaaaagaagaggagagattgattttcttaccaatctgctcagttaacacttcaactcccttggactgtaatacttaaaacagctgtctatacagtgttgttcacttgttaagcttgctccaactgtgcagtttagtcgtttggttgctttatatcagtagtacactagtacatgttgacatgtt

SEQ ID NO: 249811 - DNA, 527 bp, Glycine max
  unsure (1)..(527): unsure at all n locations
aggcgttctgttaccgccagtancgtatggaccgtcncggtccggaattcccgggtcgacccacgcgtccgctcctctctccgattccttttattaattggagttttctcgctcctttttctttccctgagaacatttcatcttcgtattgatgtcggaaaagggtcggccacttcccaaatttggtgaatgggatgtcaatgatccagcctcagctgaggggttcacagtgatttttaataaggccagggatgagaaaaagacaggtggcaacccagagtcaccaggaaagactgctactgatcctcatagcaaacctgcagtagagcctggcaaaactcagactaaaaaatggttttgctgcatgcaaaacccttctgccgaatcatagcatagcaatggttgctcctgtgaaaagcctgaacagaagaacaatgtttatgtgtaactagcgtcacagtattttctcaaagataagagctgtagagccataagcgaattctacggaatttatattttgtgatgtn

SEQ ID NO: 249812 - DNA, 409 bp, Glycine max
ggtctcggaattcccgggtcgacccactcgtccgcccacgcgtccgaaaaaaaaaaataaaaataataaataataactcctttaaatatacatgagaaacgtttcatctgcctatcgatgtctagaaaaccgtcgttcactccccaactttcgagaatggcatgtcaatgttccagcctcagcttacgatgtccacagtcatttttaatcacgccattgattagaaaaagactggtgttaacccacagtctccactaaaaactgatactgatcctcatagctgacctacaatagatcctgccctaactcatactccttaatggctatgctgcatgcaaaacccttatggcgaatcataccataacaatggaatctactgcgaaaagcctttacataacaaccatgttta

SEQ ID NO: 249813 - DNA, 527 bp, Glycine max
gggcgtgctgttaccgaaaaatagtactgctcgtaccggtccggaattcccgggtcgacccacgcgtccgctcaccggcatctcgctggtggcgctgcaattcaaggccttgctgaagaaaaatctcttgctgtcatggcggaacaagagagccagcctcttacagttactctcccctctcatattcattttcctcatcttcgcaatcgacaaggccatcaaggcacagacctcgacctcctcctcctacaagagcgtcactgaccctcccatggaaccttctccccccatcactccctgcgaggacaagttcttcatcaaactcccctgctacgacttcgtctggagcggccacgccagccccacgttccagaccatcgtcgcccgcatcatgaacaacaaccccggccgtcccatccctccctccaaagtgaagtcttttaaggaaaagagtgaagtggatgcgtggcttctcagcaaccctatgcggtgccctggagcgcttcatttttcggagaggaacgaca

SEQ ID NO: 249814 - DNA, 542 bp, Glycine max
  unsure (1)..(542): unsure at all n locations
cgtaatgtgtntctngtggtccttagccctcacctgacgtatcgtctgtaccggtctcggaattcccgggtcgacccacgcgtccgtgcaaaggtaagagctcatggcctgagctagttggagtgcaagggacagttgcggaggctacaattgagagagagaaccctttggtggatgctatcattgtgcccgaaggaaacatggtcatcactgatttccgctgtgatagggtttgggtttggatcgataaagatggaattgtcaaggaagttccccacattggatagaaactgctccccactagctagggatcaaataattgtttccagttttatgttattttattcagaataaagtttcagaaatgtcaaaagattaatgtaataaaccaactagagttggccttgtataatgttttagactcaaaatctgttcttgtcattctatatatataaaaaaaagttaatataaaaaaaaaaaaaaagggcggccgctctagaagatccaagcttacgtacgcgtgcatgctacgtcatagctct

SEQ ID NO: 249815 - DNA, 531 bp, Glycine max
  unsure (1)..(531): unsure at all n locations
gtacggnttgactngatcacagaantactacagaatcgctctaccggtccggaattcccgggtcgacccacgcgtccgacttgttatgcagctgcaagatgtacccagacttgagctacaccgagtcaaccacgaccgagaccttggtcatgggagtggcaccagttaaggctcaattcgagagtgctgaaatgggtgttcccgctgagaacgatggctgcaaatgtggagctaactgcacctgcaacccctgcacttgcaagtgaggtgttggagagctaaagcttcaagcagaaatggcccttagaaataatgataaaaactatatgtagtttcaaaacttcaaaattatgtagtatgtattatgttgcactctggtgttttgtgtctaaacaaacacccttagaataaagtggtcatttcttgcccttgagcaagttcaagtgttttggacttgtgatgggtgtgttaaggtcatggttgccttttttttatatatatatatatatataaatgtttggtaaaaaaaaa

SEQ ID NO: 249816 - DNA, 538 bp, Glycine max
cggatgtgtgtgtgttgttctagccccactgacgtatcgtctgtaccggtctcggaattcccgggtcgacccacgcgttcgcccacgcgtccgtgaaactagcgtttgatggtttgaaaggtttggggtataaaacagcgagacactgctataagagatgttggtgggtttgatagtgttgagttatcagtacttctttgcaatgatgagtttatacaaaaacttaataaggaatggagaaatgaagatcatgccacggatgttctgtcaatgtcgcaacatgtacctgggctcaagattcctattcttatgttgggtgatattataatttcggttgagacagcggcaagacaagccgaggaaagaagacatactcttcttgatgagatccgaatcctcatggttcatggcttgttacatcttttgggatttgatcatgaaataagtgaagaggctgaagtagaaatggaaagagaggaggacatccttttaaagagtcttgattggaaaggaaaaggggctaataaagagtgcatgt

SEQ ID NO: 249817 - DNA, 532 bp, Glycine max
  unsure (1)..(532): unsure at all n locations
aggcggtttgactagtcatcgacagantatagtatctgcctgtaccggtctcggaattcccgggtcgacccacgcgtccggaaatatgcagagaagttggccttcctccaggggtattaaacattgttactggattagggaatgaagctggtgctcctttgtcatctcatcctgacgtagacaagatttcctttactggaagctctgcaactggaagcaggattatgacagctgcagcacagctaacgaagcctgtttctctagagcttggtggaaaaagcccaatcattgtttttgaggatgttgaccttgataagactgctgaatggaccatctttggctgcttctttacaaatggtcagatatgcattgcatcatctcgccttattgtgcatgaaagtatatcaacagaatttgtgaatagacttgtgcaatgggccaaaaacatcagaatttcagatccctttgaagaaggttgtatgctaggtcctattgttagtgaaggacagtataaaaaagtgttgaatcgtat

SEQ ID NO: 249818 - DNA, 534 bp, Glycine max
  unsure (1)..(534): unsure at all n locations
cgcgtggggtgactgttgacgggattatattgaatcgctctaccggtccggaattcccgggtcgacccacgcgtccgcccacgcgtccgcccacgcgtccgcgaatcggaatcgagttacaatgaaatcaaatgatgttacacgttggttatgttcgatactattttgcatagttttagtttgtgttcaatttgaaggatgtgtgggatccaagactaagaaaacggacgaggcatacgtcactcttttgtacggggatgaattcttgttgggtgttcgagttctgggcaaatcaatacggaacactggatccaacaaggacatggtcgtgttggtctccgatggtgtgtctgattatgccaaaagcctactccgggctgatgggtggatagtggagatgattagtttactggctaatcctaatcgagtgcgtccaaagagattntggggtgtctacacaaagctcaaaatatttaacatgactgactacaagaaagttgtttaccttgatgcggacactattgtggttaaaaa

SEQ ID NO: 249819 - DNA, 336 bp, Glycine max
  unsure (1)..(336): unsure at all n locations
tcctgtcctgaattccctggtcgacccactctttcttccactctttctaaaaaaaaaaaaaaaattttataaaaaaaaaaaaaaaaaaaaaaaaaaaaagaaaaaataaaaaaaaaaaaaagaaaaaaaaaaaaaaagaaaaaaatttttaaaagtttcaatttttatttcaattactttcaaaattataaggttttntatttttttaacctcaattgtttttcatttcccgtttttttaaaaattcttttcttttaaaaccctttaattaaccaactttttctcttttttacaaatttcctttttttaaaatctcgtttatcccaaaatttcccc

SEQ ID NO: 249820 - DNA, 532 bp, Glycine max
gagtgtgcgtttgtctagatccgactccatttagtatcgtcgtaccggtccggaattcccgggtcgacccactcgtccgcccactcgtccgaaaaaaaaaaaaaaaaaataaaaaaaaaaaaaaaaaaaaaaaaaaaaaggaaaaaaaaaaaaaaaaaaaaaaaaggacgtccgctctaatggatccaaagcttactttcacttacttccaacatcatagctcttctttcgtgtcacctaatttcaattcactggccttcgttttacaacgtcttgactgggaaaaccctgtcgttacccaacttaatcgcctttcagcacatccccctttcgacacctggcgttttacccattaggcccgctccgatcgcctttcccatcagttgcccagcctgaatggctattggtacgcccccttttccgtctcattatgcgcgcctgctttggtggctactcccatcgtcaccgctacacttgccaacgccctatcgcccgctcctttccctttcttcccttcctttctcgccacgtc

SEQ ID NO: 249821 - DNA, 419 bp, Glycine max
tccggtattcccgggtcgacccacgcgtccgcgtcttttgcgagctctttttgagattgtcttgaaacgtggctgggcgcagttggctgagaaggctttgaacttatgcaaaatggggaccaagaggatgtggagtgtccagacacctcttcgtcagttcaatggaattccaagtgatttattaacgaagttggagaagaaagatttggcttgggaaaggtattatgacctatcatcacaagagataggtgaactcattcgtgcaccgaagatgggaaagactcttcataagtttatccaccagtttcctaaattgaaccttgctgcacatgtgcagccaattactcgcacagttttgaaggtggagctgacgataacttcagactatgcatgggatgacagaattcatggatatgttg

SEQ ID NO: 249822 - DNA, 527 bp, Glycine max
  unsure (1)..(527): unsure at all n locations
ggcggtnctgattacagacagtactgtactgccgtcccggtccggaattcccgggtcgacccacgcgtccgcccacgcgtccgcctctctctcctccaatggccgaccagctcaccgacgaccagatcgccgagttcaaggaggccttcagcctcttcgacaaggacggcgatggttgcattactaccaaggaacttgggactgttatgaggtcacttggtcaaaacccaactgaggcagaactgcaggatatgataaacgaggttgatgctgatggcaacggaaccatcgatttcccagagttcctcaacctgatggctcgcaagatgaaagacaccgactcagaggaggagcttaaggaggctttccgtgtgtttgacaaggatcagaatggtttcatctctgcagctgagctccgccatgtcatgacaaatcttggggagaagctgacggacgaggaggtggatgagatgatccgtgaggccgatgttgacggtgatggacagatcaactatgaggaagttgtc

SEQ ID NO: 249823 - DNA, 530 bp, Glycine max
  unsure (1)..(530): unsure at all n locations
tgggcggtntgtgttacctcgtagtgactattactcgtcccggtccggaattcccgggtcgacccacgcgttcggaaccgggaaaagcccaccatgaaaatcggtcgccctcggcgtccgaattgtagtctggagaagcgtcctcagtggcggaccgggcccaagtcccctggaagggggcgccagagagggtgagagccccgtcgtgcccggaccctgtcgcaccacgaggcgctgtcggcgagtcgggttgtttgggaatgcagccccaatcgggcggtaaattccgtccaaggctaaatactggcgagagaccgatagcgaacaagtaccgcgagggaaagatgaaaaggactttgaaaagagagtcaaagagtgcttgaaattgtcgggagggaagcggatgggggccggcgatgtgtcccggtcggatgtggaacggtgagagcctgtccgtcgatcgactcgggacattgaccgacgcggattgcgatggtggcccaagcccgggctgttgatatgctcgtgga

SEQ ID NO: 249824 - DNA, 530 bp, Glycine max
  unsure (1)..(530): unsure at all n locations
agccgggtgtnctgatcttaacncatcgatgcacgcctgtccggtccggaattcccgggtcgacccacgcgtccgcaagagtggctttttggtgaattgattggtgatcccgagttggttgagttcactgcgcatagacatgttccttaatttccccaaatattaaaacaagattcaaagcacgtcacttacgttcccgctttctgtttaacaagtgaaaaacttgaaccttttgagacctcagttctctgccatggcaaattctcatttatcaacaccttctgagctattttcaagacaacataagccccctagggttccaaatcttattgggggcagttttctggactcaaaatcgttaactttcattgatgttatcaaccctgcaacacaagaggttgtttcacaagttccttgcaccacagatgaagagtttaaagctgcggtatctgcagcaaagaaggcatttccatcatggcgaanaactccaatcacaaaacgccaacgtgttatgtttgagttccaggagc

SEQ ID NO: 249825 - DNA, 532 bp, Glycine max
cgccgtgtgtctatataagacataatatagtattcgctcgtaccggtctcggaattcccgggtcgacccacgcgtccgcccacgcgtacgcccacgcgtccgctgcaaaacgagaagtatccaacaatgactacgacgcgtgttgctatctgtctttgctttgcattcctttactacgcggctgaaggagccaaggttagtttcaataacaagtgctcatacacggtatggccaggaaccctaaccggtgaccaaaagccccaattatcaacaactggtttcgagttgggtccaggagcatccaactctgtggaccttccatctccatggtccggtcggttctgggcccgaacaggatgctccaacaacaacggaaggttcagctgcgccaccgccgattgcgcctccggtcaagtcgcatgcaacggtgccggtgcaatcccgccagctactttggtagaaatcacagttgcagcaaacggagggcaagatttctacgacgtgagcaacgtggatggcttcaacgtgccca

SEQ ID NO: 249826 - DNA, 531 bp, Glycine max
  unsure (1)..(531): unsure at all n locations
gggggggcnntaaatatgggactatatagaatctgctctaccggtccggaattcccgggtcgacccacgcgtccgcatgcattgaatatattccacaaggggaaatccagtagaagagatacatcaaaattggaagatcaagctgtaaaatctgagaagcaaatagaggagggaactgctatgaaaccagaagcaaagtctgaaaatgccgctcctgtaaaaaaggctgaagcagaaacattaagttcagtgggaaagacagatggtgaaaaatcagttcctgcacccaaagccgctgaagttcctcctgataatgagtttgagaagcgaataaggcccgaggtaatactagcaaatgagattgatgtcacattctctgatattggtgccttagatgagaccaaagaatcccttcaagatctagtaatgcttcctcttagaggccagaccttttcactggaggccttctaaagcctngtagaggaatattgctgtttggacctnctggaactgggaagacaatgctggcaa

SEQ ID NO: 249827 - DNA, 525 bp, Glycine max
  unsure (1)..(525): unsure at all n locations
gaggatgtctttactaataaagaacatgaaggattgctctaccggtccggaattcccgggtcgacccacgcgtccgggcggcgctacttcccacattgctcggaagtgctggacaagttcatggaggatgacctgcctgacttgttttaccttgaaaagggtactcatgaagagcagagaatcaaaaggacgcgtttcatggagcttaaagatgacgtccacaaggctttcaacaaggacaaggccgagtttagccgctctgggatttcatcttcatcatcctcatcatccctcagagattctgttgtacattacaaggctaggaaagtgtaattttaaaaccatacatagtgtttttgattttgacatacatattatatatagtgcaaattttaaaggtgaaaaaaaaaaaaaaagggcggccgctctagaggatccaagcttacgtacgcgtgcatgcgacgtcatagctcttctatagtgtcacctaaattcaattcactggccgtcgttttacaacgtcgn

SEQ ID NO: 249828 - DNA, 529 bp, Glycine max
  unsure (1)..(529): unsure at all n locations
agttgggnnnnnncctcacagcacatcagcgaaccgctctaccggtctcggaattcccgggtcgacccacgcgtccgcccacgcgtccgtaaggctgtttggacggtcacacgcagttgtattgtagaactgaacaggggtttctctttctctttctctgtctgcttcttcactttctctcgtttcaatcgaaaaaaatcatgggcagaaaattcttcgtcggtggcaactggaaatgcaatgggaccactgaggaggtgaagaagattgttactactttaaatgaagctaaagtccctggagaagatgttgtagaagttgttgtgagccctccttttgtgttccttccttttgtaaaaagtttgctgcgccctgatttccatgtctcggcccaaaattgttgggttcgcaaaggtggtgcttatactggagaggttagtgctgaaatgcttgttaatttgggaattccttgggttattattggtcactctgaacggaggcagcttttgaatgaatcaaatgagtttgt

SEQ ID NO: 249829 - DNA, 523 bp, Glycine max
gtgtgcgtctgactagctgcagctccactaccgaccgacgtaccggtccggaattcccgggtcgacccactcgtccgatgaagggaaaagaatccggtgaagcaaaaggttatgcttttgtgaccttcatgacaaaggaattggcatctaaggctattgaggagctgaacaactctgaatttaagggaaaaagaataaagtgctccacatctcaagttaagcacaagttgttcattggtaatgttcctaaatattggactgaaggagatatgaaaaaagttgttgctgaaattggccctggagtaatttgtgtggaactgttgaaggacccacagaattctagccgtaaccggggatatgcttttatagagtattacaatcatgcttgtgcagagtattcaaggcagaagatgtcaaactcaaactttaaacttggcagcaatgctccaacggtgagctgggctgatccaaggaattctgaatcatctgcaatctctctggtaaatcagtgtatgtaaagacc

SEQ ID NO: 249830 - DNA, 537 bp, Glycine max
  unsure (1)..(537): unsure at all n locations
ggtagacggtntgtctttacggcgggagtagtaaagagatccgctcgtaccggtccggaattcccgggtcgacccacgcgtccgaattctagagctaatacgtgcaacaaaccccgacttctggaagggatgcatttattggagaaaaggtcaacacaggctctgcctgttgctttgatgattcatgataactcgtcggatcgcacggcctttgtgccggcgacgcatcattcaaatttctgccctatcaactttcgatggtaggatagtggcctaccatggtggtgacgggtgacggagaattagggttcgattccggagagggagcctgagaaacggctaccacatccaaggaaggcagcaggcgcgcaaattacccaatcctgacacggggaggtagtgacaataaataacaataccgggctcattgagtctggtaattggaatgagtacaatctaaatcccttaacgaggatccattggagggcaagtctggtgccagcagccgcggtaattccagcttcaatagcgtatatt

SEQ ID NO: 249831 - DNA, 475 bp, Glycine max
  unsure (1)..(475): unsure at all n locations
gaattcccgggtggagatccaccagctgtcacagaaaaagggctggtcgcaatatcaatgggctgccctaagcttcactcgttgctgtacttctgccaccagatgacaaatgctgcactcataacagtggctaacaactgcccaaattctattcgattcacgttgtgtatccttgatgcaacaaaacctgaccctgatacaatgcagccactggacgaaggatttggctcaattgtgcagtcttgcaagcgactcatgcgcctatctctctcggggaaattgactgaccaagttttcctttacataggaatgtatgctgagaaacttgaaatgctgtctattgcatttgctggggatggtgacaagggaatgctgtatgtgttgaatggatgcaacaagcttangaagcttgagataatagactgcccttttggcgacatggcacttctgacggacgtaaggaagtatgaaacaa

SEQ ID NO: 249832 - DNA, 530 bp, Glycine max
  unsure (1)..(530): unsure at all n locations
agaaggtntgtctatacacgaacatatatagcatccgctcgtaccggtccggaattcccgggtcgacccacgcgtccgggcaatattctgagtccagccgttacttttctctgaccctgacggaatggttcaaagaggtcttgcactgacccatcaggatgagatactgacacctgctgctcacaccatcgactcatccttcagaaatgatcatgtcgactcctatgctctgcctgattccaatctctatgccaatgcctacaagaacataatcatgacccgaggcactactaagctactgctcgacatggcacccatatcgaaatttgctgaaatgctatacctcaacgctagatctgctaattacaccatgggaaggaagatctttaccggtgctcactcatatcgacattgacactatcatgacgaagccgctatacttgatagctaccgctgcatgcatagtgcactaagcaatgcttaatctgctgctgtacagctctactcacagaactggcatgagtactctt

SEQ ID NO: 249833 - DNA, 523 bp, Glycine max
  unsure (1)..(523): unsure at all n locations
gtgtgggctgagtgctcgcagctcatgatgtatccgccgtaccggtccggaattcccgggtcgacccacgcgtccgtgaaaattttggttgagcaagagccttctctttgttccgttccgcgaccatgtctcatgggacatgcccttccgtaaagaacttccttcttttggattctgatgggaaacgtgtcgcagtcaaatacttctctgaagactgggcaacgaatagtgccaaggaaaattttgagaaagttgtcttcaacaagactcagaagaccaatgcccgcacagaagcggaaatagcaatgtttgagaataacattgttgtttacaagtttgtccaagatcttcacttctttgttaccggtggtgattatgaaaatgagcttatcttagccacagttctgcaggcattttttgattctgtgggccttctgctcaggttgtggtcttacataaacaatttatatatgttccatgttcaagggtgtttttaatctatcactattaacacagtagtccn

SEQ ID NO: 249834 - DNA, 531 bp, Glycine max
  unsure (1)..(531): unsure at all n locations
agtaggtntgactaaataacgaaccgctacggacctgctcgtaccggtccggaattcccgggtcgacccacgcgtccgcccactccaccaccaaaccctattcagcatttcccccaatttcccctcacaccatgggctgctccgcgatggtgttggacccgaaaccgtcgtcggagccaccgccgttcctcgcgtcgacaaaatccgactacctccaaggcggcttcagcggcagcgacgccacggcctccgacgaggacgacctctacagccgcctcaagaccctgcagcgccagcttgagttcatcgacatccaggaagagtacgtcaaggacgagcagaagaatctcaagcgcgagctccttcgcgcgcaggaggaggtcaagcggatccagtcggtgccgctcgtcatcggccagttcatggaaatggtcgaccagaacaatggcatcgttggatccaccaccggatccaactactacgtcagaatcctcagcaccatcaaccgcgagcttctcaagccctncgcat

SEQ ID NO: 249835 - DNA, 526 bp, Glycine max
  unsure (1)..(526): unsure at all n locations
cgtttgcgtntgtctagtcctgccctcangtacgtaccgccgtaccggtctcggaattcccgggtcgacccacgcgtccgcccactcgtccgcccaatcgtagccgtcgcactctgtgttttcagcgccgtctccgatcggcgacaatggcgacccaaatgagcaagaagagaaagttcgtagctgatggagtgttcttcgctgaactgaacgaggttctgacaagagagttggccgaggacggttactccggcgtggaagttagggttacgccgatgcgcaccgaaatcataattagagccaccagaacccaagctgttctcggtgagaagggaaggagaataagggaacttacctctgtggttcagaagaggttcaagtttcccgagaacagtgtcgaactttatgctgaaaaggtcaacaataggggtctttgcgctattgctcaagctgagtctcttcgatacaagctccttggtggactcgctgtgcgcatggcctgctatggtgttttgaggttggtatn

SEQ ID NO: 249836 - DNA, 393 bp, Glycine max
ctcaaacatacgtattctttacctaatactttcaacattctttttaccctacctaatatattcatttatggtagtatttatcaacacggtctcctccccttacttaaataattcatcataactcctcctaacacacttccttttttccttccacacatcattcaaatttcttccctatcaactttccatcataatatatattcctaccatatttattacaaatcacctataattactcttccatttccaatattcaaccttaaaaacttttaccacatccaatcaaatcatcaaactctcaaattacccaatccttacacctatctactaattacaataaattacaataccatactcatataaacctattataaaaatcacaacaatttaaat

SEQ ID NO: 249837 - DNA, 477 bp, Glycine max
ggaattcccgggtcgacccacgcgtccgatagaagagccttccatatatagcctcccaaaaaaatgaagagtactacctctttggctgtctttctactttgtgccctaacttcatcatatcagccttcagccaccgctgatattgtattcgacaccgaaggcaatcctattcgaaacggcggcacatactatgtgttgccagttataagaggaaagggcggcggaatagaatttgccaaaaccgaaacagaaacatgccctctcactgttgtgcaatctccctttgaggtctcaaagggtctaccactgataatttcatccccatttaaaatccttgacatcaccgaaggacttattttgagcctcagtttcacttatgtacccccctgtgcctcaactccttctcggtggaccgttattctcaagggtctgccagaagaactccatgtcaaactcactggctacaaaaacacaata

SEQ ID NO: 249838 - DNA, 530 bp, Glycine max
agccggtgacgtgtaagccggggatatgatagtactcgctccggtccggaattcccgggtcgacccacgcgtccgagttgaaactcggggacaacgagcttctgcgcacggagaagaagttcaaggttttcatggagaattacgggaggagctactccacagaggaggagtatttgcgccgtttggggattttcgcccagaacatggtcagagcggcggagcatcaggcgctggaccccaccgtcgtccacggcgtcacgcagttctccgatctcaccgaggacgagtttgagaagctctacactggcgtcaatggcggcttcccgtcatcgaataatgccgccggcggtattgcgccgccgttggaggtggacgggctgccggagaattttgattggagagagaaaggagctgtcaccgaagttaagttacagggtagatgtggatcatgctgggctttcagcaccacaggatctatagaaggagccaattttcttgccaccggtaagctcgtcagtcttaagtgacaa

SEQ ID NO: 249839 - DNA, 533 bp, Glycine max
  unsure (1)..(533): unsure at all n locations
agtgcggtgtcgtgtgtcatcgcaactantgatgtaccgtctgtaccggtctcggaattcccgggtcgacccacgcgtccggatcaaagcaaaatcagaaaagggcacagagtcaagtagctcattaccagaagattggagagcagctttatatctttctcttgaaagtggcaaattttggttccctgctcaagtctataaccgtgagaatggtcatgctgggttcatgctctcatgttatgatgcccaactatgctatgattctcgatccgacacttttctggcaaggtactcgcctcatgggagatggacaactgaggaaaacatacaatgggaccggctaagagtgccaccaattgctacttctccacatgctcttcacatctctgactgtttggatgacttgagacctggagatcacattgagattcagtggagaagaaacaaagaatttccttatggttggtggtatggtgtcattggtcatttggaacaatgtcaaggacatgggaaccattgccattgtcactata

SEQ ID NO: 249840 - DNA, 527 bp, Glycine max
  unsure (1)..(527): unsure at all n locations
agtcggtntgnctagtacagacactatatagcattgctcgtaccggtccggaattcccgggtcgacccacgcgtccggtaaatagtaaatataaataccaacgctggagtgatggtagtttagggcggtgttactcgttctctcgttgattcggatctagagtcttttttcactcttcagttctcgttgttgttcttcgctttcctgaaactagggttttcaatttcgattcattcgttaataattaaagatgtttgggagggcaccgaagaagagcgataatacgaggtactacgaaatcctcggcgtctcgaagaacgcttcgcaggatgatctgaagaaggcttacaagaaagccgccatcaagaatcaccctgacaagggcggtgatcccgagaagtttaaagagctggcacaagcatatgaggttctgagtgaccctgagaagcgtgagatatatgatcagtatggtgaagatgcgcttaaggaaggaatgggtggtggcggtggccatgatccgtttgata

SEQ ID NO: 249841 - DNA, 534 bp, Glycine max
gggtagagcggttctattgaataagacactattattggatcgtctgtaccggtccggaattcccgggtcgacccacgcgtccgaatgggcgttctcacattcgaggatgaaatcaacttccgtgtggctcctgctactctccggacggccctaattacagacgccgacatcgtgataccaaacgctcttgataccttcaagagtgttgaaaacgttaagggaaatggtagtccaataaccatcaagaagatcactctacttgaggatggagaaaccaagtttgtgctgcacaaaatagattgcattgatgaggcgaacttgcgatacagctacagcgtggtaggcagtgctgcattgccagacacagcggacaagatcacattcaactacaaatcagatgctggtcctaaagaatggtctgctgggaagctcactgtcaaatactaaacacaaggagatgctgatcccaaccaagacgaactcaaaactggaaaagccaaggctgatgctctcttgaagccattgaggcttacc

SEQ ID NO: 249842 - DNA, 387 bp, Glycine max
gaattcccgggtcgacccacgcgtccgtccacgcgtccgcagaagacaggttcaaaccggagcaaaaaaacttgttacgatggtttgttgcgacaaggatccacgagaggaagtccttcaagcatggtacatggatgatagtgatgaagatcaaagactcccccaccacaaagaacccaaggagtttgtctcgttggaccaacttgctgaacttggagtccttagctggaaattagatgctgataaccatgaaaatgatccagagctgaaaaagattcgtgaagagcgtggctacacctacatggatgtttgtgaggtcttgccagaaaaagtgccaaattatgagcagaaaatcaaaagcttctttgaagaacatcttcacactga

SEQ ID NO: 249843 - DNA, 526 bp, Glycine max
  unsure (1)..(526): unsure at all n locations
gaagatnattggaagggagggatacgtaatgctgtcccggtccggaattcccgggtcgacccacgcgttcgcccacgcgtccgcgaattccctgcaattaacataagcataacccctttccaacctttctgctcttcagatcggatcagatcagatccaccgccatggatttcatgaaggtcttcgatcaaaccgttcgagaaataaagagagaggtgaatctgaaggtgctcaagattccggaaatcgaacagaaggtgctggatgctactgataatgaaccttggggtcctcatggtactgtgctggcagagatttcacaggctaccaaaaaatttactggatgtcaaatagtcatgaatgtcctttggacaagactgggtgaaactggaaaagattggcgctatgtatacaaggtaatgctttccaaagaaccatgttatttcttaagatgttaagatacatagagaagaatttttggtggcattttctatgttgatagatacacaacttacttttctttcaa

SEQ ID NO: 249844 - DNA, 444 bp, Glycine max
acgcattcgtccactcgtactctaattccttgcaaataacattatcataacccctttccaacctttctccgcttcacatttaatcggatcagatccaccgccatggatttcatgaaggtcttcgatcaaaccgctcgagaaataaagagacaggtgaatcttaaagtgctcaagatttccgaaatcgaacaaaaagtgctggatgctactgataatgaaccttggagtcctcatggtactgtgcttgcatacatttcacaggctaccaaaaaatttactgaatgtcaaataatcatgaatgtcctttggacaatactgggtgaaactggaaaagattggcgctatgtatacaaagtaatgctttccaaaaaaccatgttatttcttaagatttttagatacatagagaagaattttttgtggcattttctatgttgatagatac

SEQ ID NO: 249845 - DNA, 482 bp, Glycine max
gaattcccgggtcgacccacgcgtccgcccacgcgtccgcatcgcctcctccaacaccaccgccacctcctggattcgcagaagcggcgccgcctaccacccctccacccgcatcgccgccgtctccctcggcgacgaggtcctctcctccctcccctccgccgtccccctcctcctccccgccctccgctccctccacgccgccctcgtctattccaatctccataacgacgtcttcgtttccacccctcactccgacttcgtcatcctcaaccccttccctacctcccaagccttcttcaaccaaaccctagaaaccttcattctccctcttctccatttcctctctcaaacaaattcccccttaatgctcaacctctacccttactacgtcttcatgcagaacagaaacctcgtccctctcgaaaacaccctcttcaaacccctccctttctccaaacaaatgctcgaccccaacactc

SEQ ID NO: 249846 - DNA, 526 bp, Glycine max
  unsure (1)..(526): unsure at all n locations
cgagtgcttagctgaagttgacgatcctcatcggaccgccgtaccggtctcggaattcccgggtcgacccacgcgtccgcaaccatcatggagcgtgaggactgctttagttgcactgattgcgttcatgcctaccaacgcaaatggtgcattgggatctttagactacaagaaagaagagaggcatacactggccattaagtctcgtgaagcttctccaaaattcgggactcctgaacgtcaaaagctgattgatgagatacacgagtacatgctaagcaaagcaccacctgttcctcaacctagtgccacagaggcttctgaagagaaccccagaaatgaagaggccgagacacaggtcaattcaccaaatcccgagtccttacctgcaggagagggtattacagatcaagaagttgatggaattgtggaagaacaagaagtcatccttgcaaaccctgcaggagttgaagcttcaagggaggttcaaccaagtgtttcaaggaatgaagtgcctcataaatan

SEQ ID NO: 249847 - DNA, 452 bp, Glycine max
ccggtccggttttcccgggtcgacccacgcgtccgcccacgcgtccgcttttttcaggttgaacatgtcaaagctgagagaaatctacttgctgaggttgacagcaattgcattgttaaactttattgttcctttcaagatgaggagtatttatatctcataatggagtatctacctggtggagatatgatgacattgctgatgcggaaggatatactcacagaagatgaggccaggttctatgttggggagactgtcctagccatagagtcaattcataaacataattatattcatagagatatcaagcctgacaacttgctgctagatagaaatggccacatgaaattatcagattttggattatgtaaaccgctagactgcagtaaccttcaagaaaaggacttctctgttggaatgaacagaagtggagcccttcaaagtgatgggcg

SEQ ID NO: 249848 - DNA, 530 bp, Glycine max
  unsure (1)..(530): unsure at all n locations
gtagtatgggttctgacgaggggagaagagggaatgctccggtccggaattcccgggtcgacccacgcgtccgcccactcgtccgcccactcgtccgatttgcctgcatgcctttggtattgtggggtgtgggtcgtttagtggtgtcaagtcttgcgaacgtgagggtgcatgagtggtaatcgggatgtttttgttgcacggctccatgcttgcgcatgcaacgtgtgacatgcatccttttcattgtcaccttagccttcgtggcttaggtgctgacgattggttcctgtgttgcctacctaccaaacggtattcgtgtggctagtcagacccattccatccaggcctctttgttggggacgctggaggatttcaaagtcccacacgtgaaccacgttagtcgtccatcataacggcttnctgtggcacacgtgtggtgatggttctcttcgatgcngtgcatgcagtgaacgtgggtggtctagtgcctccacattgtccctaaaatcggttgtctcggatgacgc

SEQ ID NO: 249849 - DNA, 364 bp, Glycine max
tccggaattcccgggtcgacccactcgtctcgcccactcgtccgaaaaaacaaacaaaaagatctaataacctaagatatagaaaaatgtaagtgcgattaatcaagtcaagtcttgcaaaacgttagggtgcatgaataggaaatcgagatgttaaatgatgacgagatccatgcttgcgcatgcaacttgtgacatgcatccttcgtattagacaccttagccttcgaggattacgtgctgactattggttactgtgttgtctacctaccaaacattattcaagtggctagtaatgacacattccatccaggcctcttcttctctgacgctggaagatttcaaagtaccacacttaaaccac

SEQ ID NO: 249850 - DNA, 443 bp, Glycine max
gaattcccgggtcgacccactcgttcgggcaaaagatgtcacaagagaaatggatcaacaaggcaatcttaaaacagaaaattgtaggcatgacaatgacgagaagggttatggtggagcaaagtacaccattggtagtgtggaccacattactacaccatttattgtagaggccaatcttaaatcagaaaatcagatacaagacaatggccaaaagggttatggtggagcaaaggacacaattggtagtgtagaccacattactacaccacttgctgaaaaggccaaagctgctggtagcaccactgctcagtatgttggggagaaagcagcacaagccaaagatgctactgtgcaaactggcaagagtgctgcaaaagttgcctcagatttgagggacaaggctttggccacaaggtggagtgctgcacattattctactg

SEQ ID NO: 249851 - DNA, 534 bp, Glycine max
  unsure (1)..(534): unsure at all n locations
ggagaatgttcgtgtatgaagggataataaggatcgctcgtaccggtccggaattcccgggtcgacccacgcgtccggtttgtggcatcatcacctgttatttcagcttgatggcttatatgccttggcatgcgagtgcgtttgtaaccatcaggaaaaacaaatgcagggagttgctttcgacgaacatgagaaacaaaaatatccatccctggcttccagtacatgtacatatttatttcttgtctgaattcatcaactgttccacgtatatcaaattgctgcccctcttgacctcttactccctctttcctttgcaagcccatgaaaaatgcagaatgtgcacatggcttggatgtgtctacatactcatgtgggtaaggatggcactgcagcatcccatttgtatctcgctctatcttcagggtaagcattctcaaccgagattctacccatcccctccatgctagtaaatcatccgtgtctgatgcaattatgtccacttgtaaatagttnttgtatgcctcaaaaaaa

SEQ ID NO: 249852 - DNA, 535 bp, Glycine max
  unsure (1)..(535): unsure at all n locations
gaagtnttgcttaacagacagtattgattgtaccgctcgtaccggtctcggaattcccgggtcgacccacgcgtccgatttgttgtctgttacgttaacgtccctgcctccgattctttccacttcttacttggggtctagtttctcttttccctctcacacaacacaagagaacacgaataaaacgcactgcacgtgaatcgcaattattagggtttacacaccctcgcagatggtttgagattgcgaattcgacgacgatgatggaaggagcgagcaatggagggatgctgtaccacgaggtgcaggagtcgaagctctgcgcggtgcattgcgtgaacacggtgctgcagggcccgttcttctcggagttcgatttggccgcgcttgcctccgatctcgaccgcaaggagcgtcaggtcatgctcccagcgctcgcgtcggcggatttcgagtcgcacaatgtctcgctcgacggagatttcagcatccaggttatacaaaaggctctggaagtttgggacctacaagttat

SEQ ID NO: 249853 - DNA, 525 bp, Glycine max
  unsure (1)..(525): unsure at all n locations
cggagggttgactagttaccgcactatatagaattgctctaccggtccggaattcccgggtcgacccacgcgtccgaagaatccgacatgaatattgtcgaaagtaccataacattgaagcttccacaaggttccaatgatgtcttgctcaaaaatttgtacttgtcttgtgatccgtatatgaggaatctcatgaacaagcccgaaggccctcccaatagtcgtgcttacactcctggctctccattaataggatatggtgtgtctaaaagtctggaatctgggcacccagattataaggaaggtgatttagtgtggggctttaccaaatgggaagagtatagcttgttaccctcagctcaaatactcttcaaaattgagcacactgatgttccacttacctactacactggaattcttggtatgccaagagtgactgcatatgcaagtctatttgaagtaggatctcttcagaaaggagaaaatgtttttggttcggctgcctcttgcgcanttggtcaactt

SEQ ID NO: 249854 - DNA, 462 bp, Glycine max
cccacgcgtccgattgttttttatttgaaataatgtccgggatcatccacaagattgaggagaccctgcatgtgggagggcacaagaaagaggagcacaaaggagaacaccatggtgagcacaaaggtgaacacaaaggagaacaccatggtgagcacaaaggtgaacacaaaggagaacaacaccatggggagcacaaggagggacttgtggataagatcaaggacaagatccatggtgatggccatgacaagggtgagaaaaagaagaagaaggacaagaagaagaaggagcatggacatgaccatcatggtcatagcagcagcagtgacagtgattagatcttatatgttaagcaggtgtacggtacgatggtagtgaagagccagaatccatcttcctgctttatgatataatacacataaaatagcgattccggaaatcatgtctgtagctgctctt

SEQ ID NO: 249855 - DNA, 470 bp, Glycine max
cggcccgacccacgcgtccgcccacgcgtccggaaagagtagtgaacatgaggaaactggcccccccaaaacatgaagagcatcattcttctcgtgacaattcttatggaaaatcttcttctggtagctctggatttggaactacactttcaaagaagtctttggatatggcaatgagacatatggacataaggcgaagcatccaaggtaatctgcggcctcttgtgacaagcattccagcttcctctatgtacagtgtgagatcaggtagttcctcaaagagcaggacagtgagtgcttctgattctccacttgccacaagcagcactaccagctctgaaccaagtgttaataccaactccatgtcttatgatggaagtggggttgaagaaaatgattttgcatgtgagaggggaaactcttgatgggagtcatcaatccatgatgggcaaagcatgatcatcatcact

SEQ ID NO: 249856 - DNA, 487 bp, Glycine max
accggtctggaattcccgggccgacccacgcgtccggaaataattccctctgatggaagacaagaagagccttgcttcatctgaagagcgttggcagataaagggaaaagcttctctattagctgcacttgactactatgttggcttgcatagtgacatcttcatctctgcttccccaggaaatatgcacaatgcattggttggacaccggacatacttgaacttaaagactataaggccaaatatggcattgatgggtcagcttttcctgaataaaaccatagagtggtcagagtttcaggatgcagtggttgaaggtcaccaaaatagacaaggggaactaatgctgatgaagccaaaacaatcaatatatacgtatccagctcctgattgcatgtgccaagcttagtagtgactagtagtagtatatacttaaattattattattgctcacggatgtagcctgtgtattttatagttcggtgtc

SEQ ID NO: 249857 - DNA, 538 bp, Glycine max
  unsure (1)..(538): unsure at all n locations
cgtggggnnnnnnaatttgatgaccnctnttcgtatcncccccnccgnntcggaattcccgggtcgacccacgcgtccggaaagatccgtgaagtactaaggaattggcctgagaagaacattcaagtcatagttgtgactgatggagaacggatcctgggtcttggggatcttggttgtcaggggatgggaataccagtgggaaaactttctttatatacagcacttggaggagtccgtccttcagcttgtttacccattacaattgatgtgggcacaaacaatgagaagctgctgaatgatgaattatatattgggctaaagcaaagacgagcaactgggcaggaatatgctgaacttatgcacgaatttatgacagcagtcaagcaaacttatggggaaaaggtcctaattcagtttgaagactttgcaaaccacaatgcttttaatctgcttgagaaatatagatctacacatctggtctttaatgatgatattcanggaacaagattcgtggttcttgctggactagttgcaa

SEQ ID NO: 249858 - DNA, 537 bp, Glycine max
  unsure (1)..(537): unsure at all n locations
nggtaggtgtgcgnntnnnctagctacagaaggcctcactgtactgctctaccggtccggaattcccgggtcgacccacgcgtccgcccactcgtccgcccacgcgtccggtgaattgcaatcagaagaaaataaagtctccaatgagaaaaataagaaaagaaagctgaaaacaccggcgcagcttaaagccttggaggatttttataatgagcacaaataccccacggaggaaatgaaattagtacttgctgaggagttaggattgacagaaaagcaaatatctggatggttttgccacagaaggttaaaagataaaagattgatgaaagatgaagccgttgctaatgggagacaagatcgttcaagtggtgtcatccaagatcgtggcagtggacttgggcaagattcatgcggaagcagtaagcatgctgatcacaggtatctggatccgaaggaggttgagagccatggcctctacaatcacgaattgtcagttgcagatatgacccacagacgtaggaaccattatcctga

SEQ ID NO: 249859 - DNA, 525 bp, Glycine max
  unsure (1)..(525): unsure at all n locations
tgagccggntgactgaatacgaagaacctctatggactgctgtaccggtccggaattcccgggtcgacccacgcgtccgggccaatttgctaaattgactgattgttatgtggttggaagtgctggaagtaaagagaaggtggatcttttgaagaataaattaggatttgatgaagcctttaactacaaagaagagtcagacctcaatgcaactttgaaaagatactttccagaaggcattgacatatactttgagaatgttgggggcaagacacttgatgcagtactcccaaatatgagagttcttggtcgcatacctgtttgtggaatggtctcacagtacaatctgacacaacctgaaggtgtaacaaatttggcaaatcttatatttaagcggattcgaatgcaaggttttattgttggtgaattctatcacctatatccaaaattcttggagtttgtcctgcctcatattagagaaaggaaggttgtgtatgtggaagatattgctgaaggtcttgagaa

SEQ ID NO: 249860 - DNA, 527 bp, Glycine max
  unsure (1)..(527): unsure at all n locations
gtagtggggntgctgctacggatcctcatcggactgccgtaccggtccggaattcccgggtcgacccacgcgtccgaacaaagtaagagttcactcaatctcactgtgttgtgagttgtgtgtgagcaccaaccaacaatggtgtctctgactccgttatgtttctttattaccttgttgatcgctggtgcagacgcagcggcggagccccaaacggtgcgttttgacaccggggggttgagcagagacacctttcccaaaggattcttattcggaacggccacgtctgcgtaccaagtggagggtatggcccacaaagacggtcgcggcccaagcatttgggacgtcttcatcaaaaaacccgggattgtcgcaaataatggcacgggagaagtttctgttgatcagtaccatcgctacaaagaagatatagatctcatggccagcctgaattttgatgcctaccggttctcaatctcgtggtccagaaattttccaaatggaactggccaagtaaaatgggnagg

SEQ ID NO: 249861 - DNA, 414 bp, Glycine max
ccggttcggaattcccggggcgagccacgcgtccgtggcataatacattgatttgtttcttaaaaacaacactgcaatgtctgccatatttctgcttgttggaatgctatcgtgcattacagttgcacaatccataggagtttgctatggagtgattggtgataatctaccatcaaggcaagaagttgtggacttatataaaacaaatggcattggtagaatgcgtatatactacccagatgaagaagcactccaagcccttagaggttcaggcattgagttgattatggacgtggctaaggaaacccttcaatcattgacagactccaatgctgctacagattgggtcaataaatatgttacaccttactcgcaagacgtcaatttcaagtacatcgcttgtggaaatgaaat

SEQ ID NO: 249862 - DNA, 292 bp, Glycine max
ctttgcttcatacacgactcgtaagttgggaagaaagctgaccatgttgattgctggggtattcttcatctgtggagttgtccttaatgctgctgctcaaaaccttgccatgctcatcgttggcagaatcttacttggctgtggtgttggctttgctaatcaggccgtgccagtgttcctctctgagatagcaccttcaagaatacgaggagcattgaatatattgttccagctcaatgtcacaattggcattctatttgctaaccttgtcaactatggcaccaacaaaatc

SEQ ID NO: 249863 - DNA, 531 bp, Glycine max
  unsure (1)..(531): unsure at all n locations
cgggagggnnccnnnnnntttaaactgagggcttcgtacacccgtaccggttcggaattcccgggtcgagccacgcgtccgtggcataatacattgatttgtttcttaaaaacaacactgcaatgtctgccatatttcggcttgttggaatgctatcgtgcattacagttgcacaatccataggagtttgctatggagtgattggtgataatctaccatcaaggcaagaagttgtggacttatataaaacaaatggcattggtagaatgcgtatatactacccagatgaagaagcactccaagcccttagaggttcaggcattgagttgattatggacgtggctaaggaaacccttcaatcattgacagactccaatgctgctacagattgggtcaataaatatgttacaccttactcgcaagacgtcaatttcaagtacatcgctgttngaaatgaaattcatnccaataccaatgaggcacaatatattctattttgcctgaacaacattaaaaatgcaatttcatcac

SEQ ID NO: 249864 - DNA, 522 bp, Glycine max
  unsure (1)..(522): unsure at all n locations
nggggacgtnnggacccaggcctanagcagatcacgccgtaccggtccggaattgccgggtcgacccacgcgtccgctgatgcatgaaactgcaatttaaaatcccatattcatcgaaattaattctggggatgttagaaatgaaggtggagagtttgcatcaaaccaaggagaatgtagcattgttgttctctccatataagcaccacttatgaggaaagagtcaagaactgtccactccttattcttgcactgctaacaagctcaaatccggcgctgttacaatagattctgatcttggacgtaatgagaaaaatgggttgtagaagaaactctgtatacacgacaggattgatttcggccggatgtttcacggtgctaggagttcccatgactggcaacttgctgaaaatttgatttttggtgctgatccgcacacactcaatgaagccttgtgtatcacactgcattccatctgttctttgacacacagctattacctaatgggatactggaattaaa

SEQ ID NO: 249865 - DNA, 351 bp, Glycine max
cacgcgtcacgcgatattatacttctaatccatttcattatatataatggggattctcacaattgaggatgaagccaccttccctgtggctcctgctaccctttacaaagctctagttacagatgccgacaacgtcatcccaaaggctgtcgaagccttcaggagtgttgaaaaccttgaggggaacagtggtcctggaaccatcaagaagatcactttcgttgaggatggagaaagcaagtttgtgttgcacaaaatagaatcagttgatgaggcaaacttgggatacagctataacgtatttggtggagttgggttgccagacacaaaggagaagatcacattcgaatg

SEQ ID NO: 249866 - DNA, 519 bp, Glycine max
  unsure (1)..(519): unsure at all n locations
nnnnggatgtttttataaggagtcggacgtcatgctctaccggtccggaattcccgggtcgacccacgcgtncgtgaactccttaactatacttgtgattggaaaagggggtgtttgaaaatcttcaactgggaactccatcattggggatagagtgggttccaataatcctttccaatccgaaaggcccaaaaccctgattgtgtcgcgaacaaaggcttgttttacattgaacattcatgacactcctggtctcattgaagggggatacatcaatgatatggcacttgatataataaaacgtttccttcttaacaagaccataaatgtactgctttatgtggatcgcttggatgtgtatagagtggacaactttgaataagtagtcgccaaagctataacaaataatttttgaaaaagaatatggaacaagactattctagcactcacacatgcccagttctcttcaacagatggatggcttatgatgaatctttttacaaaaactgagtctctttt

SEQ ID NO: 249867 - DNA, 379 bp, Glycine max
taccggtccggaatcccgggtggggccacgcgtccgaaaaagctcttttccttctaaatttgattccttattcacattctatatgtattgggcttcttacctgtctcagaaaacaaaaacctaggggagtgctggtggtgccggagaaaacccattccacttggtgagaacgttctgagaagcatgctgcattctttgacttgaataaagatggtgtcatctacccatgggagacttttaaagggttgcgtgaaatcgggactggggttttgctgtccgttggaggtgctattttcatcaatgtgtttctcagtcagagtactcgtcccgtaactctctttatccccataaaaactctctttttttttttttttttaca

SEQ ID NO: 249868 - DNA, 425 bp, Glycine max
ccggaattcccgggtcgacccacgcgtccgcccacgcgttacgaagaacaaccccatcttgccttctgatccttaccaaagagccttggctcggttctggtccaaattcattgatgataaagtttttggtgctgcatggaaatccgttttcacagctgatgagaaagagcgtgagaagaatgttgaggaagcaattgaggctctgcagtttcttgagaatgagataaaggacaagaagttctttggaggagaggagattgggttggtagatattgctgctgtctacatagcattttgggtccctatggttcaagacattgcagggttggagttattcacaagtgagaaatttcctaagctccacaattggagccaagaatttttgaaccatccaattgtcaaagaaagtctgccccctagagatc

SEQ ID NO: 249869 - DNA, 434 bp, Glycine max
  unsure (1)..(434): unsure at all n locations
tccggaattcccgggtcgagccacgcgtccgnccacgcgtccgtactggacctgccattgtcagtggcattttataagcttgttctctggcaaggtcttgatttgcatgacattctgttcattgatgctgagcttgggaagactttacaagagttcaatgcccttgtttgtcggaaacattatatagaatctattggtggtagctatacagatacaattgttaacttgtattttcatggtgcaccaatcgaagatctttgcttagattttactctccctggttatcctgaatacaccttgaagccaggagatgaaattgttgatatcaacaatttggaggagtatatatccttggtgatcgatgcaactgtcaagactggaatcatgcggcaaataaaagcatttaaagcacggtttaaccaggtttttgatat

SEQ ID NO: 249870 - DNA, 263 bp, Glycine max
tccggaattcccgggtcgacgccacgcgtccgcttcactggtgttttcccccaattcccagtcccacatagcttaaaacttaccatctacgattggacaaatacaaatacccttctgcctcgctcaaaacacaaacaagctcgcttctttcttctctcattaacaacatgcagatcttcgtcaagactttgaccggcaagaccatcaccctcgaggtcgagagcagcgacaccatcgacaacgtcaaggccaagatccaagac

SEQ ID NO: 249871 - DNA, 520 bp, Glycine max
  unsure (1)..(520): unsure at all n locations
naagagtgtgtccccacgtcccccaccgtatgccgtaccggtccggaattcccgggtcgacgccacgcgtccgcgaagccttctcgttcttcttcttccgccctttctctctctagaaccgtacgggcgtgtctttctctctgctcaaccggagacagcgtcgccttcttttctgaatctcgcggcgttgttagttctgcggcggttgtagttccggcggcgatgggacagcaatcgttgatctacagcttcgtcgctcgcggcaccgtgatcctagcggagtacaccgagttcaccggaaacttcaccagcgtggcggcgcagtgccttcagaaactcccttcctccaacaacaagttcacttacaactgcgatggccacaccttcaactacctcgttgataacggattcacttactgtgtggttgctgttgagtctgctggacggcagattccaattgctttcctcgaacgaatcaaggaggattttaccaacaagtattgctgaagaaaaacctccn

SEQ ID NO: 249872 - DNA, 530 bp, Glycine max
  unsure (1)..(530): unsure at all n locations
nnaagatgtcgtnnccccccaccgtcccacaccgtactgctcgtaccggtccggaattcccgggtcgacccacgcgtccgcccacgcgtccgggaaataattgatctttgaaaatgcagggaggaaagaaagctggagagtccatcaaggaaacagctgcaaacattggtgcttctgccaaggcttgcatggagaaaaccaatgccactgttcatgagaaagcagaaagaatgactgcacgtgatccgatgcaaaaggagttggcaacccagaacaaagaggcaaatatgaaccaggcagagctggacaagcatgctgcgcgtcaacataacacggcggcgaagcatgctgtcactgcaaggcacatgggacaacccatggggacccatcaaacgtcagctatgcccggtcatggaaccggacaagccactggctcatgtcaccgaggaagtggtggctcacaaccctagtggcaccaacacatgctccggtggggactgctacngctcataataaccgtgctgagggat

SEQ ID NO: 249873 - DNA, 527 bp, Glycine max
  unsure (1)..(527): unsure at all n locations
nnaatgatgttctgncccccccacgtcccccagcgctatacctcgtccggaattcccgggtcgacccacgcgtccggtactgttctattagttcatactaagttctgaaaatgagttccaaagttttgtttggggtacgtatgntcttggccactatacttctgatctcctctgaggttgcacccgatgatgcatacgaaaattttgacaaaataaatgggaagcctagtgcagatggggtagatgaaaagcaagtattggcgtggcggctatggtggcggctatggtggtggttatggaggtgggcgttgaggctatggaggtgggcgtggaggctatggagggggacgtggtggatatggcggcggacgaggtggctatggtggcgggcgtggtggctattgcngccggcgttgtggcnggcgttgtggctatggtccttatgaacataacgaggggctgggttgatgcttaccctcacaactaagaaggccactttctaaagcttatatatgggttaaaggtat

SEQ ID NO: 249874 - DNA, 522 bp, Glycine max
  unsure (1)..(522): unsure at all n locations
ggggnagcgccctaaatggccatgccactacgcacgcctgtccggtccggaattcccgggtcgcgccacgcgtccgaaggatgtatgcttgggttgttgctaattatgcacttgtcactcttggaggtgatcgtttggaaacaactgggattattgaacttggtggtgcttctgctcaggtgacctttgtatcaagagaagcagtgctgccttcattttcacgaactgttaaatttgggaataccacctacaacctttacagccacagctttcttcattttggcctgaatgctgctcaggactcgttgaaagaagcacttgtattgggagaatttaacttagcttctcaatctcttcaaaaagggttgcggatagatccttgtactcctacaagatactcttataatgttgaatcatggaagttcccttctagctcagagagtgaaaaaaaccaatattagtccactgtacaagcccagggaaaactttcagaatggcgaactggagcacttacactgttac

SEQ ID NO: 249875 - DNA, 521 bp, Glycine max
  unsure (1)..(521): unsure at all n locations
nggattttgccccnaaagttttagacgcactgncgtaccggtctcggaattcccgggtcgacccacgcgtccgaaacaaccaacctcttcagtgatcttttattagtactaagctaaaccatttgggattgcctcaaaatcaaaacctttatctttctagctatttcccttttcaaatcatgccacctaacatcaccaccgttgttgccaatgtcaccaccgagcaattacccaaggctcgtggaggaagtgggcgtgccttcgtgacctttcttgctgggaacggtgattacgtaaagggtgtcgtgggtttggccaaaagactgataaaggccaaaagcatgtaccctttggtggttgctgtgttaccagatgttcctgaagaacatcgtgagattctcaaatcccaaggttgcattgtcagggagattgaacctgtgtaccctcctgagaaccagacctagttcgacatggcctattatgtcatcaaataccttcagctacgtaatttggagtttcag

SEQ ID NO: 249876 - DNA, 422 bp, Glycine max
gaattcccgaatcgacccacgcgtccgcccacccgttcgcttctaaatatatggggggaaacttttagatctcctcaatgaacggaaaaaggtttgcatgagggaggatgggaaacagcatgtttgcattgttggcttgcaagaatatagagtatctaaagttgagacaatcaaggaatttattgagagaggtaattccacaagaagtactggtacaactggagcaaatgaggaatcctctcgatcgcatgctatacttcagctttgtatcaagagatcagctgatgggactgaatcaaagcctacccgacttgtgggcaaactatcttttatagatctggctggaagtgaacgttgtgcaaatacgacagataatgataagcagactaagattgaaggggcagaaataaataaaagtttac

SEQ ID NO: 249877 - DNA, 522 bp, Glycine max
  unsure (1)..(522): unsure at all n locations
nccgattctnnccggagggggtgaggacgctctacccgtccggaattcccgggtcgacccacgcgtccgcggacgcgtgggtgctgaaacacttgaggattatttacgccgtgaatgtccagagccgtgtaaggaaattcttgttttgtgtgacaatcgttgcgtactttttgataacaagactaaggatgaagggaagcgctttggacaagttcaacaacttctctcttttgtaaacacagttctatcacgtaatggtggacgaccttatacagatgagttatttacacaactgaagaaaggagcaatggagctgcataaccaacaaagagaggttgattctttaaaaggatattcaaaaggagagatattgaagtttaaaaagcaaatgcagcaaacatatgatgaccaattaaagcgaattactgagatggttgaaatcaaagtganggaggcaactatgangcttgagcaaacaatggcagaagagcaagcttgcagacttaggccnaggaaaatgca

SEQ ID NO: 249878 - DNA, 383 bp, Glycine max
tccgattcccggtcgacccacgcgtccgatcgaatcgaatcgaatcgaaagggaagtgcaaaatggatgacatgcccgtgcccggggtcttgtgaccaagccccaagaatcaccccgcatcacccgattcggcgccgaccatgatgttgtgaaaaaagggtgcgaggctctgcataaatgcgaggacatggtcaataatctaggtttgttctcttccaacgagaccaaagaagatatcagcaccacgaatctcaaatacattctggtgccattttatctcgcggagttgacagaaaaaatagcacaggatgacaggatacagattctaaagtcttcccaagcaaaaactaaggaagttatctcattctgtgaagcaatggagc

SEQ ID NO: 249879 - DNA, 351 bp, Glycine max
  unsure (1)..(351): unsure at all n locations
ggaattcccgggtcgacccacgcgtncgatcaatattaaatattggtgcacagaaaatacgtcatctgacaataatgaggagaaaggtcaatattccaagttctcgaatgagattcatacatcattaaacctggcatcatcgaggatgccaccaacacaaaacgtttggcaaaactgctcacatttgaaagcaccaagtctgaaggtaaattgacatctcctgatcagtacatatctagaatgaaagctgggcagaacgatatcttttacataactcgaaccagcaaagaacaactggtaaactctccattccttgagcggcttaagaagaaaaattttgacgttattttc

SEQ ID NO: 249880 - DNA, 525 bp, Glycine max
  unsure (1)..(525): unsure at all n locations
nnggagctcttccccgcacctgccccgacgcactgctgtaccggtccggaattcccgggtcgacccacgcgtccggcgaggcaataccattctcatcttgcatttgcaccatctatactattttagggtggaggagaagcttcgcgaacgaaagcaaagaaccctagaccgtcacagaaccattccatagccatgtctggtgttggacctctttctcaggatcgggaacctgtcgacctccgcaagaaggctctcaccgccgccgcccagaatgacgagaaagcccgcaacgccgcccgccgctctggcgccgaaatcgaaaccctaaaaaagtataatgctgggacaaacaaagcagcatctagcggcacttcattgaacactaagacgctggatgatgatactgagagtatagctcatgagaaggtgccaactgaacttaagaaagctataatgcaagctaggatggacaaaaagcttacttaggctcatcttgcacaactgatcaattgaaaaccttaagtg

SEQ ID NO: 249881 - DNA, 409 bp, Glycine max
aattcccgggtcgacccacgcgtccgtttgcaactgcaacaatggtgccgcaacccattttgcatctaacccttttgtcattggggatcggtctgaccactctgtccttggtcgatgccgccgatcccacatttggcttcacccctcttggattatctagtagctcaaacttgcaaatccaaaagccttacgacgttgcagtcaacgagcgctacagcttttcaaatggagtgcacagattttgggtatactccacggacaagcctcatatgcaaggcagcaatacgaagccacgaactgagattcgtatcgctggatacgattatacatacggtgtgtggcaatttcaaaggtttttttacgtgcctagtggcacaagcggtgtgtgcatccagcaagtgtttggtgg

SEQ ID NO: 249882 - DNA, 443 bp, Glycine max
  unsure (1)..(443): unsure at all n locations
cggaattcccggntcgacccacgcgtccggctgttcctacaatcattccaaatgtgcccttccggtcgcaccctcctcccttcctcggtctcggatttccgaccggcattggacgtcctcgatgccgaccgcgacggcaaaatcagccgcgacgacctccgcgccttctacgccggagtcggcggcggaggagatgacgtgatcggggcaatgatgacagtggctgacaccaataaggacgggttcgtggagtacgaggagttcgagcgcgtggtctcggcggagagaaagcccgtggggtactgtggggccatggaggacgtgttcaaggtcatggacaaggacggcgacngcaagctcaaccaccatgatctgaagacttacatggcctgcgcttgttttncggccaccgacaacgacatcaacgccatgatccgattcgg

SEQ ID NO: 249883 - DNA, 344 bp, Glycine max
tccggaattcccggggttctttctctgtctttctctttggttttctgaaaaaaaaaaaaaacaaaaattggtgggatttgaaggtatttgaggtggggattgaattgggtacattgttggggttggaaaaatctatcaccatgaatattatgcgaaagttgaaaagcattgcttctgggaagacttccgtttcatcagatcctggaggggattgtaccacaaaaagagtaaagtttgatcaagaaaccgaaagaaaagtcaatgaagaaacatatcctaatgagagatgcggaaaagatcaggagcagtatgtagatgcattaaaagaaagtgttaattctaat

SEQ ID NO: 249884 - DNA, 416 bp, Glycine max
  unsure (1)..(416): unsure at all n locations
tccggaattcccgggtcgacccgcgcgtccgattaatagtaatacaaacagcagcatgcgcccacccgttattctcaaaactaccaccgtgtttgtggaatctttcttctcgtcaccaccctgtgatcgcagactcaacactctcgctagacacttcctttcgcaaatggcttctcacgacagcatctccgcttctacaacctccgcttctgattccgtcttcaatcacctcgttcgtgctcccgaagatcctatcctcggggtaactgtcgcttataacaaagatccaagtccagttaagctcaacttgggagttggtgcttaccgaactgaggaaggaaaacctcttgtttttgatgtagtgaggcgagttgaacagncactcataaatgacgtgtcacgcaacaaggaatata

SEQ ID NO: 249885 - DNA, 340 bp, Glycine max
  unsure (1)..(340): unsure at all n locations
ggcggatcctgcaatcattccaaatgtgcccttcctgtcgcaccctcctcccttcctcggtctccgatttcctaccggcattggacgtcctcnatgccnaccgcgacggcaaaatcagccgcgacgacctccgcgccttctacgccggagtcggcggcggaggagatgacttgatcggggcaatgatgacagtggctgacaccaataaggacgggttcgtggagtacgaggagttcgagcgcgtggtctcggcggagagaaagcccgtggggtactgtggggccatggaagacgtgttcaaggtcatggacaaggacggccactgcaagctcaaccacca

SEQ ID NO: 249886 - DNA, 525 bp, Glycine max
  unsure (1)..(525): unsure at all n locations
cggggnagctgcttacccggcactgcnccacngtcatgccgtaccggtccggaattcccgggtcgagccacgcgtccgcactttcactggaatcacaatcctgaaacaaaaacatcttatcatttaacatgctacgagacaacatgaccaccacattggaaagaggtttctcggaagagcaagaagctctggtggtgaagtcatggaatgtcatgaagaagaattctggagagttgggtctcaagtttttcttgaaaatatttgagattgctccatcagctcagaaattgttctcattcttgagagattcaacggttcctttggagcaaaatcccaagctcaagccccatgccgtgtctgtctttgtaatgacctgtgattcagcagttcagctgcggaaagccgggaaagtcactgtcagagaatcaaacttgaaaaaattaggtgctacccattttagaaccggcgtagcaaacgagcatttcgaggtgacaaagttgcacttttggagaccaataaaagagn

SEQ ID NO: 249887 - DNA, 399 bp, Glycine max
  unsure (1)..(399): unsure at all n locations
acccgtccggaatcccggggcgacgccacgcgtccgcccacgcgtntcgccacgcgtncggttcttcacatgatcttcataactcttaatgtgtgtatgatttgcatccggggcgatcacatanagattcagtggagaagaaacaaagaatttccttatggttggtggtatggtgttgtaggccacttggagttatgcgatgggaatgaaaattactgccgttgtcatagtagtgacacagtggtgctagagttcaatcagtacactcctgactcgcgttggaggaagacaactattagtagaaaagatcatagagaggaaggaaatgaagcagatggtttttatggaggaatcagaaagattaagagtgagactgagatttccattttgaaaagcatt

SEQ ID NO: 249888 - DNA, 405 bp, Glycine max
ccggattcccggtcgacgccacgcgtccgcttgcggctagggttttagcgcagcttcttctagatttaaggaagatgggtaaggagaaggttcacatcagtattgtggtcattggccatgtcgactctgggaaatccactaccactggtcacctgatttacaagcttggaggcattgacaagcgtgttattgagaggtttgagaaggaagctgctgagatgaacaagaggtctttcaagtatgcctgggtgctggacaaacttaaggctgagcgtgaaagaggaatcaccattgatattgctttgtggaagtttgaaacaacaaagtattattgcacagttattgatgcgcctggacatagggatttcattaagaatatgattactgggacatcccaagctgact

SEQ ID NO: 249889 - DNA, 542 bp, Glycine max
  unsure (1)..(542): unsure at all n locations
nggggcgatgttnntnntccaggggtccggacggctcgctcatacccgtccggaattcccgggtgcgacccacgcgtccgctggttttccgcgaaatctatttcagtagagcgtatgatgtcgatggcccgaggtagagcactcaatgggctagggtggccccatttcgccttaccaaccccagggaaactccgaatacaggcctagatcgtttgtacagacagacttttagggtgctaagatccaaagtcgagagggaaacagcccagatcgtacgctaaggtccctaagcaatcacttagtggaaaaggaagtgatcgagcgatgacaaccaggaggtgggcttggaagcagccatcctttgaagaaagcgtaatagctcactggtctagctccatggcaccgaaaatgtatcagggctcaagtgattcaccgaagcgacgagaccttgaaaagtgctttttcaagtgtcagtagcgggacggtcttgtcaatcgggaaagggttttggtgacaacaacttgagaatataanaagtgaga

SEQ ID NO: 249890 - DNA, 343 bp, Glycine max
tctaccggttcggaatcccggtcgacccacgcgtccggttaaagttcatcaatggcaggtcgtggcaaaaccctaggatccagcgccgccaagagggccacctcaaggagcagcaaagccggcctccaattccccgtcggccgtatcgcccgtttcctcaaggccggaaaatacgccgagcgcgtcggcgccggtgctcccgtttacctcgccgctgtcctcgaatatctcgcagccgaggttttggagttggctggaaacgctgcgagagacaataagaagactcgaattgtgccgcgccacattcaattggcggtgaggaacgacgaagaattgagcaagc

SEQ ID NO: 249891 - DNA, 474 bp, Glycine max
taccggtccggaattcccgggctcgcattcttcctcatagatggtctcaactactacccctaattgattcaaacccctcatctgtttctctcggggctctttctttgaattgaatcgctcttatgcactatgcacaggacacacttctgaaaagatttttcaatgctttaattataatcatattcataggtattgttattcactgtaataagatcaataacgggtgagaaaactggaaatagcaacagttccagggcgatagcgatgaggcttcttgactccaccggttgtcggtgcagatttccttgtagcctacacagaaatcacgcgtttattgaattattaatatccaaaatcacataattacgtaattgaagaatcaattgtcaataaaccttcgggaaattaagaataaaaggtaattgaaatcgagaaaccctaactagaaaaaaaaaacgaaacacttaataaaaa

SEQ ID NO: 249892 - DNA, 524 bp, Glycine max
  unsure (1)..(524): unsure at all n locations
ggggnggggcctggccccgcacctgcccgacngtactgctcgtaccggtccggaattcccgggtcgagccacgcgtccgcccacgcgtccgatttccattaaaaagaaaatatcataaatgggtattttcagattcgaggacaaaatgagctcccctgtggctcctgctactctttacaaagctctagttacagatgccgacaacatcatcccaaaagctcttgattccttcaagagtgttgaaaacgttgaaggaaatggtggccctggaacaatcaagaagataactttcgttgaggatggagaaaccaaagttgtactgcacaaaataaaaacaagtgattaagcaaactttggatataactacaacgtaatgggtggtgctgcgtttccaaacacaaccgaaaaaaacacattccactccaaaatggcttctgggtccaatggaggcttttgttgccaacttaattccgaatcccaaaccaaagagatgttaatcccaaccaagaccaactcaaaatggg

SEQ ID NO: 249893 - DNA, 249 bp, Glycine max
  unsure (1)..(249): unsure at all n locations
caaacatcgggtttttgatgtctcattggctgatctccaacgcgattaaggccacttcttcaaagaagagtcgtttganaacttatgaccttcaaaggaaaaatgttctgacaaacttcttgggaatggatttcacaactgacaagttgaggtcttttgttccaaaatggcaaactttaattgaagctcatgttgatgttaagaccactgataattatacattgaggatgttctgcattggctttacta

SEQ ID NO: 249894 - DNA, 523 bp, Glycine max
  unsure (1)..(523): unsure at all n locations
nctgagntcctgtagcactgcccgtaccggtccggaattcccgggtcgacccacgcgtccgcccacgcgtccggtgcttcagttacgacgaggattcaattttttggcagttaaaggatgggctctcacctgaggctgatgttgtttatgtgggatctctcaaggctgatgttgatgcaaatgagcaagagaaagtttcccttcagttgctggaggaattcaattgcgtgcctacttttattccttcagacctctacaaacaattccatgatggtttctgcaagcaacaattgtggcccctattccattacatgttgcccatgtatccaggcaatcgccgctttgataggtcacagtggcaggcttatgtttctgctaacaagatttttgcagataaagtcatggaagtccttaatccagaagattgatatgtatgggttcatgaatatcatcttatggtcccttcaacatttctgcgaaagcggtgtatcgaatcaaggcttggtttttccctcacaaggcc

SEQ ID NO: 249895 - DNA, 458 bp, Glycine max
accggtccggaattcccgcctcaggcgtccggtaacgcttccgaagcttcatttatgactaggattcaagttttaggcagttaaaggatggggtatgacctgaggctgatgttggttatgtaggatctctcaaggctgatgttgatgcaaatgagcaagagaaagcttcccttcagctgctggaggaattcaattgcatgcctacttttattccttcagacctctacaaacaattccatgatggagtctgcaagcaacaattgtggcccctattccattacatgttgcccatgtatacaggcaatcgccgatttgataggtcacagtggcatgcttatgctgctgctaacacgatatttgcagataaagtcatggaggtccttaatccataagatgattatgtatgggttcatgattatcatcctatgggccttccaacatttctgcgaaagcggtgt

SEQ ID NO: 249896 - DNA, 537 bp, Glycine max
  unsure (1)..(537): unsure at all n locations
gcggcgactgtgccagctgcagacgnatcgnacgtaccggtccggaattcccgggtcgacccacgcgtccggttgaagagtttagttcataatagtagttggatcttctgcataatcatattcaatatgatggtctcaagaggcaacaccgccatgtctgccatattgctgcttcttggaatattatcttccactggagtagaatttacgggggcacaatctgttggtgtgtgttatggaggaaatggaaacaatctaccaacaaagcaagcagtggtggatctttacaaatcaaacagaataggcaaaatccgtttatactatccagacgaaggagtccttcaagccctcagaggttcaaacatagaggtgatcctcggtgtccctaatgaccaacttcaatctctcaccaacgctggagctgccacaaattgagtcaacaagtacgtgaaagcatactcacataacgtgaaattcaagtacattgcaagttgtaacgaaattcacccttgtgactctttagccaggtctgtactn

SEQ ID NO: 249897 - DNA, 544 bp, Glycine max
  unsure (1)..(544): unsure at all n locations
gtataaggagcnnntgtctttgtctactcactcatagtactgacgtaccggtccggaattcccgggtcgacccacgcgtccggtttgataaaatattgtacacataaatctagctccaattcctaatcacctggttaatttcttcacatagagctatcaagatccaacgttaacatgaagaatgttttagtaaggtcagctgcgcgagctctgcttggcggcggtgggcggagctactaccgccagctctcaacggcggcgatcgtggaacagagacaccagcacggtggcggcgcgtttggaagcttccacttgcggaggatgtccactcttccagaggtaaaggatcagcactcagaggagaaaaagaacgaggtcaacgacaccagtaacgccgtcgttacgagttactgnggaatcacaaggcccaaggttcgtagggaggacgggacagagtggccgtggaactgcttcatgccatgggatagttaccactctgatgtgtcaatagacgtgaccaagcatcatacaccaaagtcattan

SEQ ID NO: 249898 - DNA, 551 bp, Glycine max
  unsure (1)..(551): unsure at all n locations
cgttttacggcgagtgagtctattctgactgcatggcataccggtccggaattcccgggtcgacccacgcgtccggtcaattccaacaacaccacaatgggaagaagaccggcgaggtgttaccggcagataaagaacaagccgtacccgaaatcccgtttctgccgcggcgtgccggagccgaagatccgaatctacgacgtgggaatgaagaagaaaggcgtggacgagttcccgttctgcgtgcacctggtctcgtgggagaaggagaacgtctccagcgaggctttggaggcggcgcgcatcgcatgcaacaagtacatggccaagttcgccggaaaagatgccttccacctgcgcgtgagggtgcatcccttccacgtgctccgcatcaacaagatgctatcgtgcgcccgtgccgacaggctccagaccggcatgaggtgcgcctttggaagccgcatgggacgtgcgctangggtaacattggtcaagtgctgctcttcgtgaggtggaaggatgctaacaagcaccatgcctaggaggctttt

SEQ ID NO: 249899 - DNA, 202 bp, Glycine max
attataattaaattttattataatacatgaagtaagtaaatttttataatttaaaattagcttatgtaaaaattaaaatcaactatttaaagaattcattaatatcattaaacttctataaaaaactgatgcataaaataattttatgtttatggaataacaatatttcatctaaaaaaaaaatagtgaatcaacctattta

SEQ ID NO: 249900 - DNA, 542 bp, Glycine max
  unsure (1)..(542): unsure at all n locations
ggtaagagtnnttacngctgacacgaacatcactgnactgacgtaccggtccggaattcccgggtcgacccacgcgtccgcttttatgaattccctattttgcaggcaagatttttctttcagcaactaatatctggagttagctattgtcattccatgcaaatatgtcatagagatctgaaattggaaaacactctactggacggaaatccagctcctagacttaaaatttgtgactttggtttctccaagtctgctttgctgcactctcaacctaaatcaactgttggaactcctgcatacattgctccagaagttttgtcgcgaaaggaatatgatggaaaggttgccgatgtttggtcgtgtggtgtgacactttatgtcatgttagttggagcatacccatttgaagatccagaagatcctaaaaatttcagaaagagtattggggtgaactcttacttgacttaaaagagatcttttatgattaatatctttgatccatagcagcaagtttaaactctgattctctcgttggcagn

SEQ ID NO: 249901 - DNA, 531 bp, Glycine max
  unsure (1)..(531): unsure at all n locations
gtagggctgcgactaaccgaccctccatcgaactgcctgtaccggtccggaattcccgggtcgacccacgcgtccgcccacgcgtccgcaccatgttaaccgcaatcctcagaagaacctgttccactctctgaaggcgcggtttccccgctgccttaatctccgcctccaccgtcggaaaccacttccggccaccctccgcggactttatttccagaaccttccactccaacactggccccttgaatttccgctcctcttcatgtcaccgcgcagaatacgccgtcgacgatttcccttacgaagaaggctccaaagggaacgccgacgactaaggcctcgagatcgcgaagctcggaatttctgaggatattgtctccgctttggccaagaaaggcatcaccaagctcttccccattcagagggctgtgttggaacctgctatgcaaggacgtgatatgattggtcgagctagaactggaactgggaagactctngcttttgggatacccatcatggataagaaccatc

SEQ ID NO: 249902 - DNA, 534 bp, Glycine max
  unsure (1)..(534): unsure at all n locations
tgaggntttctgctgccaggccctgactgtaccgacgtaccggtccggaattcccgggtcgacccacgcgtccgcccacgcgtccggccttttctttcctagctactacactttcattctttgcttcagagaatgaactagctaggatggtcagtgttgaagagatccgtaatgcacaacgtgcagagggccctgccactgtcatggctattggcaccgcaacttctccaaactgtgtcgatcagagtacctatcctgactattatttccgcatcaccaacagcgagcacatgaccgagctcaaagaaaaattcaagcgcatgtgtgataagtcgatgattaagaagcgatacatgtacttaaaatgaagaaaccttgaagaaaaatccgagtgtttgtgcttacaatggaacctacgttggatgcagggcaagacatgggggtggtggaggtcccaaagttgggaaaagatgctgcaactaaggcaatcaaggattgggtcaacccagttcaagattaccatcctatctttgc

SEQ ID NO: 249903 - DNA, 549 bp, Glycine max
tgctagactgtgtttaatgtcatttcagattgtactagcatactcgtccggaattcccgggtcgacccacgcgtccgttcagggcttatacccttagagataaggtttttgcatgatcctgctaaagatacaggttgtgtcggcagtgcattgacaagtaacatgatacgattttttaagacccaagatgaatcatggagccatgaggttgccatatcagtgaaaccattgaaagtgcaaaactggattcttcctgaaatgcctgggcttataactgattttctgatttctcttgatgatcggtttctgtattttgtaaactggcttcatggggatttaaggcagtttaacatcgaggacgttaaaaatcctaaactgactggacaagtatgggttggtggacttatccagaaaggaagccctgtagtagctataactgatgatggggaaacaatggaagctgaatttccaaaaattcagggacacaagtttgaaaggggcccttataagatttaattggattttaatgggaaacggctttttgcttcc

SEQ ID NO: 249904 - DNA, 408 bp, Glycine max
cggaattcccgggtcgacccactcgtctcgcccactcgttctggacaattgaagggatattcgatagaggatatattgcgacagcaaatagaaaagggctgaagtgggggaaagcctgcaggaggactaggtaacggtggatgaatcatcgacacctgatgttgtcatataaatgaaaccactgaaagtgcaatactggattcttactgaaatgcctgatcttataaactgattttctgatttctcttgatgatcggtttctgtattttgtcaactggcttcatggggatataattgcagtataacatcgatgacttttaaaatcctaaactgactggtacaagtttggttggttgacttattcataaaggaagccctgtattatctattactgatgatggttaaaca

SEQ ID NO: 249905 - DNA, 320 bp, Glycine max
tccggaattcccgggtcgacccactcgtccggtcttcaaacatgatcaagaatccaccactaagaaagtctctgactatgccggcgatgctgctcagaaatcaaaggactatgccggtgacactgctcataaaaccaaggactatgccagtgacactgctcaaaaaaaccaaggactatgcccgttgaaactgcacaaccataaaaggactatgccggtaatgcttataacaaatcaaagggctatgtctggaataccgcacaaaggaccaaggaaaatggtttgaatgctacttaaaaaaccttggattttgccacttt

SEQ ID NO: 249906 - DNA, 521 bp, Glycine max
  unsure (1)..(521): unsure at all n locations
cgcgcggctgagatagatcgcatttattgctctcctgtccggattcccggtcgacccacgcgtccgcaaagattaacccttgcttgtgtaagtatgacctaattcaaactgtgaaactgcaattgggtcattaaatcagtaatagttggtttgatggtatcttctactcggataaccgtagtaattctagagctaatacgtgcaacaaaccccgacttctggaagggatgcatttattagataaaaggtcaacacaggctctgcctgttgctttgatgattcatgataactcgtcggatcgcacggnctttgtgccggcgacgcatcattcaaatttctgccctatcaactttcgatggtaggatagtggcctaccatggtggtgacgggtgacggagaattagggttcgatttcggagagggagccttgagaacggctaccacattccaagaagcaacangcgcgcaaattacccatcctgacacggtgaggtagtgaccattaatacatacccggctcn

SEQ ID NO: 249907 - DNA, 542 bp, Glycine max
  unsure (1)..(542): unsure at all n locations
gatgagcgtagtgtttctactcgagtactgcatangacgtaccggtccggaattcccgggtcgacccacgcgtccgcccacgcgtccggagccatggtaccatttccctcataaaattctctcttcctttttggggtgtcctattccaagcttcaatcttttctctcttctcacagccttcttcactcacaggaggtgaagatgtcgactccggctaggaagagactgatgagggattttaaaagattgcaacaagatcctcctgctggcatcagtggggctccccaagacaataatattatgctttggaatgctgttatctttggcccagatgacaccccttgggatggaggtacgtttaagttgacacttcagtttacagaggattatcctaataaaccacctactgtgcgctttgtttctcgaatgtttcatcctaacatttatgcggatggcagtatatgcttggacattntacaaaatcagtggagccctatatatgatgtagctgcaattcttacctcaatccagtcattggtggg

SEQ ID NO: 249908 - DNA, 536 bp, Glycine max
  unsure (1)..(536): unsure at all n locations
agattcacgtgtnntnnnaacttccacgcncatcacgnactgacgtaccggtccggaattcccgggtcgacccacgcgtccgcccacgcgtccgcccacgcgtccgccgggaaaaccgtttacggccctatttctccaaccggccaccgacctgtctacaaggcaaatggtctgcaagcctattttgtcaccttgattacttattttgctctctggtggtttgggatattcaaccctacgattgtttatcatcatttgggagaaatttattcagctctcatcttcggcagctttctcttctgtgttttcttgtacatcaagggtcatttggcaccgtcttctacagattctggctcatctggaaacttaatcattgatttttactgggggatggaactttatccacgcattggaaaacattttgacataaaagtcttcacaaactgcagatttggaatgatgtcatgggcttgtcctgcactgacctactgcatatagcagctgcagtatgaagaaaatgganaagtagcggactc

SEQ ID NO: 249909 - DNA, 374 bp, Glycine max
gaattcccgggtcgacccacgcgtccgaccacgcgtacgcccacgcatccatctggataaccgtttactgtcctatatcttcagccagacacctatctgtctacagcgaacatggtctgcacacctattatgtcaccttgactacttatattgctctctgatgaatagacatattcaaccctacgattgtgtatcatcatttaggagaaatttatacagctctcatattaggcagatctctcttatgaatattctcgtacatcaaggatcatactacaccgccatctacaaattctcgctcatctggacatctaatcattaatttatactgcgagattgaactttatccacaccattgcaaaacattttgacat

SEQ ID NO: 249910 - DNA, 551 bp, Glycine max
tgtttagacgggctgaaaccgcaagaggatagtaatgctctatccggtccggaattcccgggtcgacccacgcgtccggaagagccttccatatatcgcctcccaaataaatgatgagtactacctcttcggctctatgtctgctttgcgccctaacttgatcatatcagacttcagccaccgctgatattgtattcgacaccggaggcaatcctattcgaaacggaggcacatactatgcgttgacagatataagatgaaagggccgcggtatagaatctgccaaaaccgagacagaaacatgccctatcactgttgcgcaatctacctttgaggtcgtaaagggtgtaccaccgagaattgcattcccattcaagatccttgacatcaccgaaggacttactctgagcctcagtttcacttatgtacaaccctagtgctcactgcttatacgtggacacgttattctcaaagttctgacataagaactgcatgtcactactactggcgtcgaaaacacaatatacggactggttaaggatcaaacagcc

SEQ ID NO: 249911 - DNA, 551 bp, Glycine max
agtttttagcgtgcgtgtaaagaacggatagtatggtacactcgtccggaattcccgggtcgacccacgcgtccgcccacgcgttcgcccacgcgtccgcaactactgtgtcttctgcttgtcatttggtgcccggattggagtcacatttgtggtgtgggttgaagacaacaaagggtgggaatggggctttggaatctctactataaccatatttgtatctatcccagtgttcttggcaggctcaactacttataggagcaagatcccttctagaagtccacttacaaccattttgaaggtactagttgctgcttcacttaacagctgcttcaacagtagaaattctagcagtgcagtggtgaacatgacttcaagcccttccaatctaaactcaagcagaaaacaagtagggaaagaagcttccaatattgcaaacaaggaaccagaagccccaataacaaacacactcaaattcctcaataaagcagttgagaacaaccctatctattcatcaataaaatgcacagtggagcatgtagaagatgtga

SEQ ID NO: 249912 - DNA, 550 bp, Glycine max
tgggtaagcgtactgatgtcgaattggatagtaagtgccactcgtccggaattcccgggtcgacccacgcgtccgcatcggtggtgtttgtcttgtgcatctttgtagtgttgaatgcaagtgcctctgatgccagtcgcgtattgctgaacaaaactgctacaggtaacgtgtccagagagaagattgagagatacttacttgaaaatggactctgccagacaccccccatgggatggaatagctggaaccactttggctgtgatattaatgaaagtttaattcgagaaacagctgatgcattggtgtcatcgggccttgctgctttgggatacaaatacattaatttagatgattgttgtgccgaacttaatcgagaccatcagggaaatatggttcccaaggcttcaacatttccttcatgaattaaggctctggctcattatgttcatggggaaaggttgaagctggggatatattcagatgcatggaatcaaatctgcagtaaacgtatgcctggatcacttggacacgtgagacaaggtgcata

SEQ ID NO: 249913 - DNA, 534 bp, Glycine max
tgtttagcggtgctgatgtcattcatcactgcatgacgtaccggtccggaattcccgggtcgacccacgcgtccggttcagcaacaacgtgatcggactcctgaacttcctgaccttcctcctctccatcccgatgctggtggccggagtgtggctgagcaagcagggcgccaccgagtgcgagcggtggctggagaagccggtgatcgcactcggcgtcttcctcatgctcgtctcactcgccggcctcgtcggcgcgtgctgtcgcgtgtcgtggctcctctggctctacctcctcgtcatgttcgtcctcatcgttcttctcttcgccttcaccatcttcgccttcgttgtcaccaacaagggcgctggcgaagttgtgtctaatagagggtataaggagtataggcttggggattactcgaactggttgcagaagagggttaacaacactaagacgtggaacaagatcaggagttgcttgcaatctgggaaagtctgcactgaagttcaatccaaagttctaaacgacac

SEQ ID NO: 249914 - DNA, 540 bp, Glycine max
  unsure (1)..(540): unsure at all n locations
cgcgtacgtgatgtcaatcgatcantgnatngaccgtaccggtccggaattcccgggtcgacccacgcgtccgcccacgcgtccgtatgcttccatttccattaaaaagaaaatatcataaatgggtattttcgcattcgangacgaaatcacctcccctgtggctcctgctactctttacaaagctctagttacagatgccgacaacatcatcccaaaggctcttgattccttcaagagtgttgaaaacgttgagggaaatggtggccctggaacaatcaagaagataactttcgttgaggatggagaaaccaagtttgtactgcacaagatagaagcagttgatgaggcaaacttgggatatagctacagcgtagtgggtggtgctgcgttgccagacacagcggagaagatcacattccactccaaattggctgctggtcccaatggaggctctgctggcaagctcactgtcgaataccaaaccaaaagagatgctcagcccaaccaagaccaactccaaactgtgaaagcccaggc

SEQ ID NO: 249915 - DNA, 551 bp, Glycine max
ggttttagtactggctaatgccaggtcagcattgtagtgctgtacccgtccggaattcccgggtcgacccactcgtccgcagaaagctagatagcttctagatatccacttcggattcgaaccgtgaacgcgtgtcctaggaaggctctagtccttaggaatatgaagctacatgagtcataatagctaccactacgacaactggcttgtagatctcaatcgatcatagcgacatagctcttggatccttcgatggacgctcttcctatcattgtgtatcagaattcaccaagagttggatagttcacccagcaatagggaacatgagctgtggttagaccgtcgtgagacaggttagatctaccctactgatgacagtgtcgctatagtcattgaacctatttcgagaagaaccgtcgattctcacatatggtcatcgaccttggctgaaagccaatgtctcgaaactaccgagcgttggactatgactgaacgcctctatgccagaattccggctagaagctacgcttgcgccctacgtccatatgcca

SEQ ID NO: 249916 - DNA, 550 bp, Glycine max
  unsure (1)..(550): unsure at all n locations
gggtttagctggctgatgctgcatcgattgtagcgtgcgtacccgtccggaattcccgggtcgacccacgcgtccgcccacgcgtacggccagtagtcatatgcttgtctcaaagattaagccatgcatgtgtaagtgtgagctaattcagactgtgaaactgcgaatggctcattaaatcagttatagtttgtttgatggtatctactactcggataaccgtagtaattctagagctaatacgtgcaacaaaccccgacttctggaagggatgcatttattagataaaaggtcaacacaggctctgcctgttgctttgatgattcatgataactcgtcggatcgcacggcctttgtgccggcgacgcatcattcaaatttctgccctatcaactttcgatggtaggatagtggcctaccatggtggtgacgggtgacggagaattagggttcgattccggagagggagcctgagaaacggctaccacatccaatgaaggcagcaagcgcgcatattacccaatcctgacacggngaggtagtgacaatn

SEQ ID NO: 249917 - DNA, 445 bp, Glycine max
gaattcccgggtcgacccacgcgtccgcccatggccaccacctgcgcattcctcctccttcccctcctcctgctgctccacctcgcggtcggggttcacggcatcggcatcaactacggaacgctcggcgacaaccttccaccgcccgcggcggtggcgaacttcctgaagacgaagacgaccatcgaccgcgtgaagatctacgacgtgaacccggacatcctgcgggccttcgccggcagcggcatctccgtgacggtgaccgcccccaacggcgacatcgccgccttaaccaaaatcgactcggcgaggcagtgggtggcgacgcacatcaaaccctttcaccctcagaccaaaattaattacatcctcgtcggcagcgaggttctccactggggcgacaccaacatgatccgcggcctcgtccctgccatgagaacccttc

SEQ ID NO: 249918 - DNA, 548 bp, Glycine max
tggttatcgtagtgtgatcgcacagtacgtactgctctaccggtctggaattcccgggtcgacccacgcgtccggcatttattagataaaaggtcaacacaggctctgcctgttgctttgatgattcatgataggtcgtcggatcgcacggcctttgtgccggcgacgcatcattcaaatttctgccctatcaactttcgatggtaggatagtggcctaccatggtggtgacgggtgacggagaattagggttcgattccggagagggagcctgagaaacggctaccacatccaatgaaggcagcaggcgcgcaaattacccaatcctgacacggtgaggtagtgacaataaataacaataccgggctcattgagtctggtaatcggaatgagtacaatctaaatcccttaacgaggatccattggagggcaagtctggtgccaacaacccaggtaattccagctccaatagcgtatatttaaagcgctgcagttaaaaatgctcgaattggaccttgggttgggtcgatcagtacggctacggtgtg

SEQ ID NO: 249919 - DNA, 370 bp, Glycine max
tgaattcccgggtcgagccacgcgtccggtaatattattcttcgaatccattttattattcataatgggtattttcacatttgacgatggaaccacctaccctgtggctcctgctaccctttacaaagctctagttacagatgccgacaacgtcatcccaaaggctgtcgaagccttcaggagtgttgaaaaccttgaggggaacggtggccctggaaccatcaagaagatcactttcgttgaggatggagaaagcaagtttgtgttgcacaaaatagaatcagttgatgaggcaaacttgggatacagctatagcgtaattggtggagttgggttgccagacacagtggaagaagatcacattcgaatg

SEQ ID NO: 249920 - DNA, 539 bp, Glycine max
gtttagagtagtgattcagccgacatgcactgacgtaccggtccggaattcccgggtcgacccacgcgtccgaagagtcgattgtagatcatgactgaggagccatcataggatgttatcgatgcatgtaacgcactgtcttagtacaaggctatgtctgcctaatagcacctcatataccgcagagacccaaacatcttaacgttcgaacgcatgcgagctttggatcgaaaccactactatgtatgcagatttcagatacccatggaaatggaggctcaaatagctgaagtatgcactgaggatggtctcgaaaacatccctacaactcgtaatcctagcactacaattcttcccaaaggacacgcatagtgcaattcatgaatgcgcaacagcttatcactataggtcacacatgacgaacttcggtatgatgtctacatatatgagaaaacccgattcactggacccttgcactagtacatgaaatctccgttacattggagagttaccggaccatagtcacgatggtgaaatca

SEQ ID NO: 249921 - DNA, 556 bp, Glycine max
  unsure (1)..(556): unsure at all n locations
agtnnnnagaacgggctgattacggagagggatagtatctgctctactcggtccggaattcccgggtcgacccacgcgtccgatttgcagctggtttagctgcggaagggctcaagccattttgtgccatttattcatcatgcttgcaacgcggatatgatcaggtatgtaggtagtccatgatgttgatcttcaaaagctacctgtccgatttgctttggatagggctggtttagttggagcagatggaccaacccattgtggagcatttgatatcaacttacatggcatgcctacccaacatggtggttatggctccttctgatgaagctgaactgatgcacatggttgcgaccgcagcagctatagatgatagaccaagctgctttagatttccaaggggaaacggaatcggagccactctgccactaaataacaaaagaaccccacttgagatnctgaaaagtagaattcttgtagaaggcagcaagaatgccattttgngatatgggtcttgtgtccaacaatgcaagcaagcctcaaaaatgcttaagga

SEQ ID NO: 249922 - DNA, 407 bp, Glycine max
tccggaattcccgggtcgacccactcgtccgcggactcgtggggatttggcataatacattgatttgtttcttaaaaacaacactgcaatggctgccatatttctgcttgttggaatgctatcgtccattacagttgctcaatccataggagtttgctatggagtgattggtgataatctaccatcaaggcaagaagttgtggacttatataaaacaaatggcattggtagaatgcgtatatactacccagatgaagaagcactccaagcccttagaggttcaggcattgagttgattatggacgtggctaatgaaacccttcaatcattgacagactccaatgctgctacagattgggtcaataaatatgttacaccttactcgcaagacgtcaatttcaagtaca

SEQ ID NO: 249923 - DNA, 547 bp, Glycine max
agggtaaggtggtgtgtgtatgatcgaatatgatgacgtaccggtccggaattcccgggtcgacccacgcgtccgcgatgatgtggggtatcccgaagagttgaacttggacagaagttctggtgatgattctatggaagaggatttgcctgagactaagcaaattgattctaagtttaatgttgatgaacttaaagacaaaatagagattgaagagcctattgtgaaggaggaaagtagtactatagctgttggagatggtctgtctgcaggagaaagtgatatccaccaagatattgacattagtccagttgctccaacagagaaacgaaaatttaatgaacaagcatcagttgggaacaatgagcctgcaaaaaggcaacgcatgtggaacactgaaacagttaaaggtccatatgcacatagcactactcccagccctgttactacacctagagatgatccatttgcttttaaaccaacttctttaggtggaatcccatgatccgattgtcaacctaagaaccctttggtccggcacatgctg

SEQ ID NO: 249924 - DNA, 550 bp, Glycine max
  unsure (1)..(550): unsure at all n locations
aggggnagcggngtaaaactgcatcagcacagtaagtctacactcggtccggaattcccgggtcgacccacgcgtccgcccacgcgttcgcatacccacaaaccacagctcttctagatgactctctaaaaagcaatggaccagctgggtgaagtcttaatgtttctctaacaatgccttgcaagtaaggaaggttggcaatatctgattcttctactattctactctttccaaccactgcatccatttcttgtcttgccttctccaacacacctggattgttgattaactctgccatagcccattccatcgttacagctgaggtgtcagtcccagcaattaatatgtcctaaatattgtcattagaaacaacacatgttgatgttagtcatgtttgcataactcttttcataaactagaaaaactcagctataaatttttggttagataatattctcaaaccatataataatttatgctcacaaacacctaaagaaacaaaaaagattaaacaaaagaatggttatataattgatgatatgacctaacc

SEQ ID NO: 249925 - DNA, 531 bp, Glycine max
  unsure (1)..(531): unsure at all n locations
ggtagtgtggtgtgtcatcgagatgatagacgtaccggtccggaattcccgggtcgacccacgcgtccgggcagatgtgcgtattcctctgcattggtggcaacagcactacctggatgaacaccgccgttctagtcacatgcatccgcaacttccgccgcaacagaggccccgtttccggcattctcaaaggctttgtcggtttgagcaccgccatattcaccgacctctgttccgctctcttcgccgacgaccctgcttcctttctcctcatgctcgccctcatccctttcgccgtttgcctctccggaatgtttttcctccgtgagattcctnccgccgncaccaacgaccaggaagagtctacttatttcgcggttttcaacgcggttgccgtggtccgtcgcgttacctctggctttcgggttcgtgccgaaccctatcgctcttgtgtctcggcattcgccgtggttttgctactttctgtgggggccgccgatggaaaatccggtccactctaactggaggccc

SEQ ID NO: 249926 - DNA, 539 bp, Glycine max
  unsure (1)..(539): unsure at all n locations
gtggtagagcnntcacaactttcagctctcatagtaccgacgtaccggtccggaattcccgggtcgacccacgcgtccgcccacgcgtccgcaatttcgcacctccctcgtttccatcgacatccgcatcaaaagaccttctctttctcttgccatcatttcattccccatacgctccatccatcaccctttctttcattctgttgggaaatggaagtcacactttcagcgtgcaagtccattagctcgccttctgttcccgtcgcagctttatttgcggggaaagcaggaactaagagttcgcaatgcagttttttagctggagcaaacaaagtgaggtttcctaggcaagtcggtcaagttagccacgttcgcaaacagcgccaaacgcgtcactgcggtgctctccacgcgacttgcagcggtgacaagatcctgatcgcgaatagaggcgagaatgcggttcgcgttattcgaaccgctcatngaatggngattccgtgtgtggctgtgtactccaccattgataaggacgccct

SEQ ID NO: 249927 - DNA, 533 bp, Glycine max
  unsure (1)..(533): unsure at all n locations
gcggggctnccaacgtccgcgaactacagtactgacgtaccggtccggaattcccgggtcgacccacgcgtccgtgtttacctgtcatgtttgtttctgttgaatgatgaacttgttaatcctcgttgatcccattacttggtaaacaggattgccattccccatacgctccattcatcaccctttctttcattctgttgcgaattggaactcacactttcagcgtgctagtccattatctcgccttctgttcccctcgcagctttatttgcggcgaaagccggaactaagagttcgcaatgctgtttattagctggcgcacacaaagcgaggtttcctaggctcgtcggtcaagttagccacgttcgctaacagcgccgtacgcgtcactgcggtgctctccacgcgacttgcatcggtgacaagatcctgatcgcgaatagatgccacattgcaggtcgcggtattcgaaccgcttataaatggggattccctgttttgctgagtacttcccctttcatatgacacccttc

SEQ ID NO: 249928 - DNA, 540 bp, Glycine max
gtcttgagtatggcgctgcaacttttaatgatcgctcgaccgacgtaccggtccggaattcccgggtcgacccacgcgtccgcttcatgtctcaaggcaaagggttaaaggtggaggttggatcatggattccatgtcaaatgtgtcaaaaagagaccctgctgcacagttcctcatcatcttcagaagcaaggacacaattggattgcgatcccttgctgctggtggaaaattattgcagatcaatagaagaatggagtttgtatttgctagtcatagttttgatgtttgggagaactggactctagaaggttccttacaggaatgcagactggtgaactgtagaaacccatcagctgttttggatgtacgcgttgagattttggcaactgtaggcgaagatggagttactcgttggcttgaatagagtgattgtaggtctgtaatactcaaaagggagaagcttgtaaatactccaatcccgtgacttaatgatctttcaaatgtctctttgtgaaagatggaatgtattcatagtgg

SEQ ID NO: 249929 - DNA, 538 bp, Glycine max
  unsure (1)..(538): unsure at all n locations
cgcggngtgccgctgactgcagactacagtactgacgtaccggtccggaattcccgggtcgacccacgcgtccggcaatatctagagcttttggagaccactgcatgaaggactttggactaatctccgtgcctgatgtcacacacagaataattaccaccagggatcaatttgtcatcttggcaacagatggggtatgggatgttatatccaaccaggaagcagtgaagattgtttcagcaacgtcacataaagaaaaagctgctcataggcttgtgaaatgtgccatacatgaatggaaacggaaaaaaagtggcattgcgatggatgatatgtcagctatttgcctcttctttcactctcgcgcctctcatcaactccccccagccatcaaaattgttgattaagaatgtngagtggttaaacaggtcattacagctttctttgtaagttgtaacacagaaattcatttagactngtatataaacttatcaattaaaatganatatgtgaaaaattggaatggattcatagtgca

SEQ ID NO: 249930 - DNA, 547 bp, Glycine max
  unsure (1)..(547): unsure at all n locations
agtntnagcgtncntaattatgcagtggattgtatgctcgtaccggtccggaattcccgggtcgacccacgcgtccggtttaacactaagttgcaaggcagcggacttcgttccagggcttgatatcggcctcactgttgcggcggtgttggatttatcaaggctcggtacacaccaccagccctagaacatgcgctgatgtgtcttacctgtcctacactatatatcactcgtaagcatatgctgatcaagaacttgacatggttgtgaacgttaggcatgacctaatgacgaaatctagagagattgcattccattgtgctcatgctgccactgtcatgtacgcttaattcatgcatagtgatcggaatctgtggtgaatatggtgacagtttgggcagacccatattgtagacacttgcacgagatatcaagcaatgaatctactagcagttgcagtcgctagtttagccgtgctacctctgtagttgctgattctggcgatcacaagtgtggctgatcgaatacctaacatgtgctgtactga

SEQ ID NO: 249931 - DNA, 545 bp, Glycine max
  unsure (1)..(545): unsure at all n locations
gatntagagtggtagtgtcaattcgatcgtagtgctctatctcgtccggaattcccgggtcgacccactcgtccgacatactagaagtattattattctttcatttccattaaaaagaaaatatcataaatggggattctgacattcgaggacgatatcacctaccctgtggctcctgctactctttacaaagctctagttacagatgccgactacatcatcccaaaggctcttgattccttcaagagtgttgaaaacgttgagggaaatggtggccctggatcaatctagaagataactttcgttgaggatggagaaaccaagtttgtactgcacaagattgatgcatttgatgaggcaaacttgggatatagctacagcgtattgggtggtgctacgttgccagacacagcagtgaagatcacatatcactccaaattggctgctggtcccaatggaggctcttctggcaagctcacttgcgaatacctaaccaaaggagatgcttcagccaaccaagacaactaatactcggaaaacccaag

SEQ ID NO: 249932 - DNA, 319 bp, Glycine max
ggaaacaaaatcctaggattctttgttccttggggatttcctaatttcccaggtttctaaattaccttttgtttcaaattgacctgaaattcaaaccacaatttttcaatgagcgacaagttgttcacacaatcatttttaaacaatttattttgaagccaaaaggctttcattaagggatttgaaaaaagcaaaaagtggttctttatgaggaaagaccttttttacaaccaggtgggttgacaaacttttggttccttttaaaagcttttgaaattttttactgggggaatatttgcacccttgttattttttgaaa

SEQ ID NO: 249933 - DNA, 535 bp, Glycine max
cggagcctataagcctgttacgtcatcgatagtaccgacgtaccggtccggaattcccgggtcgacccacgcgtccgctctctctcgatctgggtactaaccctaacccgcttcgaaccgtggcttcctcaggctcgcagaacctctctcgaagaaaaccttcttcttcttcgtcttcgtcttctcaacaaacacccgggtcgacccggatcgtttaccgagaatctcggatcccatcggaatccgatttcccgatctggcagcagaactggttcatcgcattgctcttcgtcatggctctcggattcttcgccctcgccattttcctcttcctcactctcgactctgacatcgctccttcttccaccgcctccgcctccgcctccgccgcttcctccgaaggcgtcgaggtgcaggttacttacggcacggttctgaagcttatgcacgagaagaccaaatttcggttgcattctcatgacgtgccctacggttctggcagtggacaacaatcggttactgggttcccaaatgg

SEQ ID NO: 249934 - DNA, 532 bp, Glycine max
  unsure (1)..(532): unsure at all n locations
gttgcncntaccctgattagtgtacgatagtactgacgtaccggtccggaattcccgggtcgacccacgcgtccggagaagggtcagcattgccttggaaatcttgatgaggccaaggttgcttttccttgatgagccaaccagtggacttgacagtgcttcagctttctttgtgactcagacactacgtgccttggcaagggatggaagaaccgtgatagcctctattcatcaaccaagcagtgaagtgtttgagctatttgaccaattatacttgctctctagtggcaaaactgtttattttgggcaagcttcagaggcatatgagttctttgcacaagctggctttccatgtcctgctttgaggaacccttctgatcacttnctcaggtgcatcaattctgactttgacaaagtcaaggccacccttaaagggtccattgaaactcngttttgaggggaagtgatgatcctttggacacgatcactacagcggagctattagaacctttatggcttttaccggactttt

SEQ ID NO: 249935 - DNA, 539 bp, Glycine max
  unsure (1)..(539): unsure at all n locations
gtgagcgcnnntncaactgtttgagtacgatagaactgccgtaccggtccggaattcccgggtcgacccacgcgtccgggattctggtcctattagtttagtagtaaatgcttgcgcaagcagggatcttcgagataatgttgttggggtttgttttgtggcccatgatataactgctcagaagaatgtcatggacaaatttacgcgtattgaaggtgattacaaggcaattgtacagaaccgcaatccattaatccctcctatatttggcacagatgaatttggctggtgttgtgagtggaatccagctatgacgaagttaactggatggaagcgagaggaggtgatggataaaatgcttttgggagagctttttggcacccatatggctgcttgtcgcctaaagaatcaagacgcttttgttaatttgggtgttgtacttaataaagccatgactggtttggnaacagaaaaagttccttttgggttctttgctcggaatggcagtatgntgaatgccctgcttctgggagtaagaa

SEQ ID NO: 249936 - DNA, 546 bp, Glycine max
  unsure (1)..(546): unsure at all n locations
agctaggcgcntnctnntncctgaccgcanatcgatagacgtgcccggccggaattcccgggtcgacccacgcgtccgagactgtcaatgaagctgctaaattcagataccggagtggtaaccaatttaatcgcgcaggcttaacagttagagccccttatggagctgtgagtcatggtgggcattaccactctcagtctcctgaggctctcttctgtcatgttcctggtatcaaagtggtcatgcctcgaagtccactggaagcataagggttattgctatcttgcgtacgagatccaaatgctatcgtattctttgaaccgaagtggctatatcgttcggctgttgaagaagttccagaggatgactacatgctgcctttatctgaagctgaggtaattcggcaaggaagtgatataacacgtggtggatggggaactcaattatctataatggaacatgcttgtcttgatgctgaaaaaaaaggaagttcttgtgcacttgatgatcttgaaaaactaatttcctgggataatgaaacagtaa

SEQ ID NO: 249937 - DNA, 544 bp, Glycine max
  unsure (1)..(544): unsure at all n locations
gccgggtnttaangactgatctagatcgatngnacgtaccggtccggaattcccgggtcgacccacgcgtccggctatggcggcctccttgttggggaagcttgttagccaaccaatgcacggaccaagagtggctatcacacttgcaaggtttctccctgatggccttgtatcagtaatcagggatggacctggtgaagcagttgtagttgcccttgagcagactacagagacaccagaacttgtatggacgccagcgatggcgacttccttatctgcacaaatttccactatggcatcagagctataccgtgagcagatgaaagggcgtgttgttgattgggatgtgcctgagcaggcatctggacagcaggaaatgagagatgagccacaggttggtggcatctatgttaggctgtttctgaaagatcccaaattccctcttagaaaccctaaaaggttcttggaaggtctactagatcaagaattgtcgtccattgctgccacccattatgaggtgcanngtattgatccagagctttct

SEQ ID NO: 249938 - DNA, 538 bp, Glycine max
  unsure (1)..(538): unsure at all n locations
gtatgcgnttacattgaactgacaccgataggactgcacgtaccggtccggaattcccgggtcgacccacgcgtccgggaggttctttttttcttgctggaactgaaagggctggggggctgagtgtgtccttgtcagggccagatggccgtgtcttgggcggtggagttgcacgtcttttggtagctgcttcccctgttcagattgttttggcaagctttgtttctgatgtacgcaagcacttcaagcatgctaagcagatgctgaatgcagaggttttcatagcagcaggccaaagcagctcaccatcaagaggcactctcagtgagtcttcatgtggggttgggagtgggagcccactaaaccaaagcacaggagcctgcatcaacaccatgaacaactgtaccaccccaacacacagctttcaaggcatgccctgcaagtagaacttgactcacctcacatgtttgtgtagtaggtttggtgtggtgaaagacacatcaagcttttacttgttatgctattacttatgggtttt

SEQ ID NO: 249939 - DNA, 551 bp, Glycine max
cgtttttatggtgctgatttcatccgataacgactgacgtaccggtccggaattcccgggtcgacccacgcgtccgtgccgtcatactcacaccactcttcttacattttcattttctctgcgaattcctattcccgtacgcaaaccaaatgggtattaagggtttaacaaagcttttggcggacaatgccccgaagtccatgaaggagaacaaattcgagagctacttcggtcgcaagatcgccattgacgctagcatgagcatttaccagttccttattgttgtgggaagaagcggaactgaaatgctcactaatgaggctggtgaagttaccagtcatttgcaagggatgttttcgcggacaatcagacttctagaagctgggataaaaccaatatgtttttgatgggaagccaccagatttgaagaaacaagagctggccaaacgttactccaagagagctgaggcttcttgagaattgtcagaagccttaaagacttgccatatggagacattgaaaattcagataaccgtccgtgaaggtgacaa

SEQ ID NO: 249940 - DNA, 436 bp, Glycine max
aattcccgggtcgacccacgcgtacgtgccgtcatactcacaccactcttcttacattttcattttctctgcgaattcctattcccatacagaaaccaaatgggtattaagggtttaacaaagcttttggcggacaatgccccgaagtccatgaaggagaacaaattcgagagctacttcggtcgcaagatcgccattgacgctagcatgagcatttaccagttccttattgttgtgggaagaagcggaactgaaatgctcactaatgaggctggtgaagttaccagtcatttgcaagggatgttttcgcggacaatcagacttctagaagctgggataaaaccaatatgtttttgatgggaagccaccagatttgaagaaacaagagctggccaaacgttactccaagagagctgaggctactgaagatttgtca

SEQ ID NO: 249941 - DNA, 455 bp, Glycine max
tcctgaattcccgggtcgacccacgcgtccgcatccttctcttcagatgatgaaggtttctatgcatttgaatcagaggatgacgtagatcgttcgattagatatgttggaaccaattaccctcatgttaagcggcgtaagaaattgcctgaccctgtagaaaaagagaaaggtgtcagtctttggtcaatgattaaggataatatagggaaggatctaacaaaagtttgccttcctgtttattttaacgaacctctttcctccctgcaaaaatgttttgaagaaatggagtattcatatcttctggaccaagcatatgaatggggaaaaaggggtaatagcctcatgaggattctctatgttgcggcttttgctgtatctggctatgcttcaactgaaggaagagtttgcaaaccatttaatccggtacttggggaaacatatgaagctcacta

SEQ ID NO: 249942 - DNA, 460 bp, Glycine max
accggtccggaattcccgactcaagcgtccgccgaatacgaagtcgacgctgacacagatccctctgctggggacgaaggctggtccacgggacggggcggcatggacgcagaggctgaaggaagagtacaaggctctgatagcgtacacgcaaatgaacaagtccaacgacaacgattggttccgcatctccgccgccaatccggaaggcactcgctggaccggtaaatgctggtacgtctacaacctcctcaagtacgaattcgacctccaattcgatgtccccgtcacttacccttccaccgcccccgaactcgaactccctcaattggatggcaaaacccaaaagatgtataggggtggaaagatctgcttgactgtgcacttcaagcctctctgggccaaaaattgccccagatttggaattgcacatgcactttgcctaggccttgcaccgtgg

SEQ ID NO: 249943 - DNA, 515 bp, Glycine max
gggtagaggctgatgtgggtggagggaaagtaagtactcgtccggaattcccgggtcgacccacgcgtccgcaacgggcgagtaaacccgtaaggcgcaaggaagctgattggtgggatccccctgtgggttgcaccgccgaccgaccctgatcttctgtgaagggttcgagtgagagcatacctgtcgggacccgaaagatggtgaactatgcctgagcggggcgaagccagaggaaactctggtggaggcccgcagcgatactgacgtgcaaatcgttcgtctgacttgggtataggggcgaaagactaatcgaaccgtctagtagctggttccctccgaagtttccctcaggatagctggagcccgcgggcgagttctatcgggtaaagccaatgattagaggcatcgggggcgcaacgccctcgacctattctcaaactttaaataggtaggacggtgcggctgctcttgtgagccgcgccatggaatcgagagctccaagtgggccattt

SEQ ID NO: 249944 - DNA, 478 bp, Glycine max
ccggacctgaattcccggcccgacccacgcgtccgggaaatagctttcctcggttataaccttcaaggtggaaagaaaaacccacccactgtccggattccaataaataccttcctctctatattttcgcacaataccctctcacccttcaacgatgagttactacaatcagcagcaaccacccgtcggtgttcctcctccccaaggttacccaccgccggattcttacggaaaggacgcgtaccctccgccagggtacccgccgcaaggaggataccctccgcaggcgtatccagcacaggggtaccctccaccctacgcgcctcctcagtacgctcagcctccgccgcaacaacaccagaattcatctggcccaggttgcttagaaggatgtttggctgctctctgctgctgctgtctgttggatgcgtgcttctgagaggagaagaggttgctttgcacaaattggattgaaact

SEQ ID NO: 249945 - DNA, 414 bp, Glycine max
ggaattcccgggtcgacccacgcgtccgctctttctctctctctctatcttcaatttcgagaagtagctccagtattatatggcggccttcagagcattctggaacagtccagttggtcccaaaacaactcacttttggggacctattgccaactggggatttgtagcagctggattggctgacctgaacaaacctccagaaatgatctctggcaacatgacaggagcaatgtgtgtctattcagcattgttcatgagatttgcatggatggttcagccacgcaactatctactttttgcttgccatgcctcaaatgagactgttcaactctatcatttttcccgatgggcaaaggcacaggggcttctgtcggaaaagaaggaagaagcttcatcccagtgatttgatgatgc

SEQ ID NO: 249946 - DNA, 429 bp, Glycine max
ggaattcccgggtcgacccacgcgtccgggattggctgttgtggattaaagagtaatcttctcttgagcggacgcgtgggcggacgcgtgggcagggaactactcaattgcagtggtgcaagctaattcatccttggaagaccaagcacaagtatttacctctccctccgcaacctttgttggtgtatacgacggtcacggtggtcctgaagcttcccgtttcatcaccaaccacctcttctccttccttcgcaaggagggtggtttgtcggaggaagttataaagaaggcgttcgaggcaacggaagatgagtttttgcgtgtagtgagggaatcatggattgcgcggccacagatagcttccgtgggttcgtgttgtcttctgggagcgatttcaaagggagttctttatgttgctaatctcgggga

SEQ ID NO: 249947 - DNA, 524 bp, Glycine max
  unsure (1)..(524): unsure at all n locations
agttnaagacggctgaatgatttgataatgaggaagtaagtattgcgtccggaattcccgggtcgacccacgcgtccgaaaagtctatcacagggaggtacacctccacgattcctcatcatagatgatggttggcaacagattgaaaataaagcaaaggatgctactgaatgtttggtacaagaaggagcacagtttgctactaggttgactggtattaaagagaatactaaatttcaaaagaaattacagaacaatgagcagatgtcaggtctgaagcatctagtacatggagcaaagcagcatcacaatgtgaaaaatgtatatgtatggcatgcactagctggttattggggtggagtgaagccagcagcaaccggcatggaacattatgacactgccttggcatatccagtgcagtcaccaagcgtgctaagaaaccaaccagacattgtcatggacagcttggctgtacatggccttggcctagtgcacccaaagaaggttttcaatttctacaacgt

SEQ ID NO: 249948 - DNA, 518 bp, Glycine max
  unsure (1)..(518): unsure at all n locations
ggggnagatggtacgttgtgggggtgatgaagggaaatcatgcaccggtccggaattcccgggtcgacccacgcgtccgataacaagaaggcatgtgtgggacataattgaaaatgcaaagagagggcgtgccattgttgttacaacgcactctatggaagaagctgacattctaagtgaccgtataggaatcatggcaaaaggaagtcttcgctgcattggcacctcaatcagattgaagtcccgctttggtactggttttattgctaatatcagcttcaatggaaacaatatcgaacatagtcctgccaatggagatgcaatatctacagaacgtcgtgaggcaatgaagaaattctttaagaatcatttagatgtagtgccaaaagaggagaaccataacttcctaactttggagattcctcatgacagagaggcgctcatgacgaatttcttttcagagctccaagatagagaagaagaattcgcatatctgatatccagctgggtctaacaac

SEQ ID NO: 249949 - DNA, 422 bp, Glycine max
ccggaattcccgggtcgacccacgcgtccgcccacgcgtccgcgctttctttaaccattattgattaaaatattttctatacatttcgataactgtctcttttggtttggtttatatgaacattgaagatgcaaagaacggagtgcctattggtccaagggcttattcttattggctttacaacgtaccatggggcatgtacaaatcattgatgtacataaaggaacgttatggaaacccaactgtgttcttatccgaaaatggcatggatgatccgggtaacgtgactcttcccaagggtttgcatgacaccacaaggataaactattacaaaggctatttgactcaactaaagaaggcagttgatgatggagctaatgtggttggatactttgcatggtcattgctggataactttgaat

SEQ ID NO: 249950 - DNA, 388 bp, Glycine max
ccggctcgacccacgcgtccgcccacgcgtgcgcgctttctttaaccattatggtttaaaatattttctatacatttcgataactggtctcttttggattggcttatctgaacattgaacatgcaaagaacggagtgcctattgctccaagggcttattcttattggctatacaacgtaccatggggcatgtacaaatcattgatgtacataaaggaacgttatggaaacccaactgagatcttatccgaaaatggcatggatgatccgtataacgtgactcttaccaagggtttgcatgacaccacaaggataaactattacaaaggctatttgactcaactaaactaggcaattgatgattgagctaatgttggttggatactttg

SEQ ID NO: 249951 - DNA, 468 bp, Glycine max
ccggaattcccgggtcgacccacgcgtccgcccacgcgtccgctagaagtattattattcttccatttccattaaaaagaaaatatcatagatgggtattttcacattcgaggacgaaatcacctcccctgtggctcctgctactctttacaaagctctagttacagatgccgacaacatcatcccaaaggctcttgattccttcaagagtgttgaaaacgttgagggaaatggtggccctggaacaatcaagaagataactttcgttgaggatggagaaaccaagtttgtactgcacaagatagaagcagttgatgaggcaaacttgggatatagctacagcgtagtgggtggtgctgcgttgccagacacagcggagaagatcacattccactccaaattggctgctggtcccaatggaggctctgctggcaagctcactgtcgaataccaaaccaaaggagatgc

SEQ ID NO: 249952 - DNA, 521 bp, Glycine max
agggtaagatggctggcatagagaagacgggatagatagctctcgtccggaattcccgggtcgacccacgcgtccgatactggatgatggagaacatgcttttacaagagggggacattgtcaaagtgaaaaatgtgacacttccaaaggggacatatgttaagttacagccccacacaaaagactttttggatatttccaatccaaaagctatcttagaaacaacattgaggaatttttcctgcttgactactggagatagcattatggtggcttacaacaacaagaaatattacatagatattatagaaactaagcctgacactgccataagcataattgagactgactgtgaagtggactttgctcctcccttggattacaaggaacctgaaaaacccactgcacccctttctgctgggaaggcagcagtggctgctgaggtgatccctgctgaagatgagcccaagttcaacccattttctggaactgggagacgcttggatggaaaacctttgaat

SEQ ID NO: 249953 - DNA, 527 bp, Glycine max
  unsure (1)..(527): unsure at all n locations
agggtttagcgtactgacatgtcggggggaggaatgtaatcnctcgtccggaattcccgggtcgacccacgcgtccggtttaattaaaacaaagcattgcgatggtccctgcggatgttgacgcaatgtgatttctggccagtgctctgaatgtcaaagtgaagaaattcaaccaagcgcgggtaaacggcgggagtaactatgactctcttaaggtagccaaatgcctcgtcatctaattagtgacgcgcatgaatggattaacgagattcccactgtccctgtctactatccagcgaaaccacagccaagggaacgggcttggcggaatcagcggggaaagaagaccctgttgagcttgactctagtccgactttgtgaaatgacttgagaggtgtaggataagtgggagctggaaacagcgaaagtgaaataccactacttttaacgttattttacttattccgtgaatcggaagcggngcactgcccctctttttggacccaaggtcggcttcggccggtcga

SEQ ID NO: 249954 - DNA, 516 bp, Glycine max
  unsure (1)..(516): unsure at all n locations
ggttagatctactaagggtttgagggaggggattcatgcaccggtccggaattcccgggtcgacccacgcgtccgctggaggtagaggtttctatctcaaaggagatggtgttcgtcttaatcaagctctaatagggtttgggcttgattttttggaaaaaagggagtatactttattgcatactcctttcttcatgagaaaagatataatgtcaaagtgtgctcaactagcccaatttgatgaagaactttataaggtaactggtgaaggagatgacaaatatctgattgcaacagctgagcagccactctgtgcatatcatttagatgattggatccaccctacccagctaccattaagatatgctggatattcatcatgctttcgtaaagaagctggatctcatggtcgagacactctaggaatattccgagtccaccaatttgagaaagtggagcagttttgcctcactagcccaaatgacaatgattcatgggacatgcatgatgaaatgn

SEQ ID NO: 249955 - DNA, 534 bp, Glycine max
  unsure (1)..(534): unsure at all n locations
agtatgagatgttacgccatcaagataagtatgnanccatcaccggtccggaattcccgggtcgacccacgcgtccgatttgtgatgacctgcttaagatatacaagaacaataataatcataatttatgtttgaaagaaaaaaaaaaaaaaaaaaaaaaaaaaaaaaaaaaaaaaaaaaaaaaaaaaaaaaaaaaaaaaaaaaaaaaaaaaaaaaaaaaaaaaaaaaaaaaaaaaaaaaaaaaaaaaaaaaaaaattgaagaactaaatttcaaaatgcaattgtatattaatcaaactgaacaacaaaaaattaatacatactcaaataaatcaacattttaatgaacaatctttttagctaaaatgtatatatacaacgagaatataaacaacatgcaaaccataattgtgaaatggaatctacatattgggaataccactaatattgtacgtttaaagacttattccaataatgacaactaaatttaatgaccactttaatggacccaacattagcttcattaggttgat

SEQ ID NO: 249956 - DNA, 346 bp, Glycine max
ggaattcccgggtcgacccacgcgtccgcccacgcgtccgaaaaaaaaaaaaaattaaaaattaaaaaaaaaaaaaaaaaaaaaaagaaaaaagaaaggccggccgttttaaaggtcccagctttccttccccttccttccaacgtattactttttttttagggtaccctaatttaattcaattggccgcctttttaaaacgtctgaactggaaaaaccttggcgttcccaactttaatccctttgcagaaaatccccttttccccagttggcttattaccaaaaaggcccgacccaatggcctttccaaaaaatgtcccaccctaaatggcaaatggaacccccc

SEQ ID NO: 249957 - DNA, 427 bp, Glycine max
ggaattcccgggtcgacccacgcgtccggtttaatgaacctcgtgtggtggctgctcttggctatgataatggtttctttgcccgtggaaggtgctcaaaagaatatgggaattgtacagctggcaactcaggcactgagccttacattgttgcccacaatttgatattgtcacatgcagctgctgttcaaagataccgagagaagtatcaagaaaagcaaaagggaaggattgggatcctcttggattttgtttggtatgagcctcttacaagatcaaaggccgacaatttagcagctcaaagagccagagactttcatgttggatggttcattcatccccttgtttatggagagtatccaacaaccattcaaaatattgttgggaatagactccccaaattcactagtgaagaagttaaaatcgt

SEQ ID NO: 249958 - DNA, 527 bp, Glycine max
aggtttagcgtactgagccatcacagtacgtaggctgctaccgtccggaattcccgggtcgacccacgcgtccgagaaaatcagtaggcgtagagaacagcagagaaagaggaataatggagcaggaagagcacgaggtgtacggtgcagacattcccgacgaggagattgacatggacgcagacgccgagcaacaagatgagcaacttgcccccaatcacacaaacaaggaactggaggacatgaagaagaggctgaaggagatcgaggaggaagctagcgcccttcgcgaaatgcaggccaaggtcgagaaagagatgggcgctgttcaagattcgtcgggcacttacgcaactcaagctgaaaaggaggaagtggatgctcggtcaatctatgttggtaatgttgactatgcatgtacgcctgaagaagttcagcagcattttcagtcctgtggaactgtgaacagggtgacaatactgacagacaaatttggtcaaccaaaagggtttgcttatgtagagttt

SEQ ID NO: 249959 - DNA, 524 bp, Glycine max
tgcttagcgtctacgcagtcctgcatagtatgtattcgctgctccggtccggaattcccgggtcgacccacgcgtccgggaacatcaagttgggttccaaaggctgtgtagtcatcttcatcggacaagcgtgcggggagctcacaacaaaagaatctgccctctcttgaaaatgatgttggtcaatccagtactagtagtgttataccatctgaacatttgttctgtgcatttgctgctgccaactgcccccttgaagataaatgttctcgcattcatggaaatcagtgcttatactgtagaaaattatgcttacatcctactgatcgaaaggaaaaagaaaaccatttgagaacttgtgagaaaaaggaaaaataccttcaggctttgaaagatagtcaagacgtagagtgcaatgtttgtttggaacgtgttctgtccaaacctaaaccagctgattgtaggtttggtctgcttcctgaatgtgaccatgctttctgtttatcctgtatccgcaattggca

SEQ ID NO: 249960 - DNA, 515 bp, Glycine max
  unsure (1)..(515): unsure at all n locations
tgtttagcggtncgcatcgcgagatggacgtattcttccccggtccggaattcccgggtcgacccacgcgtccggattaagaactggaactacactgggttgattgatgcaatccacaatggtgaagggaaatgcgggactgccaaggtgttctgtgaagaggagctagttgaagcaattgccacagccacaggacacaagagagactccttatgcttcattgaggtgattgttcacaaggatgacaccagcaaagaattgcttgaatggggctcacgagtctctgctgccaatagccgtccccccaatcctcagtaaacttcagatgtcggcctatgattaaattgctgcaattgccctttagctctatgaaattgagaatcatttgagatgttgtccttgtaagaaatttacctttgttaatggcttgaaatatttatgcaaaactgagtccccacttgtttgtgtaaattctttcacttgagataaaaatatatccatcacctttgttctta

SEQ ID NO: 249961 - DNA, 528 bp, Glycine max
  unsure (1)..(528): unsure at all n locations
tgttttagatggtnacaactgaggcaggagggaggggattcatgctaccggtccggaattcccgggtcgacccacgcgtccgctcgctcatactctcaatctgagactagaccgctccaacacgcgagttgcaagtcgtcaggcgggtcgtaccgaggaatcggccgggaaatcgcgcttcacctcgactcactcagcgcgcgactagcagtgaactacaccttcaactcggcccaagccgactcactcgaggcgcatatcaacgccgcattcggcaccactacaccgatcgcacgacgggaccatgccgacgtgtgacgatccggctcatgagaagatgctcttctactcagtctaacgaccactggactgaccgatccacatactcgtcaactcagcaggcgttatcgacagaacgtatccctgcgtcagctacaccactcgtagagtcctttgaacgaactgtcgctgagaacgctcgtggcgccttcaactgcgcctgcgatgccccaaaccgtgctatgcgca

SEQ ID NO: 249962 - DNA, 409 bp, Glycine max
ggaattcccgggtcgacccacgcgtccgcgctgctgtgcctgacataaatctagttctgcataatgaagtggtgtggagcatcatgggtgcgagattcaatggtgtatactaatgatgtaatttgcttgggttttgtggatgctggatcagacccaagtacggcccaagttggatttgtggtgggttattctcaaccaattacttcaatcacaattggagcacatcagttggagaacaacatgctacaatttgacttggctacctcaaggcttggcttccgctccctcttcttggagcacgccaactgtgccaactttaactttacctcttctgcttagaatttgattattctactataatcaaaatttgcattgtaattaagatccatgtgtgtagacaaagttatta

SEQ ID NO: 249963 - DNA, 449 bp, Glycine max
  unsure (1)..(449): unsure at all n locations
ggaattcccgggtcgacccacgcgtccgcacctatcctgattactacttcagaatcaccaacagtgaccacatgaccgagctcaaagagaagtttcagcgcatgtgtgacaagtctatgatcaagatctcttcgtttaggtacatatatctcgtcttgatcttgaaagagaatccaaacatgtgtgcttacatggcaccttctttggatgctaggcaagacatggtggtggtagaggtaccaaagctagggaaagaggctgcagtaaaggccataaaggagtggggccagccaaagtcaaagattacccacttgatcttctgcaccactagcggtgtggacatgcctggtgctgattaccaactcaccaaacaattgggccttcgcccttatgtgaaaaagtacatgatgtaccaacaaggttgctttgcangtggcacgggtcttcgt

SEQ ID NO: 249964 - DNA, 523 bp, Glycine max
  unsure (1)..(523): unsure at all n locations
ngttaagcggtagaatgttggatgagggagagtaatactgctccggaattcccgggtcgacccacgcgtccgcccacgcgtccgcccacgcgtccgggagatctcagcgttgatgaggaaaatggggtacaagcggaacgccaaaaggtgcaaagagaagtgggagaacatcaacaagtacttcaagaaggtcaaggaaagcaacaagaagaggcctgaagattcaaagacatgtccctattttcaccagttggaggctctatacagggagaagaacaagggagaggggcagatgaagccggagagcatgatggcgccgctcatggtgcagccggagcaacaatggcctcctcaaacaacgcttgtggtaccgccagaagtaaccatgggagacacccagaatgaccccatggaccggcagtaccatgaggagaatgaggatgacgaggacgacaaggaaattggagatgaagacgaggatgaggacgacgaangaggtgataattatgagatagttgcgagn

SEQ ID NO: 249965 - DNA, 520 bp, Glycine max
aggtaagatgtctgtatggagggtagacggagaagtaatactgcgtccggaattcccgggtcgacccacgcgtccgaaggggtggaatgaaaattggaaccgggctctggatgatgaacgattcacaggccagagaccaagaactttcttcttcttctggttgtggcgcttcttccattcacagtaactccaattccatagaaagatgggtaccggggattcggattcggaatcgaatggatggaaccgtgctcgtgggttggcgcttaagactctgctactaattggtggcgcacttctcgttaagcgcctccgcaagtccaccacgcgttgggaccacgctcatttcgtcttcaactcccttaacggcgaaaagtattccaaggagcaagcttccagagacccggataactatttcaacattagaatgcttacatgccccgcagcggagctagtggatggttccaaggtcttgtattttgaacaggctttttggaagactccacaaaaaccctttcgg

SEQ ID NO: 249966 - DNA, 398 bp, Glycine max
ccggaattcccgggtcgacccacgcgtccgggaggagtggcgttgccagtgacattcgcgtacccatgtttcatgtggcttaagacaaaggggcggaagaagtatagtgccatgtggtggctcaattggttcttggggacattgggagtggctttgagtgccatattggttgcggctagtttatatgtcatcattgatactggtgttaatgtgagctttttcaatcctcagtagtctcacatatagagtgggaaaatgtactaggaaaatgatgttgggaggtaattaattagtaagagaattgctaaggttttctttctttctttttttgagaaattcaaatttgtgaccccactttgtagttctaaaaaaaaaacaaaaatgcaaacatgcataat

SEQ ID NO: 249967 - DNA, 512 bp, Glycine max
tggtagagttgacactgagaaggagggaagtatgctcacgtccggaattcccgggtcgacccacgcgtccggcgtacctcaaaaggatatttcgtgacctgtttattcgtgaaggattccagtttgattatgtctgtgactggaccattttgaagtatcagcaatcacagctagccactcctccaacacgggccattggtcctagtgctggaaccagttctggaatgccccccgctgttactaatgctgataggcatacaggaggggaagaaggtagacctcctgctttggtttcagtggattcctcgaggcgcagaatgtcagggcccattttaaatactttatcaagtgccaatgccttgggtcaatcaagtggatcatctaggaggtttgctgcctctagtaaccgtgatgcatttgtggtggctgagtcaaatatccgaactcgcactgctgaggctagccctgagcaacacaatcagctttgagtgggcaaaaaagtcttcattgga

SEQ ID NO: 249968 - DNA, 517 bp, Glycine max
ggtagattgaccctcggtagggggggatgctgccccggtccggaattcccgggtcgacccacgcgtccgcccacgcgtccgcccacgcgtccgcccactcgtccgatggcccgttagttagggtaagtggatattttgtcctacacatgacggcatgagaatggaactacatctaacactatgttgtttcagtcctagttgactactctgtctgtatgaatgagatgatatagtagaaaaaaaaaaaaaaaaaaaaaaataataataaaaaaaaaaaaaaaaaaaaaaaaaaataattacaaaaaataaaaaaaaaaaaaaataccaacataaatactatataaaaaaaaaaatccttcagttttaaaaaggggaccaaagggtttcgttttctgtgtttaatgcctagggggttattttttgaacctttttgaggtgtcccccatctaaatccaaaatttttgaaaaaaaattggcaaaaatgccccaaatggggtattttatataaaaagggggg

SEQ ID NO: 249969 - DNA, 469 bp, Glycine max
  unsure (1)..(469): unsure at all n locations
gaattcccgggtcgacccacgcgtccggaaaatactataatatatatcattgtctgtcttttgttttgaaccattttctgcctataagtactcatacattcgacgtttttcaaaggtgagagccaccctttttctcttacaagctactagaacaccgtttgctttgctctcccttcattttgcaaaacctctgggtatctaactctgcagccatgggaagtttggaagttgaatcaacaaatggtcacacctcaagtcctcacaaaaaaactgaaaaatcggagagagagaggagaattgatgagtggcttccaattacttctaaaaggaatggaaaatggtggtattcagctttccacaatgttactgccatggttggagctggtgttctcggtcttccctatgccatgtcagagcttggatggngtccaggtgtaactatacttatcctctcatggatcatcaccct

SEQ ID NO: 249970 - DNA, 538 bp, Glycine max
  unsure (1)..(538): unsure at all n locations
tggtnatttgagagtgatccatgaactgatgtacgtgcgaaccgcttcggaattcccgggtcgacccacgcgtccggttgaacaccatcttaagaatcccccttctgtcccgtctgacaaattatctcatgtgtgcactggcattttgaagcctgacaatgagttgcaaattttgattgatggggaacagaagaagaaggtaaatttcttatctgctgatgattttgaaccccctcttatccctcccaagacaatcccagatcctgatgataaaaaacctgaggactgggatgagagagagaaaattccagactcaagtgcagtaaagccagatgactgggatgagaatgcacccttggaaattgttgatgaagaagctgagaaacctgaaggatgggacaatgaacctgaggagatagatgatccagaggcaacaaaaccagaagattgggacgatgaggaggatggtgaatggaaagcccaaagatgagaaccanaatgtgagcagcccccgttgtgtgagtgaagaagccatgaa

SEQ ID NO: 249971 - DNA, 422 bp, Glycine max
cggaattcccgggtcgacccacgcgtccgcccacgcgtccgacagacttctaattccaactgcatctgccagatatttggagaatgggcttcagatgattgaattccttggaagagtagtgggtaaagctctatatgaaggaatattacttgattactctttctcccatgtctttgtacaaaagctattgggacgatatagctttcttgatgaattatcaacacttgatccagagctatacaggaaccttatgtatgtcaagaattatgacggtgatgtcaaggagctctctcttgatttcacagttactgaagaatcattgggcaaaaggtatgtggtggaacttaaatctggtggcaaagatatttctgtgacaaatgagaacaagatgcagtacatacatgcaatggcagactacaaac

SEQ ID NO: 249972 - DNA, 354 bp, Glycine max
aattccacccagccgtccggccacgcgtcctggttatttgattggtttgcattcatgttaagctagtggcgatcgggtccagggtcagtctacaacctacagttttggtttggtttgcttgattgaagatcaaggaatgaagatgtcgggtgttataaggcacaagagtattcaccccgccttctccgcaatcagacacttctcttctgcagctaaagagattactgtcacggatgctatcaactcctcactcgatgaggaaatgtcacctgatcctaaagtcttcttgatgggtgaagaggtttgagaatatcatggtgcatacaagatatccaatgtgctgctcgacaagta

SEQ ID NO: 249973 - DNA, 383 bp, Glycine max
cctgaattcccgggtcgacccacgcgtccgaaaaaaaaaaaaaaaaaaaaataaaaaaaaatataataaaaaaaaaaaaaaaaaaaaaaaaatgaaaggataaaaaaaaaaaaatacaaaaataaaaatactaaaactatataaaaatatactataccaatcctttaaccacacaaaaacctcttttttttgctaaaaccaattttcaaaataccacccatcatcctaaattatgcagcatgtcttataatctgaaatttcctgttcattataatttctcatgcaaatttcaaaattctgaattttgacctttctcattatcttagccctttaaattttcctaacaattttccccttaaaaatcctaattattcgcattttaa

SEQ ID NO: 249974 - DNA, 488 bp, Glycine max
  unsure (1)..(488): unsure at all n locations
ggagagtttgctccggaattcccgggtcgacccacgcgtccgtgagaggaaagggagggcctcagaactgcaaatccctactcccactaaagggagcaaatagttaagaacaaacacatagaggagttcagttcacgatagcaagtttcattgaataaaccatgacggaacctcagaatccttcaccattgacacattctccagcgttagaaatcacacctcaaccactgctacctcccaaaaggaaacgaagcctccctggaatgccagatccagatgctgaagtgattgctttgtcaccgaagacgctgttggcgacgaaccgtttcgtgtgcgagatctgcaacaaaggcttccagcgcgaccagaacctacagcttcaccggcgtggccacaacttgccgtggaagctgaggcagcgagggagtacagagccgcggaagaaagcttacgtgtgtcccgaacctttctgcgtncaccacaaccct

SEQ ID NO: 249975 - DNA, 245 bp, Glycine max
gaattcccgggtcgacccactcgtccgctgacgcgtgggaaaaaaaaaagatttaatttaaaaaaaataaaaaaaaaacaaagtggaaggataataaaataaaaaaaaaaaccaaaaaaattactaaataaatacacataaaactaaactaatccttacctttctataccttttacatttactccccctttattcatcacacttactcttctttatacctccctctttgtaattccatttccctt

SEQ ID NO: 249976 - DNA, 314 bp, Glycine max
ggaatttccgggtcgacccacgcgtccgcgaagaacaagggaaagggaggtaagaacaggaataggggaaagaacgaggcggacggcgagaagggagagctggtgttcaaggaggacgggcaggagtacgcgcaggtgctccggatgctgggtaacgggcggtgcgaggcgatgtgcatcgacgggacgaagaggctctgccacatccgcgggaagatgcacaagaaggtgtggatcgccgtcggagacatcatcctggttggactcagggactaccaagacgacaaggctgacgtgattctcaagtacatgcc

SEQ ID NO: 249977 - DNA, 398 bp, Glycine max
ggaattcccgggtcgacccacgcgtccgcaggtagcagttgccctttcacatgctgctattttggaggagtctatgcgtgcccgggatcaagtcatggagcagaatgttgctttagatttagcccggcgagaggcagagatggcaattcatgctcgcaatgattttcttgctgtcatgaatcatgaaatgaggacaccaatgcatgcaattatagcattgtcatcacttctcttggagactgaactgacgccagagcaaagggttatgatagagacagtgttgaagagtagtaatgttttggcaacactcattaatgatgttctagatctttctcgacttgaagatggtagcctcgaattagaaatgggaaaattcaaccttcatggagttttgggag

SEQ ID NO: 249978 - DNA, 470 bp, Glycine max
ccggaattcccgggtcgacccacgcgtccgcccacgcgtccgatcgggtctctctgtctctctcggatcatcaaaatcagaaagaattgggggaatggagaacaaccagcaacaaggcgctcaagcccaatcgggaccgtaccccggcggcgccggtggaagtgcaggtgcaggtgcaggtgcaggcgcggccccgttccagcacctgctccagcagcagcagcagcagctgcagatgttctggtcgtaccagcggcaagagatcgagcacgtgaacgacttcaagaaccaccagctccccttggcccgcatcaagaagatcatgaaggccgacgaggacgtccgcatgatctccgccgaggcccccatcctcttcgccaaggcctgcgagctcttcatcctcgagctcaccatccgctcctggctccacgccgacgagaacaagcgccgcacccttcagaaaaacgaca

SEQ ID NO: 249979 - DNA, 525 bp, Glycine max
  unsure (1)..(525): unsure at all n locations
tggggagacgtgctgcatgttgggtaggaggagggaaatgcatgctaccggtccggaattcccgggtcgacccacgcgtccgcccacgcgtccgcccacgcgtccgcccacgcgtccgctccttctcaaactagtaatatatagtattattcatccattccattctatatatttcataatgggtgttttcacattcgaggatgaaaccacctctcctgtggctcctgctaccctttacaaagctctagttacggatgctgacaacgtcatcccaaaggctgttgacgccttcaggagtgttgaaaacgttgagggaaatggtggccccggaaccatcaagaagatcactttccttgaggatggagaaaccaagtttgtgttgcacaaaatagaagcgattgatgaggctaacttgggatatagctatagcgtagttggnggagatgggttgccagacacagtggaagaagatcacattcgaatgccaaatgggctgctgcgccaacgggaggtctgcttggaagc

SEQ ID NO: 249980 - DNA, 513 bp, Glycine max
  unsure (1)..(513): unsure at all n locations
ggaggtgctggtagtttggtggacggatagtatccttctaccggtccggaattcccgggtcgacccacgcgtccgcccacgcgtccggcaatgggcggtatactttctgcgcttcttggcggcgacgcggcggcggcggcgtcttcgccggagagttctacttctagagtctcctccttccactcgtcgccgcgctggcagctctacttcaacgagatcaaagataccgataagctcgttgcgatagatttctcggcgtcgtggtgcggtccttgcaaattcatagagccagcgattcacgccatggccgacaagttcaacgacgttgacttcgtcaagatcgacgtcgacgaattacctgatgtggcgcatgagtttcaggtgcaggcgatgccgactttcgtgtngtggaagatagggaaggaagtcgaccaggctgtgggcgcataagaagacgagctcgagaagaagattgcgaacatcgatcgggatcttactctgaatccctataat

SEQ ID NO: 249981 - DNA, 517 bp, Glycine max
  unsure (1)..(517): unsure at all n locations
cgtnaagtgtctacaactgggggggatataaggtgatgctgctaccggtccggaattcccgggtcgacccacgcgtccgtttttgttcaaggctgctgagttgtgcatggttggtttgagtgctggtgcagtacagggtgcgttgtcaaactctttggctagtaaaaaggaggggagattatctgtgacagtcccaagtgtgagcagtaatgctcttggttatggtgcttttcttggaatttatgctaacctgagatatcaactgttatgtgggtttgatagagcaatgatgacccattttgacgtcattggagttgccttgttcttcagcacagcattcagggtcttgaacgttcaattaggagagacctctaagcgtgcctggcttggagttgaggcagatccactggctcagtcggatgacctcttgaaaagttataacaggacttctgagaatgtagaaaagtcatcctcaaaatggttatatcanagaatgcggntgtttctgggcttgaac

SEQ ID NO: 249982 - DNA, 540 bp, Glycine max
  unsure (1)..(540): unsure at all n locations
agttntncagagtgtgtccctagctctgatgctacgtgcgaaccgcttcggaattcccgggtcgacccacgcgtccggtactgttctattagttcatactaagttctgaaaatgagttccaaggttttgcttgtgctacttatgttcttggccactatacttctgatctcctctgaggttgcacccgatgatgcatacgagaattttgacaaaatagatgggaagcctagtgcagatggggtagatgaaagcaagtattggcgtggcggctatggtggcggctatggtggtggttatggaggtgggcgtggaggctatggaggtgggcgtggaggctatggagggggacgtggtggatatggcggcggacgaggtggctatggtggcgggcgtggtggctatggcggcgggcgtggtggcgggcgtggtggctatggtcctaatgaacataacgaggcttgggttgaagctaacccttacaacttagaaagccactttctaaaacctatttatgggggttaagtattgcaattaaaaaaa

SEQ ID NO: 249983 - DNA, 397 bp, Glycine max
gaattcccgggtcgacccacgcgtccgagaaattgaatctttctgttcttccaacaactacaattggatctttccctcaaactggcgatcgtagaagagttcgtcgtgaattcaaggctaacaagatctccgaggaagattatatccgtttcattaaggaggaaatttacaatgttgtaaagctccacgaagaacttgacattgatgtcttggtgcatggaaagcccgagaggaatgacatggttgagtactttggagagcaattatctggctttgcatttactgccaatgggtgggtgcaatcatatggatcccgctgtgtcaaaccttccatcatctatggtgatgtgagccgttccaagcccatgacaagtttctggtcttcaactgctcaaag

SEQ ID NO: 249984 - DNA, 413 bp, Glycine max
ggaattcccgggtcgacccacgcgtccgtcatgatggtccatacaatgtgataaagaattgggactacactcgctttgtggacgcgatccataatgggcaaggcaaatgctggactgccaaggtacgtacagaggatgatctgactgaagcaattgcaaaagctactggaccacagaaagattcactatgttttatagaagtttttgtacacaaggatgacaccagcaaagaattgctggaatggggatctcgtgttgctgctgctaacagtcgtcctcctaatcctcaatagaaaatcatttcctaattattggcctgttttgtgtattttgttgaatagagttccactactggatatttacaagagaaaaacgacaaaaatgaaaaataagttgaaataaatgtttgcttt

SEQ ID NO: 249985 - DNA, 474 bp, Glycine max
ccggaattcccgggtcgacccacgcgtccgggaagggtgttggaagatggtaatggaaaggattctgtggcggaaggaatttcgacgaaggaatatccaaaattctcggctttctttaagaagattaccatatacttggatcagggtttgtaccaggataaccatgttgttgtgtgggatagtgctcattcggcggctgcgcagcagcgtgatggttttgaggtgaagaggaaaggagataaggaattcactgcggtggttaggatggcgatgaattattcgcctgacaagtttgtggtttcaccgcaactggctagagttttaggggttgagtttgactcgcgctgcaggatcatagctgctctttggcactatgtgaaggctaagaagctgcagagtcccaatgacccttcgttcttcatgtgtgatgcttctctccagagggtgtttggggaaggagaagatgaaattctc

SEQ ID NO: 249986 - DNA, 447 bp, Glycine max
  unsure (1)..(447): unsure at all n locations
ccggaattggaattcccgggtcgacccacgcgtacgcccacgcgtccgcccacgcgtccgaaacggatgggttcacatcagggtgcagcatcagatggccttcatttttaatggtcaagttgtcatagatacctccttacctttcagaagtaataattatagcatgatttcgactgttagtccaattgctgcaccagcatcaaagagagctcaattttctgttaagggtgtcaacctgatacgccctgccactaggttaatgtgtgctttagaagggaaatatctggtctgtgaagatgctcatatgtcaatggatcaaagctccaaagagcctgatgaacttcagtgtgtccagttttcatgctctgtccctgtgatgaatggaagaggatntattgagattgaggaccagggtttgagtagcagcttttttcctttcattggtgt

SEQ ID NO: 249987 - DNA, 194 bp, Glycine max
gaattcccgggtcgacccacgcgtccgggaatttgtgttttctttcgcttgtttgtttgtttaattcaataaaggaaattaggcgtgactcttgttgagtatgctctgcctatttgaaaatttccacacctcttttaattgtcgtaatgatgtgtgaagtgtgtgttattttaaaaaaaaaaaaaacaaataaa

SEQ ID NO: 249988 - DNA, 540 bp, Glycine max
  unsure (1)..(540): unsure at all n locations
aganttactggtctgtgccacgcatagatagtaattctcatactcgttcggaattcccgggtcgacccacgcgtccgcggacgcgtgggaaattcaagagattcccaaacttttttactttttattccctttttgtcactatacaatacaaatacacattcaacaattttcgattcaagttcaaagccatcgacgagtgttgaggaagaataacaatgggaatgatagtggattttgaaaatgaccaaaacgacgccgttctggttccgccccctaacttcgccatggttgaagactgcgttttccgatccagcttccccaccccttccaatttcccctttctccaaaccctaaaccttcgctccatcatatacctgtgccccgagccttatccggaagaaaatctcgagttcctccgctcgcagaatattcgcctctttcaatttggaattgaggggaaaacggacgtttctatgcctgttctcaaggattctatcatggatgcacttgaagtttaattggtgtgagaaatcaccccat

SEQ ID NO: 249989 - DNA, 391 bp, Glycine max
cggcgcgacccacgcgtccgcgcacgcgtccgcccactcttccctcttttctttctttcatccccaaatcggaaccgaaattcccaccttcaactttctcccccaaatcgaccaccaccactgtcaagcccattcatttatattttattcgtatatatacatacagagagtgagtgagagagagagtgggaagaatggattcggatcaaggcaagcttttcatcggtgggatttcatgggatacgacggaggacaagctcaaggagcatttcggtaactacggcgacgttttgagcacttccgtcatgcgggagaagaacactgggaagccaaggggctttggtttcgtcgtttttgcggatcctaacattctagatagggttttggaaga

SEQ ID NO: 249990 - DNA, 379 bp, Glycine max
aattcccgggtcgacccactcgttcgcctttacagcctagtcgataatcgtaccaggatcttatgcataatcatattcaatctgagtctctggagaggctacaccgccatgactgtcatattgctgcttcttggactattatcttacactggagtactctctaccgtggcactatctgccgatgcgtcttatggacgaaatggaaacaatgtaccagcatatcaggcattgactgatctttccaaatccgtcagaataggcgacattcgtcatactatgcagacgaatgagccctctatgccctcagaggatcaatcctatctgagagcctcggtgaacctaatgaccaactactatctatcaccaacgctggagctga

SEQ ID NO: 249991 - DNA, 547 bp, Glycine max
agttttagctgtgctgttgtgcaatcactgcactgtcatacccgtccggaattcccgggtcgacccacgcgtccgctggaagcccaggtggccagctcatatcacctggatcagcattttcaacttctggcacctgaaccgcattccctgatagaccccctacacttgaattccccaaaggggaaacaccaaagatcttgggtgttgaacacttctccacccgaagatggggttctagactgggatctggatcattgacgccagacagtgcatggcaaggttcaagactaggttcgggatccttgactcctgatggtgttgggcttgcttcgcgattaggctctgggtgtgtgacacctgatggtctggggcaggaatccaggttaggttctggctgtttgacacctgacagtgctgggccaaccaatcaaaacaacatctctgtgcaaaaccagatttctaaagaagcaactcttgcagattcagacaatggacatccaagcaatgcaacattgggtgatcacagagtttcatgtgaaataaccgg

SEQ ID NO: 249992 - DNA, 365 bp, Glycine max
gcttgaagcccatgtggccagctcatatgatttggatcagcatattcaacttctgtcaccggaaccgcattccctgatggacgctctacacttgaattccccaaatgggaaacacctatgatcttggatgttgaacacttctccacccgaagatggggttctagactgggatctggatcattgactccagacagtgcatggcatggttcaagactaggttctggatccttgactcctgattgcgttgatcttgcttcgccattaggctcttgctgtgtgacacctgatcgaccgtagcaggaatccatgttaggttctagctgatttacacctgtacaagcttttctcaaccattcaaaacaaca

SEQ ID NO: 249993 - DNA, 486 bp, Glycine max
tccggaattcccgggtcgaccgacgcgtccggtctcaagggccaactcatgatgagattgattttgaattcttgggaaacgtgagcggtgaggcttgcattctccacacaaacgtgtttaccaaaagccaagggaacagagagcaacagttctatctctggttcgaccccaccagaaactttcacacttacttcatcatctggaagccttaacacatcatattcttggtcgataacattcccataagggtgttcaagaatgctgagactattggcgttcctttcccgaagaaccaacccatgagaatctattctagcttgtggaacgctgatgactgggccaccaaaggtggtttggtgaaaactgattggtcaaaagcaccctttacagcatactaccgcaatttcaaagccacagagttctccacctcttcttccaattccttctctgatgctgcatggcagagcaacgagcttgatgcctatg

SEQ ID NO: 249994 - DNA, 560 bp, Glycine max
  unsure (1)..(560): unsure at all n locations
agtntttagcgtggctagatgcctattccgcatagcactngcattgtcgtaccggtccggaattcccgggtcgacccacgcgtccgcccacgcgtccgcccacgcgtccgtccacgcgtccgattcattttaatcctaatggtgcagttcttgatcattcgatttttctcctcaagatgcagatattcgtaaaaactttgaccggcaagaccatcacccttgaggtggaatcctccgacaccattgacaacgtaaaagctaagattcaagacaaggaagggatcccacctgaccagcagagacttatctttgcgggtaaacaacttgaggatggtcgcacccttgccgattacaacatccaaaaggaatcaaccctccatctcgtgcttcgcctcaggggtggcatgcaaatctttgtcaagactttgaccgggaagaccatcacccttgaggtggaatcctcggacaccattgataatgttaaggccaagatccaggacaaagagggcattcccccagatcagcagaggctgatttttgcccgtaaacaacttgaggat

SEQ ID NO: 249995 - DNA, 553 bp, Glycine max
  unsure (1)..(553): unsure at all n locations
ggctnaactggtnctaaacctgataccgactctcatccgcacgacgtaccggtccggaattcccgggtcgacccacgcgtccggtcttagacacatatatggctcgacttgtattgttcttctcagcattttctcttttcctgctaaattctactatcacggcacaagtcccagcaccaccatctccttctacaattccatccccaatgtctcctttggcaccttctacaccaccaccgtcccgttctcttcctgctcctccaacgtctcttacgccaccacttccatctacagattccgctcccactcctccaccacctattggatttggaggaggtggtggaagtggaattggaaaaggtggtggtggctcaggcgttggaataggctcaggaagtggtagtggtggcgttcaaggtggtggtggacaaggacgtggtgttgggataggaagtggcgttggcagtggtaccggctatggtggcggtggaactggcattggcagtggtgacagtagtagaggaggtggatgacgctttctggtgttggatat

SEQ ID NO: 249996 - DNA, 551 bp, Glycine max
  unsure (1)..(551): unsure at all n locations
agcttnatggcgctgaagacttaccgacctacatagccactgacgtaccggtccggaattcccgggtcgacccacgcgtccgcagaggtgaagcttcatggattgtggtatattccctacactttgagggtggtatggaccggaaagttcaaggatataccatatcaaaacatagaagaagaccgctactataagagcattcaacttcttgaatacaacccactatacaagaaaactgcagtgcttgtccataatggaaaacccttatgtgagtccatgcttattgctgaatacattgatgagatttggtcacataattcattacttactgctgatccctacgagagagctctggcaaggttctgggttaaatatgctgatgatgacatgttttctgcagttattgcattcttccttagcaataatgatgaagagcgagaaaagagcatagagaagatatgggagcatctcagggttgctgagaatcagtgttttggtgatcagaagaaattttttggtggagacattattaacattatggacatagcttt

SEQ ID NO: 249997 - DNA, 551 bp, Glycine max
  unsure (1)..(551): unsure at all n locations
cgatttagatggtntatgccgcatcagacctcatcgcactcccgtccggaattcccgggtcgacccacgcgtccgctcgctctatttctcagtctctgtgtttgcggctgaagattccgaacgagtgaccttctgcgttgctcgcaaagtttaagtaatcatgggtaaggaaaaggttcacatcaacattgtcgtcattggacatgtcgactctgggaagtcaactaccactggtcacttgatctacaagcttggaggtattgacaagcgtgtgattgagaggttcgagaaggaggctgccgagatgaacaagaggtcattcaagtatgcctgggtgctcgacaagctcaaagctgagcgtgaaagaggaattaccattgatattgctttgtggaagtttgaaaccaccaagtactactgcacggtcattgatgctcctggacatcgtgactntatcaagaacatgattactggtacctnccaagccgactgtgctgtccttaatatggactncaccactggtggttttggagctcgtatttctaaggaag

SEQ ID NO: 249998 - DNA, 501 bp, Glycine max
gtccggaattcccgggtcgaccgactcgtccgctcgctctatttctcagtctctgtgtttgctgctgaagattccgaacgagtgaccttcggggttgctcgcaaagtttaagtgatcatgggtaaggaaaaggttcacatcaacattgtcgtcattggacatgtcgactctgggaagtcaactaccactggtcacttgatctacaagcttggaggtattgacaagcgtgtgattgagaggttcgagaaggaagctgccgatatgaacaagaggtcattcaagtatgcctgggtgctcgacaagctcaaagctgagcgtgaaagaagaattaccattgatattgctttgtggaagtttgaaaccaccaagtactactgcacggtcattgatgctcctggacatcgtgactttatcaagaacatgattactggtacctcccatgccgactgtgctgtccttattattgactccaccactggtggttttgaagctggtatttct

SEQ ID NO: 249999 - DNA, 553 bp, Glycine max
  unsure (1)..(553): unsure at all n locations
aggggaaggtggctgaaaccgaaacggaatctctatgcaatgctctaccggtccggaattcccgggtcgacccacgcgtccgaccatttaccaaactcactcatcaattctcatctttcttctcactaactattaattcatggtgtcgagcacagctggccaagtcatcaaatgcaaagctgcggtttcatgggaggcagggaagccacttgtgattgaagaagtagaggttgcgccaccacaagctggtgaagtgcgtttgaagatcctctacacctctctttgccacactgatgtttacttctgggaagctaagggccaaactccattggttcctcgtatatttggtcatgaagctggaaggatcgtggagagcgtangtgagggtgtgactcatctganaccaggggaccatgccctnnctgtgtttaccggggagtgtggggactgccctcattgcaagtcataggagagcaacatgtgtgatcttctcaggatcaacactgataggggtgtcatgatccatgatagccaaacaagttttctataaagg

SEQ ID NO: 250000 - DNA, 246 bp, Glycine max
aattcccgggccgaccgcactcgtccgaccattcaccaaactcactcatcaattgttatcactcttctcactaactattaagtgatcgtgctgatcacaactggccaagtcatcaaattccaacctgctgattcatcggaagcacctaagccactcgtgattgaagaaaccgatgctgctccaccacaagctgatgaaatgccctatactatcctttacaccttcatttgccacactgatgattac

SEQ ID NO: 250001 - DNA, 543 bp, Glycine max
  unsure (1)..(543): unsure at all n locations
gtnaagaggnctgattatagatagaatgttatgcactgccgtaccggtccggaattcccgggtcgacccactcgtccgaaacaagtgtacgtgggacccttccttcgcaagcaagagagagaaagtgctgctgacaaggcaaaattcaacaatgtttttgtgaagaatctatcagaatcaaccaccgatgatgagttgaagaacacttttggtgaatttggaactattactagtgctgtagtaatgagggatggggatgggaaatcaaagtgttttggatttgtgaattttgagaatgctgatgatgctgctagggctgttgaggctctcaatggcaaaaattttgatgacaaagaatggtatgttggaaaagctcagaagaaatctgaaagggagaatgaattgaaacaacgatttgagcagagcatgaaagaagctgctgataaatatcaaggcgcanacttgtatgtaaaaaatttagatgatagcattggtgatgaaaaactaaggagctgttctncccttttgtaccatacctnttgc

SEQ ID NO: 250002 - DNA, 555 bp, Glycine max
aggttaagctggtctgagcatgatcagcaaagtattgtactgctctaccggtccggaattcccgggtcgacccactcgtccggaaaatcatttcctaattattggcctgttttgtgtatatagatgaatagagtttcactaggggatatttacaagagaaaaacgacaaatatgaaaaatatcgtcgaaataaaagtgatgcttttacaaactaaaggtgaatatggaactattactagtgctgaaataatgaaaggatggagatgggaaatcaaagtgttttggatttgtgaattttgagaatgctgatgatgctgctagggctgttgaggctctcaatggcaaaaattttgatgactaagaatggtatgttggaaaagctcagaagaaatctgaaagggagaatgaattgaaacaacgatttgagcagagcatgaaagaagctgctgataaatatcaaggcgcaaacttgtatgtaaaaaatttagatgatagcattggtgatgaaaaacttaaagagctgttcttcccttttggtaccattacctattgcaa

SEQ ID NO: 250003 - DNA, 549 bp, Glycine max
  unsure (1)..(549): unsure at all n locations
gaggcggtgctgaaaaagaagttgaaggactgctctaccggtccggaattcccgggtcgacccacgcgtccgcgtgtcctaactctgaaactctactattctttctcctccgcagaaccttaacaaccaaaaggaagcattacagttcccaatttcacagaaacaccagaattgatcaaaacacataacanaaaaaaagtgaaaatggcgagcgctgtagagaaagagggtggcgcgagagaggaaactttctctttggagcttnctgctccacctggttggaagaagcagttcatcccaaagaaagctggcacccccaagaaaaatgagattgtgttcactgcagcaacaggagaggagatccataacaggaagcagctggaaaaatatttgaaagcacaccctggtggtccagctgtatcagaatttgactggggcactggtgagaccccangaagatctacaagaattagtgagaaggcaaaggcagctnctncatctgtaagtgagcccncaaagaagcgtactanaagatcatcagnctcacaa

SEQ ID NO: 250004 - DNA, 549 bp, Glycine max
  unsure (1)..(549): unsure at all n locations
agggttagaggcgtgtacagcaagaggatgtattgtattgctctaccggtctcggaattcccgggtcgacccacgcgtccggggagctttgctttcatagtttttgacaaatctacttctaccctctttgtggcctctgagcaatatggtaaggtacctctatattggggaattactgctgatggctacgtagcatttgccgatgatgcagaattgcttaaaggtgcttgtggcaagtcacttgcttctttccctcaaggatgtttctactctacagctgttggaggattgatgtgctatgagaatcctaaaaataagattactgcagttcctgctaatgaggaggaaatctggggagcgactttcaaggtggaagggccagcagttgtcgtagccagacaatagattttcctttctgctggtgagatgccatatgatgattagtggaggagactgtaaaaggcatccatgagggccaatgtaattaaatggcatggggagtgatcactggaattgggaaatattangggtgtaactttgttcattaaa

SEQ ID NO: 250005 - DNA, 552 bp, Glycine max
  unsure (1)..(552): unsure at all n locations
tgtantagaggtntgactcgatcagcattgtactgatcgccgtaccggtccggaattcccgggtcgacccacgcgtccgctttttgaacagacgaaggaaaaacgcagtgattaagcgcagacatgtatcatccaacaggaggtggcgttcgtggcggtcgagatcaattcacttgggaggatgtgaaagttgataagcatagggagaactatcttggtcacagtatcaaggctccggttggaagatggcagaaagggaaagatcttttctggtataccagggataaaaagtcccaaaatgcagaaatggaggctgcaaaagaagagataaaaagaattaaggaagaagaggagcaggcaatgagggaagctcttggcttagctcccaagcgttctaaccatcctcaaggtaaccgtcttgataaacatgagttttcagaactggtaaagcgggggtctacagcagatgacttaagtgcaggtcatgctgaagcttgcagggttcaaggtcttggttttgcaagagaaccacgcccttggggaggaatccgg

SEQ ID NO: 250006 - DNA, 549 bp, Glycine max
  unsure (1)..(549): unsure at all n locations
gttttagagggntgtaatcgcaagaatatgtattgctcgtccggtccggaattcccgggtcgacccacgcgttcgcacacacacagctagcagatattacatacacgtgaatcactaattaacccatggaaaaaagatcaatagctgggtggggctttctcttccttgttctctttgttgctcaagttgtggtgcaaactgaggcaaagacttgcgagaacctggctgatacatacaggggtccatgcttcaccactggcagctgcgatgatcactgcaagaacaaagagcacttgctcagangcagatgcagggacgattttcgctgntggtgcaccaaaaactggtaaatggatccattcacttcaacgtgaagaagatgcatgcagcgctattttataaaanattaaactactatatactatatataataagactggcgctgcatcaatgacctatgtattatagtatatattattaccgatgtcagaactatagatgcatgtactgtgcataacggctgagttatgtacttatggtaaagatnaa

SEQ ID NO: 250007 - DNA, 547 bp, Glycine max
  unsure (1)..(547): unsure at all n locations
cgagtagtggtagtgtatcaagcaacatagtactgctctaccggtccggaattcccgggtcgacccacgcgtctcgcagcagttcaaagaccggggaagaacaatttgggaatgggattgggtgcggggttgcttggaggagccttgggtggacttctaattggggacatgatttctgatgccggttcttacgacgctggttttggagatttcggtggatttgatttttaaatctcttgttagttttctttgtttgggggtagttttttatgttcaaatgtgaacttaaattagaatatgttttttgcagtaaaaaaaaatattnnaanatataataaataaatatttaaaaaaaataaattaaattaaaaataaaaaataaaaattatatatttaattatttaaaatatttttatatatattatttttatttaaaaggtgttgattttttaagtttttatgttaaattatatttttatttgggggagaaatatttatgaaggggctgtttataaaaaattgggtgttgtttttaaaatggttataa

SEQ ID NO: 250008 - DNA, 549 bp, Glycine max
  unsure (1)..(549): unsure at all n locations
gttnaagcggctgagtacgaccagcacatgattgcactgctcgtaccggtccggaattcccgggtcgacccacgcgtccgcggacgcgtgggttggaaagcaatgagggtgatcctgagttacttgtcttcattccattgacttcagatgtcaagattaagagcatatccatagttggtggagctgatggaacaagtccttccaagatgagagtgttcatcaatcgagaaggaattgacttttcagatgcgcaaagcatgcaggctattcaggaatgggatttggttgagaatatgcaaggagtattggaataccagacaagatattctaaatttcaaagcgtggcaaatattaccttgcactttcctgagaattttggtggtgacactactaaaatacactatattggctttaaaggcgaagccactcagttgaaaagggatgttgttgccactattgtttatgagcttatgccaaatccttctgaccacaagacacgtgctgaaagtggatggggtctttctcacatagaatgaaatagttacattt

SEQ ID NO: 250009 - DNA, 542 bp, Glycine max
ggggcgggtgatcatgaacgaaatatattgattgctctaccggtccggaattcccgggtcgacccactcgtccgccagctgctactcgtgaatatgcaccattgattgaggaattatggaatgatgctggcattgaggctacatacgaaaggagaagcgaattagaaatgctgcctagtgttgccggttatttcttagagcgggctgttaaaatattaaggacagattatgaactctctgatttagatatcctttatgccgagggagttacttcatctaatggggtggcttgtgtggagttttcatttccccaatcagtgtctgaggaaactgttgacactaccgatcgatatgattctttggtcaagtatcaactaattaaggtgcatgcaagggggctaggagaaaattgcaagtggctagagatgtttgaggatgttgaaatggtcatcttctgtgtttccttgactgactattatcagtttttctgtgatggcaacggttgtctcactaacaagatggttctaagcacaatgtttttg

SEQ ID NO: 250010 - DNA, 549 bp, Glycine max
  unsure (1)..(549): unsure at all n locations
ngtttagagggtgattaagaagggagaagtattgtactgctctaccggtccggaattcccgggtcgacccacgcgtccgcttttttctccaatggaaaactccaaagatttagacgctctctattactcttagacgtcatgttctgcctcagatactttctttcacactacccttggccttgatatacaaaaagacatgtataagaaccggttgcaagaattggctcaaagaagatggtttaatttgccagcctactcatgcattcgcgaagggccagatcatgctcctcggtttaaagcaactgtcaattttaatggagagacctttgaaagccctacattctgctctactcttagacaggcagaacatgcagcaactgaagtggctcttaacactattgcaaaaagaggtccctctggagctttggcagcaagagttctggatgaaacaggagtatacaagaatttgctccaggaaactgctcatagagctggactgaatcttcctgtgtatacaaccattcgttctggaccaggtcatgggcctaa

SEQ ID NO: 250011 - DNA, 182 bp, Glycine max
attccctgctctacccactcttcctaaaaaaaataaaataaaaaaaaaaataaaattaaaaaaatatatataaataaaaaagaaaaagaatataaataaaaataaaaaaaaataacactaactattaatcacaatattaaataaaacatctttcaaaaatttaatacaaaaaataatctcaa

SEQ ID NO: 250012 - DNA, 551 bp, Glycine max
  unsure (1)..(551): unsure at all n locations
agtnnaaggagggctgagtccgatcagcatgtactgcactgctcgtaccggtccggaattcccgggtcgacccacgcgtccgaatccgtcttttgactcataagtaaccaaccgcttctttcaatcaactgaaagtcgttaggttttcttaaggttactgtctgtctctgttttatatgtggcatgggcatgagatggatctgtattccatcatgtccatggaagaatagttaactactttccttttttggtgatttctaaggttctaatttataatatgggagtggaggagaacacccctaactccatttctacctcacaatgccacgaagaacaaagcatcaacaaaatcaacacgcatgtgctcttgaatgtctacgatctcacccctgtcaataattacgtctactggtttggatttggcatctttcactctggcattgaagtacatggtaaggagtatggttttggagcccatgacttcccagctagtggagtttttgaagtggagccaatgaaatgccctggattcatatatagatgttccatct

SEQ ID NO: 250013 - DNA, 549 bp, Glycine max
  unsure (1)..(549): unsure at all n locations
gtaacgaagcggntaagtctgatcagaccgctacgcactgccgtaccggtccggaattcccgggtcgacccacgcgtccgcaaaggttccggtttatataatttcttcagtggctgaagagttactagcgttgctgaacggcatacctgagtggctttgcaaacagcggcaagagaaactatttgatggggaaccattgtttgcacacctcaagctcctaaaagagagaaaaattcatgtggttcctgctattcattctcatgaactcttaattaattggcaggaaccatgcattgtattttgtcctcaccggaatttgcgtatgggtcctgttgttcatttgcttcgacgatggtgtggtgatccaaaatctttacttattcttgaggatgttttgaatccactatcacttttaccttaccagcctgttgcaatgaaggttcttcaatgtgtatttcctgttggaatagggttgcatgaagttcaacctttactaaagacattgcagccgaagactgttctgtgtccggatgagttgagactgcatat

SEQ ID NO: 250014 - DNA, 549 bp, Glycine max
  unsure (1)..(549): unsure at all n locations
agtntaagaagggctgaaacagatcagcacgtgactgcactgccgtaccggtccggaattcccgggtcgacccacgcgtccgggtttttctgattcttaccattgttactgtttgtgtgacaattgtggggacatacttttggttaaatgctgagaactaccactggcaatggacttctttcttttcagctgcctcaacagctgtttacgtgtatttgtactcagtatactactactatgtgaagacgaagatgtcaggcttcttccaaaccagcttctattttggatacactttgatgttttgtcttgggctgggaattctgtgtggagctgtgggttatcttggttcgaatttgtttgtgaggaggatctacagaaacatcaagtgtgactaaggcttttgtaggagtctgagaccagagcacttccatatgtttgttgctggagacaataaatttcttagaggaagcctctggtcatgtgtggggaccatacaatgtttgcaggtagtaagtatcacaaggttgaggatggatggggatgcatttt

SEQ ID NO: 250015 - DNA, 544 bp, Glycine max
  unsure (1)..(544): unsure at all n locations
agttntagagggctgagtaagctccgaanctactnctctaccggtccggaattcccgggtcgacccacgcgtccggtcgtcattggacatgtcgactctgggaagtcaactaccactggtcatttgatctacaagctcggaggtatcgacaagcgtgtgactgagaggttccagaaggatgctgcttagatgaacacgaggtcattcaaggatgcctgtgcacttggcaagctcaaagctaaccgcgaaaaatgaattaccatatatattgctgagtggaagtacgacaccaccttgtactactgcacaggcatcgaaaccccctgacaacctgactttatcaataacacgattactggtacctgccatgctgattgagctgacgctatcaatgaactcaccacttgatgtgtttgaaactgtgtttctaaggcatgacagactcgtgagcatgcatttcgtgctatcaccctcgagtgaaatccatgatccgttcaataacatgatgatgcccctacctcgtaatcctttaaagcttggtgtg

SEQ ID NO: 250016 - DNA, 548 bp, Glycine max
cgagaactggctgttcacaagacacatagtactgctctaccggtccggaattcccgggtcgacccactcgtccgaaaggggttttaactgcgccctttatgctgctcaaaacaaatcgactaggggttatcctggcctgtgctgtttacaagagagatctcccatcaaatacaaccccaaatgaaaggattcaagcaactgacgggtgtgcctagtttttgaatttttttgcatctgacattcattagcttttttggtcaatttttatgatttcttatcattcatataatttagcttattccattttggtcatctaaagctttgaagtactactaagtaactaatcactgtattcaaattttcagagaagattcatgaaatctattaatgtgagaagagtgaataattattggctctccccttgtgataattagaagctttgaagttataaatctacttttaaattcaataaagccaatgggaaataaaaaaaattgtcaaagactattggaaggtgttgaaaaaaaaaagggcggccgctctagagg

SEQ ID NO: 250017 - DNA, 543 bp, Glycine max
cgagaactggtgtacagcagaggaagactgctgctaccggtccggaattcccgggtcgacccacgcgtccgcacaaaccctagaagccaacgtttttcagggtgagtctctccttcgcgtgctaatccatagagtcgcttgttaatttctcaggttgttagagcacgatggttcagtataattttaagaagatcactgtggtgccaaatgggaaggatgtcgtcgacatcatcctctctcgcacccagcgtcagacaccaaccgttgtgcacaaaagatatgctatttcacggcttcgccaattctacatgcgcaaagtgaagtatactcagcagaattttcatgacaagctcttcacaattatcgacgagttctcccaggctcgacgatattcaatccttctatggcgaacttcctcatggggtctacaataaggacacttcaagctggctttgggccaaattacaattgccggaatcttaatggtaagattgccaaaaactttgtgaagtggtggaatatggggactcgttgatcgtgcaa

SEQ ID NO: 250018 - DNA, 551 bp, Glycine max
  unsure (1)..(551): unsure at all n locations
ggtttagcggnctgcgacagaacgaagaatgtatctgcactgctctaccggtccggaattcccgggtcgacccacgcgtccgcttttctcttcaatctcaggtctcccagtcacactttcactgtcaaaccaacatgaatctgttactcgccgctgtaactctcctcgtcttttatgcggcgaaatttttttactcaaatttctgggtcccatggagaacagagcggcacttcaagaggcaagggatagggggccctggctaccgtccgatcttcggaaatacatcagagatccgacggctctacgcagaagccaagtcagaggcaagtgcatcccctcctccgttccaccacgacatcatgggacgcgtggctccattctacgaccggtggtctcgcgcgtatgggaaaactttcttgtactggttcggttcgacgccgcggttggcggtaaccgaaccggacatgattaaggaggtgctcatgaacacgcgcggggagtatgtgaaagttccgttcaaccctcagtccaagttgctctttggacagggc

SEQ ID NO: 250019 - DNA, 550 bp, Glycine max
  unsure (1)..(550): unsure at all n locations
ngagaaggttgctttagtccagcactgtatcgcactgctctaccggtctcggaattcccgggtcgacccacgcgtccggactgccactgctgcattgcatagtgaattctttacaacaaaaccatatgcttgggagccctctatccttccaaaatatcctcccagcaaggagatggatgcaaagctacgggatgaagaagctagaagattgagagcagctggtaaagctaatgctgatggtgtcaagaaatctcgtccacgtgagcgagttgggaggggagttccagttccagaggccaatgctgaactgcaagcaaatattgatagaccgcggctgatcacacatgcaaatgctaagagcaagagtgagaagtttcctcctccccaccaagatggagctctaggctatcctttgggttcttcacatcacatggatccagtttttgatccccctgatgttccatttagttctacaaacttatcacaacctatagcaaatatccaaacctggtctggcccgttggtagatccttctggtgtgggtgtgccc

SEQ ID NO: 250020 - DNA, 551 bp, Glycine max
  unsure (1)..(551): unsure at all n locations
ngaggactggctggtacccgcaaggaaagtattgtatcgctgtaccggtctcggaattcccgggtcgacccacgcgtccggcaggagcgagtgattgcagaacacccagcgcgaatgagaatggaggaagcccttgcggggctggagcgagtccaaacccagctcctgcaacgcatatcgaaactggagcgttcgcatcttccatcaccctcttcccaaaacgacaccgtcgaagacactgccacggacaccgtggctcgcctctcctccattctgcgcagcaacggcgttcccgatttctccttcaagagagtcccttccgattactacgactggcccctcgaaacccgtcgcgacgccctctcncgtcgctaatccaccatctctgcaaaagcatcgttctcgttaacacgcaagcccccggcaacgtcgtcgatgcaacgaccgcaagaattcccaatactatgtcggtgtcgttcagtacaccgntcgcttcaacgcttangcttgcaagaattttctgtaatcgctcaacaatggaagtatcgcga

SEQ ID NO: 250021 - DNA, 553 bp, Glycine max
  unsure (1)..(553): unsure at all n locations
gggggaggactggctgatacgataagcaaagtacagattgctctaccggtccggaattcccgggtcgacccacgcgtccgctgcaattgaaagttatcagcagtcaactaatcgactgctcattttgggattcagtggaggtttaacagaaccagttgagaaaacaggtgatcaaattaaagaaatggaactgaaggttcatccaaaattgagacaacctttgacagcactatgcagtgatccaaataccacagttgttgtgctcagtggaagcggtagacaagtcctagatgataacttcaaagaatacgacatgtggttggcagctgaaaatggaaatgttttacatncttcanagggtgnagtggatgactacantgccagagcatctgaatatggaatgggttgatagtgtgaagcatgtntttgagtacttcacagaaagaacacctcggtcacattttgtttttgaagaaagggggaactcactngtattggattacaaatattcagatgttgaatttggaaaaacttcagcaagggacatgcttcc

SEQ ID NO: 250022 - DNA, 444 bp, Glycine max
tgaacttcaattccgggctcgacgcactcgtacgctgcaattgaaagttatcagcagtcagcttttcgactgctcattttgagattcaggggagctttaacagaaccagttgagaaaacaggtgatcaaattaaagaaatggaactgaaggttcatccaaaattgacacaacctttgacagcactatgcagtgatccaaataccacagttgttgtgctcactggaagctgtagacaagtcctatatgataactacaaagaatacgacatgtgggtggcagctgacaatggaatgtttttacatacttcaaagggtgaatcgatgactactatgcctgagcatctgaatataaaatgggttgataacgtgaaacatgttactgagtacttcacagaaagaacaccttcgtcacattttgtttattaataacgggaaacttcactt

SEQ ID NO: 250023 - DNA, 551 bp, Glycine max
  unsure (1)..(551): unsure at all n locations
gaattagacgtgctgagctgatcagatnagtgacgcacttccgtaccggtccggaattcccgggtcgacccactcgtccggccaaatcaatcaaattcttcgagttgaacacaggggccaagattccttctctggggtggaggacttggcaagctgaacctggtgtcgtagctgaagctctcaccacagccattcaagtcggatacaggcatatcgactgtgctagtgcgtataccaatcaagcagacattggttctgctcttaagaagcttatcgatgatcgcgtggtcaatcgcagaggacttatggatcactttcaaactctggtgcacaaatcatgcaccaaaagatgtgccaaaagcatcggataaaacattacacgaattgcaacttgactatctcgacctctatctgatccactggccataccgcatgaaaagtacaacatctggactcaatagagaatatctcgagcaaccagacattcccaatacattgaaagcaatcgaggcactctatgactcagacaaggctagagccatacgaaccaa

SEQ ID NO: 250024 - DNA, 457 bp, Glycine max
  unsure (1)..(457): unsure at all n locations
tccggaattcccgggtcgacccacgcgttcgctcaatcttccttgcttgcactctcatcagaaaaggaaagcttttgataaagaaggaacgggagggaaccttgtaactttgggctggaaaagccatggccagggagcaaattcaggtgctaaatgcgcttgatgtggcgaaaacacaatggtaccatttcactgcaatcatcattgctggaatgggcttcttcaccgatgcatatgatctattctgcatatcccttgttacaaagttgcttggccgcatatcctatcacgttgatggcgcagcatagcccggaacattgcctccaaatgtttcagctgctgtaaatggcgtggctttctgtggaacactctcangccagctttttcttggctggctcggtgataagatgggaagaaaaaagtctatggcatgactctgatgctgatggtaatatgc

SEQ ID NO: 250025 - DNA, 547 bp, Glycine max
  unsure (1)..(547): unsure at all n locations
ggttagaggnntgtgacgacagagagatatatagtactgctgctaccggtccggaattcccgggtcgacccacgcgtccgctgctatgaaacaagatgtggatgacatgtatccaacaactctttctcacacgatgaagtgggggacaaaaagtcatgcagaatgtgcttgcttttcaccagatgggcagtttcttgtatcatgctcagttgatgggtttattgaggtgtgggattacataagtggaaagctgaagaaagatctacagtaccaggctgatgaagtgttcatgatgcatgatgatgctgtgctttgtgtagactttagcagagattcgaaaatgcttgcatctgggtctcaaaatggaaagattaaagtctggcgtattaggactggtcaatgcttgcggcgtcttgaacgtgctcattcttcaagtgtcacaagtgtttccttctctcgggatggaaaccagttattaagcacttcatttgacagcacagcaagaattcatgggctaaaatttgaaagatgttaaaggatttcgtgg

SEQ ID NO: 250026 - DNA, 543 bp, Glycine max
cgagaggtgtaaagatggagaagtatgtatgctcgcaccggtccggaattcccgggtcgacccacgcgtccgcaatccctcatctcattgctgagatctgcaagctggctatggactacgaaccctgcgacagtggcggaactgatgatgacctttcaccaacccatcaaaatagaatttccaggggaggaagaagacgtctcgctgggaatgggagatctgctgttgggtcaattccttacccaaggatgtatggtgaaattgatatggagacccaaattcatcaacttgagcaagaagcatacagttcagttctaagagcctttaaagctcaagccgatgccattacttgggagaaagaaagtttgattacagagctgagaaaagaactgagattgtcaaatgaggagcacagagaacttttaggtcgagttaatgctgatgatgtgataccgaggataagggaattgagacaggcacgtggccatcaatctcgtgtacttatcactggtcaaggactctattgattaaattccacgtccc

SEQ ID NO: 250027 - DNA, 548 bp, Glycine max
  unsure (1)..(548): unsure at all n locations
gggtagcgggntgcgacgacaagcaactgactgtactgctctaccggtccggaattcccgggtcgacccactcgtccgcccacgcgtccgaaaatattttcttctatctcatcctttcttttagttttatttggagttgtttatcttgggtaaaaaaaatcatgggtgttttcacttctgaaagcgaacacgtttcccccgtctctgctgcaaaattatacaaagctattgtcctagatgccagcaatgtcttcccaaaagcattgccaaatttcattaagagcgtagaaaccattgaaggagatggagggccaggaaccattaagaagcttactcttgctgaaggtttaggttatgtgaagcaccacgtagatgcaattgacacagaaaactatgtgtacaactatagtgtgattgaaagcagtgcattgtccgagccattggagaagatatgttatgagtacaaactggtggcaaccccaaatggaagatccattgtgaagtccacaagcaaatactatacccaaggtgatgagcaactcgccgaa

SEQ ID NO: 250028 - DNA, 550 bp, Glycine max
  unsure (1)..(550): unsure at all n locations
gggtgagagcngttgagtcgaacgggagtttatggacctgctctaccggtccggaattcccgggtcgacccacgcgtccggccgcgagggaggtttcgtttcgtttcgttcagttcacacattctattctctatcgattggtcttccctttttctcaatccactacaccacagttatgaggagccaacttgtgtgtaatgggtgtaggagcatcttggtttaccctagaggagcaaccaatgtttgctgtgcgttgtgcaacaccattacctctgttcctcctcctggaatggacatgtcacaactctattgtggaggctgtacgacattgctaatgtacacacgtggtgctacaagtgtgagatgttcctgctgtcacactattaaccttgtaccagaatctaatcaagtcattcattgtgcgaactgccggacaacactcatgtatccttatggagcttcctcagtcaaatgtgcaatttgttgctatattactaatatcagtatgaccaatggaaggctttcaattcctgtacagagaccaaatgga

SEQ ID NO: 250029 - DNA, 545 bp, Glycine max
  unsure (1)..(545): unsure at all n locations
gtttaggcgggctagttatgaaaatgacgtactgctgctaccggtccggaattcccgggtcgacccacgcgtccgctcgattttgtgatcctcctacttggttcctagaaagctttgtagtgagcatatataatggctgttgaaaggtccggaattgccaaagatgttacggaattgattggtaaaaccccattagtatatctaaataaacttgcggatggttgtgttgcccgggttgctgctaaactggagttgatggagccatgctctagtgtgaatgacaggattgggtatagtatgattgctgatgcataagagaaaggacttatcacacctggaaagagtgtcctcattgagccaacaagtggtaatactggcattggattagccctcatgggagcaacccggggttacaagctcataaatacaatgcctgcttctatgagtcttgagagaaaaatcattctattatccttttgaagctagttggttctgacagatcctgcntaggaaataaaagtgctgttcaaaaggcctgaaaaata

SEQ ID NO: 250030 - DNA, 553 bp, Glycine max
agagagatgtgtcgatttcagctaagcatctcactgcagtgccgtaccggtccggaattcccgggtcgacccactcgtccgctattcttgcactttctctcaaccgacttcctatttgcgggcaagaggagctcgggctgggattggcgagtttgttgagtatgacttagataatgaagatgaggattggctttttgagtttaatgaagagaggaacattttgacacctgaaatgtttgagagtcttcttttcaagttggaggtattggatcataaagctcgtgaaagagctggacttataacacctacacttggttcaccaattcctgtgcaactacggcttgatactgctattgaggccttacaagcacagggcttcaaatattcaattatccagtctgtatatgattattggaaagagaagcgagaacgatggcaaaagccggttttgcgacgtttgcagccgtcttcaccggttaacgacaccaacccgtataatgtctttcggccaagggagaatgcccacagacttcacacatgacggatgcaaagg

SEQ ID NO: 250031 - DNA, 550 bp, Glycine max
  unsure (1)..(550): unsure at all n locations
gtatagcgtgctgagtactgccagcacgctacgtactgccgtaccggtccggaattcccgggtcgaccgcacgcgtccgcccacgcgtccgcaaccctgacactccttcttctccgcttcctcttcgatcatcgggtcagaatgccgccgaagttcgacccctcccagatcgtcgacgtcttcgtacgcgtcaccggcggtgaggtcggcgcggcgagttccctcgccccgaagatcggtcccctcggtctctcccccaagaagatcggagaagatatcgccaaggaaaccgccaaggactggaagggcctccgcgtcaccgtcaagctcaccgtgcagaaccgtcaggccaaggtcacggtggtcccatccgccgccgcgctcgtcatcaaggccctcaaggagcccgagcgtgaccgcaagaaaacgaagaacatcaagcacaacggcaacatctcgctagacgacgtcatcgagatcgctagggttatgaggccgaggtcaatggcgaaggacctcagcggcagcattaaggagattctcgggacgn

SEQ ID NO: 250032 - DNA, 550 bp, Glycine max
  unsure (1)..(550): unsure at all n locations
cgagaaggtttgatatgaacagcantttattgtactgccgtaccggtccggaattcccgggtcgacccacgcgtccgtccatgtcgtttttgtcgtttccttttaatcaacatttcttcatttaggtttttgtggcgataatgtgatgatcacttggccatcatcaccttaacgaactcctcgtagtttatttggccatcgccatcaacatcggcctcgcgaatcatctcatcaacctcttcatcggtgagcttctccccgaggttggtcatcacatggcggagctcagcagcagagatgaacccattctggtccttgtcgaaaacccggaatgcctctttcagctcctcctcagaatcagtgtccttcatcttcctggccatgagtagatcgcgagcggccgctctagaggatccaagcttacgtacgcgtgcatgcgacgtcatagctcttctatagtgtcacctaaattcaattcactggccgtcgttttacaacgtcgtgactgggaaaaccctggcgttacccaacttaatcgccttgcagcaan

SEQ ID NO: 250033 - DNA, 558 bp, Glycine max
  unsure (1)..(558): unsure at all n locations
gttntaaggagcttctcaacctgagccagtcactccatcgcacctgacgtaccggtccggaattcccgggtcgacccacgcgtccgcccacgcgtccgcacaaagtcacaatggaccccctctctctcttctgcaccggagccctcgtcgccggcggcctctactggttcgtgtgcgttctgggccccgccgagcagaagggcaaacgcgccaccgatctttccggcggctccatctccgccgagaaagtccaagacaactacaaacagtactggtccttcttccgccgcccaaaggagatcgagaccgccgacaaagtccccgacttcgtcgacaccttctacaatctagtcacagacatctacgagtgggggtggggccagtccttccacttctccccctccatccccggcaagtcccaccgcgacgccacgcgccttcacgaggagatggccgtcgatctcatcgaggccaagcccggcaacagaatcctggatgtgggcttgtgcgtgggctgtcccatgcgggccatcgccggccactcgcggccaacgtagt

SEQ ID NO: 250034 - DNA, 555 bp, Glycine max
  unsure (1)..(555): unsure at all n locations
aggggnaagcgggnctaaattacgtaacagaacttgtgatgcacctgccgtaccggtccggaattcccgggtcgacccacgcgtccggcaatatttgaaggttgtgttattctgaaagagaagatagggagggcggtttggtttggggcaaatggattccttagaagacagcggctgttgggattttctcgattactctttcatcgatcaagcgccccctgatttcctttggtccaataacaataatagtgtgagcaccgaaattgacattccaggtgatgctgttgcttgtcaagagaacaccaagaagaggggacgcaccgattcatgcttcaaggcgggatcaaaagcttgccgtgaaaaattgcgaagggagagactcaatgaaaggttctgtgacttgagctctgttttggagccagggagacctgtgagaacagataaaccagctatacttgatgatgctatcagagtcttgagccaacttaaaaccgaagcccatgagctcaaaanaacatatgaaaaattactaagagganataaaatgttaaaggg

SEQ ID NO: 250035 - DNA, 561 bp, Glycine max
  unsure (1)..(561): unsure at all n locations
atggttnaaaggagcggtntgnagatcgaccacgcatatgactcgactgctctaccggtccggaattcccgggtcgacccacgcgtccgggctgctaaagtagatgctaatggtggtggtggtaagggtggggtttctgcagtttctgggaaggttccagcagtggcacatacattggctgaaaagcctgatgaggtcgcattcaatattagttaccatgctcagttcagtcctcatttttcccctttcaagtttgagctggaacaagcttactatgccactgcatgagagtgttcgtgaccgtatgattcggcaatggaatgaaacgtaccttcattttcacaaagttgatcccaagcaaacttactacttatcgatggagctccttcaaggtcgagctttgaccaatgccattggaaatctgaatatacaagatgcatatgctaatgctttgcgcatatgtggactttgacttgaagaaatagcacatcatgacaaggatgcaacactaagaaaatggggtcttggtaagcttggctaatgctttctggaattcatggc

SEQ ID NO: 250036 - DNA, 417 bp, Glycine max
taccggtccggaattcccgggatcaattactcgtgcaatcataattaataatccatcttatttggtctcattactatagtttctctagatggaagggaaaactaagtcatgcgtagttctaccttttcttctattggttgcaattttcatgcaacaatgtgtccatggataatcgcaagtgccctgcctttttgtctttggggactctctgtctgataactgtaataataacaaccttgcaagcactacaaagtccaattacaaaccatatggcatcgacttaccaaccggcccaacatgacgatttacgaatggacaaacatctattgacctaattgctcaactactgggatttgagaatttcataccaccctttgcaaacactattggctcatacacacttaagggtgtgaacta

SEQ ID NO: 250037 - DNA, 555 bp, Glycine max
cgtagccgtggctgtggtcagctaaagaattgtattgctctacctgtctggaattcccgggtcgacccacgcgtccgaacgacgtagtgcgctcgcaaagagactatagttataccggagtgcacaagctgaaataggttcagttgcttggtctaagtagatatatgtatgccagatcacgtttatacgagagccagcagtgtcattattcattgtttccctatttccagttcattattcatactcattttttgttgtcatcttatccacttgtattgtcatcttaaatagatgagacgattctgaaaagggaaaaaaaatgattttttgggttatacaattgagtgtccccgtatatttcatttttcaaaaaaaaaaaaaaagggcggccgctctagaggatccaagcttacgtacgcgttcattcgacgtcatagctcttctatagtgtcacctaaattcaattcactggccgtcgttttacaacgtctttactgggaaaaccctggcgttacccaattaattgccttggagcacattcccctttcgtcagcc

SEQ ID NO: 250038 - DNA, 277 bp, Glycine max
gaattaccgggtcgacccactcgtcctaacgacctagtgctctctctatgcgactttatatattccgtattgcacacactgaaacaagttctggtccttaatctaagtagatatcattatgctaaatcactattaaaccatatccatcatcgtcagctttcattaaacacatatctcaaattgattatacatacacattttcttgttgcatacttatccactcaccattaatatgtgcattatacaatatacaattccttaactgtcaataaaatga

SEQ ID NO: 250039 - DNA, 466 bp, Glycine max
gctcgtactcgatttcccgggtcgacccacgcgtccgaaaggaccttaaggcaagggacattgaagcctacagattgcaaactcttccaccacaatcggtggggtaatgtggtcattacaactcctgatggcatttgggatcatgaagaggccattaggaagaatgtaggtggccaggttcttggttactttcactaaaatgatcattactgtgctgttttggccaggtattaagttctgctatgtttccacataaacattccataaatgttttatgcgattacagaattttttctcttcctgtatgaatgttataacatggctgctcatgcatgatgagtatgatggattggatttgatgctctgtggaaatttttcctgagtttgataaatggtgtactagacatgaatggttattatatccttagtttgtaatctatttcaaattcaaattccatgtagtcat

SEQ ID NO: 250040 - DNA, 552 bp, Glycine max
  unsure (1)..(552): unsure at all n locations
cgtagcggggnnaaaatgaattcantgcactngcanntccttctggtctggaattcccgggtcgacccacgcgtccggcgctcggagagaaggcgaagaggttccagatcttcaaggacaacctgcgattcatcggggaccacatctgccaagaggaccgatcctacaagctcggactgaaccggttcgcggatctcaccatcgaggagtacagggccaagtactcgggaaccaagatcgatcccaaccggacgctcggtaagaccccgagcaaccgatacgcgccacgtgtcggcgacaaactacctgaatcggctgatcggacgaaggaaggtgctgatcctccaggcaaagaccaaagaggctgtgggatctgcttggcattctcagcaatcggggcaatggaagggatacatgagcatgtgacaggtgaacctgtttcggtatcagaacaagaattgggggattgcgatacaagatataacgaaagatgcaatggaggacttatggactatgcatctgagttcattatcgacaatggcgggactgatt

SEQ ID NO: 250041 - DNA, 558 bp, Glycine max
agaaataagtgcgtctgagactggtacggcactgcatagtactgtccgtaccggtccggaattcccgggtcgacccacgcgtccgtcaacgccatctccagctgcttccttatcagaagcgcttcgccccagagattctcgcttggtctccttcaatccttcttccaacgctattaattacaaaattaacctctccgcttccctccgatccattcactccctacctcttaaaacctacttgcggatcaaatgctcccaaacagatgggaatggaagtcctgcaaagaggacagtgcttcatgatctttatgagaaagataggcagaatccatggaatgacaatctctgcaaacctgttacagaccttcttcctcttatagcaagtggtgtcagaggcgtcactaggcaccctgcgatttttcagaaagctatctcatcatcgaatgcttacaatgatcaattcaaggaacttgtgcaagcatggaaagacattggaagggcctaatgggaaccttgagtggatgatatccaagatgcttgcaaattatttgaccaatc

SEQ ID NO: 250042 - DNA, 551 bp, Glycine max
  unsure (1)..(551): unsure at all n locations
tggtgaggagcgcttaattctaatccgaccctacatagcattgtcctttccggtccggaattcccgggtcgacccacgcgtccgctcccctcctcctccggtcagcggaagatgccgctgatgggcctcggcaccgcgccggaagcaaccagcgcggttaccacaaaagatgctgttcttgaggccatcaagcagggctacaggcactttgatgctgcttctgcttatggtgtggaacagtctgtgggagaagccatagctgaagcacttaagcaaggactaattgcatccagagatcaactcttcatcactaccaaattgtgggtcactgataaccatgcccatactattcttcctgccctgcagaaatctctcaggacacttcaactagaatacatagatctctttctgatccactggcccattgctactaagcctggaaaagttgtgtaccccattgaagtatcagagatagtggaatttgacatgaaaggtgtgtggggatccatggaagagtgccagagacttggcctaccaaaaccattggagtn

SEQ ID NO: 250043 - DNA, 557 bp, Glycine max
  unsure (1)..(557): unsure at all n locations
aggtntttagagcntctctagactgacacgactttcatcgcacctgccgtaccggtccggaattcccgggtcgacccacgcgtccgcccacgcgttcgatctctctcaaggattgccctcttgttggggatcatggagtgtgtaggctgttggcgtcggcttcgaacttgtcgagggttaagcttcagactttgaaaatcacagatttctctctggctgtgatttgccattatggaaaggcgataacaaatctggtcctctctggtctaaaaaatgtcactgaaagagggctctgggtcatgggggctgctcaaggtctgcagaaactggtgtcacttactgttacttcctgcatgggactaactgatacaagcatataagccattgggtaagattgcatcatccctgagcagttgtgccttcaccggcgatgctatcgttctgacagtgcgatggtaacatatgccaaagctgcagtatctctagagagcttgcaactggatgagtgcaacatgttcactcagtctgggattaatggtgcccctgcaaacatcaaa

SEQ ID NO: 250044 - DNA, 545 bp, Glycine max
  unsure (1)..(545): unsure at all n locations
ggtttgagnnaaaaaatttgaacgatctcatcgattgccgtaccggtccggaattcccgggtcgacccacgcgtccgcggacgcgtgggaaaaatcaaaggcctgaaagggatgaatccagtggatcaaaagatagagcagatcaaaagacattaagacggcttgctcaaaatcgtgaggctgccaggaaaagccgactgaggaaaaaggcatatgtgcaacaattagagagcagtaggttgaaactgacccaacttgagcaggagctccagcgatctcgccagcagggaatatttatttcaagtactggagatcaggcacagtcaatgagtggaaatggcgctatggcatttgatgtagagtacgcacgatggttagaagagcataatagacaaaccaatgagctaaaggcttgcaataaatctcatgctggaaatatngaacttcgaaccattngtgacaatttcatgacgcaagttngatgatatcttcagactgaaaggtatttgcagcaaaagctgatggttttcacattctgtcaggaa

SEQ ID NO: 250045 - DNA, 550 bp, Glycine max
  unsure (1)..(550): unsure at all n locations
ggtttatagcggatgggtgttccagcncaggtcagcatcgtcgaaccgctccggaattcccgggtcgacccacgcgtccgccgaggtaaccgcccccactttttttctaatgcagaatatttctctctctctctttccctgtttatcgtcctctttcagattcaccctcgttttccctctttcgcataaataaataaataaatataaacaccatgagcgttcctccgccgtctacggcggcgatgtggacgccgttcacggcagcgcagtggcacgagctggagcaccaggccctcatcttcaagtacctcaaggcgggtctctcggttccccctgacctccttctccccattcgcaagagcctccaattgatatcgtctcacccatcgatggggtattatgggaagaagatagaccctgaaccgtgtcggtgcatgagaaccgatgggaaaaagtggaggtgttcgagggatgcacaccctgacttcaagtactgcgaccgncatatgatacgacgtcgttaccgttccagaaaagcctgggaatcatn

SEQ ID NO: 250046 - DNA, 505 bp, Glycine max
  unsure (1)..(505): unsure at all n locations
gaattgaagcctacngctatgtacgtaccggttcggaattcccgggtcgaccgacgcgtccggccagatcctagatggctagacgtacatcttattcattgatcgccagatcatgataggggtaaagagcttcgggaaaacttggaccggtgagaccatcaccctcgatgtggagatctccgacaccatagataacgtgaacgctagaatgctagacccggaaaggataccaccttgccggcacagagtcatctttgcaggtaaacatctcgaggatctgttaacggttgccgactacaacagataagaggagaccagtctgcaactggagcttcgccgcacgagttggatgcaaatgtttgtcaagactttaactggcaagaccatcagcctcgaggacgaatcctgtgacaccatcggtaatggcaaggccaagatgcatgacatagacggtatacctacagatcagcacatgttggactttgctgggtaacaacttgatgat

SEQ ID NO: 250047 - DNA, 550 bp, Glycine max
aggttatttgttcgggagtccctgagtccacctccgtcggactgactgcaccggtccggaattcccgggtcgacccacgcgtccgcaggcaccttttcaaccggtcactcattcttctgggccaccggcaccatcaccaggccttggcttcttcttcttctctctccccattttctcgctctcggttcttctcctctacgccgttctccatggcttctgattccccttttcctgtcaccggtcaaaacatcaaccccaagggtcttaaaatgtgagtatgctgttagaggagagggtgtcacacttgcccagaatttgcaaaaggatttacaggccaatccaggctctcacccatttgatgagatactttactgcaacattgggaaatcccagtctcttgggcagcaggccataaccttttttcgagagggtcttgcgtctatgtgagcattcaaccttttttgaccaaagtggaacacaaggtttggtcaataccgacgcaatacaacgagcttggcaggatggggaacatattcctcggagagcaaac

SEQ ID NO: 250048 - DNA, 457 bp, Glycine max
  unsure (1)..(457): unsure at all n locations
cggaattcccgggtcgacccacgcgtccgcttcctcacgcatttcctcgtttttttctttccttttctctttctccggcgacgatctcagattccggccactcctctcgccggcgagcccttactcttccctcctccgtcgagccctctccgattcgaatcgttcccagcctcgcaccaccatgaatcccgaatacgattatttgttcaagcttttgctgattggagattctggtgtaggcaagtcatgtcttctcctgaggtttgctgatgattcataccttgacagctatatcagtaccattggagtggactttaaaatccgcactggggagcaggatgggaaagactataaaacttcaaatttgngacactgcgggtcaggaaccgttccgaacaatcactagcagctattatcggggggctcatggcattaattggtgttatgatgtcactga

SEQ ID NO: 250049 - DNA, 461 bp, Glycine max
ggaattcccgggtcgaccgacgcgtccgaaaagcctttttttttaaaaaaaaaattcctttaaaaaatgaagaatactatcttcttcggtctgtttcttgtttgtgccttcacctcatacctaccttcagccaccgctgatactatcttcgacataaatggtgattttgtccgaaacggtggcacatactacatcttgccagttataagaggagactgaggtggaatataattcgccgcaacaggaaacgaaacatgccctctcactgtagtgcaatctccccttgaggtctctaaaggtctaccactaatcatttcatcaccattcgaaatccttagcatccaagaaggccttattttgaacattgggttcacttttgtgcccccctgtgccctaattccttctgagtggactactgttaagggtttaccagaaggactcgctgttaaacttactgggta

SEQ ID NO: 250050 - DNA, 328 bp, Glycine max
accggttctgaattcccggctcgacgcacgcgtccgattgtaaattaaaaaatttgaaatacattttaattgtcaaaaaaaaaaaaaaaagaaaaagtaaaaattaaaaaaatataaaaaaaaaaaaaaaaaaataaaaaaaaaaaataaaaaaaaaaaaaaaaaaaaaaaaaaaaaaaaaaaaaaatgtgaccccctataaaatgaatcaatcataatttccccttatcattaaactctaaaattattaaatagtgacacttaaataaaattcactgaccgatttttaaaaaacatcaaactgaaaaacatttgattatacactata

SEQ ID NO: 250051 - DNA, 545 bp, Glycine max
  unsure (1)..(545): unsure at all n locations
gattttaggatgcgtatcaactattcagtactcatcgcactgccgtaccggtccggaattcccgggtcgacccacgcgtccgccaagacgaccttaaaattggctaagccaagtctgatgctcttttcaaggccgttgaggctgaccttttggcccatcctgattacaactgatcctcttcatcactattcagtcagcaacgaccttgctttatattatatacaagagttttcttgccttgtgtggagctttatccaatcactgtgtgtggtgtgtgcttaagttaaaaacttgccttgcaattaatgtcacgagtgattcctttctcattcacttgtgccacagaattgtgagagtcagtggatatctntgtatgtgacttcaataaattttaataaaagaaagcatcatttaaactttaaaaaaaaaaaaaaggggcggccgttctagacgatccaagctaacgtacgcgtgcatgcgacgtcttagcttctctaatagtgtaacttaattccaatcaattgcccgtggtttaacaccgtcgt

SEQ ID NO: 250052 - DNA, 494 bp, Glycine max
  unsure (1)..(494): unsure at all n locations
gaatttccgggtcgacgcacgcgtccgtgttgatgtagatttatgcaatgccagtgtttgacatgattgaaacggtgatggtcaagaaattgggtttcgaaccaagcagaatgcttcgttttgttgtacgtaatgtatatgtggcattcactatgttcattgctattaccttcccatttttcgatggtctcctaggattttttggagggtttgcttttgctccaacaacatactttctcccctgcatcatgtggcttgcaatccacaaaccaaagagatacagcttgtcttggttcattaactggatctgcattgtgcttggcctatgtttaatgattttatcacctattggaggattgaggacaatcataattaaagccaagacctacgaattttactcnttgactctttctactcttgactcagtcattggaaagttaactatatgggaaatgtgtgtgaattatcatatgtcgctccttaatttactattg

SEQ ID NO: 250053 - DNA, 544 bp, Glycine max
  unsure (1)..(544): unsure at all n locations
gtnattccggagggntccatgaatccgactctcatagcactgccgtaccggtccggaattcccgggtcgacccacgcgtccgatcttggcttcagagtaggaaggataagatagttcatatctacatggctggggatagctggggtgggaacattgtgcaccatgttgccctcaaagccatggagtcgggaattgaagtgtttgggaatatactgctcaacccattgtttggcgggcaagaaagaacagagtccgagaagcgtttagatgggaggtattttgttggagttaaggatcgagactggtattggagggcttttcttcctgaaggggaagatagagaccaccatgcatgcaacccgtttggccccaagggcaaaagccttgaagggataacctttcccaagagccttggggtggttgctggtttaagacctggtcaggactggcagttgggttatgcaaaagggcttgagaaaggctgcccaagaagtggaactggctattcttgaagcaagcaaccggtgggtttaattagtggccc

SEQ ID NO: 250054 - DNA, 546 bp, Glycine max
  unsure (1)..(546): unsure at all n locations
cgtatttagttgtggtgtcctacncattacgcacgtactaaccgctccggaattcccgggtcgacccacgcgtccgcccacgcgtccgatccacagctattgtatgtagcaaagttctatagtattcttcaaggagaaagtggtattccaagtatgaagtggtgtggcactgatggagacaataatgttctagttattgatcttctgggacggagtcttgaagacttttttgtctactgcaggaggaagttttcattaaaaacagttttgatgttggccgatcagatgctgacaagaatagagtgcatgcattccaaagtatttacgcatagagacatataaccagatgacttccttatgggtcttgtgatgaaatcaaatcagcttatattattgatttcggactatcaaaaagatatatggaccctaacacagacgaacatattccttacagagagaataaaagcttaacaggaactgcacgctatgcaaagttgtcacactcacatgggaattgagcaaaagcttctggatgatcttgagtct

SEQ ID NO: 250055 - DNA, 513 bp, Glycine max
  unsure (1)..(513): unsure at all n locations
gtggccnnnctgcgcatgacaagaaatagtacgtctctaccggtccggaattcccgggtcgacccacgcgtccgcccacgcgtccgagagcttggaattccattaactcaccgtggcattgcaaatagtgtgagattcctcacagggcattcaaggaaaggaggatccgatcctctctttgtatcggaaaatgctgctgatccggattctaccttggtggtttacatgggcttggcgaccttcccttcacttgcacagaagctaatgcatcatggtctgtcccctcagaccccagctgcagccattgagcgaggaaccacacttcatcagcgcacggtgtttgctgaactaaaggaccttcacgagaaaattacatctgctcagctggtgtcaccaacgctgattattataggaaaagttgttgaactatcaccattttggccaattcctacaaaagaagaatcatgtttaatgcangcatgatggatgttgtcaagaaatattattgtgaag

SEQ ID NO: 250056 - DNA, 421 bp, Glycine max
ggaattcccgggtcgaccgacgcgtccgcccacgcgtccggcggcatgcaaatctttttcaaaacccttactggcaaaacaatcacgggagaggtggagtccttcgacacaatcgataacgtgaaagccaagattcaagataaggaagggattcctccggatcaacaacgtttgatcttcgccggaaaacaactcgaagacggcagaaccctcgccgattacaatatccagaaagaatcgactctgcatttggtgcttcgtctccgcggagggatgcagatcttcgtgaaaaccctaaccggcaaaacgattactctagaggtagagtcctctgacacaatcgataacgtgaaagcgaagatccaggataaggaaggtattccaccggatcagcaacgtcttatcttcgccggaaagcacc

SEQ ID NO: 250057 - DNA, 509 bp, Glycine max
  unsure (1)..(509): unsure at all n locations
agttaaggtnncttgaccatcagaatatagtaagtctacacggtccggaattcccgggtcgacccacgcgtccggtttcagtggtgctgatataacagagatttgccagcgcgcgtgcaagtatgccattagagagagcattgagaaggacattgagagagaaaggaggaaaagagataaccctgaagcaatggaagaggatgatgttgaagatgaaatagcagaaatcaaggcagctcattttgaggaatcaatgaaatatgctcgaaggagtgttagcgatgccgacattcgcaagtaccaagcatttgcccaaacattacagcagtcaagagggtttggaagtgagttcaagtttgcagattccaccttcagtggtggtgctgccaccgcatctgatccatntgcttctgctggtggagctgatgaagatgatctntacagttaggtcaacttgaatggtagtaaatgccgtgctatcttagttatgtacttctcatnttgtgtat

SEQ ID NO: 250058 - DNA, 337 bp, Glycine max
taccgatctccaattcccggatcgacccacgcgtgcgataaaccctttagagcctgagggttaagaaaagttcatatcctacatgggctaaaggggtccctgtggctgttcaacattagtgcgacgcacgtatggcctcaaaggctttgcttctggacctgaaattgctaggggtatgctgctgagtccataccatgccgggctactacaaatgcttgacattactccatcagctgagacgtataatggggataaaatggaattggctgatgctgcattgcctcttcttaaaggagttgatgctacaacacgatgtggctgaagcatgcactggggt

SEQ ID NO: 250059 - DNA, 545 bp, Glycine max
  unsure (1)..(545): unsure at all n locations
cgtcttttggtgcgattcaataggccttcgctcatacactgccgntaccggttcggaattcccgggtcgacccacgcgtccgcggacgcgtggggccgctgagctacaggtttattctcacgtttctcggaatgtggaaagagatgcaagaatgttacaaatgccaatatcagcaaattgttgaagccaaaactttagatgccttatcgttaaacacaaagcctggcaatgctcatattgatgcaacaataaaactcaaatctgaggtacagaaatggaatttgagcttcttagattggattcacgcccagaggtcccatgtgaaagccttgaatggttggctggtaagatgtctattatacgaacccgtagaagtacccgatgattcaacttcctttctacctagcatgattagggcaccacctgtgtatgtgatctgtcacaaattgtcaaagggcagggataaactcttaaagaaaaatgtatttgaagcctaaatgggttcatgctacgagtgaacgaactcttagaaaagcatatttaan

SEQ ID NO: 250060 - DNA, 541 bp, Glycine max
tgttttagtagcgtatcaatgagtaaagatcagtacggcactgctcgtaccggtccggaattcccgggtcgacccacgcgtccgcccacgcgtccgattcttccatttccattaaaaagaaaatatcataaatgggtgttttcagattcgaggacgaaatcacctcccctgtggctcctgctactctttacaaagctctagttacagatgccgacaacatcatcccaaaggctcttgattccttcaagagtgttgaaaacgttgagggaaatggtggccctggaacaatcaagaagataactttcgttgaagatggagaaaccaagtttgtactgcacaagatagaagcagttgatgaggcaaacttgtgatatagctacaagcgtatgggtggtgctgcgttgccagacacagcgggagaaaatcacattcaattccaaatggcttgttggtcccaatggaggttttgtggcaagctaacggccgatcccaaaccaaggagatgctaagccaatcaagaccactaaaactgaaaaagcaa

SEQ ID NO: 250061 - DNA, 335 bp, Glycine max
accgctccggaattcccgggtcgaccgcacgcgtccgctcgtcctccgccttcgcggtggcatgcaaatcttcgtcaaaaccctaaccggtaaaacgagtacgctagaggtcgagtcctctgacaccatcgataacgtgaaagctaagatccaggacaaggaaggcattccaccagaccagcagcgcttgatcttcgccggaaaacagctcgaagacggcagaaccctcgccgattacaatattcagaaagaatcgacgcttcatctggtgcttcgactccgcggagggatgcagatcttcgtgaagacgctcaccgggaaaactattactctgg

SEQ ID NO: 250062 - DNA, 360 bp, Glycine max
ggaattcccgggtcgacccacgcgtccgtctcacacaacaaacatatctcttgctcttctgtccctcaatggaaggatcaggatccggggtggtgacagtctacggcaacggcgccatcaccgagaccaagaagtcccccttctccgtcaaagtcggcctagcccagatgctccgcggcggcgtcatcatggacgtcgtcgacgccgagcaggcccgcatcgcggaggaggccggtgcctgcgcggtgatggccctggagcgtgttcccgtcgacattcgggcccagggcggcgtggcccgcatgagcgatccgcagctcatgaaggatatcaagcgggccgtcaccatccccgtgatgg

SEQ ID NO: 250063 - DNA, 506 bp, Glycine max
  unsure (1)..(506): unsure at all n locations
tgtaaggtgctgaggcatcgaatanagtacgcctctatcggtccggaattcccgggtcgacccacgcgtccggccatgtattcttcattgtacttggtacataagagtggctattctgttatggactctgggggataccaattcacatgcatttgacttgatatttcatcttgttgaattggtgtactataacacggcattgaccttggtttgtatattttgcagaagtctcagataaagcttctcacaaagcattttctttggaagacaagcagaaacttgataggcagttgcatgatatggctttagccattgagaggttggaaagcagtaggcagaaacttctaatggagattgactcacaatctactgaaatagagaggctttttgaggaaaattctaatctctcaaattcgtaccaagaggcagttggggcagcagcaagatgggaaaaccaggtaacaatcagcatcaggggtttggccataaatataatttatggttac

SEQ ID NO: 250064 - DNA, 511 bp, Glycine max
  unsure (1)..(511): unsure at all n locations
ttgagggntncttgacccacgctagancgcctngacttaccggtctcggaattcccgggtcgacccacgcgtccgcccacgcgtccgcacacagctagcagatattacatacacgtgaatcactaattaagccatggagaagaaatcaatagctgggttgtgcttcctcttccttgttctctttgttgctcaagaagttgtggtgcaaactgaggcaaagacttgcgagaacctggctgatacatacaggggtccatgcttcaccactggcagctgcgatgatcactgcaagaacaaagagcacttgctcagaggcagatgcagggacgattttcgctgttggtgcaccaaaaactgttaaatggatccattcactccaacgtgaagaagatgcatgcagcgctattttataaaaaataaaactactatatactatatataataagactggcgctgcatcaatgacctatgtattatagtatatattattaccgatgtcagaactatagan

SEQ ID NO: 250065 - DNA, 545 bp, Glycine max
aggtatagtgggtggtgtccctagcattactgactacgcactgacgtaccggtccggaattcccgggtcgactccacgcgtccgcaaaatgactcaagcccagattcaaccagttaaacttggaacccaaggctttgaggtactgttaactacattacttgctcttattttgataattgatacaattaatctcattctaggtttcaaaattgggattcggatgtatgggccttactggagcgtacaatgaccctctccaagaacaggatggcatatctgttatcaagtatgcgttcagtaagggaatcacattttttgatactgcggatgtttatggaaccaatggctatgaaactttggttggaaagggtttgaaaccacttgccaaaggaaaggatcagattggcaccaaatttggtattgcttcacgagggttttctggaattaaagataaaggttcggcttaatattgtgcgatcaatgctttaaactaggttggagccttttgatgttgaatacattgatctgtaattatatcacaaaac

SEQ ID NO: 250066 - DNA, 395 bp, Glycine max
ggaattcccgggtcgacccacgcgtccgtgaacacatcaataggcttgtggctgcaagacttcagtttgatgtcatgggggtggaaactgttttggtggcaagaacagatgcagaagctgctaatttgattcaatcaaacattgacacaagggaccatcaatttatcttgggagtgaccaaccccaaccttaaagggaagagtttagcaactcttatgcaacaaggcatggctgctgggaagagtggagctgagcttcaggctttggaggatgagtggctctcaaaggcacagttgaagactctctcagaagcagttgtggaggcaattgagaggcagaacattggagaggaagagaagagaaggaagctgaatgagtggatgcaccattcaagc

SEQ ID NO: 250067 - DNA, 505 bp, Glycine max
  unsure (1)..(505): unsure at all n locations
tgcaactgtgctgtataatgatagaagtaagcctctaccggtccggaattcccgggtcgacccacgcgtccgaagacattgtttggtttggttacttgctcgaatttcctcgaatcgcttaatttgtattggattagttaaaccgcaacgcggaatctcttttctcgaactggctaactctcaggcaagtggttcggacgctgattccagcaacaagcggctggtgctcgcactgtatgacgccctaaactccggcgactccgacgccgtcgtcaagatcgtcgccgccgacctcgagtggtggttccatggtccgccctcacaccagtttttgatgcgcatgctcaccggcgactccgctgccgacaactccttccgcttccttccgcagtccatcgccgccttcggctccaccgtcatcgtcgagggctgcgacaccgnccgcaacattgcctgggtccacgcctgcaccgtcacggatgggataattactcagatcagagag

SEQ ID NO: 250068 - DNA, 538 bp, Glycine max
gttttcggctgttcaatgaaatgatactcatgcactgccgtaccggtccggaattcccgggtcgacccacgcgtccgcccacgcgtccgcttgaatcttcgttatccttctttttttctccttgaactcggatattgactatggcagatgaggtggttctgctagatttctggccaagtccatttgggatgagggtcaggattgcacttgctgaaaagggtatcaaatatgagtccaaagaagaggacttgcagaacaagagccctttgctcctcaaaatgaacccggttcacaagaaaatcccggttctcatccacaatggcaaacccagttgtgaatctctcgttgctgttcagtacattgaagaagtctggaatgacagaaatccccttgtgccttctgacccttaccagaaagctcagggtagattctgggcttgactttgtgacaataagatatttgatctttgaagaaagatttggacattaaagggagaagaaaaaagagctgccaaaaaggagttcatagaagcccttta

SEQ ID NO: 250069 - DNA, 539 bp, Glycine max
gtattcgagcgtgtccctgaaactacgctcatgcactgacgtaccggttcggaattcccgggtcgacccacgcgtccgcaagatggttctgctagagaagctctgggatgacgttgttgctggccctcaacgtgagcggggccttggcaagctcagaaaactcaccaccctcaaaactattgatgaaggagacagtagcaagctgcagaagacgttgtcgatgccgtcgacaccgacaaccccgatgactgccacgactacaacgacaccgggatccgctcgtaaagctgacaacttttggaggagcgtcttccatcctgggagcaacatacgcacagataccaactgtgctcaaatgattgacaaacccctttgcaacgcttccaatggctacgactggctttacagtggggataccagaatccaggacacgttgaaggattagcttgtgaaactcgcgggtggatggtaatgatagcgcttttagttagcgactggcgagcttggatggattgtacattattcggacgaaataaatg

SEQ ID NO: 250070 - DNA, 548 bp, Glycine max
  unsure (1)..(548): unsure at all n locations
gattttacgtcggctgttcccacgcatagattgtacgatagcactgccgtaccggtccggaattcccgggtcgacccacgcgtacgcaaaattcaaggcgtaattgaagctggagtttgtagccggcgaggtgaccttgggatgcgcccttccaattcagtgcttattcctgctcttcagactgatggaaatattgatactggagatgaatatcatacacaggtcatgattgaccatcaagctctcacacgtacatagaatatgttgactaatgcttatcttatgagcatattctatcgaaccatgctggaccatatgagacataacactagggaacagaaagcactatcacgatgtaatcgatgctcggactaatgactactcagtgcatacgcttcacaatgctgaataggatatcaatagatangctgattcgtcaatcatggatgctacctacggtggaacttatgaacaaactgagctcctggttaggcaaaagttgaataagcccttgcgcgatcaaattatttgtgcatatccttagattg

SEQ ID NO: 250071 - DNA, 411 bp, Glycine max
  unsure (1)..(411): unsure at all n locations
cggaattcccggtcgacacgctccggatatgaaagcttacgtttttggtgaatgtctggcaaggatgtaaacctgagatttgtacatntaattctttaaataatggactttgcaagaatcataagaatggagaagccttgagtttatatcatgacatgttcttggaaggggttattgctaacactgtaacatacaacacgttggttcatgcatttcttatgagagattctatccaacaagcatttaagcttgttgatgaaatgctatttaaagggtgcccttttgacaatattacatataacggccttatcaaagctctgtgtaaaactggggcagttgaaaaaggattgggatnngttgaagaaaatgcttggaagggatttttnctactattatctcttgaatatactg

SEQ ID NO: 250072 - DNA, 447 bp, Glycine max
  unsure (1)..(447): unsure at all n locations
ccggaattcccgggtcgacccacgcgtccgcacacacacagctagcagatattacatgcacgtgaatcactaattaagccatggagaagaaatcaatagctgggttgtgcttcctcttccttgttctctttgttgctcaagaagttgtggtgcaaactgaggcaaagacttgcgagaacctggctgatacatacaggggtccatgcttcaccactggcagctgcgatgatcactgcaagaacaaagagcacttgctcagaggcagatgcagggacgattttcgctgttggtgcaccaaaaactgttaaatggatccattcactccaacgtgaagaagatgcatgcagcgctattttataaaaaataaaactactatatactatatataataagactggcgctgcatcaatgacctatgtnatatagtatatattaataccgatgtca

SEQ ID NO: 250073 - DNA, 501 bp, Glycine max
tctgtgtggcatcgaatgaagtatgtcctgcacggtccggaattcccgggtcgacccacgcgtccgcccacgcgtccgcgcagccttttcaccaaattgtcgaccaaccatcttcgttatttgcaggtttggtttcctttgaattacaatttacaagacaaggaaggcagcctcggatgttgttgttgtcgtcgtcgtgttcttaggttttgttctgagacgcagtttttcattcttctaatggcccagtccttcggtcagaccgagatcaactgggacaagctagataaaactagattctatgtcgtaggagctggactctttacaggtgtttcggtggcactttatcccgtttctgttgtgaaaactaggctgcaagttgccacaaaggatgctgtagagagaaatgtgttttctgttgcaaaaggactacttaaaacagacggcatccctggtttgtatagagggtttggcacagttatcactggtgcaattcctgcc

SEQ ID NO: 250074 - DNA, 504 bp, Glycine max
  unsure (1)..(504): unsure at all n locations
tgggtgctggccatcgattatcgtacgacctaccggtccggaattcccgggtcgacccacgcgtccgcctaattccccaatcaatcatctttacgtgtttgttcgagaccatggccaaaagcccctgcaagcttgaacatcccttggaaagaaggcaggctgagtctgctcgcattagagacaagtatcctgatagaatacctgtgattgttgagaaagctgaaagaagtgacatcccagacatcgataagaagaagtaccttgtcccagcagatttgactgttggccaatttgtttatgttgtccgtaaaaggattaaggtcagtgcagagaaggctatttttgtttttgtcaataacactctacctccaactgccgctttgatgtcttctatttatgaggaaaataaagacgatgatggttttctttacatgacttacagtggagagaacactttcggttctcgctagggtcaaatttaataatatatgagatcctctgtan

SEQ ID NO: 250075 - DNA, 508 bp, Glycine max
  unsure (1)..(508): unsure at all n locations
ggtaaggcnntnntgatagtggggggaagtatggatcacctcgtccggaattcccgggtcgacccacgcgtccgnccacgcgtccgcttatattcatcgttgtattggagtctgccatcgggatatcaagcctgaaaagctattggtcaatccacacactcaccaagttaaattatgtgacttggaagtgcaaaggttttgggtaaaagcgaaccaaatatatcatacatatgttctagatactatagagcacctgagctcatatttggcgcaactgaatatacttcagccattgacatctggtctgttggatgtgttttagctgagctgctgcttggacagnctctgttccctggtgagagtggagttgatcaacttgttgagatcatcaaggttctgggcactccaacaagggaagagattaagtgcatgaaccctaattatacagaatttaaattcccacagattaaagcacatncatggcacaagatcttccattagcgcatgn

SEQ ID NO: 250076 - DNA, 561 bp, Glycine max
  unsure (1)..(561): unsure at all n locations
agttttatgagttttccgtgnnntgtnaactaaacactacngcgatagcactnccgtaccggttctgaattcccgggtcgacccacgcgtccggcttcaggtaaatatcatatgcgggaaatgtacgaatggacactgtaaaggtcgggctggatgcatatgtaatgtcacaaatgaatcaaactgctgagttttaatagatcttgcaattccatgtgataaaccgttccctgcactatttcaaggcttcactggtggcattcattcaagatcatgggatctagtatataatggcatgacccaaattggttttgagaaaccccaccatgagtctagctttcatacagggcaaactcaagtagttctgggtatcactgaatttaatctacttaatatgctggctcacatgcctaatttaaaagataacgactatgaactagtattgactaggacttgctctcaaatggagacctatttcaacagaggtaccctaaatagcgaatgataactgtagatgccaggacgtgcccttatagcctaaattaaggtcatatcacaaag

SEQ ID NO: 250077 - DNA, 542 bp, Glycine max
tgtttaaggtgactgtccctgcttcagttgtcattcactgacgtaccggtccggaattcccgggtcgacccacgcgtccggggaccactgttgttggacgggaaggagtacaccgtgcccatggccaccactggggggtgtctcgttgcgagcaccaacagagggtgcaaagctatccacgtctccggtggggcctcctcggtgttgctcagagatggcatgaccagagcacccgttgttcggttaccctccgctcagcgcgccgcgcagttgaagttcttcttggaggatcctctcaacttcgattcgcttgctgtcgttttcaataagtcaagcagaattgccaagttgcagaacattcagtgtgctattgcgggcaagaatctgtacatgagattccgatgcaccactggtgatgccattgggatgaacattgtgtcaaaaagtgttcaaaaatgttcttgattttcttcaagatgactttcctggattggattgtatttgaatctcttgcaatttctgttcggacaataaaaccgcaa

SEQ ID NO: 250078 - DNA, 557 bp, Glycine max
  unsure (1)..(557): unsure at all n locations
ggttnttgagttntaggtgcnctgtaccatgagacaggatcataatgactgctctaccggtccggaattcccgggtcgacccacgcgtccgaattaaactaattgcaaagatgaataccaagccctttttctccttgtgcttactctgcgcactgcttctcatctgtgttgtggcaactgagccatccaaagatgcgacacaagcagaagaaccaaagacacggccagatgcctggagaagtggtggaagtggaggacatggtggaagtgggggacatggtggaagcgggggacacggtggaagctggggacatggtggaagctggggacatggcggtggacatggcggaagatgcaaatgctgcggtcgaaagggctgcaaatgttgctgaaagtaaaaaacacaaacatgaactgaagacacacatacgtgtgtactccatgtaataagtatagtatgtagaattaagaaaataaagcatggaatctatattcgtgctcaggctggcatatggtgacccggttttcatcaaccatgcctgtannttgacacatcc

SEQ ID NO: 250079 - DNA, 424 bp, Glycine max
  unsure (1)..(424): unsure at all n locations
gaatttccgggtcgacccacgcgtccgataaaagaccatgtcggtgaaggagtgcgagcaccacaaggggaagaagaggaagatctttcggcaagtgttctggtgcttagtggtgttccttttcatcgtgctggtcacaattcttttgatatgggcaatccttagacccaccaaacccaccttcacgctccaagacgtcaccgtctacgccttcaacgccaccgtggcgaacttcctcacttcgaattttcaggtcacgctcatctcgcgtaacccgaacgaccgcatcggtgtttactatgatcgcctcgaaaccttcgtgacctaccggagccagcaggtcacgtaccgaaccgncatcccttcgacatatcaaggccataaagagatcaatgtttggtctccgtttgttatggcaccaaca

SEQ ID NO: 250080 - DNA, 461 bp, Glycine max
ggaattcccgggtcgacccacgcgtccggccgcggatattcaaccccttgtttgcgacaatggaactggaatggtcaaggcaggattggctggtgacgatgctcctagggctgtctttcccagtattgttggccgacctcgacatactggtgttatggttgggatgggtcaaaaggatgcctatgttggtgatgaagcccaatccaaaagaggtattcttactctcaagtatcccattgagcatggtatagtcagcaactgggatgacatggaaaagatctggcatcacacattctataatgaacttcatgttgctcccgatgagcacccagtgcttctcactgaggcccccctcaacccacaggccaacagagaaaagatgacccaaatcatgtctgagaccttcaatgtgcctgccatgtatgtggccatccagactgttctctccttgtatgcgagtg

SEQ ID NO: 250081 - DNA, 548 bp, Glycine max
  unsure (1)..(548): unsure at all n locations
gttattccgtgtactagtcctagctttgattcgtcatcgcactgccgtaccggtccggaattcccgggtcgacccacgcgtccgcccacgcgtccgatatattccattctctctgtgtatttccctacctctcccttcgggatgcagatcttcgtcaagaccctcaccggcaagaccatcacccttgaggtggaaagctctgacaccatcgacaacgtcaaggccaagatccaggacaaggaaggaatccccccggaccagcaacgtctcattttcgaccgaaagcaacttgaggacggacgtacccttgctgactacaacattcagaaggagagtgcattttacctcgggcttcgtgtacctcgtcggattgcaaatcttcgtaagacccctaaccgggaagacaataccctagaaggtgaaaagttccacgccatcgattacgttaaaggccagattcaagaccaggaaggtattcccccggaccaactacggctgaatttcgacggaaagcagcttgaggaccggcggacccttgncgactacaa

SEQ ID NO: 250082 - DNA, 556 bp, Glycine max
  unsure (1)..(556): unsure at all n locations
ggttttnagaattccgggtgnnctgttattgactcgacagtattttgaacggccgtaccggtccggaattcccgggtcgacccacgcgttcggcggttttgcgttcttcatattctacctttcgccaggtcaagaacccccaaaaccctaggagaaacgctggcggcaccggttctcgattctcggtggtgggaaaccgcccgtctctggtcccgaaatcgaatatctgctattttttttcttctctcgctctgatttcgattggcagttctaggggttctgtggttctgatttgggggtttcggaaatgggaagcagaaaggaagaagagaggaacgaganaattattagaggtctcatgaagcttncgncgaatcgaagatgtataaactgcaacagcctgggaccacaatatgtatgtacgagtttttggactttcatttgtatgacatgcagtggaatacatcgtgagtttactcatcgtgtgaagtctgtgtcaatggcaaaagtcacttcacaagaaagtgatgctcttcaaaatggaggnaccaacgtg

SEQ ID NO: 250083 - DNA, 371 bp, Glycine max
gaattccgggtcgacccacgcgtccgggatatctctctattacatgatcgatcattcatagcatagtgtgaaatttgagcgagacgctaagaagaagaagaagaagaagaagaagaagaagatgctcgagaagatgggggtgaacacgaaagccgaggccgccagggctcgtaagagcgcggcggatacggagcggaaggagaaggagagtcgagagaaggaggaccagtactggctagaggcggaaggttcaaagtcacgcgccgcgaagaagaaggaggaagaggccgaaaagagggcggaagcagccgcgcggaaagcggatgcgcgacggttggcggagcatgaggagaaggagctggagaagtcga

SEQ ID NO: 250084 - DNA, 392 bp, Glycine max
cggaattcccgggtcgacccacgcgtccgctggattgttccaaactatacagagggaagcgcaattgattctttttgtgtgtttgactgtgatcaatcagttggatatcgcatagaggattgtgttgccttgaggggaaactcagtttttgactcactaaaagtaagtagccaaacaatttctcggggtcctgttgaagttgattcctttgataagttaccaacttcactcaataaaaacccattaacaagccaaacagagcgacaaagattgcaattacaaaaggttcaattatcaaatctggtcagtggggatacggaacaccaggaagagtctgccatggctgacgccagtcctagaactgatatttctacagatgttgacactgatga

SEQ ID NO: 250085 - DNA, 547 bp, Glycine max
  unsure (1)..(547): unsure at all n locations
cgtantttcggtgantgttcctgggccctcagcccgtacgtaccgctccggaattcccgggtcgacccacgcgtccgcccacgcgtccggcgacgccgtttgggtcctcttccacctcgccttcttctcccaatgccttccctccgcctgggcccactcggcgatcctcctcccgggtcaactcgcccgtgactcaccgcagagctgccccgcccctgaccccaacctctactacaagccagtcatcggaatcgtcagccatcccggcgacggcgcctccggccgcctcagcaacgccaccggcgcctcctacatcgccgcctcctatgtcaaattcgttgaggccgccggcgcccgtgtcgttcccctcatctataccgagcctccggagaagcttctcaagaagctcgaattggtaaatggggttctcttcactggtggatgggctaaaagtgggttatattttgaaactgtcgacaaaatatttaagaaaattttagaagagaatgatgctggagatcatttnccattatttgccaccctgcta

SEQ ID NO: 250086 - DNA, 554 bp, Glycine max
  unsure (1)..(554): unsure at all n locations
ggttttagggtctcggnnnnnnnaccctgcnncactacgcacgctcgtaccgctccggaattcccgggtcgacccacgcgtccgcccacgcgtccgtagaaattagggttcatatctcatttcctctgatttcatctcagatttcgccttcgttcgtatcgaagaagaagaagatggggaaacagattgtgccggtgaaatcagtgatctacgcgctctcccctttccagcagaagataatgccgggtctctggaaggacttgcccacaaagattcaccacaaggtctccgagaattggatcagcgccactctcttgcttggtcccctcgtcggaacctacacgtatgttcagaactacctggaaaaggagaagctgtctcacaggtactgaactcatgcaagagctgattggataaccttctaggttggtgcttgatcttgttagccaccccataatgtgacacttgtgaaccttgttctacggttggttttgaaatggctgaatttgagccttttaaaccttgacaggggttattggagggctatttcattc

SEQ ID NO: 250087 - DNA, 513 bp, Glycine max
  unsure (1)..(513): unsure at all n locations
agagatggtnctgagactcgaaatagatagttatgcctctaccggtccggaattcccgggtcgacccacgcgtccgaccacaccaccccttcttccttttcatcaggtttattccttttcttttggttcaattttgctgaatggagagtgcaagaatcagcaaatggttaaatcttctagtttgtgtactgctattgcttaaggcagaaggatctcttgttccattgactttggtgaagaatgcagaatcaaaaggagctgtttgtttggatggaagccccccagcataccactttgacaacggatttgaagaagggattaagaactggattgttcacattgagggaggaggatggtgcaacaatgtagagagttgcctttaccgtaaggatagtcgcttaggttcatctaagcaaatggaggatctttacttttctgcaattttaagcaacgaacaagagtataatccagatttctacaattggaatagagtcaaggttaggtactgtgatg

SEQ ID NO: 250088 - DNA, 509 bp, Glycine max
  unsure (1)..(509): unsure at all n locations
tgagtgcnncttcccatgaaagtaanggtaagcctctaccggtccggaattcccgggtcgacccacgcgtccggtgaagcttcatggattttggtatagtccctacactttgagggtggtatggaccttaaagttaaaggatataccatatcaaaacatagaagaagaccgctacaataagagtcttcaacttcttgaatacaacccagtatacaagaaaactccagtgcttgtccataatggaaaacccttatgtgagtccatgcttattgttgaatacattgatgagatttggtcacataattcattacttcctgctgatccctacgagagagctctggcaaggttttgggttaaatatgctgatgatgacatgttttctgcagttattgcattcttccttagcaataatgatgaagagcgagaaaagagcatagagaagatatgggagcatctcagggttgttgagaatcagtgttttggtgatcagaagaaattttttgggggag

SEQ ID NO: 250089 - DNA, 533 bp, Glycine max
  unsure (1)..(533): unsure at all n locations
agaagtggggnnnnnnaactagancctttgcactcacgtaccggtccggaattcccgggtcgacccacgcgtccgttttcttagttccatggctttgaagatgaaagacaaatttgacaggtactggagcaagtgcagtttacctttagctgtagctgcagtcctggatcctcggtttaaaatgaagttggttgagtactacttctccctaatttatggtagcactgctctggagcatatcaaggaagtttctgatggtatcaaagaactttttaatgtgtattctatctgttcaactatgattgatcaaggctcggccttgcctggcagcagtttacctagtactagttgtagttccagagataggctaaaaggctttgacagattccttcatgagacatcacagggtcagtctatgatatcagacttagacaagtacttagaggaaccaatctttccacgcaattctgaatttaacatattgaactggtgaaagtccacatgccaaagtaccccaattttgtctattatgn

SEQ ID NO: 250090 - DNA, 531 bp, Glycine max
  unsure (1)..(531): unsure at all n locations
tgggaggtgtactgtccatccgaacatagttcngatctaccggtccggaattcccgggtcgacccacgcgtccgctctctctctctgtctctctctctctagacttagattttgtgaatggctgaagtggaagagggacaggtcatcggcgtccacaccgttgatgagtggaagctgcaactccagaatgcaaaagactccaaaaaactgattgtggtggattttactgcttcctggtgtggtccatgccgttttatggccccagttcttgcagagattgcaaagaaaactcctgaattgatcttcctcaaagtggatgtggatgaagtgaggcctgttgctgaggaatattccattgaagccatgccaaccttcctcttcttgaaagaatgcgagatcgtggacaaagtggttggtgctagtaaagatgaccttcangccaccatagccaagcatgcatctgcttgtgctgctgcttcttcttcttgaagtgaagtatcataatatgaaagaagacatagaataatgctn

SEQ ID NO: 250091 - DNA, 439 bp, Glycine max
gaattcccgggtcgacccacgcgtccgcccacgcgttcgcaggcttattatctggctctgctcttcccaattgagaaggcccccactaagagaattgcaagtgtaaatggtggggtgaagatatctgaactgttgaagtatccggttagaggctttgtctttgagggcggcgaaatgctggaagatctatcaaacgttgtttcagatgcatgtatatgtcttcacaacaacaacatacctttcaatgttcttatctctgactgtggaaagcaagtgtatctgttaccacagtgttatgcacagaaacaagctcttggagaagtgaatgctgagcttcttgacacccaagtgaatcctgctgtgtgggaaattagtggacacatggttttaaagaagaagaaggattatgatgacgcgtctgtaagcaatgcttggaagc

SEQ ID NO: 250092 - DNA, 531 bp, Glycine max
  unsure (1)..(531): unsure at all n locations
tgttagcggtntactgcgtttagtncagtancgactgacgtaccggtctggaattcccgggtcgacccacgcgtccgaagaaagaaaaccctagcttaccttttcaactttcaagatgcaaatcttcgttaagacactcactggtaagacaatcacccttgaggtggagagttcagataccatagataatgtaaagtccaagattcaagacaaggaagggatcccaccagaccagcaacgtctcatttttgctggcaagcagcttgaggatggacgtacacttgctgattacaacatccaaaaggagtccactcttcacttggtgctccggctccgtggtggaatgcaaatctttgttaagacattgaccggaaagacaatcacccttgaggtcgagagctctgacaccattgacaatgttaaggctaagattcaggacaaagagggtatcccaccagaccaacaaaggcttatctttgcaggaaagcagctagaagatggcagaaccttggctgattacaatatccagan

SEQ ID NO: 250093 - DNA, 417 bp, Glycine max
ggaatacccggctcgagccacgcgtctcgtccacgcgtctcgcccacgctgtccgccttcgcgtctcgaccacgccgtccgctggatgtgcggcgcctgtgtccctacattcctatctgagtgcgactactagttaaggtgtttaccagcaatgactcgcatgttaaacttactggctatgaaaataaagtgcctgattggtttaaaattgatagagtttcccttgaattcaatgactataagcttgtgttctgtgcaactgatgatagcacgtttgatgatattggcgctcatattgatggtgaatgaaacaggcgtctggaggagactgagaataatgatccagtattggttcactttaagaaacttgaagttgaatcatcagctactgcttgaggtggccttaaaaaatcatgt

SEQ ID NO: 250094 - DNA, 322 bp, Glycine max
gaattcccgggtcgacccacgcgtccgctacaaattttcaatttttcaatggcgtctttgcttcaaaaagaggatcgagctgatgggggtgcgaaagttgctgcgaaagaactcgaacaactcaaccgagaaaaagaccgtgatttcagtgttggtgttgcagaccaacaccaacaagaataacatcagttagatcaacaaaagccttgtgtaatccgatccatgttcaatgcggtgcaagacacctactagaacgccaaggaagctgtcgttggcaagaaagaaccttcgactacgactaactcgtacagtaccatagagg

SEQ ID NO: 250095 - DNA, 414 bp, Glycine max
aatacccgggccgaccgcacgcgtccgtatctctacctccctcaaacagtttatgctttctcttgttccaatggcttcctcaggtaggctcttatttttgtgctttctctcattgttcatctctttctccatagctcaaccctctttcagaccaaaggcacttgttcttcctgtcaccaaagatgtttctgcctcagttcctcagtatgttacacagatcaaacaaagaaccccacttgtgccagtgaaactaacagttgatcttggtggtggctacttttgggtgaactgtgaaaaaggctatgtctcatcaacctcaaaaccagctcgttgtggctctgctcagtgctcacttttcgggttatatggttgcaatgttgacgacaaaatctgtagtcgttctttaagcaacac

SEQ ID NO: 250096 - DNA, 548 bp, Glycine max
  unsure (1)..(548): unsure at all n locations
agttagattgtgagnccatgaactatgnactcnactgatcttactggtctggaattcccgggtcgacccacgcgtccgaaaaaaaaaaaaaaaaaaaaaaaaataaaattaaaaaaaaaaaaaaaaaaaaaaaaagaaagaaaaaaaaaaaaaaaaaaaaaaaaaaaaaaaaaaaaaaaaaaaaaaaaaaaaaaaaaaaaaaaaagaaaaatagattatattttatatctctactaatttattcttctaaaccatttaaaatttttatgatcttatcaaacatataatattatttctgaattagttaatatacaatacagacatcgcttttcttgtttccataatgagtctatttgctcaattgttattggctatttagcatgttcattaagcttatatttcattgttatttatacttttaatagcatctttgatgtttacaatggtcttttgtctaactccttatggtttataaatatatctcattaccttagttataacttttttttctatcattgtcaatttttgtattttatttttactttttg

SEQ ID NO: 250097 - DNA, 458 bp, Glycine max
gaatacccgggccgaccgacgcgtccgctctgattggagtaaatggatatgttcaatttaaattcatgaagggattcagtgcggatggaaagatgatgtacgaggaagcaagccaagttgctaatgatgcagttggaagcataagaacagttgcttctttctgtgctgaagacaaggttatggaactatacaagaataaatgtgagggccccatgaaaacagggatactgcaagggttgatcagcggatcaggatttggggtttcatttttcttactgttttgtgtttatgcaaccagtttctacgcaggagctagacttgtggatgctgggaaggcaacattctcagatgttttccgggttttctttgcattaactatggcagctattggagtttcccaatcaagctcctttgctcctgacttaagcatagccaagtcagctactgcttccatattt

SEQ ID NO: 250098 - DNA, 459 bp, Glycine max
aattcccgggtcgacccacgcgtccgagctagcagatattacatacacgtgaatcactaattaagccatggagaagaaatcaatagctgggttgtgcttcctcttccttgttctctttgttgctcaagaagttgtggtgcaaactgaggcaaagacttgcgagaacctggctgatacatacaggggtccatgcttcaccactggcagctgcgatgatcactgcaagaacaaagagcacttgctcagaggcagatgcagggacgattttcgctgttggtgcaccaaaaactgttaaatggatccattcactccaacgtgaagaagatgcatgcagcgctattttataaaaaataaaactactatatactatatataataagacttgcgctgcatcaatgacctatgtattataagatatattattaccgatgtcagaactatagatgcatgtactgtgca

SEQ ID NO: 250099 - DNA, 528 bp, Glycine max
  unsure (1)..(528): unsure at all n locations
agttagatgtagtgtccatcagtacatagatcgcatgcacggtcctgaattcccgggtcgacccacgcgtccggggtgaacttaagaaattggtcgaagagggtaaagtcaaatatattggattatctgaagcgagcccagatacaataaggagagcacacgcaattcatcccatcacagctgtgcaaatagagtggtctttgtggactcgtgacattgaagaagagatagtccctctctgcagggaacttggtattggaattgtaccatatagtcctcttggtcgtggcttttttggcggcaaaggagttgtggaaaatgtgcctacaaatagctccctgaaagcacatncacgctttcaagccgagaacttagacaagaacaagaatatatatgaacgaattgaatgccttgctaagaagcatcangccactcctgcccagttggcaataacatgggtacttcaacaaggcgaggatgttgtacctatcccttgaacaactaagattaagaacttgatcanacatt

SEQ ID NO: 250100 - DNA, 534 bp, Glycine max
ggtaagatgtgctgcgccatcgcaataaagtatggtagctaacggtccggaattcccgggtcgacccacgcgtccgcccacgcgtccggtacggaggtggaagagacttggatgactttgtggcttttatcaatgggaaagctggaacaagtcgagatgtaaaaggacaacttacttcccaagctggtatagtagaaagcttggatgtcttggttaaggagtttgtagctgccagcgatgaagagaagaaattcgtgtttacccgaatggaagaggaagttgagaagctgaagggttctgcctcaaggcacgggaagatttacttgaaagctgccaagaattacttggaaaaaggttctgattatgctaagaacgaaatccagcgcctacagcgcatacttgacaagtccattagtcctgccaaagccgacgagttaactctaaaggaaaatatcttgtcgacatatgcgggttgactttttggtgcatcattaaccatctctcatgcaagctcgtgatcaatcgcaagttctt

SEQ ID NO: 250101 - DNA, 378 bp, Glycine max
gaccgcactcgtccgatcatgcatagttttgaggctatgtatcattttgcagtggctgtggttgtagatcgaaggcttagtgttaaatgcaaagtggtgattgatgcttttcgattgatcaatccgcagacaatgatgctctttcaagaaccaaggtagacaacatccaatctcatacatctgaataaaccattcattcaagcattgatccatcggttgaaccttcattactattccatacccattcattacaggaagaatgaacttcaagagatgatgttgcttaatcttcacatgaagaaatggactgatggtttgacacttttgcattatgatacacattccaaaacttatgaacagactgtacaggaaattgct

SEQ ID NO: 250102 - DNA, 471 bp, Glycine max
gaattcccgggtcgacccacgcgtccgtgcaaaacgagaagtatccaacaattactatcacccgtgttgctatctgtctttgcgttggattcctttactacgcggctgaaggagccaaggttagtttcaataacaagtgctcatacacggtatggccaggaaccctaaccggtgaccaaaagccccaattatcaacaactggtttcgagttgggtccaggagcatccaactctgtggaccttccatctccatggtccggtcggttctgggcccgaacaggatgctccaacaacaacggaaggttcagctgcgccaccgccgattgcgcctacggtcaagtcgcatgcaacggtgccggtgcaatcccgtcagctactttggtagaaatcacagttgcagcaaacggagggcaagatttctacgacgtgagcaacgtggatggcttcaacgtgcccatgttcgtaaccccac

SEQ ID NO: 250103 - DNA, 462 bp, Glycine max
  unsure (1)..(462): unsure at all n locations
accggttcggaattcccggctcgacccacgcgtccgcaatatcaagactctagattcccgcatttacagttttcaagtggacaaaaagatgccggtctcgttgttcaaagagaaaattgcaaatgaaattggtgttccagttaatcagcaacggctgatatttagaggaaaagtcttaaaggatgagcacgctctttctgagtattatgttgagaatgggcatacattgcatttagttgaaagacaaccaaatcagtcgcaggcttctggtacgagttctggtgagtcaactggtacaagtggtaaccgaggaaatgatgtaggctcaggggctcctcgtaatcatgttgggcaaatttcacacagtgttgttcttggaacatttaatgtgggcgaacaaggtgaatgaattgttcatgatctcactcnggttattgggcatgttttaaactctattggaaa

SEQ ID NO: 250104 - DNA, 547 bp, Glycine max
  unsure (1)..(547): unsure at all n locations
cgttaatggcatctttaactgtaaccgacagatcagcatnaccactaccggtccggaattcccggctcgacccacgcgtccgaatacattgatttgtttcttaaaaacttcactgcaatgtctgccatatttgggcttggtggaatgctatcgtccattacagttgcacaatccataggagtttgctatggagtgattggtgataatctaccatcaaggcaagaagttgtggacttatataaaacaaatggcattggtagaatgcgtatatactacccagatgaagaagcactccaagcccttagaggttcaggcattgagttgattatggacgtggctaacgaaacccttcaatcattgacagactccaatgctgctacagattgggtcaataaatatgttacaccttactcgcaagacgtcaatttcaagtacatcgctgttggaaatgaaattcatcccaataccaatgaggcacaatttattctatctgccatgaccaacattcagaatgcaatttcatcatgcgaattacaaatttatgttn

SEQ ID NO: 250105 - DNA, 405 bp, Glycine max
attaccgggccgaccgcacgcgtccgcaacaatggtgccgcaacccattttgcatttaacctttttgtcattaataatctctcttggcacgctttccttggtcgatgccgccgatcccacatttggcttcacccctcttggattatctagtagctcaaacttgcaaatccaaaagccttacgacgttgcagtcaacgagcgctacagcttttcaaatggagtgcacagattttgggtatactccacggacaagcctcatatgcaaggcagcaatacgaagccacgaactgagattcgtatcgctggatacgattatacatccggtgtgtggcaatttcaagggtttttttacgtgcctagtggcacaagcggtgtgtgcatccaacaagtgtttggtggagtaac

SEQ ID NO: 250106 - DNA, 466 bp, Glycine max
  unsure (1)..(466): unsure at all n locations
gaattcccgggtcgacccacgcgtccgaaaaaatgaaatgaatcatttcatattgattgtattgctatgcttagtccccaagggacgagatttcgttaacaacatagaggaagaatgaaaggaatatcctatcgagggaatcatatttgcttcggaagatatgctcttcaagcacttgagccagcttggataacatctagacaaatagaagcgggacggcgggcaatgtcacgaaatgttcgccgaggtggacaaatatgggtacgcatatttccagacaaaccggttacagtaagacctactgaaacacgtatgggttcaggaaaaggttctcccgaatattgggtagctgtcgttaaacctgggaaaatactttatgaaatgggtggggtaccagataatatagcaagaaaggctatntcaatagcatcatccaaaatgcctatacgaactcaattcattattt

SEQ ID NO: 250107 - DNA, 243 bp, Glycine max
gaataacccggctcgacccacgcgtcctaaaaaaaaaaaaaaaaaaaataaaaaataaaaaaaaaaaaaaaaaaaataaagaaaaagtaaaaataaaaaaaaaaaaaaaacaaaaaaaaaaaaaaaaaaaaaaaaaaaaaaaaaataaaaaaaaaaaaacaaaaaaaaaatccaaacctaaaatctaaaaaacaaacccaaataaaaatactaacccaaacataaaaaacccaaaaacaccaa

SEQ ID NO: 250108 - DNA, 431 bp, Glycine max
accggttcggaattcccggctcgagccacgcgtccggagacatcagtgcctccttctggtctttctggtgttggtctcctactctgcgcgatcgtaatcagcgctgggcggctggagccccatcaaggacgtaaacgacagccacgtggcggagatcgccaactactcgctgagcgagtacgacaagcgttctggggccaatctcacccttgtcaaagtcgtcaagggcgagactcaggtcgattccggcaccaactaccgactcgtcctcaaagccaatgatggatccgccacggccagttacgaagccatcgtttgggacaagccttgtctccatttcatgaatctcacttccatgaaacccctttattaatcgtaaacccatactttatttcactggctctcttatcatatttcatgtgttagctatt

SEQ ID NO: 250109 - DNA, 456 bp, Glycine max
gtcttgaattcccgggtcgacccacgcgtccgcggacgcgtggcgtggatgtctctgttgtttacctcacagtgaggctggagaaagaagcgtcctacgatgaaattaaaaatgctatcaaggaggaatcagagggcaagttgaagggaattcttggttacactgaagatgatgtggtctccactgactttatcggcgatagcagatcaagtatttttgatgcaaaggctggaattgcattgaataagaactttgtgaagcttgtttcttggtacgacaacgagtggggatacagctcacgtgtcattgatcttcttgtattcgttgccaagaagtctctttaaggtgttacttcaaagtagcttgtcttcacattattaccgtatgtttatgtttagctgcgatttagtgtcttgctcgagcaaaaaatgagaggtctgaataaatcggcttctg

SEQ ID NO: 250110 - DNA, 451 bp, Glycine max
tcttgaattcccgggtcgacccacgcgtccgcccacgcgtccggaaaattggaacctgcctctgttgttaaagtttgtatttttttttgagtgggtggattgagagaactgtgcaagctttggaacttcttcaaagtctggtacttcaatggctactgaagaggttaataaacttcaatcacttcctccttaccctgagatgatagtgaaagcacttgaagccctgaatgaggctgatggatcgagtaaatcagcgatatcaaagtacatagaaaccacctacggtgagttgccagatgaaactgttttggggagtcacctgaacaagatgaaagagagtggagagcttgcgttcaaacagaacaattacatgaaagctgatccaaatgccccaccaaagaagggacgtggaaggccaccaaagccaaaggttccattgccaccaggcact

SEQ ID NO: 250111 - DNA, 532 bp, Glycine max
cgttgaatggctggccatcgaataaagtacgctgctactctactggtccggaattcccgggtcgacccacgcgtccggtttccactatcattatttgcccattaaaaatcaatttttagctctcattttcatgtttgggcaattcctccacacacaccatccaattcccgtctttgatattttaatcacagagagagaagagggtttgtttctgggttttggaaatttcagcccccatcaaagaagaagccccataatcttcgaatcgaaggcatttgattgaaaggtcgaaactttagcatctgggatcgcgcaattggggttttttttggttaaaagggtatcttcggaattcatggcaaaactgtacgtgaaggcggtgccaccggcggatctgaacaggaacacggagtggttcacgtaccctggcgtttggaccacttacatcctcatccttttcttttcttggatcctcgttctctccgtcttcggttgcttccccggcatcgcttggaccatcgttaatctcgca

SEQ ID NO: 250112 - DNA, 465 bp, Glycine max
gaattcccgggtcgacccacgcgtccggcccaacagtgtcgtttacgtgaattttggtagcatcgcggttatgacaagtgaggaatggattgagtttgcatggggtcttgctaatagcaacaaaacctttttatgggtcataagaccagatcttgtggcgggcgaaaacgctcttttaccttcagagtttgtgaaacaaactgaaaaaagaggactattgtctagttggtgctcccaggaacaagtgctgactcaccctgcaattgggggatttttgacacacagtggttggaattcaacgttggaaagtgtatgtggaggtgttccaatgatatgttggcctttctttgcagagcaacaaaccaattgttggttttgttgtaaggagtgggggattgggttggagattgaagatgttgagagggacaaaatagagagccttgtgagggagttgatggatggtga

SEQ ID NO: 250113 - DNA, 533 bp, Glycine max
  unsure (1)..(533): unsure at all n locations
gttagatgctgtccatgccaagaaggatagctgagactctaccggtcttgaattcccgggtcgacccacgcgtccggtagaaaagaaggcattaggttaagagtgatggcagtgagcgaaagagagcatagtggtgcgttactgagtgcttacagttgctgcgtcgcaaggtaccggcggcgacggagaactatcttctcaattttcgatcactgcattggttctgttgtcaagggttttgttcttcctgacttgcatacttgatggcttcaaagttgcagaagttgcaggccacagcatctcaagcgtctcaatttgtatgcagtcgtggaactaactactacaagcaattgctggaacagaacaagcaacacattcaggagcctnctacagtagagaaatgcaacctgttggcaaagcaattgttttacactcgccttgctagtattccgagtcgtaatgagtccttttggaaggaacttgattatgccaagaatttgtggaagaacaggaaagagcttaaggttgaagaa

SEQ ID NO: 250114 - DNA, 543 bp, Glycine max
  unsure (1)..(543): unsure at all n locations
cgtctatcgatcgtggctgngaagctcagtacnattactgtaccggtccggaattcccggctcgacccacgcgtccgcccacgcgtccgatttacctcttgagttaaaatgggatgatacatgtcttgataaaggtgtttcttgatctttatcattaacaaagtatatgtgaggttgtcttatgtttgattagtaagatacaagtgtctaaatattatgcttggctagaccctatctaagtttatacttgcactaattctgaaattcacatttattgatgaagaaacattttttgtttgattttcttttccagcctacaaatgagagagtacatcagattatttcaaggactgcaacatttgtcagcaaacattgaagccaatcagaaatcatcctgagggtgaaacaaggagacaatccaacttttggattcctaatgcctgatcatcatcttcatgcgtattttaagtttctcgttgatcaccaagaacttctgaaaggtgacaaagatgattggagcttaactgtagaacttaataagaa

SEQ ID NO: 250115 - DNA, 380 bp, Glycine max
aattcccgggtcgacccacgcgtccgatttgccaactaagaaaccccaaaagttgttccaaatctggatttcaaaacaaaatataggttcgccgcaacccatttgaatctctgagagaaggggcatatcaaaatcaattttttttttttctttcttcttttccctgaagagcaaatgggggcgtatagagctgatgaggattacgattatttgttcaaggtggtactgattggggactctggtgtgggaaaatcgaaccttttgtcgaggttcaccaagaacgaattcagccttgaatcaaagtccaccattggggttgagtttgccaccagaagcattagggttgatgataaagttctcaaggctcagattttggacac

SEQ ID NO: 250116 - DNA, 529 bp, Glycine max
  unsure (1)..(529): unsure at all n locations
cgtaggtgtgtnatggcatccgcatcatgnancgctctaacggtccggaattcccgggtcgacccacgcgtccgcccacgcgtccgcccacgcgtccgaaaaaagagtagatcggtttaagcttggtgaaggtgtgatgccagctagtttcaaagttcttcatgatcctattaggaaaacagatactcttattgcagattttggtgaaagtgcaattggaagagttgctccagttgattctggattctggtggataattttacttcgtgcctacacaaagtctacaggggatttatctttggctgaatcaccagattgtcaaaagggaatgaaacttatactgactctatgcttgtcagaggggtttgatacatttccaactttgctttgtgctgatggatgttgcatggttgatcgaagaatgggcatttatggctatccaatagagattcaagcacttttcttcatggcattgagatgtgctttgtcaatgctgaaacaggatgacgccgaatgaaaagaatgcgtn

SEQ ID NO: 250117 - DNA, 527 bp, Glycine max
  unsure (1)..(527): unsure at all n locations
cgtagatggcgtggaatccgtaataaagtatcgctctaacggtccggaattcccgggtcgacccacgcgtccggttttgttagttcacacactaagttctgaaaaatgagttccaaagtttttcttattctacgtatgttcatggccactatacttttgatctcctctgaggttgcacccgatgatgcataccagaattttgacaaaacagatgggaagcgtagtgcaaatggggtagatgaaagcaaatattggcgtggtggctatggcgactatggtggttggcgtggtggtggttggcgtggtggctatggaggctggcgtggtggctatggtggtgggcgtggtggctatggtggctggcgtggtggctatggtggtgggcgtggtggctacggaagttggggtggtggctttggccctaacgaacataatgaggctgggattgatgctagccctcacaactaagaaagaaacttgctaaagcttatataggatttaagttatcgtaatanataaaacttctn

SEQ ID NO: 250118 - DNA, 530 bp, Glycine max
tgaaggtgggctgtgccatagtatatagtatgcatctgctctaccggtctggaattcccgggtcgacccacgcgtccgcccacgcgtccgtctttagctgtgtatagacttaacaactacaaaggcagagtaagttaatctacatgtaatgacaagtgtcttggaagttgaaatgtgattccatttgggcaagtaggttctcctacatgaaagaaagaattgaaggtacctaaagtcactataatggttggaggaagcttcggtgcaggaaactatgcaatgtgtggtcgtgcctatagtcccaacttcttgttcctttggccaaatgctagaatatctgtaatgggtggtgctcaggctgctggtgtgctggcccaaatagagaaaggcaacaagaaaaggcaaggaattcagtggagcaaggaagaagaggataagttcaaagggaaagtggtggaggcatatgagagagaagcaagtccttattactcaacagcaaggctttgggacgatggaatcattgatccacg

SEQ ID NO: 250119 - DNA, 533 bp, Glycine max
  unsure (1)..(533): unsure at all n locations
tgttagattgttatgccatcgaatatagtatgctacgactctaccggtcttgaattcccgggtcgacccacgcgtccgtagatctctgtgaagtcgctttataacacttaacctaagatgcagaacgaggaaggacagatcaccgagctttacattcctaggaagtgctctgccacaaaccgattgattaccgctaaggaccatgcttcggttcaggttaacattgggcatgtggatgagaatggcgtctacaatggccatttctccacttttgctctctgcggcttcatacgtgctcagggtgatgctgacagtgccctagatcgcttgtggcagaagaagaaagttgaagttaagcaacagtagacacccatgatagtttgttactttgctatgtattaatttctacgcttgctagagatatttgagtactatgattgtcgtcttgagcaaatactcattctaaattntcgttggtatttggtaccgncagctaaatttgcttttttgaccaaaaaaaaaaaaaaaaaaaa

SEQ ID NO: 250120 - DNA, 534 bp, Glycine max
  unsure (1)..(534): unsure at all n locations
gttcgtgatggttgactcgactcggcctcacnactactgtaccggtccggaattcccggctcgacccacgcgtccgctcgggaagctgctttcagaaacatctatacaattgctgaatgcttggccggggaacgtattaatgcagccaaaggttcatccaatagttatgctatcaagaaaaaggatgaaattgagagagttgccaaggctaatcgttaagccaacccaacaaccagtattgtggccagaaagatttcgacctttgtacttcatttatttaaattttgaatattgtgtattacttttgatgaatttagttaatttttagttcgcgtaaggattttacatgaacgatttatttagttaatttagtttgcgtaaggattttacatgaacgatttattcagttaatttagtttgcgtaaggattttacatgaacgatttatttagttaatttttagtttgcgtaagtattttacatgaacgatttttgttcttggacgaacaaataaaattagtaatttaatttcaac

SEQ ID NO: 250121 - DNA, 533 bp, Glycine max
  unsure (1)..(533): unsure at all n locations
agattatgtgctttaactgttacgtcataacnactgctgtaccggttcggaattcccgggtcgagccacgcgtccggcaccgtggtcctgactggagtgggctccaccaatatggtgataactattgggctcagcaacggttagccatagttgatccagcttctggtgatcaacccctcttcaatgaagacaaaactgttgttgttacggtgaatggagagatctacaatcatgaagaactcaggaaacaattgcctaatcacaccttccgtacaggaagtgattgtgatgttattgctcacctgtatgaggagcacggagaaaactttatggacatgcttgatggtatattttcatttgttctgctggatactcgtgacaacagttttatagtggcacgggatgcaattggggtcacttccttgtacattggttggggtttagatggctctgtctggatttcctctgaattgaaggggttgaatgatgattgccaacattttgagtcttttccacctggtcacttgtattct

SEQ ID NO: 250122 - DNA, 477 bp, Glycine max
  unsure (1)..(477): unsure at all n locations
tcttgaattcccgggtcgacccacgcgtccgcccacgcgtccgggctcatggcattattgttgtttatgatgtcactgaccaagagagcttgaatgatgttaagcagtggctgaatgaaattgaccgttatgcaagtgaaaatgttaacaagcttctagttggaaacaagtgcgatctcacggcaaataaagttgtgtcctatgagacagcaaaggcttttgcagatgaaattggaattcccttcatggaaactagtgctaaaaatgccaccaatgttgaacaggctttcatggccatggctgctgaaattaaaaacagaatggcaagccagccagtgaacaatgcgaggccttcaacagttcaaattcgaggacagccagtgaaccagaaggctggttgctgctcgacttanagagagacgaagtatttggggtcttagaagttcatgtgtctcagtggcatctaaaactagcttt

SEQ ID NO: 250123 - DNA, 534 bp, Glycine max
  unsure (1)..(534): unsure at all n locations
tgaaagtggctatgccatcgaattacngtaccgcatcgccgtaccggtccggaattcccgggtcgacccacgcgtccgctgcctctgttccgccaagcgcagcattttcccaccgttcaggccaccggctgagttaggtttccggcgaggatgggtgctgctctgctgtcggagcttgcgacggagatagtcgtgccagtgtgcgccgtcatcgggatcgtgttctcgctggtgcagtggttcctcgtgtcgcgcgtcaagctcactcccgaccgcaacggaacgacgtcgtcgccgcgcaacaacaaaaacggctacggcgacttcctcattgaagaagaagaaagcatcaacgaccacagcgtcgttgtgaaatgcgctgagatacagaacgctatctccgaaggtgcaacatcctttcttttcactgaatatcaatatgtggggatcttcatggttgcttttgcaatactgatcttnctttttctgtgctctgtggaaggcttcagtactaagagccaaccctgcacatat

SEQ ID NO: 250124 - DNA, 478 bp, Glycine max
gaattcccgggccgacccacgcgtccgatcaatttgagggtacaaatgttatatcatttattcatgtactccacaattgctgggaaggttggaggttttgtcaaagctaaacagtacctcaacaagtgtttgtactacgttaatataggaagcaatgattacataaacaattacttccttccccagttttacctaacaagccgcatctatacccctgatcaatatgccaacattcttattgcccagctatctcagtatatgcagacactgcatgacgaagttggggccagaaaattcgtgctagttgggatgggtcttataggttgcactccaaatgccatctctacccataatacaaatggatcttgcgttgaggagatgaataatgctacgttcatgttcaatgcaaagcttaaatctaaagtggaccaattcaacaacaagttctttgctgattccaaattcatcttttataaca

SEQ ID NO: 250125 - DNA, 442 bp, Glycine max
taccggttcggaattcccgctcgagtacgcgtccgctcattgcttctctcatgttacaatcttcttgccgctgagctccctttctggtacgtgcacagagacaaaatgtacgacaggtgccaacagttcatcacgaaagaaaggactagctgagccgagatcactaactaaaacgaatctaatactaatcgaatatactaatagaatagaaatagaactgtcttttcatatagatatcccttcaacacatcataggtcatcgaaaggatctcgaagacccaccaacgcacgaaagccgggatctttcagaaaatggattcctattcgaagggtgcataaccgcatggataagctcacactaacccgtcaatttgggatccaattcggatccttaggaggtatcgggaaggaattttggaatgtaataatatcgattcataca

SEQ ID NO: 250126 - DNA, 432 bp, Glycine max
cacgcgtccgcagacactaagctctgaaatatgagtttcaaagtttttcttattctactggtgttcagtgccactatacttttgatctcctctgaggttgcacccgatgatgcataccagaattttgacaaaacagatgggaagcgtagtgcaaatggggtagatgaaagcaaatattggcgtggtggctatggcgactatggtggttggcgtggtggtggttggcgtggtggctatggaggctggcgtggtggctatggtggtgggcgtggtggctatggtggctggcgtggtggctatggtggtgggcgtggtggctacggaggttggtgtggtggctttggccctaacgaacataatgaagctgggattgatgctagccctcacaactaagaaggaaacttgctaaagcttatataggatttaaggtat

SEQ ID NO: 250127 - DNA, 534 bp, Glycine max
  unsure (1)..(534): unsure at all n locations
tggtaagcgtgctgtgccatcccgtatcgtatcgtctcgtaccggtccggaattcccgggtcgacccacgcgtccggagacaacaaagctcttcaagtagctcttgcttctcagtcagttgtgcagattggatttttgttagccttgcctatgttgatggaaattggcttggagaggggatttcgtgaggctttaagtgaatttgtactaatgcaactacagttggctcctgtatttttcacattttctcttggaacaaaaacacactattatggaaggacattgcttcatggaggtgcagagtacaaaggcactggtcgtggttttgtggtgtttcatgccaaatttgctgataactataagctctattctcgcagccattttgttaaaaggattgaattgatgattctgcttgtggtctaccatatatttggccatggatacagaggagtggttgcctatattttaattaccgtaaccatgtggttcatggtanggacatgggcttttgctccatcccttttcaattcatca

SEQ ID NO: 250128 - DNA, 320 bp, Glycine max
aattcccgggtcgacccacgcgtacggccacgcgtccgtccacgcgtccggcgagtgaccgttagcgaacaagtaccgctagggagagatgagaaggactttgaaaagagagtcatagagtgcttgaaattgtcgggagggaagcggatgggggccggcgatgtgtcccggtcggatgtggaacggcgagagcctttccgccgatcgactcgggacattgaccgacgcggattgcgatggtggcccaagcccggtctgttgatatgctcatggagacgtaattatcgcgattgtggatggcagcgcgcgcccttggcgtg

SEQ ID NO: 250129 - DNA, 479 bp, Glycine max
  unsure (1)..(479): unsure at all n locations
gaattcccgggtcgacccacgcgtccggatctctctctatctgggatctgcttccttctcttctctttctcaattctcattcataatgctaattcattcctccgatctgcgactntctatttctccctcaacacaacacgagacaacatgttcctctttgactggttctatggcattctcgcttccctcggtctctggcagaaagaagccaaaattctcttccttggtctcgataatgccggcaaaaccaccctccttcacatgctcaaagacgagagattagttcagcaccagccgacccagcaccccacttcggaggaattgagcattgngaagatcaagtttaaggctttcgatttggggggccatcaagttgctcgcagggtctggaaagactattatgccaaggtggatgctgttgtgtacctggttgacgcctttgacaaagagaggttcgcagaatctaagaaggagctcga

SEQ ID NO: 250130 - DNA, 447 bp, Glycine max
gaatacccgggctcgaccgacgcgtccgaaataaaaaaaaaatctgcttactttctattcaatatatcaattataattacataatggtagtgtcattacctacgatctgcgactttctaatttctacctcaacacaacacgagacaacatgttcctctttgactggttctatggcattctcgcttccctcggtctctggcagaaagaagccaaaattctcttccttggtctcgataatgccggcaaaaccaccctccttcacatgctcaaagacgagagattagttcagcaccagccgacccagcaccccacttctgaggaattgagcattgtgaagatcaagtttaaggctttcgatttggggggccatcaagttgctcccaaggtctggaaagactattatgccaatgtggatgctcgtgtgtacctgggtgacgcctttgacaa

SEQ ID NO: 250131 - DNA, 434 bp, Glycine max
aattaccgggtcgacccacgcgtccgaaaaaaataaaaaagtgctggaaccttttttcatcaaatagttcatatttgattcctgagggagtcttgttaaggaatttagagagcagagaggaagagatttgtattgaggaattcaacccaactaaaaacagtttacaactctgtttatatgacagttacataactgtaactgtcaactaacctgagtgagttagtgacatctgtaacatagctgtcctaactaactactgaccatagttagacttactgacttagctaaacttcggtattctgcttcagtactggacctagccactactgattgctttttggaccaccaagagaccaaattgggtcctaagaaaattgctgcacctaaagtggaccttctatcatcaagatctgatgcccagtcagcatcacaat

SEQ ID NO: 250132 - DNA, 285 bp, Glycine max
cccacgcgtcccgatcgctctctctctaggatctgctgccttttcttctctttctcaattctcattcatagaggcgaattcatttcttcgatctggaccctctatttcttcctcatcacatcacgcgacaacatgttgctctttgactggttctatggcaatctcgctttcctcgatctcatgtcacatagaagcctaaattcttttcctaggtctcgatcttaacggccaaaccacccctctttacatgctcaatgactagagatttgatcatcaccatccgac

SEQ ID NO: 250133 - DNA, 392 bp, Glycine max
cacgcgtccgcgcacgcgtacgcccacgcgtccggatagaaagagagggagtaagtggataaaggaaagaaaactaaagaaacaaacctaacacaacacaaatccttgaaacgacgacggaaatggccgtttcgagctcgcacatgcgtttcacctttgagtgccgctccgatcccgatttctcgcccgccccgccgtccttcgacaacctccgccgccgaaacttccgctcctccgcaggatccggcgcggcgtttcacggcatctactccctcatcctccgcttccctcccaacttccagcgccagctaagcaccaaggcgcgccgcaactgcagcaacatcggcgtcgcgcaaatcgtcgccgcttcgtggtcgaacaacagcgacaac

SEQ ID NO: 250134 - DNA, 526 bp, Glycine max
  unsure (1)..(526): unsure at all n locations
gtttatgacnntanctntangactgagncgtancagtatgctgtaccggttcggaattcccgggtcgacccactcgtccgcccactcgtccggaatatattacattaagaaagcccaaagaaagaagaagatggcgtgcgagtgcaaaggtaagagctcatggcctgagttggttggagtggaaggaacggtggcggtggctacaattgagagggagaatcctttggtggatgctaacactgtgcttaaaggatccatcgtcaccgctgattttcgatgtgatagggttcgggtttgggtcaccaaacatggaattgtttatcaggctccaagaattggataagaagtgtttacactaaagcacttcatatatatgttatgagtcatgaatataatagtatttaaataaggagttattctttcaaaaaaaaaaataaaaaaaaaaaagggcggccgctctagaggatccaagcttacgtacgcgtgcatgcgacgtcatagctcttctatagtgtcacctaaatta

SEQ ID NO: 250135 - DNA, 520 bp, Glycine max
  unsure (1)..(520): unsure at all n locations
gttatgcnntactnangatgaaactgatgcaatcggcatgtcgttcggaattcccgggtcgacccacgcgttcgaaaaaataatttcatttaataattaataaacataggacacaaataattaaaaactaagggattgataaagagtaacatgaaataagatgtgtgattcacaggttttttttttttattttaaaacaatcaactaataagaaagaatgtgtccaaggaaaatgtattcttaacatttgtctatttcaaaatatcatagtcaaaaacttgtcaaatttagaaagattaaataagaaaaaaaaaagtgagaggattcgatacataaaatattatataaactatttatttaaaaattaaaaattggggaaccaaattaaaataatgtaaatattttaggagtcaaaaacttaattataagcttatacatacatatatatatatatatatatatatatatatatatatatatatatataatattataatatatatgaatattgaggtgtatt

SEQ ID NO: 250136 - DNA, 520 bp, Glycine max
  unsure (1)..(520): unsure at all n locations
gtnttaatgcttgctgattagtagctgatgcgatgccgtaccggtccggaattcccgggtcgacccacgcgtccgcccacgcgtccggtttcaacaggtgtttgtgagggtggctgtgctgctattgtggattcaggaacatctttgcttgctggtccaactcctgttgtggctgaaatcaaccatgccattggagctgaaggagttctcagtgtagaatgtaaggaagtcgtttctcaatatggagagttgatatgggatctcttggtatcaggggtgaaaccagatgacatatgttcacaagttggtttatgttcttccaaaaggcatcaatctaagagtgctggaattgaaatggtgactgaaaaggaacaggaagagttggcagcgagagatactcctttgtgttcttcttgtcagatgctagttctatggatccagaatcaactaatacataatgcatcgaatgacagagtattcaactatgtgaatcaactgtgtgagagcctgccaagtncat

SEQ ID NO: 250137 - DNA, 517 bp, Glycine max
  unsure (1)..(517): unsure at all n locations
cgatgcctntgagactgcacgcactctcataggactgccgtaccggtccggaattcccgggtcgacccacgcgtccggccaccatctgttggtcctcgtgtgccaatgtatcccccaggtggtccaggtattggtgaacaattattttatagccaaggccctcctgctatcattccttcccaggtaatctcttctactctgtctatacttagacttcaatcagtgcaatcttgaatggtgcttgatgttattcctctgattttgctccatggagtaatttcctaatcattctcctttctgtccatgaaatttttttctcagcctggatttggctatcaacaacaacttatgcctggtatgaggccaggtgcagctcctgtgccgaattttttcgtgccaatggttcagcagggacaacagggacagcgtccctgtggaaggcgtccaggtgcagttcagcagtcccagcagccagttcctatgatgccacagcagatgcttcctangggacgtgttn

SEQ ID NO: 250138 - DNA, 516 bp, Glycine max
  unsure (1)..(516): unsure at all n locations
agctttncttanaactgaaccgagtctcatcgcacttctgtaccggtccggaattcccgggtcgacccacgcgtccgcttcacctgccccaccacgatgcaggagctctgggatgattccgtcactccaaacacgaccctttacaggctcatacacatgtggttctcgcagaagtacttgctcatgaagaagaggtcagaggatgttcaaggaagggcttctgaacttcttgagacactgaagaaggtgaagagtcaggctcgggttcaggccctcaaggagcttcaccaattagtggcttcccatgccactgcacgcaagactgtcattgatgaaggtggagtttctggtgtatcttctttgcttggtccttttacttcccatgctgttggctctgacgttattggtattcttgtgactttgacacttgattcggaatctaagaagaatcttttgcaacctgccaagggttccttaatggtggacatctttgatganggttccattgagacgaaa

SEQ ID NO: 250139 - DNA, 459 bp, Glycine max
  unsure (1)..(459): unsure at all n locations
tcccgggtcgacccacgcgtccgggagcaatgatgtttatcttccaagagatgaggcttttggacacttgaagtcatctgactttcttacttatggactaaaatccgtatctcaaaatgttcttccattattgcaatctgcttttgatttgaatttcacaccccgtgagtttgatagctttgatgaagttcatggactctattcaggcggaattaagctgccaacagatataatcagcaagattagtccactacccgtgcttaaggaaatcttccgaactgatggtgaacaggcccttaagtttcctcctnctaaagtaattcaagtgagtaagtctgcatggatgactgatgaagaatttgcaagagaaatgcttgctggtgtaaatccaaacttgattcgntgtcttaaggatttcccttcacgaagcatgctatatagccaagtctatggtgatca

SEQ ID NO: 250140 - DNA, 513 bp, Glycine max
  unsure (1)..(513): unsure at all n locations
ggaggtagcctttgaatgaaccgcactctatcgcgcatgcgtaccggtccggaattcccgggtcgacccacgcgtccgctgaactcttggttcactctgtcttgatgtcttccattttatgcttttctgatatggctcttcaaccactacattcactttattggcctagacccaaccaccaaagcaccaagagaccttaggtgaaccttttctctctagctctgtttgcagaaattcaagcgcaggaatggaggttgcaacaaacacaaccgcgaccacgtcaaattcattcgatgctctaactgtggaaaatgctgccctaaggacaaggctattaagaggtttctggtgaggaacattgttgaacaggctgcagtcagagatgtgttggaagcctgtgtctatgagcataattttcttctttaccttctctcttttttttgaggaaaatttcacatgtgtttatgttatttatttagtttttaattgctatttacagaatatactctntcc

SEQ ID NO: 250141 - DNA, 523 bp, Glycine max
  unsure (1)..(523): unsure at all n locations
ggtttagcncttggtatattccgtatcggcagctgactgcgatgctctaccggtccggaattcccgggtcgacccacgcgtccgccgacttctggaagggatgcatttattagataaaaggtcaacacaagctctggcctgtggcttggtggattcaggataactcgtcggatcgcacggactttgtgccggcgacgcatcattcaaatttctgccctatcaactttcgatggtaggatagtggcctaccatggtggtgactggtgacggagaattagggttcgattccggagagggagcctgagaaacggctaccacatgcaaggaaggcagcaggcgcgcaaattacccaatcctgacacggggaggtagtgacaataaataacaataccgggctcattgagtctggtaattggaatgagtacaatctacatcccttaacgaggatccattggagggcaagtctggtgccagcagccgcggtaattccagctgcaatagcgtatatttaagtctgtgaaaa

SEQ ID NO: 250142 - DNA, 513 bp, Glycine max
agtagttatgccttaagctgtacgtactcctcaggcatgtcgtaccggtccggaattcccgggtcgacccacgcgtccgacaacttctataagggatgcatttatttgacatatggtcaacacaggctctgcctgaagcttagatgattcatgataactcgaccgatcgcacggactttgtgcctgcgactcatcattcacatatatgcactatcaactatcgatggtccgatcgtggcctaccatggtcgcaacagatgactgagaattacggttcgatctcggagagggagcctgagaaactgataccacatccaatgtaggcgactcgcgcgcaaattacccaatactgacacggataggtagtgacaatattataacactaccgggctcattgagtctggtaattggaatgagttcaatctaaacgccttaacgaggatccataggcgggcacatctgatgccagcagccgctgttattccagctccaataagcgatatttaagttgct

SEQ ID NO: 250143 - DNA, 517 bp, Glycine max
  unsure (1)..(517): unsure at all n locations
gggtgccgtcnttactccgaagggggaggtactgctcatccggtccggaattcccgggtcgacccacgcgttcgtccacgcgttcgagaatgtacagtgagcttatttcaaagagtattacagaaggtggaccttttgcatctagaacatcctatgtcaaacttctacgttcggttaagagggagacacttaagctgattgagacattcttggataaggcagaagaccagccacaaatcggcaaacaatttgtgccgccaatgatggatcctggtcttggagattactccaggaatgttcctgatgcaagggaatcaaaggttttgtcactttttgcaacaattgttaacaaatataaagctgcaatgattgaagatgtacctcgcatatttgaagctgtttttcagtgcacacttgagatgattacaaaaaaattttgaagattacccagagcatcggctcaagttcttctctctacttcgtgccatagctactcattgtttcctgcattaatctg

SEQ ID NO: 250144 - DNA, 524 bp, Glycine max
  unsure (1)..(524): unsure at all n locations
cggtttatatggctcctgattacgtagctcactgtcatgccgtaccggtccggaattcccgggtcgacccacgcgtccggtgcaatccatttaacagtgatctcacatatcggtcatgtgcagatggggaagtttcggtggacaacgctgctgatgtgtggaagaactatacttgtgaggtttcttcctgacgcatttgcaagacgcctggtcggatgaccccgaccatttatggccaaatggaggctgcaatgaatgtaagctatggcttatatcattatggtccattctcggctgatctacaagactgcactttcgtgcggaaaacattcacagacatcagcaatgatcactgacctggtctgcagagaaacagtcaatngatctatattggattgggtctggtatcagctgctcgaatgctgtctttgatcttttgggtcatctacgcatgagagctgcggtaccgtgtttatactaaacagctcattgagggctaaatgtgttgggacttatactacatt

SEQ ID NO: 250145 - DNA, 525 bp, Glycine max
  unsure (1)..(525): unsure at all n locations
aggtttaggcgtcctctgaattctgtcatcgtagtgtcattgccgtaccggtccggaattcccgggtcgacccacgcgtccgaacgccatctccagctgctgccttatcagaagcgcttcgccccagagattctcgcttagtctgcttcaatccttatgccaacgctatcaattacaaaattgacctctccgcttgcctccgatccattcactccctgcctattaaaacctacttgcggatcaaatgctcccaaacagatgggaatggaagtcctgctaagaggacagcgcttcatgatctttatgagaaagaagggcagagtccatggtatgataatctctgcagacctgttacagagcttgttcctgttatagcacgtggtgtcagaggcgtcactagcaaccctgcgatttttcagaaagctatctcatcatcgaatgcttacaatgatcagttcanggaactggtgcaagcatggtacgacattgaaagtgcatatcgtgaacttgtagtgaatgatatnc

SEQ ID NO: 250146 - DNA, 511 bp, Glycine max
  unsure (1)..(511): unsure at all n locations
ctgtgcctntnaatgaacagagtctatcgtcatgccgtaccggtccggaattcccgggtcgacccacgcgtccgcagagttcagaggaattcgttttctctgatcgggatctggaagggaagcgaatcgacgtgggtttcttggtgacgacgctgatcttcgtagtgatcggaatcatcgcgtgcctctgcaccagaatttgctgcaacagaggaccttctgccaatctatttcaccttactttggtaattactgcaacaatttgctgctggatgatgtgggcgattgtatatctggcacagatgaaaccactcattgtgcctatactgaacgagggtgaataagtctctgaacagatgtaactccttgtaagttagagaatatggatcgcagattggctgctggatagaatttaatcctggctatcatgagtcgctcagtatctgttcagggtggaactggatttatttctcgatggataatggcattccaggtggcatttctattgcta

SEQ ID NO: 250147 - DNA, 520 bp, Glycine max
  unsure (1)..(520): unsure at all n locations
gttttagagccttgagctgtccatgctcctacggcatgccgtaccggtccggaattcccgggtcgacccacgcgtccgaccctactcattctccatacctcaacgaagaggttaaagagacggcaacactttgctgggcgccttgaccgagcagagcttcgtcttggccctcgattttgccctaaagtactctcagtcacaacagacaccgtcgtcgtcgtcgtcgtcatcaatggcaccgaagcagaccaaggctgagaagaagatcgcttacgatgcgaagctgtgcgacctaatggaggagtacggccagatcctcgttgtgaactccgataacgtgggatcgaaccagcttcagaacattcgcaagggtctncgtggcgactccgtcgtcctcatggggaaagacaccatgatgaagcgctcagtcaggatgcacgctgagaaaaccggaaacaacgcctatctcaaccttattcccgctcttgttggcaatgtgggattgattttcaccaaaggt

SEQ ID NO: 250148 - DNA, 506 bp, Glycine max
tgtagccttgacatgaaagagcctacgcgcatgcgtaccggtccggaattcccgggtcgacccacgcgtccggccactcgtccgatgttacgggtgcgacgttagtgacaattctaacggcgcttgagggctccataattgcggaagcgtttaatggtcgaacgtgcacgataatgcgctgagcattctatacatacagggctaggctgagccagcaaccatatcggtgctaaattatggtaagcagcatgcgccccacgatgtaacgattacgctgatgggtaccagaagcacaacgagtataaacttgatccaaacgacctgtattgcactgattcgagtctaggatggcctgtgcatactgcagcgctcgtggaactagaggaacggaccatggacatgctaaaaactggtccatacggttagatatatcgaatttgcaacattatattcggtcagagcggttcaggacacgactgggccgaatgaatgtacgacgaaggcgg

SEQ ID NO: 250149 - DNA, 524 bp, Glycine max
agtattagggctgtccgtgaagactttcacgtaccgtacagccatgtcttaccggtccggaattcccgggtcgacccacgcgtccgtaaaattcttacttaccaagcttctgatgacccaattcacagtggctacagatgggctgttgaatctacaagtaaagaagattcattgatgggatttgctgactgggaaccaccacatggtcattacaaaatgcttaagtatccatggaagaattatgtgaaattaagtggggctctaatgcactgtgcgtttatggtcatggctatgcatgggtgcatactttctgaaatacaggccccagctgagaagagacaagttttgcgcaatgagcttcagagggtaggttctgaacgaagttctagatcgcgagcgaccgctctagaagatccaagcttacgtacgcgtgcatgcgacgtcatagctcttctatagtgtcacctaaattcaattcactggtcgtcgctttacaacgtcatgactgggaaaacctggcgtta

SEQ ID NO: 250150 - DNA, 522 bp, Glycine max
  unsure (1)..(522): unsure at all n locations
aggtatttgcgtgctgagcacgattgtactgcatgccataccggtccggaattcccgggtcgacccacgcgtccggaaagatggtgaactatgcctgagcggggcgaagccagaggaaactctggtggaggcgggcagcgatactgacgtgcaaatcgttcgtctgacttgggtataggggcgaaagactaatcgaaccgtctagtagctggttccctccgaagtttccctcaggatagctggagcccgcgggcgagttctatcgggtaaagccaatgattagaggcatcgggggcgcaacgccctcgacctattctcaaactttaaataggtaggacggtgcggctgctctgttgagccgcgccatggaatcgagagctccaagtgggccatttttggtaagcagaactggcgatgcgggatgaaccggaagctgggttacggtgcccaactgcgcgctaacctagaccccacatagggtgttggtcgattaagacagcatgacngtggtcatggaagtca

SEQ ID NO: 250151 - DNA, 530 bp, Glycine max
  unsure (1)..(530): unsure at all n locations
ggttattaggcgtgnctgatgctgtatcgtagatgcangtctataccggtccggaattcccgggtcgacccacgcgtccgcccacgcgtccgtccacgcgtccgcccacgcgttcgcccacgcgttcgaaagaactaggtaggtggagtctgagaactctagcatgtactagtactactcctacattcctccatcttcctttgtactattttttttttaaccataaaagcaagagcacaaagatggtgagagctccttgttgtgaaaagatgggtttgaagaagggtccttgggctcccgaggaagatcaaatcctcacatcttacattgacaaacatggtcatggcaattggcgtgccctcccaaagcaagcaggcttgttaaggtgtgggaaaagctgtagactccgctggattaactatttgaggcctgatattaaaagagggaatttcacaattgaagaagaagaaactatcattaagctgcatgacatgctgtggaacatgtggtcagcaattgcagtcaaatgg

SEQ ID NO: 250152 - DNA, 521 bp, Glycine max
  unsure (1)..(521): unsure at all n locations
ggtttatgggnnctangactgcacgcagctgatgtactgctgtaccggtccggaattcccgggtcgacccacgcgtccgctaaatagtgaattctttaccacagagccttatgcttgtgaaccatcaagtttgccagggtatcctcccagcaaagaattggatgtaaaactgagagatgaagaagcaagaaggcaaaaggctctaaatgggaaagctagtgcagttgatggtgcaaaaaaagtcagagtacgtgagcgtgaacgtggtcgggctgttccagcccctgaagccaacgcagagatccaaacaaacttagataggtggagagttgtgacccatgcaaatgcaaaaagcaagagtgagaaatttccacctcctcatcaagatggagctgttggatacccacaagatgcatcaaataaaggacctgtttcatttggcgccccagacacttncttctcttcagggatatttaattcaaaaccttctggacatgttangaatcatgctgctgcanggc

SEQ ID NO: 250153 - DNA, 525 bp, Glycine max
  unsure (1)..(525): unsure at all n locations
aggtggcctntggcgactgccacgacatatattgtatctgctcgtaccggtccggaattcccgggtcgacccacgcgtccgcaaaccgtgtgtctggttactgtgcgccagaggtcactgatgcacgcaaaatatcccggaaagccgatgtctatagctttggtatcatgcttttggagctgcttacagggaaggctcctactcattcttcacttaatgatgaaggggtggaccttccaagatgggtccaatctgtgattcaagatgagtggaacactgaggtatttgacatggagcttctaaggtaccaaagtgttgaggaggaaatggtcaagcttttgcagcttgcccttgaatgtactgctcaatatcctgataagagaccttcaatggatgtggtggcaagcaagattgaggaaatttgtcatcctagtttagagaaagaggaagagaagaatcatgattntaaagatgctgataatggattttcccaacagtaccattctgttgactcgggtgtgtcac

SEQ ID NO: 250154 - DNA, 521 bp, Glycine max
  unsure (1)..(521): unsure at all n locations
ggtttatgggcnnttnaactgacagacgctcactgtactgctgtaccggtccggaattcccgggtcgacccacgcgtccggcctcacaaaagcaaagatcaaacaaaccaaggacgagaacacgatgttgcttgaacttgcacttggtttattggttttggctctgtttctgcacttgcgtcccacacccactgcaaaatcaaaagcacttcgccatctcccaaacccaccaagcccaaagcctcgtcttcccttcataggacaccttcatctcttaaaagacaaacttctccactacgcactcatcgacctctccaaaaaacatggtcccttattctctctctactttggctccatgccaaccgttgttgccttcacaccagaattgttcaagctcttcctccatacgcacgaggcaacttccttcaacacaaggttccaaacctcagccataagacgcctcacctatgatagctcagtggccatggttcccttcggaccttactggaagttcgtgagga

SEQ ID NO: 250155 - DNA, 515 bp, Glycine max
gtttaggatgccttaacatgaccgaatttatgcgcactgccgtaccggtccggaattcccgggtcgacccacgcgtccggaacaacgccaattctgaaacttcttctccttcttcttcttcttttgtttctcttgcgtgcttctacttcttctgaacatggaactgttgtctctgagactcaccccttcaccttcgagttcgacttcatcgcttcctgcagcacttgctcactgctccaagctatgtgaatttcatccgaggaagaagaagaaggcgtgcttcgacgcgcctaggcttgcggtgcggtgtgtgaaggcctcggcggagcgaaccggtgatacgatcgatgatggggaagctcgtagcgggttcaccacacctgccatggaagtcaccacattcaatcgaagcactttcagcgatgctgctgactttcccgtttgggaaaagattggtgctgtcgtcagactcagttatggtatcgggatttatggtgccatggcttgtgcgggga

SEQ ID NO: 250156 - DNA, 547 bp, Glycine max
  unsure (1)..(547): unsure at all n locations
aattcccgggtgcgacgccacgtcgtctcgctgtgctttcttgtctcttctcgctttcttcaagtgtctgcttcctgctgttttccttttctttcttctcatagatgnggggtggcatcagtccctctaagaagatccaaaaacgtagaactgtcgatcatggaacgtgattctcaatagtaggatnagtgtttgagcagtctgaaatgcttcaagtagcagtgtctttatacatcagtaggaagggggtgcatatcggctttcaaaagtgctttggtaccataacataaattggaagtagaaataaagaatagcatagtttttagaaagttcttgggttttatgtnggaaaccccttgtcttgnggttaatggaaagctgctgctataatggcgcattgtctttggcaaaatggaggaaggaaggggccaccagattggcaggaactttgtncggaattatncgcgctgcttagtgatcatacttcacaattagnttntattgagggaaaaccaatgnctggcaatgcnntgctgctgctcttatg

SEQ ID NO: 250157 - DNA, 521 bp, Glycine max
  unsure (1)..(521): unsure at all n locations
ngttttagtggcctgtgagtccgacagcagcgctacgncagtaccggtccggaattcccgggtcgacccacgcgtccgcttggaactgcaacaatggtgccgcaacccattttgcatctaacccttttgtcattaagaatgtctctgaccactctttccttggtcgatgccgccgatcccacatttggcttcacccctcttggattatctagtagctcaaacttgcaaatccaaaagccttacgacgttgcagtcaacgagcgctacagcttttcaaatggagtgcacagattttgggtatactccacggacaagcctcatatgcaaggcagcaatacgaagccacgaactgagattcgtatcgctggatacgattatacatccggtgtgtggcaatttcaagggtttttttacgtgcctagtggcacaagcggngtgtgcatccagcaagtgtttggtggagtaacttctgccacaacctcgcagactanggtctatggtggttctctcactcattacca

SEQ ID NO: 250158 - DNA, 522 bp, Glycine max
  unsure (1)..(522): unsure at all n locations
gttttagatggcntnaagatcgacagcagtttactgtcatgctgtaccggtccggaattcccgggtcgacccactcgtccgtacgatacgaagtttcctctatcttctcttctctgagggtagctttgattcattgaaggtttttccttcaccaactttccagaggaagaaagtgacttgatttctgggcctgctcgttttattactgagaaaccaaatacatgatactaaaaactcaaatggaagaaaagcagttagattttaatcagcctcttttatcggtaaggcgaatctcatcaacggcggcctctgaaaatgacaataaaagaaaagctgataaatcagtgcggaaacgacctcctcttccgttttacaaatcagagttaaaatcaggtccagtgactaaccctggaactgttccttttgtatgggagaagactcctggaagacctaagaatgaaagcaaactacaaacaagggctgtcgaacggncttncgttgctccaaagctttcacccgggn

SEQ ID NO: 250159 - DNA, 532 bp, Glycine max
  unsure (1)..(532): unsure at all n locations
gtaatagtgggtctntgaaaactgtcatctactctcattgtcacttctgtaccggtccggaattcccggctcgacccacgcgtccgcccactcgtccgcccacgcgtccgccttgctccactcctcatattatctttttgtgaggaaacacataatcatggaggggtctcacatggggttgttgctcttcttttgttcttccatgctttttgctgccttcgctgctgcctcctccagaaacttgcccataataccctttgatgaaggctacgcgcccttgtttggggacagcaacttggtcatccatagggatggcaaatcggttcatctttcactcgatgagagaacaggttcaggatttgtgtcgcatgatctttaccttcacggatatttcagcgcttctattaagttgccttctgactacactgcacgagtcgtggttgccttctatatgtcaaatggtgacatgttccacaataaccatgatgaaatcgactttgagtttttggggaacattagaggcaaagactgn

SEQ ID NO: 250160 - DNA, 521 bp, Glycine max
  unsure (1)..(521): unsure at all n locations
agttttagcaggcctntgacctggtatcgcactctcataggaatgtcgtaccggtccggaattcccgggtcgacccacgcgtccgtggagatccagaagttctcgaataatgctgatcagctgcattttgagtttcatcatttgccttcttcctatctccgactggctgcacaccgtgttgctcaacactacaacatgcaaacaatggttcaagataatggcttagatggccagggaagtaaaattctggttaggaagttacctgaaagcaagtaccctgtagttcgattatccgaaatacctgctaatcagttggaaaatgataaatctgagcagaaaaaaattgttattagacctaggcctaatataaacagtttgaatgatgctaacggagttgggaggaaaggaaaccctttaagaagtgtggaagaaaggaaagaggaatatgaccgtgcacgggcacgtatctttagtagccctagaagctctgaatcacgtgatacctcatgcgtggttccaat

SEQ ID NO: 250161 - DNA, 518 bp, Glycine max
  unsure (1)..(518): unsure at all n locations
gtanttgtggtgcgtgtaccgagcgtacctctatgccgtaccggtccggaattcccgggtcgacccacgcgtccgcaagaagctaagattaacacaccaacccactagaaacatgaaaacccctaacaaagccgcattactcttattccctctcttgtccctttccttatttatcaaccattcccatgcagcaggaatcgctgtgtactggggccaaaacggtggagaaggcaccttagcagaagcttgcaacacaggaaactaccaatatgtgaacatagccttcttgtccacttttggaaatggccaaaccccacaactcaaccttgctggtcattgtgaccctaacaacaatggttgcacagggttgagcagtgatatcaatacttgccaagaccttggcatcaaagtgttgctctctcttggaggtggtgctggaagctactccctcagctcagctgatgatgccacacaacttgcaaactacctctgggagaatttcctggaggccaaactgg

SEQ ID NO: 250162 - DNA, 532 bp, Glycine max
  unsure (1)..(532): unsure at all n locations
ngtttagcggtgngtgattaagacgagacactgttatgctcgtaccggtccggaattcccgggtcgacccacgcgtccggtcctatcactttccacgtaagtctccaaaaacagaaccactcattccaatggaaattgacggcaacgttctcgcggcgaagtcgctggttcacttcggcgtgcagcacatgttcggcgtcgtggggattccggtgacctcgctggccaaccgcgccgtctcgctcggcgtgagattcatcgccttccacaacgagcagtccgccggctatgccgnctccgcctacggctacctcacggngcgccccggcgtcttcctcaccgtctccggccctggctgcgtccacggcctcgccggcctctccaacgccttcgtcaacacctggcccaccgtcatgatctccggctcctgcgaccaaaacgacgtctgccgcggcgattttcaagaactcaaccagatcgaagccaccaaacctttcaccaaactcttcgtcaaagcgtctcacataactga

SEQ ID NO: 250163 - DNA, 529 bp, Glycine max
  unsure (1)..(529): unsure at all n locations
cgtntagcgttctctntngcattaccgcacctcatcgtactgctgtaccggtccggaattcccgggtcgacccacgcgtccggcttggcatactggattcctaatattggtcaactcatatttgtcacatgtggtgggtgctctgatacatggaaaggtttcacatttttggcattcaaagacctctggcctgttgtcaagatgtccctttcagctggtgccatgttatgtcttgagctctggtacaacacaatattggttcttttgacgggtaacatgaaaaacgcggaggttgaaattgatgctctatccatatgtctcaacatcaatggatgggaaatgatgatatcccttggtttcatggctgcagcaagtgttcgagtagcaaatgaacttggaagaggaagtgccaaagctgcaaagttctctattattgtgtcagtgctcacatcattggccatcggattccttctgtttatattcttcttattttttagagaaagacttgcatatatatttacctcanata

SEQ ID NO: 250164 - DNA, 513 bp, Glycine max
  unsure (1)..(513): unsure at all n locations
cgagcctntgaactgccagcgcctcatgtcatgctgtaccggtccggaattcccgggtcgacccacgcgtccggcgcgccttttactttgaacttgagagttggtagtggagggagcagagaacccgaacgccatgtttggctccgctcaaccttcttcttctcccttcggcacccctgcattcggtaccccttcttctacccctgccttcggttcttccctcttttccacacccttctcttctcaacaaccacaaccacaacaacagcagcaacaacaaacacctctgtttcaacagcaacaacaacaacaaacttcttctgctttcggctttcagaattcactcgcattcgcagcaccgcaatcctcgcccttcccaaatgctcaattaaccactcagatggctaacgttgcacctgttcctttctccctcgccgatcgcgatgttcagactattgttgatgcatataaggatgatcctgggaaccccaagtacgcctttaagcatttgtt

SEQ ID NO: 250165 - DNA, 517 bp, Glycine max
  unsure (1)..(517): unsure at all n locations
agattatgccgtncntaccatgatcgaaccctacgcgaatgtctgtaccggtccggaattcccgggtcgacccacgcgtccgcaagattacaggcatatggatggttttggagttaacacatatacgctgatcaacaaggctgggaaagcagtgtatgtgaaatttcactggaagaccactagtggtataaagtgtctattggaggaagaggccattaaggtgggaggagccaaccacagccatgccactcaagacctccatgattcaattgctgctggtaactatcctgagtggaaactgtttgttcagacaatagatcctgagcacgaagacaaatttgactttgaccctcttgatgttactaagacttggcctgaggacattatacccttgcagcctgttggtcgcttggtcctgaataagaacatagataatttctttgctgagaatgaacaacttgcattttgccctgccattgtggttcctggtgtatactactcagatgataagatgctt

SEQ ID NO: 250166 - DNA, 510 bp, Glycine max
  unsure (1)..(510): unsure at all n locations
agggttagctagctntaacatgacaagcaattgatgcatgctctaccggtccggaattcccgggtcgacccagcgttcgcatgactaatcgggtggttaccctttggtaccgacctcttgagttgcttcttggtgcccgcagatattgggcggccattgacctttggagtgttggttgcattttatgagagttattggcagggaagcctattttgcctggtcgtacggaggtggaacaactgcataagatatacaaacttgtggttcgtcttctgatgagttttggaagagtcaaagatgcctattgctaccttgtttaaacttgagacacatacatgaaatgcttaggaaggccatttaaagattttccacctcagcgctgccccttattgacactcttcttgcaattgatcctgcagaacggaaaattgccacaaaggctttaggaaataaggtgggcttttgaaaattcccgattggtaatcaattttatcatttaatgctacttat

SEQ ID NO: 250167 - DNA, 509 bp, Glycine max
ggcagtcttcaaactgatcgagtgctacgccatgccgtaccggtccggaattcccgggtcgacccacgcgtccgcaggctctgcctgttgctttgatgattcatgataactcgtcggatcgcacgggctttgtgccggcgacgcatcattcaaatttctgccctatcaactttcgatggtaggatagtggcctaccatggtggtgacgggtgacggagaattagggttcgattccggagagggagcctgagaaacggctaccacatccaaggaaggcagcaggcgcgcaaattacccaatcctgacacggggaggtagcgacaataaataacaataccgggctcattgagtctggtaattggaatgagtacaatctaaatcccttaacgaggatccattggagggcaagtctggtgccagcagccgaggtaattccagctccaatagcgtatatttaagttgttgcagttaaaaagctcgtagttggaccttgagttgggtcgatcggt

SEQ ID NO: 250168 - DNA, 523 bp, Glycine max
  unsure (1)..(523): unsure at all n locations
agggttttgggagtcnnnnaagatcggataggcacactagatggcatgctcgtaccggtccggaattcccgggtcgacccaagcgttcgcaaaaacgcattaattaagtgcctgttgggaattgggtgagccaaagagagaggaagagaagaagaaggaggagaagaaggagctttggatttcaactttttccgttcctcgagaccggtggtgtgcttgttgctcttcaaacaaatctgacatggatttactaagatttgtccatgttcttgcgttctaaggtgacctgggattgaatctaaaagatctngatttacattttgagatatgggaggagtttgttctggacaaattgctaccagtatcgggtttttgcattccaagaagtgctngattggcgagttttcatccttggagattttcttcgggtttcctttggtaattgcacttaaggttctgctccgctttaatgatcagcacaaggtacgtgatgctacattcttctgatacaggtgctgcattt

SEQ ID NO: 250169 - DNA, 525 bp, Glycine max
  unsure (1)..(525): unsure at all n locations
ggtagcggtgctgttacgccgacactgtatgtctgtacnggtccggaattcccgggtcgacccacgcgttcgctcaggcgtcctatatgttgtcctcgagctcgtttactaggacatatgatgtgacaggtgaggaggtccgtccggattcatggccaattacattcaggatgacgctcactattgcacttgctgaataggggttcgaatatgagtacttggaggacgacttgacgatcatgagacctatgatcttacatatgaacacgattcacaagatgattcccgatgtcatacacattggcgaatccattatcgaagccctcatcgttgatgaggacattgatgacgtttgtaatgacaggacttcatagccgtattaagacgcttacgatagagcttaggctggatactgggccgattatgttcacgttcttggacatgatattgggacgtcgattggagcatcaaagggagctgacaangaagctgtcatgaaggagctcatataggcgcttgaacagg

SEQ ID NO: 250170 - DNA, 533 bp, Glycine max
  unsure (1)..(533): unsure at all n locations
ggttagcggtgtctgaagcagtatcgtacctcatngccgtaccggtccggaattcccgggtcgacccacgcgtccggttggagttaaccagaaaaatttaggtagagccggatctaaatgttggctaggtaagggtactgtactaagaggagtagttatgaaccccgtagaccatccgcatggaggtggtgaatggagggccccaattggtagaaaaaaacccgcaactccttggggttttgctgcacttggaagaagaagtagataaaggaagatatatagtgataattcgattcttcgtcgtcgtactaaatagtagagaaaatagaaattgattcttagtctttacaagaaataggagtaattaactgtgacacgttcactaaaaaaaaatccttttgtagcgaatcatttattaagaaaaattagtaaacttaacacaatagcggtgaatgatataataataacttggtccagagcatctaccattatacctacaatgattggccataccatggctatccacaacgggg

SEQ ID NO: 250171 - DNA, 544 bp, Glycine max
  unsure (1)..(544): unsure at all n locations
ngattttaagttaagtggtcngtgaggtaccgtaactcacatgcattgcacttcggtaccggtccggaattcccgggtcgacccacgcgtccggctagccaatcaaacactcaatcacttcacgatttcacagttaaagatgccaggggagataatgttaatctcgccgactacaaaggaaaggtccttctcattgtcaatgttgcctcacaatgcggcttgactaattaatactacacagagcttaaccaattgtatgagaaatacaaacggaaaggacttgaaattctggcattcccatgcaatcagtttggggctcaggatccagtaactaatgaagagattgtggagtttgcttgtactcgcttcaaagctgagttacccattctcgacaaggcggatgtgaatggtgacaatgctgctccactgtacatgtttctgaaatcaagcacatgtggactctgtggggatagtatcaaatggaacttctgcaaattacttgctgatcaggatgggaatgtccttgaccgttatgcacacacaa

SEQ ID NO: 250172 - DNA, 523 bp, Glycine max
  unsure (1)..(523): unsure at all n locations
agttttagtggatggcctntgaaactggcacgcagccctacggcatgtcgtaccggtccggaattcccgggtcgacccacgcgtccgcccacgcgtccgggaactaccaaaagccgaacgtcgcacaaaaaccccaaacgtagcaggcattgagttttgtttgctttgaaacatcgtgtgcacagtaccccagaagatcgaacaaggatctccacaaagacaaaccccagttctcaactgtgttttacctctctctcacctactttcagaccatacccagggtttttgctttttctttttaaattagtttcagtgacattaacgaggctgagaagatgcagcagacaccgccaatgattcctatgatgccttctttcccacctacgaacataaccaccgagcagattcaaaaataccttgatgagaacaagaagctgattctggcaatattggacaatcaaaatcttggaaaacttgcagaatgtgcccagtaccaagctcagcttcaaaagaatttgatgtn

SEQ ID NO: 250173 - DNA, 523 bp, Glycine max
  unsure (1)..(523): unsure at all n locations
cgctttagcggtgnctgaatctgacccgtacacnatctgccgtaccggtccggaattcccgggtcgacccacgcgtccgcccacgcgtccgcagtgctctgtcttctcccccaccaccgcactctctcagatattatgatttgatatcacacattcacatcctatcatcatcgacaacacgctatccccattgcttcttctcttctccctctctcgtttcctacttgacggcgccgtttcgttctccagaagatgcttctgagtacttcgcgctgcaactagacatgatgagttcaagtttcaagacatgggctgtgggatttgcacttggaaatgaacgagaggcaacgttggagagctgaagaggatgctttattacgttcttatgtcaaacagtatggtcctagggaatggaatcttgtgtctcagcgcatgaacacatatcttaacagggatgctaagtcgtgcttggagaggtggaagaactacctcaagcctggcatcaaaaaaggctctcttactg

SEQ ID NO: 250174 - DNA, 513 bp, Glycine max
  unsure (1)..(513): unsure at all n locations
cgggcctntgcgctgcacgcagcctacgtcactgctgtaccggtccggaattcccgggtcgacccacgcgtccgcggacgcgtccgcccacgcgtccgaataaatggaactagaaatggtgcccttcagctgatgcatgctgagcttcaagttctttctcccttggttcctgttcgtgaggtcaattttctacgcttttgcaagcagcacgcagaggggttatgggcagtggtagatgtgtccatagataccatccgagaaacttctggagcacccacttttgtgaactgtaagaggcttccttctggttgcgtggtgcaagatatgccaaatggttactctaaggtgacatgggtggaacatgcagaatacgacgaaagccaaattcaccagctctttagaccctcgttgagctcaagcatggggtttggtgcacaacgttgggttaccactcttcaagccaatgcgagtgcctagccattctaatgtcctcagcagctccctctagagaaa

SEQ ID NO: 250175 - DNA, 534 bp, Glycine max
gataggcgtcctgagtcagctcgtactcaatagcactgcggtaccggtctcggaattcccgggtcgacccacgcgtccgaagacacatacgaccacgcgattcgaattaatggaactagaaatggtgcccttgggctggtgcatgctgagcttcaagttctttctcccttggttcctgttcgtgaggtcaattttctacgcttttgcaagcagcacgcataggggttatgggcagtggtagatgtgtccatatataccatccgagaaacttctggagcacccacttttgcgaactgtacgaggcttccttctggttgcgtggtgcaagatatgccaaatggttactctaaggtgacatgggtggaacatgcagaatactacgaacgccaaattcaccagctctttagacccttgttgagctcatgcatggggtttggtgcacaacgtttggttaccactcttcaacgccaatgcgagtgcctacccattctaatgtactgagcatctccctctagagaacattcagcagtaagc

SEQ ID NO: 250176 - DNA, 508 bp, Glycine max
gtgtgccttgggttgtatggggattattggcatgctctaccggtccggaattcccgggtcgacccacgcgtccgttggttgcagcttcagcagcagcggcaagcaactccatccgcaatgggaatcgatttgaaggcaggaggtaagtccaagaagaccaaacgtacagcccccaaatccaatgatatttacctcaagctcctcgtcaagctgtaccgttttcttgttcggaggactggtagtaacttcaatgccgtcatcctcaaacgccttttcatgagcaaggtcaacaagcccccgctatccctctctagattgattcgttacaccaagggaaaggaagataagatagctgtggtagtcggggccgtgaccgatgacattagggtgtatgaagtccctgctctgaaggtaactgccctgaggttcactgaaactgccagagctagaattgagaaggctggtggcgaatgcctcacctttgatcaactggctcttagagctccac

SEQ ID NO: 250177 - DNA, 514 bp, Glycine max
  unsure (1)..(514): unsure at all n locations
gggatgcgtnnnnacacgtaagaagtgatgcgactgccgtaccggtccggaattcccgggtcgacccacgcgtccgcttatataattaaactaattgcaaagatgaataccaagccctttttctccttgtgcttactctgcgcactgcttctcatctgtgttgtggcaactgagccatccaaagatgcgacacaagcagaagaaccaaagacacggccagatgcctggagaagtggtggaagtggaggacatggtggaagtgggggacatggtggaagcggtggacacggtggaggctggggacatggtggaggctggggacatggcggtggacatggcggaggatgcaaatgctgcggtcgaaagggctgcaaatgttgctgaagtaaaaaaacacaaacatgaactgaagacacacatacgtgtgtactccatgtaataagtatagtatgtagaattaagaaataaagcatggaatctatatccgtgctatggctgtcataagttgaccggt

SEQ ID NO: 250178 - DNA, 512 bp, Glycine max
  unsure (1)..(512): unsure at all n locations
gggagagtgtcnntaactcgacagaagtttatggcatgccgtaccggtccggaattcccgggtcgacccacgcgtccggaacaattagttgcatgtgcagaggctgctgtggaggaagttatccatcgtggggcggctgatccgaagaaaatagctgctggtggacattcctatggcgcgttcatgactgctaacctgctggcacacgcacctcatcttctttggcgtggaattgctcgttctggtgcttacaacagaacacttactcactttggttttcagaatgacgacagaactctttgggacgccactaatacttatgtcgagatgagtccttttatgtcggctaataaaactaagaagcccatcttgcttattcacggtgaagaggacaataatccaagaacattaaccatgcaatcagacaggtctttcaacgctctaaatggtcatggtgctctttgtcggctggtgattatgcctcacgagagtcatggttacactgctaaagc

SEQ ID NO: 250179 - DNA, 520 bp, Glycine max
  unsure (1)..(520): unsure at all n locations
agttntagtggtgctgtttacgagattactgcattgctgtaccggtccggaattcccgggtcgacccactcgtccgggagccaacattttttgtgctaagtgctgaccacgccagaatttcattatttgcattagcttccgattctgctcaaagtgtaacacgaccaattatcgtggtaaccagctatactgataaagggtgcaattttttgaaaattattcccatgattcatatccatcaacgaccactcttgtgtgcccacttacaaagcttctcctatcgctataggtagcggctcctcacttgcagataggggctcaaggcagttgggtcgacccaattcagagaatgctggagggcaggacgccaataatctgatggtcaagcttgatctcttaggtgattctggtgccggtaaaagctgtatcgttctacgatgtgttcgcggtcaatgtgatccaacatctaatgtaactgttggagcttcttttttgtcgcaaacaatatctctgcaagact

SEQ ID NO: 250180 - DNA, 538 bp, Glycine max
  unsure (1)..(538): unsure at all n locations
gggtagtggggnnnnnnaacctgaaactgactgtctatgctactgcgggtccggaattcccgggtcgacccacgcgtccgaaacacatcattagagggactttacaaatcatatgggaatttctgtactcaatgtgaggctgaaggcttccgtaaaattacatcttatcaggatcgacctgatataatggcaaaatatacagttcgcattgaggcagataaatcactgtatccagtgatattgtctaatggaaacctagctgaacaaggtgacttataggatggcaggcactatgctgtttgggaggaccccttcaagaaaccttcttatctgtttgccttggatgctgggcaattgcagagcatagatgacacatttatcacccattcagggcggatggtgacccttaggatatggacacctgcagatgatgtacctaagactgtacatgctatgtattctctgacagcagctatgacatgggatgaagatgtttttggacttgcatatgacctgnatctctttaatgttgtgctgt

SEQ ID NO: 250181 - DNA, 515 bp, Glycine max
  unsure (1)..(515): unsure at all n locations
agaggcatgcctntaacatgtatagcactttataggcactgccgtaccggtccggaattcccgggtcgacccacgcgtccgcaagcttaagaaaagagctttaagggtgattgctgagcatttgacggtagaagaagctgccgggctaaaagagggattccaggttatggatacaaacaacagaggcaagattaacattgatgaattacgagtagggttgcataaacttggtcatcaagttcccgaatcagatgtccaagctcttatggatgctggtgatgtagacggggatgggcacctagattatggagagtttgtagccatttctgttcatctgagaaagatgggaaatgatgagcatcttcgcaaagccttccaattttttgatcagaacaaaagtgagtatattgagattgaggagctgagtagcgccttatctgatgatcttgacacaaacagtgaagaagttgtcaatgcaattatgcatgatgtggacacagacaaggatggaaaga

SEQ ID NO: 250182 - DNA, 506 bp, Glycine max
  unsure (1)..(506): unsure at all n locations
naatgatacgtacgtatagccatgccgtaccggtccggaattcccgggtcgacccacgcgtccggagagagaaagagaaccaaaccaaataaagctcttggttggttcacccttgtgcttattttttgttgctgagaaagagcaaagaagaagaataagaagaaggttttgatcggatgcgatgagcacacaaggacaagtgattgatgaggcggttctggatgacataatccggcgcctaacggaggtccgattggcccgacccggaaagcaggttcagctctccgagtctgagatcaagcaactttgcgtcgctttcagagacatcttcattaaccagcccaatttgcttgaactcgaagcccccatcaagatttgtggtgacattcatgggcagtacagtgatttgttaaggctatttgaatatgggggtttgcctcctactgccaattatctctttttgggggactatgtggaccgtgggaagcagagcttagaaaccatat

SEQ ID NO: 250183 - DNA, 524 bp, Glycine max
  unsure (1)..(524): unsure at all n locations
ggttttgccttgnctnaacatgatccctacggactgctgtaccggtccggaattcccgggtcgacccacgcgtccgaaaacttccattcttggttttgattgtcaagaatctaaagaagtatttcacatttgagattcaagttttggatgataagaatgtcagacgacgatttcaagcctcaaattttcaagtgtgctgtcactcgggtaaagccctacattgcactatgccactgagaatgatgaggggtggaatcaaatccagtttaacctggctgatttcaccaagagagcatatggtactaattatgtggagacactgcaagttcaggtccatgcaaactgtcgcctgagaaggatttacttctctgaccgcctctactctgaagaggaactccctccagagttcaaattgtaccttccaatgcagaaatcatgaaaaaatgggagtttggagttgtagcctggagaaaatgatgtgattntatatgcgtactactaggtgattttaatctaaactttgg

SEQ ID NO: 250184 - DNA, 422 bp, Glycine max
gctcgtaccggaatctgcatttccgagccaggcgtccgcagaggtgaagcttcatggattttggtatagtccctacactttgagggtggtatggaccttaaagttaaaggatataccatatcaaaacatagaagaagaccgctacaataagagtcttcaacttcttgaatacaacccagtatacaagaaaactccagtgcttgtccataatggaaaacccttatgtgagtccatgcttattgttgaatacattgatgagatttggtcacataattcattacttgctgctgatccctacgagagagctctggcaaggttttgggttaaatatgctgatgatgacatgttttctgcagttattgcattcttccttagcaataatgatgaagagcgagaaaagagcatagagaagatatgggagc

SEQ ID NO: 250185 - DNA, 524 bp, Glycine max
  unsure (1)..(524): unsure at all n locations
ggtnnttagcgtgctgtgtcgaacgggactcatcgctcgtaccggtccggaattcccgggtcgacccacgcgtccggttatatttcgctctagggaacatgaaaactgtggtccacagccagggtgtgttcgggcacatattgaaagtggaggatttaatatttcccccttaaaacctcgaaatgggaggcccaggacccaagtccagcatcttatgcagattgatctgaagggatggggtgtgggttacttgtcatcttttcagcagtattgtgtccgccaaatgttaaatagtgtagctggtttacgtgaatggtttgcccaatcagatgaaagacatgctcattcaagaattcctgtcatggttaatatgtgctcaacagctgtttcttcaaagaagaatcagaagccaaatgatgtttctgtcaatcctacttctctcgatcaaatgaatgctgcaagcaagaagttctgccttgatagatgaatattctgatgatgaataagatcttcanatagcgtac

SEQ ID NO: 250186 - DNA, 433 bp, Glycine max
  unsure (1)..(433): unsure at all n locations
ttcccgggtcgacccacgcgtccggtaagggacaaggtgtatcctttacaaatctttttatcatatgggtggtggtgctgtgtgccgcactgccaatatcatcgctctatccattcctttatttcatggtaagggattttaatattgcgaaaacagaagctgatattagttcttatgctggttatgtgggttctgcattcatgcttggcagatgtttgacatctttgttgtggggaactatagctgatcgctttggtcgaaaacctgtttttgttataggaattattgcagttgtcattttcaacacactatttggccttagcacaagtttttggatggctgntatcatgaggtttcttatgggaagtttaaatggtttgcttggaacaacgaaggcgtatgccactgaaatatttcgagaagaacaccaagc

SEQ ID NO: 250187 - DNA, 533 bp, Glycine max
  unsure (1)..(533): unsure at all n locations
nnntttaagtatgccnntgncaattgaagagcggatcattgcgcactgctcgtaccggtccggaattcccgggtcgacccacgcgtccgcccacgcgtccgcccacgcgtccgtggaccttttcccactgctgttaccagcttgttggatcttacacggcttgatcttcacaataacaagttgacagggcctattcctcctcaaattggacggttgaagcgtcttaaaatactaaatttgaggtggaacaaactacaggatgcaattcctccagaaattggtgagcttaaaagtttgacgcatctgtacctaagcttcaacaatttcaagggagaaattcccaaggagctagcaaatcttccagaccttcgctatctatatctccatgaaaaccgtttagctggaagaataccaccggaattgggcacactgcaaaatcttcggcacttggatgctggtaacaatcatttagtgggtaccataagggaactcattcgtattgaaggttgctttcctgcactacgcaatctgtn

SEQ ID NO: 250188 - DNA, 385 bp, Glycine max
ggaattcccgggtcgacccacgcgtccgatcattataaagatcagacagtgccttggcataataaattcgcgagtgttgcgaccctggatcactagaatcacgggttttgagcaacatgggtgttgtggatggtctcttggcattgggtttgattctgaatgtgtgtgttgtgtgcaatggatgcacaagcagccccttcgtcaggacagctgaaaaggctgtagatatgccacttgacagctatgtctttgctattcctactggatataaagccccccagcacgttcatataacgcaaggtgacctagtggggaaatgcatgatcgtgtcatgggtgacttgggatgagccgtggtcgagcgaagtgcgttactggagtgagaa

SEQ ID NO: 250189 - DNA, 524 bp, Glycine max
  unsure (1)..(524): unsure at all n locations
gagatggnttnctgaacaatgcgacttattgcactgctctaccggtccggaattcccgggtcgacccacgcgtccgggtgataacaggtctagcatatttgacgccaaggccggaatttctttgaatgaaaactgtgtaaaacttgtttcctggtatgacaacgaatggggttacagttcccgtgtgattgatttaattgcccacattgcatccgtggcttaaacagttgaggctgatcttggatatcatcgctaaaccgttccaaatttttatcttaatcgagtttattttagtgtgaattcggaataaacacgtgttgctgtgtgtgatatcattgaaaaacacagtgcaatatttgtatttatatttttgagtttgatagacggccttaggtttttcctcctcttgtaagggacggttgactattctgtttcgtcatcacaatcataatataagcaacattttgttttccaaaaaaaaaagnnnaanaaaaantnaaacaaaaaaaaaaatttttattagg

SEQ ID NO: 250190 - DNA, 514 bp, Glycine max
ggagatgtgtgctgaatgtggattattggatgctctaccggtctcggaattcccgggtcgacccacgcgtccggaattttcttcatccttctctgttctcctagaacttgattacttgaacattccctatgacagatgaggtggttcttctggatttctggccaagtccatttgggatgagggtcaggattgcacttgctgaaaagggtatcgaatatgagtacaaagaagaggacttgaggaacaagagtcctcttctcttacaaatgaacccggttcacaagaagattccggttctcatccacaatggcaaacccatttccgaatccctcattgctgttcagtacattgaggaggtttggaatgacagaaatcccttgttgccttcagacccttaccagagagctcaggctagattctgggctgattatgttgacattaagatacatgatcttggaaagaagatttggacatcaaagggagaagaaaaagaagctgccaagaaggagttcat

SEQ ID NO: 250191 - DNA, 525 bp, Glycine max
  unsure (1)..(525): unsure at all n locations
agagatggnnnnctnacaattggtgcgggatgttaatgctgtaccggtccggaattcccgggtcgacccacgcgtccgggaaaatgaacacacattggaaaaaattaagttagagaaagataaggagccgccaaagcctgagtataaagaaatacagcacaccgatcaaaaccatacagagaaacctgaagataagattactgtcgaaaatctagaaaatagagcacaaggaggggctgagccaatggagatctcccagagccccatgtcgtcgcctgatgatactccatgtggttatgtaaaacttttgaaaggtcatacatcagaggtttttgcttgtgcatggaatccatcagctccacttcttgcatctgggtctggagattcaacagctcgaatttggaaaattgctgatggagcttgtgactctagtgtgcaaaatgaaccagtaaatgttgtggtgctgcagcacttcaaagaaagcaccaatgaaaaaagcacggatgtgacaacacttgactgtaa

SEQ ID NO: 250192 - DNA, 522 bp, Glycine max
  unsure (1)..(522): unsure at all n locations
ggtntaggtgtcttacatagaatagaagtgctcgccataccggtccggaattcccgggtcgacccacgcgtccgcaaacacgtcactaatcgtatcaacaattcaccatgcgcttgagctgcaatggatgccgcgttctccgcagagggtgcaccactgagtgccccattcgcatctccctccaatggatcaattcccctaactcccaatccaacgcaaccctcttccttgcaaagttctatggccgccaaggcctcctcaccctcctcaccaacgctccctcacaactacaacaagccgttttaaaatctttgctttacgaagcatgcggtcgaatagtgaacccggttctcggctcgaccgggttgctctccaccgggaattggcatttgtgcgaagccgcggtcaaagccgttcttaatggcgcgccgattgagcaggctcctttggacggcgccacaagcctgcagctcaaggcttngaatattcgccacgtggcaaaaagtgattaatcgtgccgcn

SEQ ID NO: 250193 - DNA, 526 bp, Glycine max
  unsure (1)..(526): unsure at all n locations
gtntattaagcgtgagtgatcctttaagtattgcatagctgtaccggtccggaattcccgggtcgacccacgcgtccggtctctcctatcctttcgcattctcaataccctatggatttgtgaaaggaaagcaaacgtggttgatcaggtccaacaccctacaatcatggacaaggttgctggttagctccatctacgttctggtctttcatctggtattagaagttatgatggagcctaccgtcacccagctatgtaccaaagaccctcttttgggaattactcgaatgctgcattgcagtttcctgtgatgcccacatgcaaagctaccatggatttgtctgctactgcaacatctgtctgacccgtctttgttgctgctccagcagagaaaggccattttcttttagactttctcatgggaggtgtctcaccagctagctgcaaaactgctgctgctcccattgaacgtgttaagcttttgatccataaccaggatgagatgatcaagactggtaggctgtct

SEQ ID NO: 250194 - DNA, 526 bp, Glycine max
agtatatttgcgtgctgatcatgagcgtagcgcatcgccgtaccggtccggaattcccgggtcgacccacgcgtccgcccacgcgtccgggcgggcacagaagataggtattaaggagcctcaggcaactttttcagcttgttttggtgcagcattcattatgctacaccctacaaagtatgcagcaatgcttgctgaaaagatgcagaagcatggtgctaccggatggcttgtcaacactggttggtctgctggcagctatggctatggaagtcgcattaaactacaatacacaagaaaaatcattgatgctattcactcaggaagtctgctgaatgcagagtacaagaagactgaaatttttgggcttgagatccccaccgaagtggacggtgtcccttcagaaattctagaccctgtgaacacttggtcaaacaaaaagggctacaaggagacactattgaaattggctggattgttcaagaacaattttgaaaccttcaccaactacaagattggcagggcc

SEQ ID NO: 250195 - DNA, 523 bp, Glycine max
  unsure (1)..(523): unsure at all n locations
agttnaaggtgcgnttaccatgaattgacttcatagcactgccgtaccggtccggaattcccgggtcgacccacgcgtccgcccacgcgtccggctgatgcatatatgcagttgcttgaaatgtatttggatccacaagatgataaggatcccatgtttactgctgctgttcgccttctgcataatcatggagaatcattagatccattgcaagttttagagaaactgtctccagatatgccacttcaacttgcttctgacactttactaagaatgttcagggccagagttcatcatcatcgtcaaggacagattgtgcataatttatctcgtgccgtagacattgatgcaagattgtcaagattggaggagaggtcaaggaatgtacaaattaatgatgagagcctctgtgactcctgtgatgcacgtcttggtacgaagctatttgcaatgtatcctgatgacactngtgtnatgtacaagtgttaccgncgtcaaagtgagtcagtgtctgtctcaagcn

SEQ ID NO: 250196 - DNA, 524 bp, Glycine max
  unsure (1)..(524): unsure at all n locations
cgtatgccnntancattgaaagaagagattaatggcactgctctaccggtccggaattcccgggtcgacccacgcgtccgcccacgcgtccggcctcgaagagatcaaaaacgagaacgtcgatctggaacggattccaatagaagaagtgtttgagcagctgaaatgttcaagagcaggtctaacatcagaggaagggggcaatcggcttcaagtctttggaccaaacaaattggaagagaaaaaagagagcaagtttttgaagttcttgggttttatgtggaaccccttgtcttgggttatggaagctgctgctataatggccattgctttggcaaatggaagaggaaggccaccagattggcaggactttgtcggaattatcgcgctgctagtgatcaactccacaattagttntattgaggaaaacaatgctggcaatgctgctgctgctcttatggctggtttggctcccaagactaaggtactaagggataaccgatggagtgaacaagatgctgcan

SEQ ID NO: 250197 - DNA, 523 bp, Glycine max
  unsure (1)..(523): unsure at all n locations
agttttatgtgtgngtgccatcgatagtgaatcattgccatgctcgtaccggtccggaattcccgggtcgacccacgcgtccgcctgcgcatgcaaccgggcagtccacgggccatgtcaccgaaggagtggagggctcacatgccatgggaaccaacagaaggcctggtgggaccgatacagctcatcatacccgtgcgggtggaaagccgaatgattatgggtatcggactgggggtacttaattaatgatgactatatcatcaaggcttataggcaatagggtaataataaggcttattaaatgtagtcagtttggggaatggctatcgtacttgttagacaggatatcatggttggtcatgattttctctccactcgatatggagagacttgagtgtggatatgacagtgtactcactacgtggaaacgttatatgtggttaacttgtacgtgtatcatttagtgatgattattaaatcaaatgtccggtggttaaacgaaaaaatgaaggccgcgcgc

SEQ ID NO: 250198 - DNA, 525 bp, Glycine max
  unsure (1)..(525): unsure at all n locations
gttttttagttgccatgncactgcccagctcacgacgtcactgcggtaccggtccggattcccgggtcgacccacgcgtccgtgtttgctgttgtaactcgttcttcttcttttgttgttctgtgtttgtgtttgatttggctctcacctgaaaatgtctagctgcggtggtaactgtggttgcagaagctcctgcaagtgcggcaacggctgcagaggctgcaagatgcacccagtcttgagctacactgagtcaaccaccatcgagaccttggtcatgggagtggcacctgttaaggctcaattagagggtgctgaaatgggtgatcccgctgagaacgatggctgcaaatgtggaccatactgctcctgcaaccactgcacttgcaagtgaggtgttggaagagctagctttaagcatagatagcccttaagtatgaattatgatcgacgattaatgggtagcttagaacttatgtattatggttctgatggtttacgtgcacaatggtgcttttggcttca

SEQ ID NO: 250199 - DNA, 515 bp, Glycine max
ggtgccctgacgctgcacgtagatcatcgcctatccggtccggaattcccgggtcgacccacgcgtccggcacactttgtatggcggaaaatatgaaggaggtggaagttgaagatggatatgtcttgaaagaagagatccatctcacggtgctaaaaacctctctgttcttcgcgggcgatggcttcagcgtctacgattgcaaaggtcaactcgtgttcagagttgactcttatggacccgacactcgcgacatagacgaactcgttctcatggatcctaacggacgttgcctcctcaccgttcgtcgaaagcggccgagtttgcatcaacggtgggaaggtttcaaaggggagagaatggacggtgataaacccatcttcagcgtgaggagagcgtcgatcataggacggtcgcgtgcgagtttgacggtggagatgtacgataaccccggtgaggagtaccagatcgaggggtgcttctcgcagcggtgctgcacgggtttcaatgtgaca

SEQ ID NO: 250200 - DNA, 521 bp, Glycine max
  unsure (1)..(521): unsure at all n locations
ggttttagcgtcctatcatgtacgtagtgcatcgctgtaccggtccggaattcccgggtcgacccacgcgtccgtaccattaaaggtgacaatccagatgcagtggtttctggattgatggctgctggggaaacggcctgtgcatcagtccatggtgccaataggcttggtgcaaattcacttctcgatattgttgtttttggtagagcttgtgcaaatagagttgcagaaatccgtagaccaggagagaaacaaaagcctctagagaaggatgctggtcagagaacaattgcatggctggacaaattgagaaattcaaatggctcattgccaacttcacaaattcggttgaatatgcaacgagtaatgcaaaacaatgctgctgtgtttcgtacacaagaaacattagaagaaggttgtcaattaattgataaaacatgggagagcttncatgatgtccaggtgaaggaccgcagtttaatctggaacttcgacttgattgagactattgaatggaaaaa

SEQ ID NO: 250201 - DNA, 520 bp, Glycine max
ggcgtcactgagcatgacaagtagctgcatcgctcgtaccggtccggaattcccgggtcgacccacgcgtccgctttcccgaatcttttccaatctcccttcgccgatccttcgcgcgttccgccaccaccgccggcgttctcagctccccgcttccggaaaattatgtatagtgttttcttggctgcttcatagtcctccctcccttgccaccggtgaatatttgattggcaatcctgtccttattagtcaagttttagaatacaaagaagcttcaatggccaagaaaccaggaccaagatccagtaaattgtcagtgtacctttacattcctaatataattggatacatccgggttcttttaaactgttttgccttctcccaatgtttatcaaacaaaatcttattctctattctgtattttttaagctttgtatgtgatgctgctgatggctggtgtgcccgcaaatttaatcaagtgtcaacctttggagctgtgcttgacatggtaacagacaga

SEQ ID NO: 250202 - DNA, 543 bp, Glycine max
  unsure (1)..(543): unsure at all n locations
gtnttatggccntncgactgaagagaatgattgcactgctcgtaccggtccggaattcccgggtcgacccacgcgtccggcgacgcgtgaccgtccacgactgttcgtataatacgactcattcaaagttaggagcttcagtccttatgccggatcacggcatggggcgacgagacctcaaccttcgacgtaatccgaagcctgtacgctttacgatcagcgtctgtgcagcgcgggtgcaacaaccaccactgttatacaggatagtccgacggctgaaacacagcagcaaagtcatactgcttctaaaaccatcggctgatgcaaatgctgatgacttgcgagctggagctcaggagactgcgcatataagaagtcagcagtcgactgcaaggaaaagcctgacaaccgaccacggcttgcgccccgagcacaactacaacaggatactcttagacgccatcaatgagaacggtcgctactgagcagctgctaatgacccagaactagggacatgcttgtaacattgaggtggtccaaagc

SEQ ID NO: 250203 - DNA, 525 bp, Glycine max
  unsure (1)..(525): unsure at all n locations
tggttaaggtgccntgccgatgatggagagattattgtcactgctctaccggtccggaattcccgggtcgacccacgcgtccgggggatttggatatgttttctgctccccttggagaaggggatattaccgcccggcaaactgagccagaggtgatagttgaggatgattatagtgatgaagaaatcgatgtagatgagctcgagaggaggatgtggagggacaaaatgcgtctcaagcgattgaaggagcaaagtaaacctaaggaaggatttgatgcagtcaagcagaggcagtcccaagaacaggcaagaagaaaaaagatgtcaagggctcaagatggaatcttgaagtacatgctgaagatgatggaggtttgtaaggcccaaggttttgtctatgggataattcctgagaagggaaagcctgtgactggggcatctgataatcttcgtgaatggtggaaagataaaagttcgtttgatcggaatggcccagctgncatagccaagtttcaagctgata

SEQ ID NO: 250204 - DNA, 516 bp, Glycine max
ggtagccgtgctgaaatgaggaggagatatgctcgtaccggtccggaattcccgggtcgacccacgcgtccgcccacgcgtccgcccacgcgtccgcttgagcctggcaaagattactacatcaaacctgccataaccgacgttggaggccgcgtcactttgttaagcagaaacaatccatgccctctatatgtaggtcaagagaattctgatgcagcagagggcttaccccttttcttcaccccttttgcagaagaagatgatgttgtgaaggtgaatagggacttcaaggtgacattctcagctgcctcaatatgtgtgcagggcacaaattggaatttggctgagaaggatagtgagagtggaaggaggctcattgctgcatcaggcagggatgattactttagaattactgagacaccaatcaaaggttcatattatataggttggtgtcctacagatgtatgccccttttgtaggtttgactgtggcatttgtgggtggttgcgtgagaat

SEQ ID NO: 250205 - DNA, 522 bp, Glycine max
  unsure (1)..(522): unsure at all n locations
aggggagatgctncttgattgtgtgagggaggattatgctgtaccggtccggaattcccgggtcgacccacgcgtccggtgcctctcctctcgctgcgttttccaatggcggccataacccgcctcctaaatcgcacctcttccctctcttccgtggcgcgtggattctcatctcacgcatcgccgccgcgcaaggaggagaggaatgtccagtgggtgttcctgggttgccccggcgtcggaaaaggcacctacgccagtcgcctctgcaacctcctcggcgtccctcacatcgccaccggcgatctcgtccgccacgagctcgcctncaacggccccctttcttcccagctatcagaaattgttaatcaaggaaaattggtgtcagatgaaatcatcataagtttattgtcaaagaggctggctgatggggaagctaaaggagaatcgggatttattcttgatggttttncacgaacaataaagcaagcggaaatattggaaggggtaactgacattgac

SEQ ID NO: 250206 - DNA, 513 bp, Glycine max
  unsure (1)..(513): unsure at all n locations
agtaaatgcntncttgaaataggaatattgcatgctctaccggtccggaattcccgggtcgacccacgcgtccgattgatttatgctagtagaaagagtgagactgatgttgacaagcagttgccagatcacaaagactcttctagtagagttacgaatactttggttgctcttaaatcatctcagcttgtggcgtcaatctctcctagcatagaaattacccttgatgatctattgaatgcagacacggctgtgtcttgctttatgaggttgtgtggagaagctactgaagatctccaccttgatgctctgctggctattttggaagagtgggatggacttttcactgcaaggaaagatgaagaaaccactgttgaaacatctgatggaggaaatgactggaacaatgatgattgggacgagggatgggaaagccttgaggaagtagacaatcctgagaaagagaagatagaagaccctgtttttgtccaccctttgcatctgtgttgggcg

SEQ ID NO: 250207 - DNA, 518 bp, Glycine max
  unsure (1)..(518): unsure at all n locations
gtggtgagtgggactcactgancgctacggctagtacggtccggaattcccgggtcgacccacgcgtccgaaaaatggaatcatcggagatcgaagacaggaagccggagattctgaaaagcggaggaggttgtcttctgccgccggttccgccgccgcaagcgaaggcggcggtgaagacggattacatgtacttcgacccgtcggattcaatcccgaagctgcacacggactcgagctgttcggagcacgtggtatcgccggaattcgcgagcgaggtgcagagcgagccaaagtggaaggagtgggagaaaagcctcgagtttccgtttaattacgtggatgccactctgaacaacagcaacagcttcacgacgcaattccagggcaataatcagatgatgtcgccgctgcaagacatgttcatgtactggcccaacaagcccttctgaacaaaccgatccaacgccgccattcgcatttgcacggtagcacgagactcaaggtctatgagtgtn

SEQ ID NO: 250208 - DNA, 529 bp, Glycine max
  unsure (1)..(529): unsure at all n locations
nggtnnaagtatgcgtgatcatgcgagatanagtacgtgctcgtaccggtccggaattcccgggtcgacccacgcgtccgcccacgcgtccgcccacgcgtccggaaattgggcgtgtgggagttgttgaatcgggaagcagaaaaaatgagaatccatcacatagcatgcctccaagacaattattcctatctgatcgtagacgagagcacgaaggaagccgcggcggtggacccggtcgaaccggagaaggttcttgaagttgccagctcgcacggcctcactctcaaattcgtcctcaccacccaccatcactgggatcatgctggtggaaacgacaagataaagcagctggtgccaggaatcaaagtctatggtggttccattgaaaacgtcaagggttgcactgacaaagttgaaaacggtgataaggtctctcttggagctgaaatcactatattggcccttcacactccttgccacacacaaggtcatataagttactatgttactggcaaagaggatgagc

SEQ ID NO: 250209 - DNA, 524 bp, Glycine max
  unsure (1)..(524): unsure at all n locations
gtacgcggtgatcatgattagaagatgatgccactgctcgtaccggtccggaattcccgggtcgacccacgcgtccgcaaaggagttgtggaaaatgtgcctacaaatagctccctgaaagcacatccacgctttcaagccgagaacttagacaagaacaagaatatatatgaacgaattgaaggccttgctaagaagcatcaggccactcctgcccagttggcattagcatgggtacttcagcaaggcgaggatgttgtacctatccctggaacaactaagattaagaacctggatcaaaacataggtgccttagcagtgaaactgtcagaaaaagacctgagagaaatttctgaggcggttcccattggtgatgtagcaggtggtagatactacaatggattggatcacttttcatggaagtatgctaacacacctncaaaagattcaaaaatctcaacctgacgcacccaaccaaccctttggttagggaatctaccaagtcatcatgaattgagggtaac

SEQ ID NO: 250210 - DNA, 520 bp, Glycine max
gtatagtgggtccttgagccatcccagatgctggctcgtaccggtctcggaattcccgggtcgacccacgcgtccgatgaagaccaaactgctagcatttctcctcttctttgccttgactacaaaaccactacgtacttggagcagctggagctgctacagagccagtgattgatacatcaggcatgaagctgagagctgatgcaaattaccatatcatccctgcagtgcccttgaccatatgtggctttgctggctggttcactggtggaagcctttcactagacagcatagatgaatcttgccctcttgatataataatcgtgaaagccaatgaatgcctaccactgagattctgaccagttaacaccaaaaaaggtgttattcgtgtctccaccgatttgaacattattttctctgattctgatgaaaggtgtgcacaccattccactgggtggatgcttgatcaatatgatgcctgtattgtacagacatatgtgaccactggtggtgttgttgg

SEQ ID NO: 250211 - DNA, 514 bp, Glycine max
  unsure (1)..(514): unsure at all n locations
ggtaatggtnttggcagggtagaagcatgctctaccggtctcggaattcccgggtcgacccacgcgtccgacgagcgtgaattacaaccacgtacatttccacgaccagaggagcatgaaggagaacagtggaaaggaaggcatcgtcatgaagacccggaagagagggcgagaatgagactgagggaagcagaaagaatagagagggaaagggaggaacagagggtgagggaggaggaagagaaactacggcgacgtgagaagaaggaacaacgggaagagaaagatgaagaaggtcaaggttcggaagactcacactcaaaaagacagaacaacccttttcacttcagctgtaacaagttccaaacgctcttcaagaaccaacatgtgtacattcgcgttcttcagagattcgaccaacgcttcctacaacttgagaacctttgagactaccgtgttgtatagctcatggctaaacccaacaccctctctctcctcaaccatgctgacgctg

SEQ ID NO: 250212 - DNA, 516 bp, Glycine max
ggtaagggttgattgggccacgtcgaccgcatggcataccggtccggaattcccgggtcgacccacgcgtccgaggggcggtgaaagctatggttgtggctttggggaatgaaggagttgctgaggaagcagctggtgccttggccttgattgttcggcagcctgttggcgccatggcggtggtgagggaggaagcagcagtagccggattgataggaatgatgcgttgtggaacgccgagaggtaaagagaatgcagttgcagcattgttggagctgtgcaggagtggaggtgcagctgcaactgaaagagtggttagggcgccggctttggttggattgcttcaaaccttgctctttacaggtacaaagagggcaagaagaaaggcagcttcactagctagagtgtttcagagatgtgaaaatgcatctctccattatggtggattaggtgtacgttattcatttgctagcgattcagcttcaaccagaaatactacaacctttgtgagtgact

SEQ ID NO: 250213 - DNA, 522 bp, Glycine max
tgttttttgggtgctgtgcacgatcgcacgccattgcgtaccggtccggaattcccgggtcgacccacgcgtccgcccacgcgtccgccacgcttctctccttccttcaacgtcgctttccactgtggccaccgggtgaacttttcaagtttgtggacacgctttaatgtacagaagcagcaatattgtggccagggtttttgatcgtcaaatttgcactcctgctcctggcactagtgtgtaatttaattcttgcaggttcatcatgctcggcgattctatgaaaatttggtaccaagtcacacagtatatgaggtcgagtgcccagaccattcatttcgtaaattcactgatgatggtcaataccttataagtttcagcagaaatcatcaggagttgattgtttataggcctagatggctttctttttcatgcaaggatgaagattgtgataaacatgatttgccatcaagagcaaagagatttgacagtttttttctccaaatatattgtgtaccactt

SEQ ID NO: 250214 - DNA, 526 bp, Glycine max
  unsure (1)..(526): unsure at all n locations
gttctaaggagggggtgtcctatggtagtgctactgacgtaccggtccggaattcccgggtcgacccacgcgtccgccagaatttgcatcaggggcagcagttgctgatgcagctggtacaagagataatgcatttgaagagaatgagtctgagagggaaccgagcaagtccatttcaacgctgttagtggtggctggggcggcaggagcagctgatgaaggaccacgtgggtcaaaaaagtcatcagtcgtctcagtttcctgggctccagatgcagcagtagttgcttcggttggattattgtttacaggaaaagatcccgtaagagcagagatttgactaggattatcatttacatgaggagaggagtctctaggagcagatggtgctgaagtttccgcatctctttcactgtgtacagggctgcgagattcaccaacagcttcttcatagctaggaggagcacccatattttgctcagaaagtttccgctcaagccttgcttncagagatgggtcttcagcn

SEQ ID NO: 250215 - DNA, 521 bp, Glycine max
  unsure (1)..(521): unsure at all n locations
ggagtgctgtcataagaatattgttatgctcgtaccggtccggaattcccgggtcgacccacgcgtccggaaaagaagaacaaagatgcaatcctcaaaggagaagatgaaaaacatggcaagtgctgccaaggaacaagtcgacatctataaagccaaaatagacgagaaggcagagaaagcaacggcaagaacagaagaggagagggtgatagcccatgagcacgcaaaggcaaaggaagctggagcaaagatggagctgcatgaagctaaagcaaggcatgcagcagagaagctaagcgccaaccaatcacattatggtctccaccatggccacaacaaccctcccttagtaggaacaactcagactcactaccagcaagggcaccagcaccagccacttggggcagttcctatgcctggaaccacttatccatcttatccactaggaggaaaccctaacccttcaaggaacaaacatatataatagatctatctgtgttttgctgtagtacgtctan

SEQ ID NO: 250216 - DNA, 526 bp, Glycine max
  unsure (1)..(526): unsure at all n locations
agtttttatgtgtcnatatcacttactgatctcatcgtcactgccgtaccggtccggaattcccgggtcgacccacgcgtccgtaataatccaacttattttgtctcattactatagtttctctagatggaagctaaaactaagtcatgcgtagttctaccttttcttctattggttgcaattttcatgcaacaatgtgtccatggagaatcgcaagtgccctgcctttttgtctttggggactctctgtctgataacggaaataataacaacctttcaagcactacaaagtccaattacaaaccatatggcatcgacttcccaaccggcccaacaggacgatttacgaatggacaaacatctattgacctaattgctcaactactgggatttgagaatttcatcccaccctttgcaaacactagtggctcagacacacttaagggtgtgaactatgcatccggagcagctgggattctaccatagagtggtacacatatgggtgccaacattaatttgagggtac

SEQ ID NO: 250217 - DNA, 525 bp, Glycine max
  unsure (1)..(525): unsure at all n locations
agttnnaggtgtcctatcatgatggcgatttatgccatgctcgtaccggtccggaattcccgggtcgacccacgcgtccggtggtgtataacactcgatccagcacattaacaatggaaacgcagctttacgtgttcgctctctagactctgctctcaaacgccgtcgttttggaactctttttcttttccctttgattcttctctgtctttgtaaccgaaagaggggaaaatataattaataccgatttcgcaaccaattcttctcttgcgttgaattgggacaacgagaaattttggatctcagtttttggcaggaaaaaaaattgcatttgagtaaaaataacagagtgtagtgtagggtcttgttcttgatactgtgctaaatttgttggatggcggagaaatcatgcatcaagcgccttcagaaggaatatagagccctttgtaaagagccagtttctcatgttgtggctcgtccttcaccgagtgatattcttgagtggcattatgtgttggagggaan

SEQ ID NO: 250218 - DNA, 522 bp, Glycine max
  unsure (1)..(522): unsure at all n locations
cggtgcnntnntctcgagggaggatgtatgctcgtaccggtccggaattcccgggtcgacccacgcgtccgcccacgcgtccggttgcacagaacacaaaagactatgctgcagagaaggctaaagaaggaaaagatgctactgtgaataagatgggagagtataaagattatacggcggagaaggctaaagaggggaaagatacgacgttggggaagcttggggagctgaaggactctgcggctgatgcggcgaagagggcagtgggttacttgagcggcaagacagaggaaaccaaagagaaagtctcggagacggcagaggcgacggctaataaggcggcggagatgaaggaggccaccagggagaaggctgccgggactgcggaggcggccaagaacaaggccgcagaggtaaaggacagagctgcagaaaccgcggaggcggccaagaacaagactgccgagactgctgangcagcgaagcagaaaaccgcacaggcaaaggacaacgccaagggaa

SEQ ID NO: 250219 - DNA, 521 bp, Glycine max
  unsure (1)..(521): unsure at all n locations
ngttttttgtgccntnccatgtacgagttctcgccacgctgtaccggtccggaattcccgggtcgacccacgcgtccgcccacgcgtccgcggacgcgtgggtgccattctcatcctcctctgtctctctctctcgaccattgccatggatccttacaagctccggccatccagcgccttcaattctcccttctggactacaaattctggtgctcctgtttggaacaacaactcctctttaaccgttggagctagaggtccaattctgcttgaggattatcatcttgtggagaagcttgcaaactttgacagggaacgtatcccagaacgtgttgtccatgccaggggagctagtgcaaagggtttctttgaggtcacacatgacatttctcacctgacatgtgcagatttccttcgagcccctggagttcagacgcctgtaattgttcgtttctcaactgtcattcatgagcgtggtagccctgaaaccttgagggaccctcgaggttttgccgtgaagt

SEQ ID NO: 250220 - DNA, 518 bp, Glycine max
agtatgccattgatcttgcctagccgcgtagcacgctcgtaccgtccggaattcccgggtcgacccacgcgtccggtgaactcttgagggtcgtggtagtttggcaaccacacttatcttcatcaatagtcgcggaaacagtttccggtgcatctcatgcgcttcctaaatgaacgacgcatatgtctcgaagcatatccagcatattgtgcgtgtcatccgccacgaatcttatgagaaagccatcgagatctctgtatctgtcgaagaggatttcaatatcgagaagctgcatttggtcgaagccgaagagcagaagatcaggcgagaatacgaacgcaaagagcgccaagtcaaaattcgcaagaagattgagtactcaatgcacttgaatgcctttcgcatttatgttcttcaagctcaagatgtcgtgatccagtccattgtagaatctgcatccaatgtaactttgaatgtcacgctttacccttatgggcatcttcatggaaccctgataa

SEQ ID NO: 250221 - DNA, 519 bp, Glycine max
  unsure (1)..(519): unsure at all n locations
gggagagcttgcgtgaccacgctagagagccatgctgtaccggtctcggaattcccgggtcgacccacgcgtccggttcattctctatgcgcagttccctacctctcctttcaagatgcagatcttcgtcaagacccttaccggacagaccatcacccttgaggtggaaagctctgacaccatcgacaacgtcaaggccaagatccaggacaaggaaggaattccctcggatcagcaacgtctcatcttcgccggaaagcagctcgaggacagccgtaccctcgccgactacaacatccagaaggagtcaacccttcaccttgtccttcgtctccgtggtggcatgcagatcttcgtcaagactctcactggcaaaaccataaccctagaggtcgaaagctctgacaccattgacaacgtcaaggccaagatccaggacaaggagggaatccccccagaccagcaacgtctcatcttcgccggaaagcaacttgaggactgacgcacnctagccgactn

SEQ ID NO: 250222 - DNA, 515 bp, Glycine max
gttatagctgtcgtgaacccactcagacagtcatgccgtaccggtccggaattcccgggtcgacccacgcgtccgaatcaaagcaagccaattggtctctctcttacaccatgagtgcatcaaccaaagcttggattgtggcatcaagcataggggcagtggaggccttgaaagaccaattaggtgtatgcagatggaactatgctttaaggtcactacaacaacatgcaaagaacaacatcagatcttatagtcaagctaggaaattgtcctctgcatcctctgctgcggtttccaacaaggtcaagagaaccaaagaagagcatatggggaaagtcatcgaattcaattgctggggtcctagtactgcaaagttttaattagttaatatttatcttacgtgttgctacgatgagacggtgaatagagactgcttttttccatattcaatcccaatatcccccattaagcatcattatgtatctcaattccaatgtctagtgcccctttgcaaa

SEQ ID NO: 250223 - DNA, 516 bp, Glycine max
  unsure (1)..(516): unsure at all n locations
ggttttagcatggctntaaaatgcatggagaggctcggtcaacccgtccggaattcccgggtcgacccacgcgtccgcccacgcgtccgcccacgcgtccggcagaggtgaagcttcatggattttggtatagtgcgtacactttgagggtggtatggaccttaaagttaaaggatataccatatcaaaacatagaagaagaccgctacaataagagtcttcaacttcttgaatacaacccagtatacaagaaaactccagtgcttgtccataatggaaaacccttatgtgagtccatgcttattgttgaatacattgatgagatttggtcacataattcattacttcctgctgatccctacgagagagctctggcaaggttttgggttaaatatgctgatgatgacatgttttctgcagttattgcattcttccttagcaataatgatgaagagcgagaaaagagcatagagaagatatgggagcatctcaaggtttgtgagaatcagtgttttg

SEQ ID NO: 250224 - DNA, 520 bp, Glycine max
cgtcgtgtctgtcactgaaactgacatccatgtcagtaccggtccggaattcccgggtcgacccacgcgtccggttttttctcagaaccttctgaggttaaagcatacaacaaagagagagagagagagaagatgaggaagccatctatgctgagatctctccactccgccgccacccgcggcgcctctcatctcttccgccgtgggtacgcctccgagccggtgccggagcgcaaggtagccgttctcggcgccgccggcgggatcgggcaggctctctcccttctgatgaagctcaagcccctcgtttagagcctctccctttaccatatcgccggaactaccggcgtcgccgtcgatatcagccacataaacaccagatctgaggtagtggggtaccaaggagatgaatagcttggaaaagctttggagggtgccgaccctgttattacccctgctggtgtgcccagaaagcccggcatgactcgtgctgaactgttaacatcagggccggaatttg

SEQ ID NO: 250225 - DNA, 531 bp, Glycine max
  unsure (1)..(531): unsure at all n locations
gttaattttatgccgtgactgatgtcagaatggaagctcatcgctcgtaccggtccggaattcccgggtcgacccacgcgtccgcggacgcgtgggttggccattctatgatttttactcatgactcctccaagttgatagtagcaggtcacgataaaaggatatatgttgtgcatgttgggggggcagatgaagttaagtcagaattactgcatacttttacaccccttcgcgaatcacaagatcaagaattacctccaactgagccacccataacaagattgtttactagttctgatgggcagtggttggcagctgtgaactgctttggggatatatatgtatttaacttggagatactaagccagcactggttcatttcaagattggatggcgcctctgttacagctggtggctttcctccccagaacgacaatgtactgatagttacaacttcctcaaatcaagtgtatgcatttgacatagaggccaaacagntgggaagatggtccacaagacacacacattgct

SEQ ID NO: 250226 - DNA, 531 bp, Glycine max
  unsure (1)..(531): unsure at all n locations
ggggtgtnntaggcgtgntgaccatgatagacanagtancgcacgtacnggtccggaattcccgggtcgacccacgcgtccgactactacaagtacttccttacaatcaaaaccaacaacaactatggcaagttatcaaaagcagtacgatgatcagggtcgcaaggttgacgagtatggcaacgttgagaagcaaaccgacgaatacggcaaccctgttcatgctgctagtgtcacctatgtagccaccagaactgctgctggtggttacagtgatgacattaataagcaacatgataccaccaatgcctacggcgtagacactggtagacagcattctagtggtggctacgatggtgacactaataaacatcatggaactactggtggctataatgatgacaccaatagacatcatggaactaccggtgtctatggtatagacaccgataggcaacaacatgggactactggtggctatgccggtgacactggtaggcaacatgggaacatcggtggcccttactatgg

SEQ ID NO: 250227 - DNA, 527 bp, Glycine max
  unsure (1)..(527): unsure at all n locations
ggtatattagtagcctntgcaatgttagtatctcatgcgactgccgtaccggtccggaattcccgggtcgacccacgcgtccgcccacgcgtccggttcaaaacaaggtttccatcaactggctactcgaccaaggtcccagcttaggtattgtccgagtgcatggggttgggcttttacacaccgagctagtgtctggaatccctgtaattttcttccagtttgtagccaacctcccagccttccatcaggtcctagttttcctatgcatcaaacatgtgccggttccacatgttaaagctaaggaacggtttctagttggtcgtattggtccaaaagagttcagaatctaccggtgcatagtgcgatacggataccatgacgttcacagagatgattttgagtttgagaatgatcttatatgcagcatagctgagttcatacgcacagaaagaaccgaatcgaactctccaaatgatgagcccctaaaggatgacagaatggcaattggaaggacatgttctacn

SEQ ID NO: 250228 - DNA, 513 bp, Glycine max
  unsure (1)..(513): unsure at all n locations
ggagtgcgtgctgaattgttgtggatatcatgctcgtaccggtccggaattcccgggtcgacccacgcgtccgaatgtattaaaaaatatattattaaccatattacactcataaatcaaatataacctttatctatctttctttgttgattgatctctacctttaattgatttagaggatttgtttcaatgctaaattattgttacacaacgtatgcagggtgccaacatcaatttgagggtacaaatgttaaatcacctattcatgtactccacaattgctatcaaacttggaggttttgtcaaagctaaacagtacctcaacaaagtgttgtactacgttaatataggaagcaatgattacataaacaattactttcttncnncagtttacctaacaagccgcatctatccccctgatcaatatgccaacattcttattgcccagctatctcagtatatgcaggtatnttataattttctatattggtttcactttgtgtcacaaattcc

SEQ ID NO: 250229 - DNA, 516 bp, Glycine max
  unsure (1)..(516): unsure at all n locations
tgtagggcgtggtgggacgtacagtatgtcatggcataccggtccggaattcccgggtcgacccacgcgtccgctctctctctctgtctctctgtctcctccatggccatctgcttcagtcccaaacacccgtgcttacgatgagatgatatagacagcaatcggagctctgaaggagagggatggttcgagcaagcgagccataggaaagtacatagaacaagtctacaaggaccttccacccactcaccctgctttgttgactcaccatctcaaccgattgaaatcctctgccctcctcgtcctcgtcaagaaatcctacaagcttcctggatctcatcatctgcctgcgctccagccccaaaagacccgtggtcgtcctcccaagcccaagccccaccccgtctggcctgctgcagccctcaccgacagccctgctcttctatccgccaaaagaggccccggtcgtcctaaaaagattggtgtcagcccgccaggcccaaggggtcgtccacn

SEQ ID NO: 250230 - DNA, 527 bp, Glycine max
  unsure (1)..(527): unsure at all n locations
gtttttttagccgtgnttgttcatgaacctattgtcatcgccgtaccggtccggaattcccgggtcgacccacgcgtccgctgattaacgagaatggacaaggaagtggagcttggttcccttgaaggtgaaatggccacccagcacatttcacaaccacagaagcgcaagggtggtcttgttaccatgcctttcatcattgcaaatgaggcacttgcgagggtggcaagtttgggccttttgcccaacatgatactgtatttgatggggacctacaggcttcaccttgcccaagcaacccagatacttctctggtcccatgctaccagcaatttcacacctgtggtgggtgctttcattgctgattcttatctgggtcgattcctcgctgttgggttgggttcggccatcacttttctgggaatgacactgctgtggttaacagctatgatcccacaggcacggggctccacttgcagtaacaataaagctggaggcttgtaatcggcaacaggaggggcaatggn

SEQ ID NO: 250231 - DNA, 529 bp, Glycine max
  unsure (1)..(529): unsure at all n locations
agagtnttaggtgcgattagactccacgtagatancgccataccggtccggaattcccgggtcgacccacgcgtccgggggaacacggagaagctgatgaaccagatcatggaattgaaattcacttcgaaatcgctgcagcgtcaatcgcgtaagtgcgagaaggaggagaaatcggagaagctgaaggtgaagaaggcgatcgagaaaggcaacatggacggcgctcgaatctacgcggagaacgcgatccgtaagcgcacggagcagatgaactacctccgcctggcctcgcgcctcgacgccgtggtcgcccgcctcgacacgcatgcgaagatgacgacgatcagcaagtcgatgggcaacatcgtgaaatcgctggagtcatcgctggccacggggaacctccagaagatgtcggagaccatggactcgttcgagaagcagttcgtgaacatggaggtccaggccgagttcatggagagcgccatggccggatccacctccctctncactcccgaaggagagn

SEQ ID NO: 250232 - DNA, 422 bp, Glycine max
cggaattctcgacccacgcgtccgctcacgcgtccgggaaggaacggtggctgcggctacaattgagagggagaatcctttggtggatgctaacactgtgcttaaaggatccatcgttaccgctgattttcgatgtgatagggttcgggtttgggtcaccaaacatggaattgtttatcaggctccaagaattggataagaagtgtttacactaaagcacttcatatatatgttatgagtcatgaatatcatagtatttaaataaggagctattcttccaattatgttattcgattgaaaataaatacatgactataagaaatttgttgtttcttatgtgtaattatgttatgcactgcaaataaatatacaaattgtgtgtttcattatctttatgtacgcaataattaaaccatctatat

SEQ ID NO: 250233 - DNA, 527 bp, Glycine max
  unsure (1)..(527): unsure at all n locations
agttntatttgtgcctntgngatcgtatgtagcatancgccactgccgtaccggtccggaattcccgggtcgacccacgcgtccgcggcacgtgcctttggggggccgaggccccctactgctggtcggcaaacggacggcgggcgcacgcgtcgcttctagcccggattctgacttagaggcgttcagtcataatccaacgcacggtagcttcgcgccactggcttttcaaccaagcgcgatgaccaattgtgcgaatcaacggttcctctcgtactaggttgaattactattgcgacactgtcatcagtagggtaaaactaacctgtctcacgacggtctaaccccagctcacgttccctattggtgggtgaacaatccaacacttggtgaattctgcttcacaatgataggaagagccgacatcgaaagatcaaaaagcaacgtcgctatgaacgctnggctgccacaagccagttatccctgtggtaacttttctgacacctntagctgcaaaatcccgaaga

SEQ ID NO: 250234 - DNA, 527 bp, Glycine max
  unsure (1)..(527): unsure at all n locations
aggttntagggggnnnnnnnattgaactacactctngcannccnnnncggttcggaattcccgggtcgacccacgcgtccgcccacgcgtccggcgagttgcttagtttcaagaagtcatgcgagatccacatgtagctgcagatggttttacttatgaagctgaggctatacgaggatggcttgacggtggtcatgacaattcaccaatgactaatagtaagctggcacatcacaatcttgttcccaaccgcgctcttcgctctgcaatccaggactggcttcaaaaccactgatcaagctcattatttttctctgcccatttttattgaactgtgtatctactgtttataccatgtataggaaagaaaagtgtcatttcattttgttaccttatatcagttttatttcttggggttcttcaatcacattttatacctatcctcttgtataggttagataaccacgggattatcttacaatagttgtaaagtacatatatatcatagcatatatgtcagaagtcaa

SEQ ID NO: 250235 - DNA, 440 bp, Glycine max
ccggaattcccgggtcgacccacgcgtccggagaattttgtcaaaatagatgggaagcctagtgcagatggggtagatgaaagcaagtattggcgtggcggctatggtggcggctatggtggtggttatggaggtgggcgtggaggctatggaagtgggcgtggaggctatggagggggacgtggtggatatggcggcggacgaagtggctatggtggcgggcgtggtggctatggcagcaggcgtagtggcgggcgtggtggctatggtcctaatgaacataacgaggctggggttgatgctaaccctcacaactaagaaggcaactttctaaagcttatatatgggtttaagttatcgcaataaataaaacttcatgagaaggttagttgtaatagaagtggaaaactgtgtaaaggaataatacctttcatgaattt

SEQ ID NO: 250236 - DNA, 512 bp, Glycine max
  unsure (1)..(512): unsure at all n locations
ggaaatgcntcgtaacatgagcctacggactgcgtaccggtccggattcccgggtcgacccacgcgtccgcttcaagattcaggtactgcgtttcggaagcagacacagatggctcgtacgaagcaaaccgctcgtaagtccacaggaggaaaggctcctaggaagcagcttgcaaccaaggctgcacgtaagtctgcaccaactactggtggtgtgaagaagccccaccgttatcgtcctggtaccgttgctcttcgtgagattaggaaataccagaagagtaccgagcttttgatccggaagctccccttccagaggctggttcgtgaaattgctcaggacttcaagactgatctgcgtttccagagccacgccgtgcttgcattgcaagaagctgctgaggcataccttgttgggctctttgaggacactaacctgtgtgccattcacgccaagcgtgtaaccattatgcccaaggatattcagctggcaagaaggattcgtggtgagc

SEQ ID NO: 250237 - DNA, 519 bp, Glycine max
  unsure (1)..(519): unsure at all n locations
tgtttaatggcggtnctnaccatgagatggggagtaatcgtaacgccgtccggaattcccgggtcgacccacgcgtccgggctctctgggtgtagccttcaaaggatgtccttcagggacaaatatcctgtggtaatgttcatatgcagtattgttgtgcttgaggcgctttgcaagtgccttaaggaaatccttcatcagcacacaaccaaatgcaggtccatttgcgatcaccacccgatcaggctgcacaatgatcgcctttgagggttaatgttcttttccaacatatacagaagatgctgtctggtgaaactgctgtaattgctgagacaggggattcctggtttaactgccaaaagctgaaattgccaaagggatgtgggtatgagttccaaatgcaatatggttcaattggatggtctgttggtgctactcttggttatgctcaggctgttcctgagaagcgagtgattgcctgcattggtgatggaagtttcaggtgactgcccaagatga

SEQ ID NO: 250238 - DNA, 322 bp, Glycine max
ctccatttccgggtcggcccacgcgtacgtccacgcgttcgtccactcgttctttttcgtttcgtttcaatggggagcgaatagcataagggcgaattctacctgcgggactacgtccgtcacaaaggcaagtttggtcactagttcctggagttcgagttccttccatacagtaagctccgctactccatcaacttcaactacaaaaactacaccatcattcgcaaggaggtttacctaatccccgccgttcttctcgagtgccgtcgcatcattacctacagcgagattattaatgaagatgataacaactgttccgaac

SEQ ID NO: 250239 - DNA, 528 bp, Glycine max
  unsure (1)..(528): unsure at all n locations
agtntatttaggatgctntgncgtgccctagctccctcgcgatgcaccgtaccggtccggaattcccgggtcgacccacgcgttcgnccacgcgttcgtccacgcgttcggtttcgttccgtttcaatggggagcgaagagcagaacggcgaattctacctgcgttactacgtcggtcacaagggcaagtttggtcacgagttcctggagttcgagtttcggccagaccgcaagcttcgctacgccaacaacttcaacttccaaaacgacaccattattcgcaaggagggttacctaacccccggcggtcttcgcgagtgccggcgcatcatcggcgagagcgagattatgaaggaagatgattacaactggcccgaaccggatcgggtggggcggcaggagctcgagattgttatggggaacgagcacatttcgttcaccacgtccaagattgggtctcttgttgatgttcaaagcaatgcttgaccccgaggtcttcgcatcttttactatcttgttcaggatttg

SEQ ID NO: 250240 - DNA, 531 bp, Glycine max
  unsure (1)..(531): unsure at all n locations
gggttatacggagtagtgtggccagcngattagngtcgactgcaactgatgtaccggtcttgaattcccgggtcgacccacgcgtccgcccacgcgttcgctcactctttctgctgcattacgctttaatggggcatcattggggtaagggctaatagcaccagtgggacgacgcttgaacactacgttttgcatgctgacatcaaccagctgttcaagctcatgataaacagcttgttcagctacaccgagattttcttgtgtgaaactatcaccaacgtttctgaggctttgaataaattcgatttgagagtttaaccgccaagagcatgttcgatgctaagacatagctattgattcgtattgtgccttacaaggacaacaagactctttgcggtattgacatcggcattgtaatgaccaaagcagattttgtgaacaacatgtgtaccattgctatgttcgggaacaacgaattcatggaggcattgcaggctgttgctgatgtaagcatgattggtcagatcggag

SEQ ID NO: 250241 - DNA, 306 bp, Glycine max
tcccgggtcgacccacgcgtccgcttattcttgtgtatcaccatcagggacgtgccatttttgcaagtgggagtccatttgcccctgttgagtacgagggcaaagtgtttgtgcctggccaggccaataatgcatacatattccctggatttggtctcggtttaataatgtctgggaccattcgagtgcatgatgacctgcttctggctgcctctgaggctttggctgcacaagtgagccaagagaactttgataagggactcatatacccagcattcaccaacatcagaaagatttcagcacaca

SEQ ID NO: 250242 - DNA, 530 bp, Glycine max
  unsure (1)..(530): unsure at all n locations
ggagttgggtgccttgngcactgcattagtaggattancgtcatgnctgtaccggtctcggaattcccgggtcgacccacgcgtccgaaaaaaatgaaaaatatgatcaataactgataactctcacagctgctccctatggttgaaaaaaaaagaagatgttatactaataaaaacggaagaaaaaactttgtcaattggttgctcatggggatccctggattgagcaatcagaataatgggcagcaaagattatgcataactgagcccatttcattggctggaccaactgaggatgatgtgatcaagacgcgtgaacttgagaagtacttgcaaggtgttggattgtacgagagtcacgaggaggctctgggaagggaggaagtgcttggcaggctggaccaggttgaatttgattgtgtttaatgcaatttcagataacgacttggaaatgtantcctatgactgtggagagcctccctttatgatatcaaaaaaaagtccttgaattgtagcatacattcttatga

SEQ ID NO: 250243 - DNA, 517 bp, Glycine max
  unsure (1)..(517): unsure at all n locations
cgagatggtgnctgaacacttcacgtatgtcangcgcactgcagtaccggtccggaattcccgggtcgacccacgcgtccgatcatacaaaattatattcttattaaccctatgcacttagagtgcataagctgaggaccctttaaggcgattctgctacgaaaacaccatgattggcagtggaagaaaattatcagccaatattgataaaatattgactgaaatagcactcaaaacttcctacactggttttgatgccaccacatatggcatagaccaagactaagtgtacgcactcgctcaatgtanggcagatgttagcacccaggattgctccaattgcatccaagatgcaacgaaacaaatccgtcaacgctattcaaaccaagtggatggcagaatttggtatgattactgctttgtaaggtatagtaacaagagtttctttggtgaggttgatacatcttttggtatattctatttcaatgttgaaaatgtgactgaccctgaagatttt

SEQ ID NO: 250244 - DNA, 416 bp, Glycine max
ggaattcccgggtcgacccacgcgtccgcccacgcgtccgagatggggcagtgatcccctttcttatggttcctactctcatgttagcgttaagtcatctggtgccgattatgatatactcgctgaaaacgtggggaatagattgttctttgctggtgaggccacgagtaggcaatacccagctactatgcatggtgctttcttgagtggcttaagggaagcatcacacatttaccgatcagctcggattcaaaacaatcctaggaagtgcatgcctaagaatatcgtaagcaatgacatcctgggtgatttattcaagtggcctgatttggaatttgggaagtttgctttcattttttatccgtcttcagaaaatctgcagtcaacggggcttctgcaagtcactattggtgatg

SEQ ID NO: 250245 - DNA, 513 bp, Glycine max
  unsure (1)..(513): unsure at all n locations
cgagaggccnttaacatgatagcagtcctacgccatgccgtaccggtccggaattcccgggtcgacccacgcgtccgtaagtcatcaatttttttattatgagaaaagagaactataaatagttatccaattatatgtgtatagacaagattaaaagttaattagtgatattatatgattatttaaaaagttatctgtatttttctgttgatggttcaaatataatctaatgatcttatttgtatttctcactttcttacaataagaagtattgttatttaatgggtttcacatgcgagttatatataatgactatacattatttttagatagtagattggtttgtgaagatttggccaaaatttaagaccataggaccaaatgtgccatctttcttcttagataagcaatgcgaagatgaccaagattatggggttacacaattcaagagtgaagaatgcgtggaatggctagatgataagccaaaagggtctgttgtttatgtatcgtttg

SEQ ID NO: 250246 - DNA, 519 bp, Glycine max
gggagaagctccttaccatgaatggagagctacgccactgccgtaccggtccggaattcccgggtcgacccacgcgtccgacaataaattattggaccgttaaaatcagcttacagctcactaaggttttgtcctcaagccaaataattgaggagtaagactatgaatatcaggaatagtttatttaataaaagaatttgtgtttgatttttaatctagtaaagtaagagaaacttgtgatttcttacacaggataacacttttgatttaattttgagataaaagtgatacgtgtagatctaggaagaggcgttgcctatttaaagaagctaaccctccacaaggaattaaggtgcaagagtttgttgtgagctataagctagtttatcgtgaggagaatatgaagttgtttgttttctttgttgctgcagtagttttggtagcatggccatgccatggcgcaggctaccaaaggttccctctccgaatgaaaactggctatggtgagcatggccatgc

SEQ ID NO: 250247 - DNA, 518 bp, Glycine max
  unsure (1)..(518): unsure at all n locations
gtagtgtgccntttgaatcgaacagtatgctatcgcgcactgccgtaccggtccggaattcccgggtcgacccacgcgtccgttctccttctaattctttgttacccttcacctattacaagccactcacactaacacaaaaacatggaactaagcaccatgttttgcttgggtgcttcgtttctcttcattgatctcttcagggcactcatcaaaccttattatgtctccaaacgccgtgacttgccactcccacctggctccatgggttggccttacataggagaaacctttcaaatgtattctcaagatccaaatgtcttctttgcctcaaaaataaaaaggtttggctctatgttcaagtcccacattctaggttgtccctgcgtgatgatttccagccccgaggctgcaaagtttgtgctcaacanagctcaactcttcaagccaacattcccagcaagcaaagagaggatgttgggaaaacaagctatcttctttcaccaaggagagtaccn

SEQ ID NO: 250248 - DNA, 522 bp, Glycine max
  unsure (1)..(522): unsure at all n locations
gggaatagcgggctagcctcgtacgaggagtatattgtatctgctctaccggtccggaattcccgggtcgacccacgcgtccggacagagcagcactcacattcacaacgaaggtttcctattcatcagacatggtgaaggcggtcagagttcacgaactcggtggccctcaagttctgaagtgggaggatgtggaaattggagatccaaaagaaggcgaggtccgtgtgaggaacaaagccattggggttaatttcattgatgtctactttcgcaaaggagtttacaaagccccttcttttcccttcactccaggtatggaagctgttggggttgtgacagctgtgggtgctggactcactggtaagcaagttggagatcttgtagcttatgcaggtcaaccaatggggtcatatgctgaagagcagatacttncttgcaataaagtagtcccttgtccttcgtcaattgacccaactgatgcaagatccatcaatcttaagggcatgacaactcagtttt

SEQ ID NO: 250249 - DNA, 523 bp, Glycine max
  unsure (1)..(523): unsure at all n locations
tgttcgcgtgctgnngctgaacccgcgcctgacgcacctgacgtaccggtccggaattcccgggtcgacccacgcgtccgcccacacgtccgctcacgcgtacagtcattatctactcctgcacagtctttgaagaggttgccacagcagaatcacttcgttgccctctccttgtccaatctcatgatgtcaatgtcattcatcccgtcttatctgaggtggctgttatgtgcggatggcttggcgttaattgcatatgtgtactactatctcatatgatggtacaggcctactattttgcacttcactccagatatgattagctgttagggtccagacgaactatgggtgctagacttactggtatgcaggttggagatcttgtatcttatgcaggtcatcctttggactcatatgctgaagagctgatacttactcctactaaaggattccctgttccttagtcaattgagcgccctgattcaatatgcgttcttctcaaaggcgttacaactcaactttt

SEQ ID NO: 250250 - DNA, 428 bp, Glycine max
cggttctcggaatttcccggcgtcgactccacgtcgtctcgctagatactatgctacattagaatagtagtaatcggtgcataaggcggactatctgtgacgatgagcatctccctagccgctatgtgtctcctaagaaagtgttctatgggcgtggaccaatgtaactatgattgtactttaactacagaccagcagggccgatcatggaatttgatggattgaacgcttcatagacagcggtcaatgaccctgttgtgtccttaaagacaggcttgtcgtactggatggcacatgtgcggcctgctatcaatccaggttctggttcaaccattatagctatcaatgggacacttgaatgtgattgtgcttacactactactgttcaagctcgacgaaattactacacgcagtgttgctcacaactt

SEQ ID NO: 250251 - DNA, 522 bp, Glycine max
  unsure (1)..(522): unsure at all n locations
ngtataagcggttctgagcctagctcagcacgtactgctctacccgtccggaattcccgggtcgacccacgcgtccgcccacgcgtccgcccacgcgtccgctcactcactaactcaccctctgcttgtgctcgtctagcgctgtcgtcgactcactcaccattttcgtgctcacttataacagtgcccatgccctctcgaggaaaatatatttgagtggcaatttgcgattagagggcctcgtgataccgaatttgagggtggtatttatcatggacggattcagttgcctttagagtatttattcaaacccccttcattcaaggtgcagaatggtatcccttgatctgaaatggagttcaggccaatgcatggttatggggaaggtagagtcaagtactaaagctaaaggggaagatatgccttccttgtgcgctagttcgacctatgagggcaaagagtaaatattggtgctatgggaccagccatagatcatgctcctggtattgccaagccccttgc

SEQ ID NO: 250252 - DNA, 266 bp, Glycine max
cggacgcgtgggtgataagaggagataccaacaagagaggagaaaaaaaagagttgagattccctttgaagaaaagatggcatcccataggcaaagctatgaagctggtcaaactaagggccgaactgaggaaaagacgaaccagacgatgggcaatattggagagaaggctcaagctgcaaaggagaagacccaggaaatggcccaagctgcaaaggagaagacccaacaaacagcccaagctgccaaggacaagacttgcgaca

SEQ ID NO: 250253 - DNA, 521 bp, Glycine max
  unsure (1)..(521): unsure at all n locations
tgtagactgggcgtgtatggtggggagaaggaaatgatgtaccggtccggaattcccgggtcgacccacgcgtccgcccacgcgtccgcccacgcgtccgcccacgcttccgggaaaaatcaatgtgccaacatgggtgattgagaaagagtaagagagagagagagagaaagagaaaacgtattatatttatgacctcaagacatcaccacaagaaacagcagcagcaactgcagtggcagcaaanaacatagtaatagtaatagtagaggaagagagacacaagagacccaccaaggaaattttgctcaaaaccagaacttgctaccaaagttaacatcttttgatgattccaagtgactttgagcttcaaagtccatagtggggtgtggtgaattttttgaattttgaagagaagaagtgtgtgtgtgtgtgtgtgtgtgagagagagagagagagagagatgagaagagtgagagtggggggtatgtgaaagcggatcaaatagatctgaaaaactn

SEQ ID NO: 250254 - DNA, 473 bp, Glycine max
accggtccggaattcccgggctcttctctctctttctccggcgacgatctcagattccggtcactcctctcgccggcgatcccttattcctgcgtgctccgtcgagtcctttccgattcgaatcgttcccagccttgtgccaccatgaatcccgaatacgattatttgttcaagcttttgctgattggagattctggtgtaggcaagtcatgtcttctcctgaggtttgctgatgattcataccttgacagctatatcagtaccattggagtggactttaaaatccgcactgtggagcaggatgggaagactattaaacttcaaatttgggacactgcgggtcaggaacgtttccggacaatcactagcagctactatcgtggggctcatggcattattggtgtttatgatgtcactgaccaagagagcttcaacaatgttaagcagtggctgaatgaaattgaccgttatgc

SEQ ID NO: 250255 - DNA, 518 bp, Glycine max
  unsure (1)..(518): unsure at all n locations
tgatttaggtgggtgngccatgcctagcaggtaattgtctgctctaccggtccggaattcccgggtcgacccacgcgtccgtccacgcgtccggagcattcagcattgagcatagtatggatatatcaaatcctgcagcctgagtcaatgcggaactgttgcacttctatgttggaagaatggtaaggatcgtggtgcaagttgtgcgatctgatggtggagttgtcatttgaaaatcaacagatgagaaacaactagtttgtaaaagatcacgctcacctgctgctcctcttacaacttatgatgaagtttatggtcttgttaacagtgataagtcaattggtgctgagatatggaccaattttggtgatgccatccatatggatagctacaataagctttgtcagctcgcacatggagaatttaaacacttgatcctgtgaggtctaacaagcttgtctgatgatacagaggccctttctatcatttggatactagaggagacttaatcaatgtgt

SEQ ID NO: 250256 - DNA, 523 bp, Glycine max
  unsure (1)..(523): unsure at all n locations
ggtgcctntgngacgtccacgttacagagnattgccgtactcggttcggaattcccgggtcgacccacgcgtccgaaaaaaaaaaaaaaaaaaaaaaaaaaattaaaaaaaaaaaaaaaaaaaaaaaaagaaaaggaaaaaaaaaaaaaaaaaaataaaaaaaaaaaaaaaaaaaaaaaaaaaaaaaaaaaagaaaaaaaataaaaaaaatggggctgccgttttaggggttcaaagttttctttcccgtgattgcaaggtcaaagctttttttttggggcccttaaattaattaaattggccgtgtttttaaaacgtttagattggaaaacccttgggtttcccaaatttaaatgcttaggataaaatccccttttgtccgcttggggaattgccaaaaaggcccgcaccaatcgcctttccaaacatttgtccaccctaatgggcaattggaacagcccttgtaatgggtctttaaacccgcaggttgtggggtttcacctcatatgtgaccgttttactg

SEQ ID NO: 250257 - DNA, 517 bp, Glycine max
  unsure (1)..(517): unsure at all n locations
tgttaggtgccntgcaatggttcgttccctacgcactgccgtaccggtccggaattcccgggtcgacccacgcgtccgttcagctcctaagagcacgcatcactgttgcacttcttactcgttctccctctgtttgttcttcttcttcttcttcgctaaaccccccctttatttttcctatctcactaacatcgatgggagacgagaataagaccaagtcccctgcttccggcgtgtggtccaccatcaagcctttcgtcaatggcggagcctccggcatgctcgccacctgcgtcattcaacccatcgatatgatcaaggtgaggattcaacttgggcaaggatcagctgcgcaggtcacttccaccatgcttaagaatgagggtgttgctgccttctataagggtctatctgctggattactcaggcaggctacatacaccactgcccgtcttggatcatttaaaatcttgacggccaaagctattgaggctaatgatgggaagcccctgccact

SEQ ID NO: 250258 - DNA, 513 bp, Glycine max
tgttaagatgtccttgcatgcacagtatcctacgccatgccgtaccggtctcggaattcccgggtcgacccacgcgtccggacgtgaggaactatagggttcccctttgtgtgctcaatgggcacgggtatgctgttaggaaggtgaaattctcgccacacgtgcggaatttgatggtgtcttgctcctatgatatgacggtgtgtgtttgggatttcatggtggaggatgctctggtgagtaggtatgatcaccacacggagttcgcggtcggggtggatatgagcgtgcttgttgagggcctcatggctagcactggttgggatgaacttgtttatgtgtggcagcatgggactgaccccagggcaccttgaaggtgaaaggtctaccacagcgaaatctgtggcattccaagttcgagctgagaaatttgcaaataggaagaggaaaaatcagtatacgggaatccgtcaacgcccttggggaaaatgggcagctgagattcgggatcct

SEQ ID NO: 250259 - DNA, 520 bp, Glycine max
ggaggtgtgggtgaatggggagaggaagaggattgctgcaccggtccggaattcccgggtcgacccacgcgtccggttattgtacaggattggcttcctacggagagaaagagtggtacttcttttcaccacgggaccggaaatacccgaacggttccaggccgaaccgggcggcgggaaccggttactggaaggcaaccggggcggataagcccattggccaccccaaaccggttgggataaaaaaagctttggtgttttacgcagggaaagctccgaaaggggacaagagcaattggatcatgcacgagtatcgtctcgccgatgtagatcgctccgttcgcaaaaagaacagcctaaggttagatgattgggtgctttgccgtatttacaacaagaagggcacgatcgagaagttccaaccaagcagcgatgttgttgttagccgaaaaatggaatcatcggagatcgaagacaggaagccggagattctgaaaagcggaagaggttgtcttctgcc

SEQ ID NO: 250260 - DNA, 516 bp, Glycine max
  unsure (1)..(516): unsure at all n locations
tggaggtgtagtgagatgagaggaggaaggtactgcatgtaccggtccggaattcccgggtcgacccacgcgtccggttgaagatatcctgtcaagaaacaagccttcagctaatgtcccaacaataccacanacagttgtaatgcctccaaataacaagtcagcattattcatatggtaaatgctgtatcctgcctttgggccccagtatgagtaagctccaatgacaaaattgtatgctatgtaccctagaacatttataacatacacttggtcatgcaagagctccttcatatctttggagaagatggtgaactgattccacaatttggatgttgacttggatcctttgagcaaggcttgatcttcagcaagcgtgtcatcatctctatgggtgaactactgatttttgtcactcaagctnctgtaaaattatgttctcttcgttgtgtaaaccctaatttgaggccactgctattgctataacaactgttcaaatcatgcttttggggagtg

SEQ ID NO: 250261 - DNA, 529 bp, Glycine max
  unsure (1)..(529): unsure at all n locations
tgttctagcttttctgtggcccaaaatcanangcactgcttgacgtactcggtccggaattcccgggtcgacccacgcgtccgaaaaaaaaaaaaaaaaaaaaaaaaaaaaaaataaaaagacaaaaaaatctaaaaaaatggaaggtgtcatactcgtgcatgcggacgtcatacctattctttcaagcaacctgcttttcaattcactgaccctacttctattaccttgactctcattaaacactgacttccctctatttactcgtcttgaaccaaattcaccttgctccaattctgctcatacctattaagcccgcatcgctcgaccttactaacacctactcgaccttcatggcgaatgtttcccgcacattgatcttgcatccatcactgtatgcctaattacatcgcgcaaattttccacgtttcttacgctcaacctttcaccctcgcatttccccttcttacgttacattatcgactcgttcttccgatatctttgccttactctggatagcacactcccn

SEQ ID NO: 250262 - DNA, 519 bp, Glycine max
aggggagccggtgtgccatgatggagagtatattgcactgctctaccggtccggaattcccgggtcgacccacgcgtccgcccacgcgtccgtgatcttgtcacaaaaaatttcatgggtgttgcaacatctttggaaggtgttgtcaatcactaccttcattgtgttgaatataagaaggtgccatctaaaattcttacttaccaagctgctgatgacccaatttacagtggctacagatcagctgttgaatctacaagtaaagaagattcattgatgggatttgctgtctgggaaccaccacatggtcattacaaaatgcttaagtatccatggaagaattatgtgaaattaagtggggctctaaagcactgtgcgtttatggtcatggctatgcatgggtgcatactttctgaaatacaggccccagctgagaagagacaagttttccgcagtgagcttcagagggtaagttctgaaggagcaaaaatgttgcgtgaacttggaaacaaagttaaa

SEQ ID NO: 250263 - DNA, 519 bp, Glycine max
  unsure (1)..(519): unsure at all n locations
cggaggtggctngccctagctaagcangctacagcactgctctaccggtccggaattcccgggtcgacccacgcgtccggagacagatgcgatatgaagtcagtcactggaaggaaaaggagattaatgggaccgagaggagattgcttggaggttgtccattaactccaaaggaaacgtccctattacttaaagcactgggttttccatcacacaccacgatttttctggtagctggaaaagcatattgaagaagaagtatgaaatatcttgaggatgatttccccaacattttctctcattcctctctgtcctcttgaaaaaaattgaatcctttcaagaatcatcagaacatgttggctggtttaaactatgttgttgcccttaaaaatgatgtatttctctacacttatgatggaaatatggcaaaggccgtacaatgtcataagcgctttgaagacttcaagaaaaccatcaatccagacaagatgaatttttgtaaacttgttgatccagtgg

SEQ ID NO: 250264 - DNA, 465 bp, Glycine max
gaatttgggggtagtcgtacgcgtgcttgcgtctgctccaggtgcttccttacattcaaaaccaacaacaactatggcaggttatcaaaagcactacgatgatcagggtcgcaaggttgacgagtatggcaacgttgagaagcaaaccgacgaatacggcaaccctgttcatgctgctagtgtcacctatgtagccaccagaactgctgctggtggttacagtgatgacattaataagcaacatgataccaccaatgcctacggcgtagacactggtagacagcattctagtggtggctacgatggtgacactaataaacatcatggaactactggtggctataatgatgacaccaatagacatcatggaactaccggtgtctatggtatagacaccgataggcaacaacatgggactactggtggctattgccgtgacactggtaggcaacatgggaacatcgg

SEQ ID NO: 250265 - DNA, 514 bp, Glycine max
gggagtggtttctcgatggggatataatgatctgctctaccggtccggaattcccgggtcgacccacgcgtccgcccacgcgtccgcgaggacggacgtacccttgctgactacaacatccagaaggagtcaacggtccacttggtgttgcgtcttcgtggtggtatgcagatcttcgtcaagacccttacgggtaagactattaccctcgaggtggagagctccgacaccattgacaatgtgaaggcgaagatccaggacaaggaaggaatcccaccggaccagcagaggcttatttttgctggcaaacagcttgaggatggaaggaccctcgctgactacaacatccagaaggagtcaactctgcacttggtgttgcgtcttcgtggggggttttaagctggagctgatttctgtgtgatgttcgatgttggattttcccaaacattttaagaagaaatgtgatgtgtaatgggtctgtaatgacctttgaaaataaggttgggttggggtg

SEQ ID NO: 250266 - DNA, 431 bp, Glycine max
  unsure (1)..(431): unsure at all n locations
tccggcaatgttaaccatgacttggtgaaatacttgctaatggtaagaggggaagcaaaagaacccaaggtcgacagtgagctcatttatgcatatgcaaaaatagataggctgagtgacattgangagttcattcttatgcctaatgttgctaatcttcaaaatgttggtgaccggttgtacgatgaagcattatatgaagctgcaaaaatcatatttgcttttatatctaactgggccaagttggctatcacactggtcaaattacaacagtttcaaggtgctgttgatgcagcaaggaaagccaacagctcaaagacatggaaggaagtttgctttgcttgtgttgatgcagaggagtttcgtttggcccaaatttgtggactaaacattattattcaagtggatgacttggaagaagtcagtgaata

SEQ ID NO: 250267 - DNA, 516 bp, Glycine max
gtagtgtgcctttccatgcacgtagtcgtacgccatgccgtaccggtccggaattcccgggtcgacccacgcgtccgacgaaaccctaggttttagtgagtggctaaaatggcggtgattttttcaagtgcaataccaggaggggcagcaccagcagcaatcgagcaagtgcagtgcttcgggcggaagaagacggcggtggcagtgacctactgcaagcgcggccgaggcctcattaagatcaacggctgcccgatcgagctggtggagccggagatcctccgcttcaaggccttcgagccaatcctcctcctcggtcgccaccgcttcgccggcgtggacatgcgcatccgcgtgaagggcggcggtcacacctcccagatatacgccatcaggcagagcatagccaaggctctcgtcgcttactaccagaagtacgtcgacgagcagtccaagaaggagatcaaggacattctcgtcaggtacgaccgcacccttctcgtcgccgatccccgc

SEQ ID NO: 250268 - DNA, 515 bp, Glycine max
  unsure (1)..(515): unsure at all n locations
ggggnagtagccttaaatgaatagagatgtgtcgccactgccgtaccggtccggaattcccgggtcgacccacgcgtccgaattaaactaattgcaaagatgaataccaagccctttttctccttgtgcttactctgcgcactgcttctcatctgtgttgtggcaactgagccatccaaagatgcgacacaagcagaagaaccaaagacacggccagatgcctggagaagtggtggaagtggaggacatggtggaagtgggggacatggtggaagcgggggacacggtggaggctggggacatggtggaggctggggacatggcggtggacatggcggaggatgcaaatgctgcggtcgaaagggctgcaaatgttgctgaagtaaaaaaacacaaacatgaactgaagacacacatacgtgtgtactccatgtaataagtatagtatgtagaattaagaaataaaagcatggaatctatatncgtgctagggctgtcatagngtgaccggtttt

SEQ ID NO: 250269 - DNA, 519 bp, Glycine max
agtagtgctgtccttaagcacttcacgtagtgctgacgcatgccgtaccggtccggaattcccgggtcgacccacgcgtccgaaactcgctcagatctacacgtctctgctgattcatccttttcttctgcagaggaaagaaccaaccaacacttgtttcttcagccatggccagtcaacctgaatcatctgacgcaaagggcacaaaaagggattttagcaccgccatattagagcgtaagaaggctccgaatcggctcgtggttgatgaagctgtcaacgacgacaactctgttgtcgcgcttcatcctgataccatggagaaacttcaactttttcgtggtgacaccatcttgatcaaggggaaaaaaagaaaggatacaatatgtatcgcacttgctgatgagacatgcgaggaaccaaaaataagaatgaacaaggttgtaagaaacaaccttaaggttaggcttggagatgttgtttcagtgcatcagtgtcctgatgtcaaatatggaaagc

SEQ ID NO: 250270 - DNA, 522 bp, Glycine max
  unsure (1)..(522): unsure at all n locations
agtctagcgtnctgacatagaatagaagtactgctcaccggtccggaattcccgggtcgacccacgcgtncgattcagcgattagcaaaaagcagaagaagaatgagaacccgacaaaaatggaagaggacgacggcgaaggcgaaaaagaagaagaggaagaagaggaagaagaagaagaagaagaagaagaagaagtgtgggacgattgggaaggagaagacgaaggagagagagaatctgaattcgtgtgtctattctgtgactcccggtacagttcgtgcggttccttgttcgaccactgcgcctnccttcaccgctttgatttccacacgatcagaacaactctcagcttggatttctatgcctccttcaagctcattaacttcattcgctctcgggtggcagagaacatatgtttgaggtgtggatttacatggcaggtccactgtggaccttagaaacaattggatgaaggtagtgacttttatgaggaataaaaactttgtggaaggagaaaag

SEQ ID NO: 250271 - DNA, 458 bp, Glycine max
  unsure (1)..(458): unsure at all n locations
cggaattcccgggtcgacccacgcgtccgaaaattcttggccaacagctttcttgtaattcctcttgcttgggtaaacatttggtaccggggttattttcttgcttcatctcgcgagttaactcgtctggattcaattacaaaagcaccagtgattcaccatttctctgaaagcatttccggggtcatgacaattcgcgcattcagaaagcagaaggaattttgcggagaaaacatttaacgggtgaatgctaatttgggaaatgatttccacaacttcagttccaatgcgtggttgggtttccgcttagaattgcttggaagcttagttttttgcctttctgcaatgttcatgatcatgttacccagcagtatcataaagccagaaaatgttggttggtctctctcatatggcttgtcattaaatgccgggatgntctgggctatatacatgagctg

SEQ ID NO: 250272 - DNA, 369 bp, Glycine max
ttcccgggtcgacccacgcgtccgcgtgatggcaccaaaggcagagaagaagcctgcctagaggaagccttgggaggagaaaaagtcgccggtggaagacaaggttccggcggagaaaaagccaaaggccggaaagaagcttccgaaggagggaggcgccggcggagaaggtaagacgaagaagagaaacaagaagagcgtggagacatacaagatctacatcttcaaggttctgaagcaggttcaccctgacattggtatctcaagcaaggccatgggaatcatgaacagcttcatcaacgacatcttcgagaagcttgcccaggaatcttctagactttgccgctacaacaagaaacccaccatcac

SEQ ID NO: 250273 - DNA, 520 bp, Glycine max
  unsure (1)..(520): unsure at all n locations
ggtagcgcntnttccatgatggagaatgtactctatacccgtccggaattcccgggtcgacccacgcgtccggacagagctactaatgaatccacaggccatggaaaaagcacaaaaggaagtacgaagcatgttgggagaaagacgagttgtcgcagagagtgatctgcatcaattggagtacatgagagctgttatcaaagagatatttcggttgcatcctcaagttccagtattagtcccaagagaatccatggaagatgttgtgatagaggggtacagaattccagctaaaacaagattttttgtcaatgcttgggcaataggtagggacccagaaagttgggaggatcctaatgcatttaagccagagaggtttttagggagtgatattgactacagagggcaagattttgagctaataccatttggagcacgtagaagaggttgtccagctattacttttgccactgcaagtgttgagcttgctctagctcaactnctttacattttcggttgg

SEQ ID NO: 250274 - DNA, 523 bp, Glycine max
  unsure (1)..(523): unsure at all n locations
gcttgctangcttcactgttcactacgcactgacgtactcggtccggaattcccgggtcgacccacgcgtccgaaaaaaaaaaaaaaaaaaaaaaaaattaaaaataaaaaaaaaaaaaaaaaaaaaaaaaaaaaagaaaaaaaaaaaaaaaagagaaaaaaaaaaaaaaaaaaaaaaaaaaaaaaaaaaaaaaaaaaaaaaaaaaaaaaaaaaaaaaaaaggcccccctttttaaaaattcaaattttacttccctttttttctaacttaaaatttttttttttgggcccctaaatttaattcatttgccccctttttaaaaactattaacttgaaaaacccttggttttcccaatttaattccttttcaaaaaaaaccctttttcccaaattggctataaaccaaaaagccccatcccattcccttttccaaaaattttccaaccctaattggaaattgacaaccccttttattcggcatttaaaccccatggttttttggttttcccccaaatttacctc

SEQ ID NO: 250275 - DNA, 519 bp, Glycine max
  unsure (1)..(519): unsure at all n locations
tgggtagcggttgtgccatgacggggattttattgattgctctaccggtccggaattcccgggtcgacccacgcgtccgctcaagagctttttgaaaagcccttcttttcgtcagttgcaaaggctcttcgtccaggtggagttgtgtgcactcaggcagaaagcatatggcttcatatggatataattgaggacattgtggctaattgtcgccagatttttaaaggctctgtcaactatgcttggactactgttcctacatacccaagtgggatgattggttttatgctttgctcaactgagggaccacctgttgatttcaagcatccagtgaatcccatagatgaaaatgagagtcagaagtcagtaagaccgctgaaattttacaactctgagattcataccgcagctttctgcttgccgtcgtttgcgaagaagaagattggttctaaagcaaattaagaagattttctaaacctttgaaagagctcatgtggcttgtgtagaagtccaacattn

SEQ ID NO: 250276 - DNA, 525 bp, Glycine max
  unsure (1)..(525): unsure at all n locations
gtaagcggtncngagatcgtatagagcgtcatcgcactgcccgtaccggtccggaattcccgggtcgacccacgcgtccgcccacgcgtccgcccacgcgtccgcccacgcgtccgcccacgcgtccgatggcgacgagggatcgcactctgcttttcagaaagcacagagatgcgttgaagagtgttcgggttccctccatctcctcgccggcattcaccggttccggcgccggcggtggccccgtcatcgaattggccaccacctcgtttctcaatcccaatcgctcttacgcaccggtaagtaccgaggatcccggcaattccagtaggggtccaaatgcaattacagtggggctacctncggcgtgggtggatttatcagangaaatatcagcaaatgtgcaacgtgcacgcacaaaaatggcagagttggcttaagctcatttcaagggcttgatgccatcaattggagatgggtagggaagaccaacgagctatttgaactcttacccatgagattact

SEQ ID NO: 250277 - DNA, 374 bp, Glycine max
  unsure (1)..(374): unsure at all n locations
cccgggtcgacccacgcgtccgcccacgcgttcgancacgcgtatcnggtttcgtgggcggacgcctttgccgtggttgagaaagccgagagcttcggctgcacatcggagccagactacgaccagaaccaccaccgtcacccgacgaaccaccacatgaaccctccctccgggcttaccccgctcgagttcgcctgcctcatacccttcgtcgccgagcaccactcctacctcgtcggctccgggcaatgcttctcactcctcgtccaacgcgttcaagcaccggccgacgccgtctggtccgtcgtccgccgctttgacaagccccaaacctacaagcactttatcaagagctgcgccgtcaaaagaccctt

SEQ ID NO: 250278 - DNA, 514 bp, Glycine max
  unsure (1)..(514): unsure at all n locations
gggaggtagccntgttttgtataaggagctgagcactgctctaccggtccggaattcccgggtcgacccacgcgtccgcccacgcgtccgggaaaggacctggtttcttctctgagatcggcaagagaggcagagatatcctcacgaaggattacaattccgatcaaagattcaccatctacttctgcaccaactccggtctcgacctgaagtcaacactggtgaagagtagaggactttcctctggtgatgtggctgcagaatttaagtataagaacaaggcggttaatgtcaaagttgatactgaatcaaatgtgttgacgacattcactgtctctgatgttgtgccatccgcgaaaaccattgcttctattcgtctgcctgattacagttctggcaaggttgaggttcagtatcttcatgagcatgttgcttttactcttggtgttggtttagaccgctcccctgttattgactattctgggacgatgggtactcctagcattgcctttgg

SEQ ID NO: 250279 - DNA, 526 bp, Glycine max
  unsure (1)..(526): unsure at all n locations
ggtttttatggatgcgctntnccatcgagatgcagtctcatagtcatgctcgtaccggtccggaattcccgggtcgacccacgcgtccgctccccttccaaacacaaacacaaacacaaacacaaacacatcgcaactcaagaaatgaaactagcttggtcaccagagagagcatccaaagcatacatcgacacagtccaatcttgccaggttttccgcgaatccggagtggcggagtttatttcggccatggcggcggggtggaactcgcagctcatagtggagacgtggtcgcagggaggacttattgccaccagcgtgggattagccctggcgaggtctcacacgtgcggaagacacgtgtgcgtagttcccgacgagcgggcgaggtcggagtacgcggagagaatgggcgaggcgggcgtgacggcggagatcgtggtgggggaaccggaggaggtgatggaaggtttggtcggcgtggacttcttggtggttgattctcgaaggaaggactttacgcgtn

SEQ ID NO: 250280 - DNA, 524 bp, Glycine max
  unsure (1)..(524): unsure at all n locations
tgganntccgggtgcgtgngatcgataagaatactacgtactgcacgtaccggtccggaattcccgggtcgacccacgcgtccgctcatgcttccaatcctaagaacattttggactctgtcaaaaatgtattgtctgctttctagtggttttcctatccatacacaatgattggcataacattatgcgcattttcttcatctcttctcgcggtggaaaaattatcagatatatctttatcatttttaattggcgtgttacagggtgtgctgcctcaattgtttattgaaatttatctttgtggtgtgaatcaactgtatgaccttgaaatagacaagattaacaaaccacatctttcaatggcatctggacaattttcctttaaaaccggtgtcattatttctgcagcatttttagctctgagttttggatttacttggattaccggctcttggccattgatttgtaatcttgtagtaatcgcttcatcgtggacggcttattcaatcgatgtgcccctactg

SEQ ID NO: 250281 - DNA, 527 bp, Glycine max
  unsure (1)..(527): unsure at all n locations
gggtcccggggnnnnnnntttgaaaactagacgtcatgcactgctctaccggtccggaattcccgggtcgacccacgcgtccgaaagcagctggtgacaactcaggtcattccgggagcacaaagtctgtgatgacaatagcgtgtccagtttgcgtttgaagtccaccttcaggagaacatagcaaccatggccagacaatatgttcgtagtatcattgcatctgttcaaagggtttcattagcactttcttcttcgcgctttgggtcttacaatgctttccacttaccacctggcacttctgaagcacaaacacttgctcgatggatctggaacagctaccgggtctatcttggggtagaacttctaaaatgggaaggccgtgaattcaattctaagtctctttggcattaatcaaattcaagttttggctgctctttaaaaggcattacccgtttcacggttgcaaataaagctggacttgacatgcttgaaacacatttggtggactttaagacaatactttt

SEQ ID NO: 250282 - DNA, 517 bp, Glycine max
  unsure (1)..(517): unsure at all n locations
gttttaggctgttcttgtcatgagaagtatgtattgccantccgtaccggtccggaattcccgggtcgacccacgcgtccgggtttggattatgccatgatgactggaggagatgttgcacctctgggcgcacaggctgttaccaaaattcatgatatatttgattggtccaagaaatcaagaaaaggcctattgctttttattgatgaggcagatgctttcctttgcgagtaagttctggagcgtttaaaatacattttgaagactgcttctataaaatataactatttaaattactactacgtagcagggtagccaaaattttgtttttgtagtttatctaacatgtgagaaatgtaactgttgtattacaagttaagacagtctacgtataacatctttatacttttacacaaatcctaacggtttatatttgatttatattgtgtttttaataaattttgatatttagaatcacgaagtgtctttaacttcacatattcggagattaaataca

SEQ ID NO: 250283 - DNA, 521 bp, Glycine max
agtagtgctgccattgcgctggcactcagaccctcaggcatgtcggtaccggtctcggaattcccgggtcgacccacgcgtccgagccattcgtattgtcgcagagaaagaaaaccctagctcaccgtttcaagatgcaaatcttcgttaagaccctcactggtaagaccatcactctcgaagtcgagagttcagataccatagacaatgtaaaggccaaaattcaagacaaggaagggatcccaccagatcagcaacggctcatttttgctggcaagcagcttgaggatggacgtacccttgctgattataacatccaaaaggagtccactctccacttggttcttcgtctccgtggtgggatgcaaatctttgttaagaccttgacgggaaagacaatcacccttgaggtcgagagctccgacaccattgacaacgttaaggctaagattcaggacaaagagggtatcccttcagatcaacagaggctgatctttgctggaaagcaacttgaggatggc

SEQ ID NO: 250284 - DNA, 390 bp, Glycine max
tttgttgttcgtttcagcaacaaagacattgttgcacaaataatatctgctagcattgctggcgatattgttcttgctgcagcatatgcacatgagctgccacgatatggtcttgaagtagggcttacaaattatgctgcagcttattgcactggtctcctgttggcccgaagagtcctcaaaacacttgaaatggatgaggagtacgaaggaaatgttgaggctactggagaggactattcagtggaacctgctgagagcaggaggccattccgtgctctccttgatgttggtcttattaggactacaactggcaaccgtgtctttggtgcccttaagggagctctggatgggggtttggatattcctcatagtgacaagaggtttgct

SEQ ID NO: 250285 - DNA, 404 bp, Glycine max
aaagcaatggctacttcaaagttgaaaacccagaatgtggttgtatctctctccctaaccttaaccttggtactggtgctactgaccagcaaggcaaactcagcggaaactgtttctttcagctggaacaagttcgtgccgaagcaaccaaacatgatcctccaaggagacgctattgtgacctcctcgggaaagttacaactcaataaggttgacgaaaacggcaccccaaaaccctcgtctcttggtcgcgccctctactccacccccatccacatttgggacaaagaaaccggtagcgttgccagcttcgccgcttccttcaacttcaccttctatgcccctgaaaacaaaaggcttgcaaatgggcttgccttctttctcgcaccaaatgacactaagcc

SEQ ID NO: 250286 - DNA, 307 bp, Glycine max
  unsure (1)..(307): unsure at all n locations
gtagangcagagaaagcaagaccaatggaagaaacagaactggaagctaaaggaagagaaaaagctgaaaccaaagatggtggtggtgaggaaaaaggaatgagaagagaataaatatgagaagaaaataaacaatccagcctggaagagatttttaagtacagagctgaagctcaacagaaagttaatgagagaaacgagagagcaaaacaagcagcagaagctgccaaagagagaaacaagcacgcaaataaagggaatgaagaacgcagaagagaaagagaaaatggtgggggtgttcaacatg

SEQ ID NO: 250287 - DNA, 288 bp, Glycine max
gaaagtcttccatagccccccaaaaatgaagagcaccatcttctttgctctctttctcttttgtgcctttcacacctcatacctaccttaagcaaccgccgaattccgggcccaataatgaaggtaacccccttgaaaatggtggcacatattaaaccttgtcagacataacagcatttggtggaataagagcagccccaacgggaattgaaagatgccctctcacggtggtgcaatctcgcattgagctcgacaaagggattggaacattcatctcgtccccatatc

SEQ ID NO: 250288 - DNA, 346 bp, Glycine max
  unsure (1)..(346): unsure at all n locations
cgtcggacgcacgcgtacgtaagctccngaattcggctcaagagcgtactggatttcattgcgatatcatttgtgtcactggatggactgccaccccaatgcaggatgttcaggttacaattgattggtttatttcctctcaggaatgtgttcccaggacctattgtgttttaaatccacaaaatccttttgtgttaaatangtggatgggaaaattgactttcccccagggcacttcccgaagtgttaagagaatgcctctttctatagggggaggagctggtgcaaagaatgctattctcatgaatatgccaaatgctgttctttcaatgtggagatattttgt

SEQ ID NO: 250289 - DNA, 395 bp, Glycine max
aaaattcttccaccaagttatgggtttccttgtgttgcttcttttctccctcttaggtctctcttctagttccagcatatcaactcatcgttccatattggaccttgacctaaccaagtttaccacacagaaacaggtgtcttcactgttccaactatggaagagtgagcatggacgtgtctaccataaccacgaagaagaggtaaagagacttgagattttcaagaataacttgaactatatcagggacatgaatgcaaacagaaaatcaccccattctcatcgtttaggattgaacaagtttgctgacatcactcctcaagagttcagcaaaaagttcttgcaaaccccccaaggatttgtcccaccaaatcaaaatggccaacaggaaaatg

SEQ ID NO: 250290 - DNA, 291 bp, Glycine max
caagccatggaaagcgtgaacaagacgaggacgaggacgaagatgaagataagcctcgtcctagtcgaccaagccaaggaaagcgtgaacaagaccaggaccaggacgaggacgaagatgaagatgaagatcaacctcgcaagagccgcgaatggagatcgaaaaagacacaacccagaagacctagacaagaagaaccacgtgaaagaggatgcgagacaagaaacggggttgaggaaaatatctgcaccttggagcttcacgagaacattgctcgccctttaagcgctg

SEQ ID NO: 250291 - DNA, 288 bp, Glycine max
  unsure (1)..(288): unsure at all n locations
atgaattgtangaatttgagggagttggagttgcnggagagtgaggtggacgacatctgtgggcattggctgagccattttcctgattcgtacacatcactggtttcccttaacatttcttgcttaggcaatgaggtgaatttgtctgccctagagcgcctggttagtaggtgtcccaatctccagacgctccgcctcaaccgtgctgtgccactagacaggcttgccactcttcttcgcggtgctcctcagttggttgagttgggcaccggagcttacacgacagag

SEQ ID NO: 250292 - DNA, 266 bp, Glycine max
gatgaggatcatgcattcaagaagattaggttgagagctgaagatgtgcaacggaagaatgtcctgacacatttctggggaatggatttcacaactgacaagctgaggtcattggtgcgaaaatggcaaactctaattgaagcccatgtggatgtgaagacaactgataactacacattgaggatgttttgcattggatttaccaagagaagagctaaccaagtgaagagaacctgctatgcacaatcaagccagattagacagat

SEQ ID NO: 250293 - DNA, 498 bp, Glycine max
  unsure (1)..(498): unsure at all n locations
tgcnagttgtgaatgaatcacgtggtctgacataagagatatgacgtcggacgcacgcgtacgtaagctccggaattcggctccaaggtcattaaacaaccttggcgttgtatacactgtccagggtaaaatggatgctgcggcgagtatgattgagaaagctataatcgcaaatccaacatatgcagaagcatacaataacctacgagttctttacagggatgctggtgatatcgctctagcaattaatgcttatgagcaatgtcttaagattgatcctgattctcgaaatgctggccagaaccgtttacttgcgatgaattacatagatgaaggaaatgatgacaaactttttgaggctcacagggactggggtaagcgatttatgagactatattcacagttcacatcatgggaacaacccaaagattcctgaaccggcccctggtgaaaaggaaagttctccccggattaatttacacattcggtgtcatattt

SEQ ID NO: 250294 - DNA, 321 bp, Glycine max
acaaggcagaaagcaagctcatcctagagttttaaaaatggcagcagcctcctccatggctctctcttccccatccttggctggcaaggccgtgaagctgggcccatcagcccccgaagtcgggagggtcagcatgaggaagaccgtcaccaagcaggcctcctccggaagcccatggtacggcccagaccgcgtcaagtacttgggcccattctctggcgagcccccgtcctacctcactggcgagttcccaggtgactacggctgggacactgctgggctttcggccgacccagaaaccttcgccagaaaccgtgagct

SEQ ID NO: 250295 - DNA, 491 bp, Glycine max
  unsure (1)..(491): unsure at all n locations
tggggcnnggaatggattgaatcgcgtgccactatataaaatatgacgtcgcatgcacgcgtacgtaagctcggaattcggctcgagtggaagagcaccgcacgtcgcgtggtgtccggtgcgcccccggcggcccttgaaaatccggaggaccgagtgcctcccacgcccggtcgtactcataaccgcatcaggtctccaaggtgaacagcctctggtcgatggaacaatgtaggcaagggaagtcggcaaaatggatccgtaacctcgggaaaaggattggctctgagggctgggcacgggggtcccagtcccgaacccgtcggctgtcggtggactgctcgagctgcttccgcggcgagagcgggtcgtcgcgtgccggtcgggggacggattgggaacgggcccttcggggcctcttccccgggcgtcaaaaagtcaactcaaaactggtacggacaaggggaatccgaatgtttaatttaaacaaa

SEQ ID NO: 250296 - DNA, 482 bp, Glycine max
agaatgaatgacgtgcactatataagaagatgacgtcgcactgcacgcgtacgtaagctcggaattcggctcgagatccattggagggcaagtctggtgccagcagccgcggtaattccagctccaatagcgtatatttaagttgttgcagttaaaaagctcgtagttggaccttgggttgggtcgatcggtccgcctccggtgtgcaccggtcggctcgtcccttctgccggcgatgcgctcctgtccttaactggccgggtcgtgcctccggtgctgttactttgaagaaattagagtgctcaaagcaagcctacgctctgtatacattagcatgggataacaccacaggattctgatcctattgtgttggccttcgggatcggagtaatgattaacaaggacagttcggggcaatcgtatttcaaaatccaaagttgaaatcctgggattaagaaaggacaaacaattgcgaaaagcat

SEQ ID NO: 250297 - DNA, 320 bp, Glycine max
tgctattatcatccgcagctgcttttattcgcaccgcaaacagtgagccatggccgtcggaaagaacaagcgcatctccaaggggaagaagggtggcaagaagaaggcagctgatccctttgccaagaaggattggtatgacattaaggctccttctgtttttcaagtgaaaaatgttggcaaaaccctggtctctcgtactcagggtaccaagattgcttctgaaggactcaagcatagagtgtttgaggtctccttggctgatcttcaaggggatgaggatcatgcattcaagaagaataagttgagagctgaagatg

SEQ ID NO: 250298 - DNA, 325 bp, Glycine max
gacatcatggaactaccggtgtctatggtatagacaccgataggcaacaacatgggactactggtggctatgccggtgacactggtaggcagcatgggaacatcggtggcccttactatggaaccaacaccgcagacaccggtactggtcccagaagtggaaccactggcggcaccggttatggaggcactggtggcactgattatggaacaactggtggcactggttatggaagtggaactgggtatggagtcaacactgggggtgcgcacactgaagcatgatatatgaaggaacatcgtcagcatgaccaatctcatggtga

SEQ ID NO: 250299 - DNA, 293 bp, Glycine max
  unsure (1)..(293): unsure at all n locations
cacccgtacgtaaactcagaattcggctcganggatgcaatcaangaaatgcatggacgggaaattggtgatcgtatcatctcagtcaacanagcacagcccaagatggggggtgatgatgcagaccaaggttacagangtggctactcatcangtggtangggaagctatggtgctggagatanggtangacaggatgactgcttcaaatgtgggcgtccagggcattgggcccgagattgtcctttggcaagaagtggtcgtggtcggggtggtagttcatttccttcacg

SEQ ID NO: 250300 - DNA, 342 bp, Glycine max
caaactgggccgcctggtgaaggagggaagaatccgaagccttgaacagatctacctccactcgctcccgatcaaggagcaccagatcatcgacacgctcgtgggtcccaccctcaaggacgaggtgatgaagatcacgccggtccagaagcagacccgggccgggcagaggacccggttcaaggccttcgtcgtcgtcggagacaacaacggccacgtcgggctgggcgtgaagtgcagcaaggaagtggcgacagctattcgtggcgcgattattctggcgaagctgtctgttatccccgtgaggaaggggtactgggggaacaagattgggaagcccca

SEQ ID NO: 250301 - DNA, 343 bp, Glycine max
caagtacttccttacaatcaaaaccaacaacaactatggcaagttatcaaaagcactacgatgatcagggtcgcaaggttgacgagtatggcaacgttgagaagcaaaccgacgaatacggcaaccctgttcatgctgctagtgtcacctatgtagccaccagaactgctgctggtggttacagtgatgacattaataagcaacatgataccaccaatgcctacggcgtagacactggtagacagcattctagtggtggctacgatggtgacactaataaacatcatggaactactggtggctataatgatgacaccaatagacatcatggaactaccggttt

SEQ ID NO: 250302 - DNA, 312 bp, Glycine max
tgaacaagggtttctctttctctttctctgtctgcttcttcactttctctcgtttcaatcgagggaaatcatgggcagaaaattcttcgtcggtggcaactggaaatgcaatgggaccactgatgaggtgaagaagattgttactactttaaatgaagctaaagtccctggagaagatgttgtagaagttgttgtgagcactccttttgtgttccttccgtttgtaaaaagtttgctgcgccctgatttccatgtctcggcccaaaattgttgggtacgcataggtgatgcttagactggagaagttagtgc

SEQ ID NO: 250303 - DNA, 322 bp, Glycine max
caccgttaaggacgagaagacccttctcttcggtgacaagccagtcactatttttggacacagaaaccctgaagagatcccatgggggtcaactggagctgacatcattgttgagtccaccggagttttcaccgataaggacaaggccgccgcacatttgaagggtggtgcaaagaaggttattatttctgcccccagtaaggatgcccccatgtttgttgttggtgtcaacgagcacgagtacaagccagagcttgatattatttccaatgctagctgcacaaccaactgccttgccccacttgccaaggttatcaatgac

SEQ ID NO: 250304 - DNA, 235 bp, Glycine max
gtcaggcggggctacccgctgagtttaagcatatcaataagcggaggaaccatgattagcacctcaactcctcacatggttctccagcaatccgtgtaccaggctttcactcaggtgtttgctcagcagctaccaaagcaagcacaggtgaaatctgtggcaccatttgggttatgcttcaactccaacaagatcaatgcatatcctaacgtggaccttgtgatggacaaaccca

SEQ ID NO: 250305 - DNA, 306 bp, Glycine max
taaacactcagcagtcatcaccatggccaagctagttttttccctttgttttctgcttttcagtggctgctgcttcgctttcagttccagagagcagcctcagcaaaacgagtgccagatgcaaaaactcaatgccctcaaaccggataaccgtatagagtcagaaggagggctcattgagacatggaaccctaacaacaagccattccagtgtgccggtgttgccctctctcgctgcaccctcaaccgcaacgcccttcgtagaccttcctacaccaacggtccccaggaaatctacatccaaca

SEQ ID NO: 250306 - DNA, 319 bp, Glycine max
cgtgaatagcgtaaccagcgttgggggaattattggtcaaggtctcgacttagttggctcaacactcgatactcttactgccttcttgggccgatccgtgtctctccagcttattagtgctaccaaagctgatgccaacggaaaagggaaacttggaaaggctacctttttggaaggtatcattacttcattgccaactttgggagcaggccaatctgcattcagaattaattttgaatgggatgatgggagtggaattcctggagcattttatatcaggaattttatgcgaactgagtttttccttgtgaatttgact

SEQ ID NO: 250307 - DNA, 324 bp, Glycine max
actcataacacaaagcacaaagcaaagctcatccttgagttaaaaaatggcagcagcttcttccatggctctctcatccccatccttggctggcaaggccgtgaagctgggcccatcagccccagaagtgggaagggtgagcatgaggaagaccgtcaccaagcaggtctcctcaggaagcccatggtacggcccagaccgagtcaagtacttgggcccattctctggcgagcccccgtcctacctaaccggtgagttcccaggcgactacggctgggacactgctgggctttccgcagacccagaaaccttcgccaagaaccg

SEQ ID NO: 250308 - DNA, 493 bp, Glycine max
  unsure (1)..(493): unsure at all n locations
gcacgntgggaatgaatcatttgaccgacagaagactatgacgtcgcatgcacgcgtacgtaagctccggaattcggctccgagaactttccctaagtttcattaagggggaaaccccttttcactccccctcgttccttcctttggctggtaaccctggccaattgcaggcttggtaataacccaacagttcaacaagttgcaactcaacaacttcaacgcgttggaacccaacaacgcgttgagtccaaaggtggtcttattganacatggaactctcaacaccctgagctgcaatgcgccggtgtcactgtttccaaacgcaccctcaaccgcaacggcctccacttgccatcttactcaccttatccccaaatgatcattgtcgttcaagggaaaggaacaattggatttgcaattccgggaagttcccgaaacttttggaaaagccacatcagcattcaagcagaaaaggctcaaggtcgcagcagca

SEQ ID NO: 250309 - DNA, 354 bp, Glycine max
attgcccttgttctttcaaagttaccaagcacaagtacacagcacaacagcaccatatggcgtctgaacaattggctcgcatacagaacatcaccaccgagaaggagattcacgttgagaaacacatggttcccaagatggccacccacttcgagcaccttgcggagcaagctaaagaatctgacatcaccgctgggaacgatactccgcagggtagcatagaagccttgcaagctggacagagggtcaaagatcatgcaggaaaagccatgggagatattggtggacgtgggaaagccagagagactaacgagctgggtgcacactttgaatccctggctgacaaagtaactg

SEQ ID NO: 250310 - DNA, 324 bp, Glycine max
actttccttagttcaatatggggaagcccttcttcactctctctctttcttccctttgcttgctactcttgtcgagtgcatgctttgctattacctccagcaagttcaacgagtgccaactcaacaacctcaacgcgttggaacccgaccaccgcgttgagtccgaaggtggtcttattgaaacatggaactctcaacaccctgagctgcaatgcgccggtgtcactgtttccaaacgcaccctcaaccgcaacggcctccacttgccatcttactcaccttatccccaaatgatcattgtcgttcaagggaaaggagcaattg

SEQ ID NO: 250311 - DNA, 465 bp, Glycine max
  unsure (1)..(465): unsure at all n locations
gggtcggaatgaatgaatcgcgtgcgaagacaatgaagtcgcatgcgcccgtacgtaagctcagaattcggctcgaggcaaaggattctacccgccgctcgatgggaatttcccctcaaggggtctcctaaggctaatccgcctcacgagggtcaccaacggcacgtgcctttggggggccgaggccccctactgctggtcggcaaacggacggcgggcgcacgcgtcgcttctagcccggattctgacttagaggcgttcagtcataatccaacgcacggtagcttcgcgccactggcttttcaaccaagcgcgatgaccaattgtgcgaatcaacggttcctctcgtactaggttgaattactattgcgacactgtcatcagtanggtaaaactaacctgtcccaacaatgtctaatcccaactcaagtttcccaattgttggtttaccattccaccacttgn

SEQ ID NO: 250312 - DNA, 303 bp, Glycine max
acttaattagtgttcatgaatacgtcaagccttactttagtggttctaaattgaaaagctttctagctggtcataatatcaccattactgatggtattgacaagactagtgcaactttgcaatttagaaagttagcagattgtgattttctcaagagaaactttaagcagatgtctaatgttttgtgggtagctcctgaggacaaggcgagtttatggtcacaacttcattatgtttcgtgtaataatctggaaatgcaagaagcttatcttgtcaatctcgtaaatgtgttacgagaattgt

SEQ ID NO: 250313 - DNA, 367 bp, Glycine max
gactgataaagctcatatcttccgtgctgatcttccaggggtgaagaaagaggatctgaaggtgcaggtggaggagaataagatcctgcagataagcggggagagggtgaaggagaaggaggaccagaacgacaagtggcaccgcgtcgagaggcagtgcggaagcttcctccgccgcttccggctgccggaggatgccaaccccaaccagatcagctgcacgctcgaaaacggggtgctgaacgtcaccgtgcccaaggtggagaagaagccggagaacaagaacgtgaggcagattgatgtggtttgatgatgatggagcaacatgaagacctggtatgtttgaaagaattttggggtaagttgt

SEQ ID NO: 250314 - DNA, 337 bp, Glycine max
cgccttcagcttccacaatcctatcgcacatctttctcagttctacgatggagttttggggtgccgaggttaaggttggagagtctgttaaggtagacccaaccgaatttgaggcatgcatacacctttctcaggctgctcttggtgaggcaaagaaagataagcctgaaccggtggttctctacatgaaagttggtgaacagaaatttgtcttgggaaccctttccagggagaaaatccctcaaatatctctggaattggttttggaaaaggagtttgagctttcccacagttcaaagagtgccagtgttcatttctgtggatacaaggcatatta

SEQ ID NO: 250315 - DNA, 320 bp, Glycine max
aagatctccatatctgttcccaaaagcttgtttgtaagaatggcttccggtgaacagaaattccctcctcaacaacaacaaacacagcctgggaaggagcatgctatgactccagtaccccaattcactagccctgactacaagccttcaaataaacttcaagggaagattgcattagtcactgggggtgattctgggattggacgagcggtgtgtaacttgtttgccttagaaggtgctaccgtggccttcacgtatgtgaaggggcatgaggacaaggacgcgagggacacattggaaatgatcaagagagcaaagac

SEQ ID NO: 250316 - DNA, 305 bp, Glycine max
ctaacaaccctctccctccgcaacctctcttatcctacaccctcctcctcttcttaccctacgcacctctccgccaacccctcctccctccaattccccaacttctcccaccgcgccaccaccacgcgccgcgcccgcgtcgtcgtcgtctccgccgtcgaggcaccggagaaaatcaccaagctcggcgacgaaatcgcgggactcacgctcgaggaagccaagaacctcgtcgacttcctccaggacaagctcggcgtctccgcggcagcgttcgcccccgtagccgtcgccgcgggtgccgt

SEQ ID NO: 250317 - DNA, 327 bp, Glycine max
aaaagaaagggggaatcggtgggtggaggcttctttggatcatcggagagaggcttctttccattttcaccacagcaatggagaagatctacctcggtggaaaggagcatcatattcgaactggctgtggtattgtgtctgtcatagtctatggcgatcccgacaaaccagctctgatcacttatccagatttggctctaaattatatgtcatgttttcaaggactatttttctgtccagaagcagcttctttactgcttcacaacttttgcatatatcatatcagtcctcctggacatgaggtttttgggagcagctgcaatttgt

SEQ ID NO: 250318 - DNA, 298 bp, Glycine max
caacaacctcaacaaagaggacaaagcagcagaccacaagaccgtcaccagaagatctataacttcagagagggtgatttgatcgcagtgcctactggtgttgcatggtggatgtacaacaatgaagacactcctgttgttgccgtttctattattgacaccaacagcttggagaaccagctcgaccagatgcctacgagattctatcttgctgggaaccaagagcaagagtttctaaaatatcagcaatagcaaggaggtcatcaaagccagaaaggaaagcatcagcatgaagaag

SEQ ID NO: 250319 - DNA, 302 bp, Glycine max
ggccactcctttgaaggtcttaccttgtggactctcaatcctaataccagcacaaggatcggatctgcacctgctatgtttcagtttccttctttcttaaccatcttaccaatcttataccttatgtgttagtctgctagattgtatggaagtgttgagcaaaggggtgcatcgtgctatggtaccggtagatgggcaagcggagaacatgtcagctggggtggaacttgtagagtctgcttccagctaccaaatgctgactcagatggatgtgcttaagttcctgcatgatcgtgctggtg

SEQ ID NO: 250320 - DNA, 224 bp, Glycine max
ctcaagtatcaaggaaactccggccctttggtcaacccataaataacaacaagcatatatgaaggtgtggtgaggccatcttatatgaaataatatcaaaatatattttgtgtaataataaaactatggcctatgtatttaccaccctccgacccagcctatgttaatatctgagtggcgttgtacctttgaatcgccttaataaaatgtcaatcttcaagttt

SEQ ID NO: 250321 - DNA, 316 bp, Glycine max
caaaacagtaaagctaacttcaacacctttaattttctaaaagtaattcagcggctgaataccaagcggagaagatgagtcaggagcagccacggcgtcccaaaggccaaaaccccatcaaatacggcgacgtttttgtcgtctccggcgaccttgcacagaagcccgtcgcaccggaagatgctgccatgatgcaaagcgcggaaactcgagtgctcggacaaacccaacccggcggagcagcttccgtcatgcaatctgccgccaccaggaatgaacaggctggccttgtcggtcaccgggacgtcaccgacgt

SEQ ID NO: 250322 - DNA, 313 bp, Glycine max
  unsure (1)..(313): unsure at all n locations
gagataacttgacaaataaaatcaccatgtctatcatcccaaacttgttcggtggtagacgaagcaacgtcttcgacccattctctctggacgtatgggaccctttcgaggggtttcctttttccacaggtcacgtgccttcctctggtggggaaagcagtgccatagccaacactcgcgtggactggaaggagactccggcggctcacgtgttcaacgttgatcttcccgggttgaagaaggangaagtgaaggttgaagttgaagatgggaaggtgctgcagattagtggtgagaggaccaaagaacaaga

SEQ ID NO: 250323 - DNA, 501 bp, Glycine max
  unsure (1)..(501): unsure at all n locations
gtctttnctgaatgaatcactggacctacagaagacatatgacgtcgcatgcacgcgtacgttagctccggaatccggtccaaggttaatatcccaataaaaccttattaaatattttaagatacaaggaatagaagcacggttcccattactgttgctgggaacatgttttccctggcttcagtttccgtcccaattggcattgcttactgggaaaaagagaaccccaaacacaacaagtgttcccagagttgcaaaatccagagagactcgtacaagaaacaagcatgccacgccccttgcaaactcctttaaggggaaaaacaagaatgttaaaaaagtgaaaatccacgaccacgaacatgaacaaaaaaacccgacaaggaaacctaacaacccggttaaaaggaggaagacgaaaattaccacccagttccaaatccaattccaaagcccaaaaacttcttcagaagaacgagcaccaaccaggcaaaggaacag

SEQ ID NO: 250324 - DNA, 252 bp, Glycine max
ctcggagagaaagagagagagagagagaaaaatggctgatacaagtggaggagatgcaatgagaccggtggtaatatgtgatcacaagtgtggctgcacagttccatgcactggtggttccacttgcaggtgcacaagtgtcggcatgacagctggatgcggtgatcacgtgacatgcacgtgcggagagtactgtgggtgcaatccatgcgcatgtcccaagactgcagcttctggaactggttgcagatg

SEQ ID NO: 250325 - DNA, 407 bp, Glycine max
taaacaccagtcttaattaatttatgcaggtaaaccctgatgatgttgtgtttgggggatgggatatcagtaacttgaacctggcagatgccatggccagggccaaggtgtttgatatcgacctgcagaaacagttgaggccttacatggaatctatggttccactccccggaatctatgaccccgatttcattgctgccaaccaaggagaccgtgccaacaacgtgatcaacggcacagagatagaacaagttcaacatatcatcaaagacattaaggagtttaaggaaagcactaacgttgacaatgtcgttgtcctgtggacagccaacacagaaaagttcaagcaccctatttgttggactaaacgacaccatggaaaacgcctttgcttccttggacaggaa

SEQ ID NO: 250326 - DNA, 291 bp, Glycine max
  unsure (1)..(291): unsure at all n locations
gtttctttcaatggaagtcatttctgcttctagcttgaatcccaacgctccgatgttcatgccactcgcctatcggacggtggaggatttctccgaccagtggtgggacctcgttcactcctccccctggttccgcgacgactggctccgcgagtgcttccaagatccccagttccaaaacgacgacgctttcgacttcgactttgagctagatctccaagatgaagatgaaagggaacgaaaggaagggaatgangtggtgtcgttggggctgctgaaatggcgaagctg

SEQ ID NO: 250327 - DNA, 326 bp, Glycine max
agagaatggctcccaagggtttaacctttctggctgtgttaatatgcgtttcagcactgtcactgactccttctgttgcgggggaagggcaaaataatggccttgttatgaacttctacaaggaatcatgccctcaggctgaagacatcatcacagaacaagtcatgcttctctacaagcgccacaagaacactgctttctcctggctcaagaacatcttccatgactgtgctgttcagagttgtgatgcttcactgttgctggactccacaagaaggagcttgtctgacaatgaaacagatagaagctttgggttgagaaatttc

SEQ ID NO: 250328 - DNA, 343 bp, Glycine max
ctacactcatctgcgattcttgttggaatgaggtgagcgttgtgtttgagttagcttgactatggaagcaaaagataagtggtgcgtggtgaccggaggtcgcggcttcgctgctcggtctttggtggaaatgctaattcgtcacaaggagtactgcgttcgcatcgccgatttggaagtcagcattgttctcaagcccgccgagcatttaggccttctcggcaaggccctgcactctggccgagcccaatatgtctccctcgatcttcgcaacaaggcccaagttctaaaagcgttggagggagttgaggtggtgttccacatgggtgctccaaactcttcc

SEQ ID NO: 250329 - DNA, 313 bp, Glycine max
aaagaaaggggtggtggctgcttcgaaagcttaataatttgtttatttccagaacatcatagttttcgcagcagcaaactaacaaattactcatatcatataataagatggcccgttctctctcgcaagccaaacgtattggtgtccttgttgctcaatctatctccctaattcccgttcatcggcgaggttacgcagtggcatccgatgtatcggtaagagttggattgggtaatattgggcgaaggaatggaatcgtgggaggtgtagaagagaagcctgatacaagagatggttcaaaagcctactcaac

SEQ ID NO: 250330 - DNA, 495 bp, Glycine max
tgccagttgggaatgaatcacgtggcacgacagaagacatagacgtcgcatgcacgcgtacgttagctccggattccggtccagctccaatgggccttaaacactcatcagtcatcaccatggccaagctagttttttccctttgttttctgcttttcagtggctgctgcttcgctttcagttccaaagagcagcctcagcaaaacgagtgccagatccaaaaactcaatgccctcaaaccggataaccgtatagagtcagaaggagggctcattgagacatggaaccctaacaacaagccattccagtgtgccggtgttgccctctctcgctgcaccctcaaccgcaacgcccttcgtagaccttcctacaccaacggtccccaggaaatccacatccaacaaggtaaagggaattttgggaagatataacccggttgtgtcaacccaattttagaacccctcaacaacctcaacaaggaggacaaggcaccag

SEQ ID NO: 250331 - DNA, 316 bp, Glycine max
caccagtgctatcttcaaatatcatgtccacacatgtcatcaaggtcgtcacactcgaagcatgataagagtagcccttcataccatagaatcagttccgatttgaagcctggaatggtgtttgttgtccctcccggtcatcccttcgtcaccatagcttccaataaagagaatctcctcatgatttgcttcgaggttaacgctcgagacaacaagaagtttacatttgcagggaaggacaacattgtgagttctctggacaacgttgctaaggagcttgcctttaactatccttctgagatggtgaacggagtat

SEQ ID NO: 250332 - DNA, 297 bp, Glycine max
gctagaatggaatttcgatgctcagtcatctcttttaccattctcttctctcttgctcttgcaggagagagccatgtccatgcatcgctacctgaggaagattattgggaagctgtttggccaaacactcccattcccactgcactgcgagagcttctaaagcctctccctgcaggtgttgaaatcgatgaactccctaagcaaattgatgatacacagtacccaaaaacattcttctataaagaagaccttcatccaggcaaaacaatgaaagtacaattcaccaagcgtccctat

SEQ ID NO: 250333 - DNA, 327 bp, Glycine max
gggaaacaaaactacccttttgcttttgctctttgttctttgccatggagtggccacaacaacaatggccttccatgatgatgagggtggtgataaaaagtcaccagaaagtttgtttttgatgagcaactccacgagggttttcaagactgatgcaggggaaatgcgtgtgctgaaaagccatggtggtaggatattttataggcacatgcacattggcttcatctctatggaaccaaagtccttgtttgttcctcagtacctcgactccaatctcatcatattcatccgtagaggggaagcaaagctgggattcatatatgatga

SEQ ID NO: 250334 - DNA, 313 bp, Glycine max
gatcatacatagtagtgttggtgggttgcaaagatgcttgggggtcttctccataggggtcataagataaaagggacagtggtgttgatgcgcaagaatgtgttggacgtgaatagcgtaaccagcgttgggggaattattggtcaaggtctcgacttagttggctcaacactcgatactcttactgccttcttgggccgatccgtgtctctccagcttattagtgctaccaaagctgatgccaacggaaaagggaaacttggaaaggctacctttttggaaggtatcattacttcattgccaactttgggag

SEQ ID NO: 250335 - DNA, 315 bp, Glycine max
ctgttcaaagtggatctacaagcatgtattttgctgaagctacggcaccacacaaacatgggggtggacttctcacttcaagtaaccatggggtcaagacagaacgatttgtgcaaagaggccactcttggtatgtggctactgatattccaagtgacttccttgttcaaattggagaagctaacttccacttgcacaagtatcccttggtaactagaagtggaaagctgactacagtcatatatgaatcccacgacccagatttgaataagatagttatcgatgatatccctggtgggggaaaaggctttgaac

SEQ ID NO: 250336 - DNA, 335 bp, Glycine max
cttgcaggttcgaaagacaatgtgataagccagatacctagtcaagtgcaggagcttgcgttccctgggtctgcaaaagatattgagaacctaataaagagccaaagtgagtcctactttgtggatgctcagcctcagcagaaagaggaggggaacaagggaagaaagggtcctttgtcttcaattttgagggctttttactgaataagtatgtagtactaaaatgtatgctgtaatagctcatagtgagcgaggaaagtatcgggctatttaactatgacttgagctccatctatgaataaataaatcagcatatgatgcttttggtttgtggt

SEQ ID NO: 250337 - DNA, 408 bp, Glycine max
  unsure (1)..(408): unsure at all n locations
cggctcgagctatcagcatcctccatctcttcatcagaagatccaaaatcatcatcatcagaatcatcatcagagtggtgatgaagatgatgatgaagagacccctcccaagaaggtggatctgggaaagaagagacccaatgagtctgcatcaaaaactccagtttcttccaagaaagccaaaaatgctactcctgaaaagactgatggtaagaaaggtggacatacagcaactcctcaccctgcaaagaaaggcggaaagactcccaacagcgaagccaaagccaagactcccaacagtgaagccaaagccaagactcctaagtctggtggactctcttgcanaacctgcagcaagtctttcaacaatgaaagtggtctgcaacaacataacaaggcaaagcatgg

SEQ ID NO: 250338 - DNA, 385 bp, Glycine max
gttagaaatataactaaagagaccatggagatagtagctaacaaggaagttattgcagttaaccaagatccacttggtgtacaaggtaaaaaggttaggatggaaggtgatgaagagatttgggcaggtcctctttcagggtacagggtagctgttgtcttgcttaatcgtggcccttggaaaatatcaattacagccaactgggatgacattggtattccaccaaaaagtgctgttgaagctagagacctttgggagcacaagacattgatgagacccttcgtggataaattgactgccacagttgatccacatgggtgtaaaatgtacgttctgaaaccaatggcttgaattttccggaaccaaatttttggattgcaccttt

SEQ ID NO: 250339 - DNA, 331 bp, Glycine max
cagatggataggtatcagagggtagagaagcccaaggcagagactcctataaacgagaatgagatacgcgtcactactcaaggaaggatgaggaattacatcacctacgccaccactctcctccaggagaaaggatctagtgaaattgttctcaaagcaatgggacgtgcaataaataagaccgtaatgattgctgaactgatcaagagaaggattgttggtctgcatcaaaacacccaaattggatcaactgatataactgacacatgggaaccactagaagaaggccttcttcctttggagactactcgccatgtttcaatgatcacaa

SEQ ID NO: 250340 - DNA, 360 bp, Glycine max
aagagaggacccttctcttgcatagttcaagtgagtgagagtgccaaaaaatgggaagggctccttgttgttccaaagtggggttgcacaaaggtccatggactcctaaagaagatgcattgcttaccaagtatatccaagctcatggagaaggccaatggaaatcactacccaaaaaagcagggcttcttagatgtggaaaaagttgtagattgagatggatgaactatctgagaccagacataaagagagggaacatagcaccagaagaagatgatcttataatcagaatgcattcacttttgggaaacagatggtccctcatagcaggaaggttaccagggagaacagacaatgaaa

SEQ ID NO: 250341 - DNA, 318 bp, Glycine max
gaacactcatcaccatggccaagcttgttctttccctttgtttccttcttttcagtggctgcttcgctctgagagagcaggcacagcaaaatgagtgccagatccaaaagctgaatgccctcaaaccggataaccgtatagagtcggaaggtgggttcattgagacctggaaccctaacaacaagccattccagtgtgccggtgttgccctctctcgctgcacccttaaccgcaatgcccttcgtagaccttcctacaccaacggtccccaggaaatctacatacaacaaggtaatggtatttttggcatgataatcc

SEQ ID NO: 250342 - DNA, 308 bp, Glycine max
gatcagggtcgcaaggtcgacgagtatggcaatgttgagaggcaaactgacgaatatggcaacccggttcatgccactagtgtcacttatgtagccaccaaaagtgttggtggctacaatgatgacgctaataagcaacatgatattactggtgtctatcccgagaaagacaccggtagacatcattttggtcgtggttacgacggtgacactaacaagcaacatgatgctactggtgtttatcccggaatagacattggtagagattatgggactaccggtgtttaagggctaaacaccgacagaca

SEQ ID NO: 250343 - DNA, 374 bp, Glycine max
ggaattcggccgctcgagggaacaggaagctgtagcaacagttgggaacatccctaccctgttcgtattgcagcagtacgacaatccactatcaaagaagttaaatgaagtggtaaatgagatacggcggcaaagatgttcctacttccggttcaagctctgcaggaaaggagatccatcaggaatgctattcttctcgtatatgatagaagacaagagcgcaggtggcttctcctatgtagagtttcttatccatgttcataggcaaattcacaataaaatgtcatcataacgagtatatggcagcttcatttttgcaagcttttagacctaaatgatagagcaagccccaagtatacgtgagattctgcata

SEQ ID NO: 250344 - DNA, 395 bp, Glycine max
ggaagaggaatcttgagaaatggcaggggacagcaagagcaagattctgttcatcggagggactggttacatcggaaaattcatcgtggaagccagcgccaaagctggccacccaactttccttttggtgagggagtccactctctccaaccccgcaaaatcacccctcatcgacaatttcaaaggcctcggtgtcaatcttgttttaggagatctatacgatcaccaaagtttggtgagtgctataaagcaggtcgatgtggtaatttctactgtaggacacctgcagctagctgatcaagataagatcatttctgcaattaaagaagcaggaaatgttaagaagttctatccatctgagtttggaaatgatgtggaccggactcatgcagttg

SEQ ID NO: 250345 - DNA, 388 bp, Glycine max
ctactacaagtacttccttacaatcaaaaccaacaacaactatggcaagttatcaaaagcactacgatgatcagggtcgcaaggttgacgagtatggcaacgttgagaagcaaaccgacgaatacggcaaccctgttcatgctgctagtgtcacctatgtagccaccagaactgctgctggtggttacagtgatgacattaataagcaacatgataccaccaatgcctacggcgtagacactggtagacagcattctagtggtggctacgatggtgacactaataaacatcatggaactactggtggctataatgatgacaccaatagacatcatggaactaccggtgtctatggtatagacaccgataggcaacaacatgggactac

SEQ ID NO: 250346 - DNA, 357 bp, Glycine max
gcaacataaatacttccaatagaacgaaaactgatgctcggagaacaccatcgcgggaatccgacggtcctcatgccaccgtggccagcccactacgatccgacggctgagatgtactccgcgttcgtaacacacgacatcactgctggtgagtactctccgtaccatcttcaggaagcactaacggcgctgcagcgttttctgccgtcaaacgaaacggacgcagactcggactcctcggaggcggctcagcccgacactgcggtggacgcgtacacgtgcgaccatttccgcatgtacgagttcaaggtccgtcgatgcgcacgtggcaagtcacacgactggaccgactgtccg

SEQ ID NO: 250347 - DNA, 332 bp, Glycine max
cgcgcttgaggcttccattgctagcaattttactgataacggatgcattgcgtgtatgtgtcacaacactgatggactttatagtgctaagcagactgctattgtgagagcttctgatgatttttaccctcgtgatcctgcttcccataccatccatatttcttctgttgcatacaactcactattccttggagaattcatgcaacctgactgggacatgtttcatagtttacacccagcagcagattatcatgctgcagctcgtgcaattggtggatgtcctatttatgttagtgacaagccaagcaatcacaattttgattctcctaaga

SEQ ID NO: 250348 - DNA, 302 bp, Glycine max
gcaattcactctgtacaattcttcgttcgttctctgcagttatatcctttttgagcttcaatggcggacgctgaaaccttcgctttccaggctgagatcaaccagcttctaagtctcatcatcaacacattctacagcaacaaggagattttcttgcgtgaactcatcagcaatgcttctgatgctttggataagattcgattcgagagcttaaccgacaagagcaagctcgatgctcagccagagctcttcattcgtcttgtgcctgacaaggataacaagactctttccattattgacag

SEQ ID NO: 250349 - DNA, 353 bp, Glycine max
atgcaacctccacaaaggcttatgctaccagaaccatccttttcctgaaaaatgacggaactttaaggccacttgccatagagttgagtttgccacatcctcagggagatcaatctggtgcttttagtcaagtttttctgcctgcagatgaacgtgttgaaagttctatttggctgctagcaaaggcttatgtagttgtgaatgactcgtgctatcatcaacttgtcagccattggttaaacactcatgcagttgttgagccattcatcatagcaacaaacaggcatctcagtgttgttcaacctaattataaactccttcaacctcactatcgtgacaccatgaacctaaat

SEQ ID NO: 250350 - DNA, 394 bp, Glycine max
  unsure (1)..(394): unsure at all n locations
tccaaaatttaataacccaataaaacctaataaattattttagataacaagaataaaagcacggttccaataccggttccgggaacttttttcccgggcttcagtttctgtctcatttggcattgcttactgggaaaaagaaaaccccaaacacaacaagtgtctccagagttgcaatagcgagagagactcgtacaggaaccaagcatgccacgctcgttgcaacctccttaaggtggagaaagaagaatgtgaagaaggtgaaattccacgnacacgaacacgaccacaacacccggagaaggaaactcagcaacccggtgagaaggacgaagacgaagatgagcaaccacgtccaatcccatttccacgcccacaacctcgtcaagaagaa

SEQ ID NO: 250351 - DNA, 422 bp, Glycine max
gtcgacgcacgcgtacgtcagctacggaattcggcccaaggaaaattaacaaatttcaaaaccctcctcatctcccttctcttctgcatcgcccacacttgcagcgcctccaaatggcagcaccagcaagatagctgccgcaagcagctccagggggtgaacctcacgccctgcgagaagcacatcatggagaagatccaaggccgcggcgatgacgatgatgatgatgacgacgacaatcacattctcaggaccatgcggggaagaatcaactacataaggaggaacgaaggaaaagacgaagacgaagaagaagaaggacacatgcagaagtgctgcacagaaatgagcgagctgagaagccccaaatgccagtgcaaagcgctgcacaagataatggagaaccagagccaggaactgga

SEQ ID NO: 250352 - DNA, 411 bp, Glycine max
ctacgttaactacggaatccggtccaaccttccggtcaattcccccggtttttcctccaaaccaatggttccggggaaaccccgaaatttaacaaggcttctccgaacggcggcttcggcggcttcggcttcgtccctctccctcttaagcccaacctcggaacctctccgttcggttcccgctcgtggattggtggttcgcgccccgaaaggatccacgaaccaccgcgccctaaccggcgtgatctttgaaccgttcgaagaggtgaagaaggagctcgatctcgttcccaccgttccacaagcttctctcgcccgccaaaaatacgttgacgaatccgaagccgccgttaacgaacaaatcaatgtggagtataacgtttcctacgtttatcatgctatgtttgcgta

SEQ ID NO: 250353 - DNA, 265 bp, Glycine max
gttaactccggattccgctccaggagaaccccaaacacaacaagtgtctccaaaattgcaataaccagagagactcgtacaggaaccaagcatgccacgctcgttgcaacctccttaaggtggagaaagaagaatgttaagaaggggaaattccacgaacacgaacacgaacacaacaaccggagaaggaacctcaacaaccccgtgagaaagaggaagacgaagattagcaaccacgttcaatcccatttccacgcccaaaacc

SEQ ID NO: 250354 - DNA, 380 bp, Glycine max
atcatggagaagatccaaggccgcggcgatgacgatgatgatgatgacgacgacaatcacattctcaggaccatgcggggaagaatcaactacataaggaggaacgaaggaaaagacgaagacgaagaagaagaaggacacatgcagaagtgctgcacagaaatgagcgagctgagaagccccaaatgccagtgcaaagcgctgcagaagataatggagaaccagagcgaggaactggaggagaagcagaagaagaaaatggagaaggagctcattaacttggctactatgtgcaggtttggacccatgattcagtgcgacttgtcctccgatgactaagaagttaaagcaatgttgtcacttgtacgtactaacacatg

SEQ ID NO: 250355 - DNA, 392 bp, Glycine max
atttgaagcgtggttatgttgcctcaaactcaaaggatgaccctgcaaaggaggctgctaacttcacagcccaagtcatcatcatgaaccacgctggtcagattggaaatggctatgcccctgtcctcgactgccacacttctcacattgctgtcaagtttgctgaactcatgaccaagattgacaggcgatccggcaaagagcttgagaaggagcccaagtttttgaagaacggtgatgctggttttgttaagatgattccaaccaaacccatggttgttgaaactttctccgagtatcctccacttggtacgtttgctgttagggacatgcgtcaaactgttgctgtgggagtcatcaagaacgttgagaagaacgatcctaccggagcc

SEQ ID NO: 250356 - DNA, 392 bp, Glycine max
ctctccttctcgcagagtgagcgagcaagcgaatatcccaatcccacaccaatggcatgctcagccacctctgcttccctcttctccgcaaacccaacacccctcttctctcccaaaccctctctctccctccaccttaaccctctccccacgcgcccttctccctccctcacgcgcccttctctctccctcacgcgcccttctcactctcgccgctccttcgttgtcaaagcctcctccagcgagcttccgctggttggtaacaccgcaccggatttcgaagcagaggctgtgtttgaccaggagtttatcaacgtgaaactatctgattacattgggaagaaatatgttgtgctcttcttctacccgttggacttcacctttgtctgccc

SEQ ID NO: 250357 - DNA, 390 bp, Glycine max
aaatcatttcgttgcagtcagtcattcgaagaatacggtttcagatatgaatcgcaatcgtatgggagatcgacatctggctgcattgtaagtgcaattctcgtattcttcatgatcttctcatcctgactctaggtgaatcctctaggtacgcaccgttatgccactggcaagcacccttctggctactgcacgcgcccatctgactctgcgggactccttcggtgtcaacagtctactccagtgagcttccgctggttggtatcaccgcaccgggatttcgacgcataggctgtgtttgacgaggagtttaacaacgtgaaactatctgattacattgggaagaaatatgttgtgctcttcttctatccgttggacttcacctttgtc

SEQ ID NO: 250358 - DNA, 329 bp, Glycine max
atccctttccttcctgcctctctttgctttcctggctctttcagaagatgttgaacaagttgtggacataagtggcaaccccattttcccaggtggcacatattacattatgccatcaacttggggcgctgccggtggtggattgaaactaggccggacaggaaactcaaactgcccagttactgttttgcaagattactcagaaatcttccgtggcacaccagtcaaattcagcatacctgggataagccctggaatcatctttacaggtactccacttgaaatcgagttcgcagagaaaccttattgtgctgaatcctccaaatggg

SEQ ID NO: 250359 - DNA, 471 bp, Glycine max
ggggtgggaatgaatgaatgacgtgtcgtatagaagaaaatgacgtcggacgcacgcgtacgtaagctcggaattcggctcgagggcttggcggaatcagcggggaaagaagaccctgttgagcttgactctagtccgactttgtgaaatgacttgagaggtgttgctgtacttgttggagtgccaaacaaagatgatgcattcaaaactcatccagtgaatttcttgaacgagagaactctaaagggtaccttctacggaaactacaaaccccgcactgatcttccttctgttgtggagaagtacatgaatggggtaagcttcaatattgattgaattgtgcactctataaggacattcattcatatatattgatgttttttttttttatcgccaaatgttaaatgttaattggtaatagtgagatttgaactcacgacctcatctcaatcccctaaaactcctggtcaa

SEQ ID NO: 250360 - DNA, 313 bp, Glycine max
tgctgacgctgattacctcatcgttatccttaacgggactgccattctttccttggtgaacaacgacgacagagactcctacagacttcaatctggtgatgccctgagagtcccctcaggaaccacatactatgtggtcaaccctgacaacaacgaaaatctcagattaataacactcgccatacccgttaacaagcctggtagatttgagagtttcttcctatctagcactgaagctcaacaatcctacttgcaaggattcagcaggaacattttagaggcctcctacgataccaaattccaggagattaac

SEQ ID NO: 250361 - DNA, 421 bp, Glycine max
ttacttaactacggaatccggtccaaaaccggaaactccaaaaacaatggctccaaaggtggccccaacttaaacaatggttcccccaacttggttcccccaagaaattttaacaacgtgaaggccccaaaggttcctgttggcggattccctgctttgcttaaagttggaattattggtgggcttgttgtatatggggctgcaaacagcttgtacaatgttgagggaggtcatcgagccattgtcttcaatcgtgttgtcggtgtcaaagataaggtctatcctgaagggacacatattatgattccttggttcgagaggcctgtgatctatgatgtacgtgcacgtcctcatttagtagagagtacatcagggagccgtgatctccaaatggtgaaaattggacttagagtccttaccc

SEQ ID NO: 250362 - DNA, 394 bp, Glycine max
gaaacagacaatttgcagagtttgtttattgtgaaaaatagaacaatgcatgcagcatagaaatccatagagacctttaatgaaatcgcagccaacattggcgcctctgccaattctggcttggagaaaaccaaggccactatccaagagaagattgagaatatgaatgcagaagatcagactcaaatggatatggctaccaagaggaaagatgagaagatcaaccaggctgagatggagaagcagcaggcccgtacgttacacgccgctgcaaaacactacgccatggatgagcacatggcacagggcagtcacgataccgccgggcctagaatcgagactgctacacacatcatcagtgggcccgggactgacaatgctatgtagtctaaca

SEQ ID NO: 250363 - DNA, 393 bp, Glycine max
cttaattattaacacttccttagttcaatatggggaagcccttcactctctctctttcttccctttgcttgctactcttgtcgagtgcatgctttgctattagctccagcaagctcaacgagtgccaactcaacaacctcaacgcgttggaacccgaccaccgcgttgagtccgaaggtggtttgattcaaacatggaactctcaacaccctgagctgaaatgcgccggtgtcactgtttccaaactcaccctcaaccgcaatggcctccacttgccatcttactcaccttatccccggatgatcatcatcgcccaagggaaaggagcacttggagttgcaattccaggatgtcctgagacgtttgaggagccacaagaacaatcaaacagaa

SEQ ID NO: 250364 - DNA, 390 bp, Glycine max
caaaaagtaatctggatcctgcaatctatggtgatcaaagcagtaagataacagcagattcccttgatctagatgggtacacaatggacgaggcacttggtagtcgaaggttatttatgttagattaccatgatatcttcatgccatatgtgaggcagataaatcagctgaattctgcgaagacttatgcgacaaggactatcctttttttgagagaagatggaactttaaagccagtggccatcgaattaagtttgccacattctgctggggatctgtcagctgccgtcagtcaagtcgtcttacctgctaaggaaggtgttgagagcacaatttggctactagccaaagcttatgtcatcgtaaatgactcttgctaccatcaactca

SEQ ID NO: 250365 - DNA, 364 bp, Glycine max
ccaacaatgccgttcaaagtggtcctaattgaaaaacacctgggcgttggtgcaaatgtttgcctcaatcattttccctggagacaacaagctcactgagaaaacaatttttacttgcagagatttggacatcttggttgtttattatacaatagcaactcaatttagaaaatttctaccgcattacattaggtggcatctgtataccttgttgatttacattctcccatcttttctcactgctgaaattaaatataagcggaatctgagtaatattcatatttccggcttattttacgacggcagatacaaattctggactaaacacgagaaaaatcttgctttgacagaagaggaaaagatg

SEQ ID NO: 250366 - DNA, 393 bp, Glycine max
gaagcagcaaagggaaacaaaggggaataactgcaccattgacccaattaacgatagcaagtacgagcatagccttgagagttttgcacagaagctagtgaaagaaaggccttcaacatcaacatcaacatcatttgttatggctacttccaacagttcttttctgcatgctgatgcaccggctcctgcaccagccttgcttccgtcttggctttccaattccaatggcactgcacctgtgaggccaccctcaccttctgtgactcgtagtctttctcactcgacggtggcagcgtctccgccatggatgcaaccgcacgtcagaggacaggacaatgctaatcctcttgttttggggaatgtggcgcctcacggtgccgttctagcatttgg

SEQ ID NO: 250367 - DNA, 356 bp, Glycine max
catagaacagcatcgaacccgtcgtaccagatgaacttgtcaccatggtttcttccgacattgatccacgagaggatgtccttcatgcctggtacatggatgatgttgatgatgatcacagactcctgccatcatgtgagaacccaaggagtttgtcgcgttggaccaacttgctgaacatggagtccttagctggaaactagatgcggataaccatgagaatgatccagatctgaagaagattcgtgaagagcgtggatacacctacatggatgtttgtgacgtctgcgcagtaaaattgccacattatgaacagtaaatcaactgcttctttgaagagcagcgtcacactgatg

SEQ ID NO: 250368 - DNA, 363 bp, Glycine max
gccgaggatctcccctttcgaaccgattatgccgatagatatgtatccgcgggaagtattgaatactggccggatccacagcgtggcatcaaggaagcttacagggttttgaaacttggagccaaggcatgtctaattggtccggtctaccctacattttggttgtcacgtttctttgctgatgtttggatgcttttccccaaggaggaagagtatattgagtggtttcagaaggcagggtttaaggacgtccaactaaaaaggattggcccaaaatggtaccgtggtgttcgccgacatggcttgattatgggttgttcagtgaccggtgttaagcctgcatctggagattctcctttgcag

SEQ ID NO: 250369 - DNA, 307 bp, Glycine max
attttgttggagatctcgtctttgaagtttctaagatgacttccccctacattaaatgtacagtctctttcttcatagcatttggaaatttggctgatgacaccatcaattttgaggcttttccccacaagctggtgcagtttggagagattcaggaaaaagttgtattgaaattttcacaagaggaatttcttacagcttggtcaactcaggtgcgtcctgcaacaactctgttggctgatgggtgtccatatttgtaagctatggtgcatgataattcagtttccacaataacaagttaatttgg

SEQ ID NO: 250370 - DNA, 438 bp, Glycine max
cgtcgcacgcacgcgtacgtaacctccggaattcggctcaaggaaacatttagggctcgttataactccggtgaagggtgcaaaagttgtcattgataggctaactggccggaccaacggatatggctttgtaaggttttcagatgagagtgagcaagtgagggctatgactgagatgcaaggggttctttgctcaacaagacccatgaggattggacccgcctctaataaaacccccaccactcagtcccagcccaaagcttcatatcagaattctcaacctcaaggttcacagaatgagaatgatccaaataatacaactatttttgttggtaatttggattctaatgtcactgatgatcatctgaggcaagttttcagccactatggagaattagtgcatgtgaagattccagcaagcaagcgatgtgggtttgt

SEQ ID NO: 250371 - DNA, 438 bp, Glycine max
cttcggacgcacccttacttaaccccggaatccggtccaaccaaaattgtccaacttgattgaaaattattgtgttaaaaacaaaacaatttttcaatggcttcaaaaaaacaagaggagcgacctgaggcagctgcgaaagttgctgccaaagaactcgaacaagtcaacagagaaagaagagaccgtgatttcggtgttgttgctgaacaacaacaacaacatcatcaggaagatcaacaaaaacgtggtgtaatcgggtccatgtttaaggcggtgcaagacacctacgagaacgccaaggaagctgtcgttggcaagaaagaagctactaataacgcgtacagtaatacagaggttattcacgatgttaacattcagcccgatgacgtgtcggcaacgggggaagtaagggacatatcagccacaaagactcat

SEQ ID NO: 250372 - DNA, 349 bp, Glycine max
ctggaaccctttgatagactatacatagagacacacagagagagacagacaagaaggataaagatgcaatcttcaaaggagaagctgaaaaacatgaccagtgctgccaaggagcaagtcgacatcgagaaagcaagcatagacgataagacagagaaagcaacggcaataacacaagaggagagggtgattacccatgaacgtgcaaaggcaatcgaagctgatgcaaagatggagctgcatgaagcacaagccaggcatgcagcagagaagctaagcaccagccaatcacattatggtccccaccatggtcataaccctcccctggtaagaacaactgagactcact

SEQ ID NO: 250373 - DNA, 393 bp, Glycine max
gaaagaacttccttataaccaaaaccaacaacaactatggcaagttatcagaagcactacgatgatcagggtcgcaaggtcgacgagtatggcaatgttgagaggcaaactgacgaatatggcaacccggttcatgccactagtgtcacttatgtagccaccaaaagtgttggtggctacaatgatgacgctaataagcaacatgatattactggtgtctatcccgagaaagacaccggtagacatcattttggtcgtggttacgacggtgacactaacaagcaacatgatgctactggtgtttatcccggaatagacattggtagagatcatgggactaccggtgtttatggcctaaacaccgacagacatcatggaacttctggggtgaat

SEQ ID NO: 250374 - DNA, 349 bp, Glycine max
  unsure (1)..(349): unsure at all n locations
ccttaataaataatttaagatactatgatgagagcacggttcccattactgttgctgggacttgttttcctggcttcagtttctgtctcatttggcattgcttactgggaaaaagagaaccccaaacacaacaagtgtctccagagttgcaatagcgagagagactcgtacaggaaccaagcatgccacgctcgttgcaacctccttaaggtggagaaagaagaatgtgaagaaggtgaaattccacgaccacgaccacgaccacaacacccggagaaggaaactcaacaatccggtgaaaaggangaagacgaactgaacaaccacgttcaaatcccattcccaagcc

SEQ ID NO: 250375 - DNA, 279 bp, Glycine max
  unsure (1)..(279): unsure at all n locations
cccagttcanaggtaaggtangttaacaaccctcctcaacctcctcccaatgggaccttttattcgttcccaaccttagggaacaaggtccgtcctcaagtcccaaaacgcaacaacgcaaagggcctgcacacttctcgagcccctacttttcggaaagcaaaggggatctcaaaggggtttgcacccaaattttatctaaacccttgcccggggcgcccctctcccaagtcgccttccgccaccctttcagatacaagaagcacaacgagctcttca

SEQ ID NO: 250376 - DNA, 392 bp, Glycine max
attgcatttcgttactttcatttgttgtgcaatcttacaagttccaaacttctctattttgttattatttgttctcacttctcacacatacagatttgagccttttatattatcatggcttctaaggtggtttcggttttggttatagcgatgatgttgtttgccatgaactgtaactgcactagtgttggccacatgccttcaaccaaagaggaaggtcacgattttcaggagtctaaagccaagaccacacaaactgcgaacaaggccatggaaactggtaaagagggacaagaagccgcagagtcatggacagaatgggctaaagagaaactcagtgaaggtcttggcttcaaacatgatcaggaatccaaagaatccaccactaacaa

SEQ ID NO: 250377 - DNA, 434 bp, Glycine max
cttcggacgcacccttacttaacctcggaattcggctcaaccaaaaggaccagaattggcattgatgaaacaatttgcacaatgagacttcgccaaaacattggtcagaattcatcacctgacatctacaaccctcaagctggtagcatcacaaccgccaccagccttgacttcccagccctctggcttctcaaactcagtgcccagtatggatcactccgcaagaatgctatgttcgtgccacactacaccctgaacgcgaacagcataatatacgcattgaatgggcgggcattggtacaagtggtgaattgcaatggtgagagagtgtttgatggagagctgcaagagggacgggtgctgatcgttccacaaaactttgcggtggctgcaaaatcccagagcgataactttgagtatgtgtcattcaagac

SEQ ID NO: 250378 - DNA, 360 bp, Glycine max
gagaagtaaaagatcttagtgcaagtaattaacatggaatctcagcaagcaaaccgtgaagaacttgatgagaaggcaaggcaaggtgaaactgttgttcctggaggaactggtgggaagagtcttgaggctcaagaacatcttgctgaaggaaggagccgtggagggcagacgaggaagcagcagctagggtcagaggggtatcatgaaatggggaccaaaggagggcagacaaggaaggaacagatggggagagaagggtaccaagagatgggacgcaaaggaggactcagcaccatggacaagtctggtggagaacgtgctgaagaggaaggcatagaaatagatgagtctaagttt

SEQ ID NO: 250379 - DNA, 394 bp, Glycine max
ctcgagccgattcggctcgagcggctcgagttactaactaaacaatttttcaatggcgtccaagaaacaagacgagcgagctgaagcagctgcgaaagttgctgccaaagaactcgaacaagtcaacagagaaagaagagaccgtgatttcggtgttgttgctgaacaacaacaacaacatcatcaggaagatcaacatacacgtggtgtaagcgggtccatgattaaggcggtgcacgacacctacgagaacgccaatgaagctgtcgttggcaagagagaagctactaataacgcgtacagtaatacagaggtgattcacgatgttaagattcagcccgatgacgtgtcggcaacgggggaagtaagggacatatcagccacaaagactcat

SEQ ID NO: 250380 - DNA, 389 bp, Glycine max
caaaaccaacaacaactatggcaagttatcaaaagcactacgatgatcagggtcgcaaggttgacgagtatggcaacgttgagaagcaaaccgacgaatacggcaaccctgttcatgctgctagtgtcacctatgtagccaccagaactgctgctggtggttacagtgatgacattaataagcaacatgataccaccaatgcctacggcgtagacactggtagacagcattctagtggtggctacgatggtgacactaataaacatcatggaactactggtggctataatgatgacaccaatagacatcatggaactaccggtgtctatggtatagacaccgataggcaacaacatgggactactggtggctatgccggtgacactggt

SEQ ID NO: 250381 - DNA, 394 bp, Glycine max
gtaagatggcaagtggaggccattgcggttgaggggccacaagaacaatcaaacagaagaggctcaaggtcgcagaagcagcagctacaggacagtcaccagaagattcgtcacttcaatgaaggagacgtactcgtgattcctcctggtgttccttactggacctataacactggcgatgaaccagttgttgccatcagtcttcttgacacctctaacttcaataaccagcttgatcaaacccctagggtattttaccttgctgggaacccagatatagagtacccagagaccatgcaacaacaacaacagcagaaaagtcatggtggacgcaagcaggggcaacaccagcaggaggaagaggaagaaggtggcagcgtgctcagtggcttca

SEQ ID NO: 250382 - DNA, 391 bp, Glycine max
atgagtttgaagaacaacatggtggtgctaaaggtgtgtttgttgcttcttttccttgtgggggttagagctgcacgcatggaactgagcttcttcaaaagtgatcagtcatcaagttatgatgatgatgagtattcaaaaccatgctgtgatctctgcatgtgcacacgctcaatgcctcctcaatgcagctgtgaagatattaggctgaattcatgccactcagattgtaagagctgtatgtgcacacgctcacagccaggacagtgtcgttgtcttgacaccaacgacttctgctacaaaccttgcaagtccagagatgactagaaaaactaatagctctctcaaatggacgaagcccctttaggctttgtttgttatgttaggggag

SEQ ID NO: 250383 - DNA, 288 bp, Glycine max
atgagtttgaagaacaacatggtggtgctaaaggtgtgtttgttgcttcttttccttgtgggggttacagctgcacgcatggaactgagcttcttcaaaagtgatcagtcatcaagttatgatgatgatgagtattcaaaaccatgctgtgatctctgcatgtgcacacgctcaatgcctcctcaatgcagctgtgaagatattaggctgaattcatgccactcagattgtaagagctgtatgtgcacacgctcacagccaggacaatgtccttgtcttgacaccaac

SEQ ID NO: 250384 - DNA, 308 bp, Glycine max
cccggtgccttcactcctacttgcagcttgaagcacgttcctggcttcattgagagagcagaagagctgaaagggaagggtgtggacgaaataatctgtatcagtgtgaatgatccatttgtgatgaactcatgggccaaaacattcccagagaacaagcatgttaagttccttgctgatggtgcagccaaatacaccaatgcccttggtcttgagcttgacctcactgacaagggtctcggcgtccgctcaaagaggtttgctctgctggtggaagacctcaaggtgaaggttgcgaatgttgaaag

SEQ ID NO: 250385 - DNA, 200 bp, Glycine max
ggctctctcacgcagtcgcagtgagtgaaaaggaaaatcctaattgcggtagtcacagtgccttcgagagaaagaaaagatggcagataatcttgttctccgtggcaccatgcgcgcccataccgacgttgtgacggcgattgccactcacatcgacaactccgacatgatcgtcaccgcctcacgcgacaaatccatca

SEQ ID NO: 250386 - DNA, 424 bp, Glycine max
  unsure (1)..(424): unsure at all n locations
cggacgcacccttacttaagctcggaattcggctcaagatacatagtattgttggtgggttgcaaagatgcttgggggtcttctccatangggtcataagataaaagggacagtggtgttgatgcgcaagaatgtgttggacgtgaatagcgtaaccagcgttgggggaattattggtcaaggtctcgacttagttggctcaacactcgatactcttactgccttcttgggccgatccgtgtctctccagcttattagtgctaccaaagctgatgccaacggaaaagggaaacttggaaaggctacctttttggaaggtatcattacttcattgccaactttgggagcaggccaatctgcattcaaaattaattttgaatgggatgatgggagtggaattcctggagcattttatatcaagaat

SEQ ID NO: 250387 - DNA, 388 bp, Glycine max
gctataaagttgagtttgccacatcctcagggagatcaatctggtgcttttaatcaagtttttctgcctgcagataaaggtgttgaaagttctatttggctgctagcaaaggcttatgtagttgtgaatgactcatgcaatcatcaacgtgtcaaccaatggttaaccacacatgcagttgttgagccattcatcatagcatcaatcacgcatcacagtgttgttcaccctatttataaactccttcaccctcactatcgtgacaccatgaacataaatggacgtgcccggttatcactggtcaacgacggtggcgttatacaacaaacatttttgtggggaacgtattctgtggaaatgtctgctgtagtttacaatgattgcgttt

SEQ ID NO: 250388 - DNA, 390 bp, Glycine max
caccaattcattctcatacattccttcttcttcttcttcttcttcttcttctttcacaatcacaatggcgcgagtggatctggatggtaaccccatcaagccacttacgatctgcatgatcggcgctggcgggttcatcgggtcgcacctctgcgagaagctcatgtccgaaacccctcacaccgtcctcgccctcgacgtctacagcgacaagatcaaacacctcctggattccgccgattcccccctcccttgggctggccgcatcaccttccaccgcctcaacatcaaacacgactctcgcctcgaaggcctcatcaagatggcagatctcactattaatctggctgcgatttgcactccccccgattacaacactcgccctctcga

SEQ ID NO: 250389 - DNA, 387 bp, Glycine max
tagcctcacaaaagcaaagatcaaacaaaccaaggacgagaacacgatgttgcttgaacttgcacttggtttattggttttggctctgtttctgcacttgcgtcccacacccactgcaaaatcaaaagcacttcgccatctcccaaacccaccaagcccaaagcctcgtcttcccttcataggacaccttcatctcttaaaagacaaacttctccactacgcactcatcgacctctccaaaaaacatggtcccttattctctctctactttggctccatgccaaccgttgttgcctccacaccagaattgttcaagctcttcctccaaacgcacgaggcaacttccttcaacacaaagttccaaacctcagccataagacgcctcac

SEQ ID NO: 250390 - DNA, 254 bp, Glycine max
ctcgagccgattcggctcgagctcgtctttgaagtttctaagatgacttctccctacattaaatgtacagtctctttcttcatagcatttggaaatttggctgatgacaccatcaattttgaggcttttccccacaagctggtacagtttggagagattcaggaaaaagttgtattgaaattttcacaagaggaatttcttacagcttggtcaacccaagtgcgtcctgcaacaactctgttggctgatgggtg

SEQ ID NO: 250391 - DNA, 323 bp, Glycine max
attctctccattgtctttgaacactcatcaccatggccaagcttgttctttccctttgtttccttcttttcagtggctgcttcgctctgagagagcaggcacagcaaaatgagtgccagatccaaaagctgaatgccctcaaaccggataaccgtatagagtcggaaggtgggttcattgagacctggaaccctaacaacaagccattccagtgtgccggtgttgccctctctcgctgcacccttaaccgcaatgcccttcgtagaccttcctacaccaacggtccccaggaaatctacatacaacaaggtaatggtaatttt

SEQ ID NO: 250392 - DNA, 177 bp, Glycine max
agggtcgcaaggttgacgagtatggcaacgttgagaagcaaaccgacgaatacggcaaccctgttcatgctgctagtgtcacctatgtagccaccagaactgctgctggtggttacagtgatgacattaataagcaacatgataccagcaatgcctacggcgtagacactggtatac

SEQ ID NO: 250393 - DNA, 377 bp, Glycine max
gtgcctgatcggtgggagttctcgaacgattatttccgccgaggcgagaagcggcttctttgcgaaattcagcggcggaagatctcatcgccggcgccgtctccgactgcgccgacgacggttacggtgccgatgccgttgaccgcgataccgatcatatcgccgtcgaactctggcgaggagcaggtgatatcgtcgaactcgtcgccgttgcgagcgccggcggagcttctcgacgagaacgagcggcttaggaaagagaacgttcagttaacgaaagaactcgccgagatgagatcgctctgcaacaacatatattctctcatgtcaagctacggaaacaaaaacggaaacagcaacggcagttaccaaactga

SEQ ID NO: 250394 - DNA, 324 bp, Glycine max
cttgctggttgccacactacaccgatatttccaccaaacccgtttgcgttgttgtttgcgaataaatggcaactaagaggagcgtgggaacgttgaaggagggtgatttgaaggggaagagggtattcgtgagggtcgatctgaacgtgcctttggatgacaaccttaacatcaccgatgacactagagtccgtgctgctgttcccaccatcaagtacttgactggttatggtgctaaagtgatcctttctagccatttgggacgtccaaaaggtgtaacacctaaatacagtttgaagcctcttgtgccaaggctgtctcaac

SEQ ID NO: 250395 - DNA, 395 bp, Glycine max
atcagtcatcaccatggccaagctagttttttccctttgttttctgcttttcagtggctgctgcttcgctttcagttccagagagcagcctcagcaaaacgagtgccagatccaaaaactcaatgccctcaaaccggataaccgtatagagtcagaaggagggctcattgagacatggaaccctaacaacaagccattccagtgtgccggtgttgccctctctcgctgcaccctcaaccgcaacgcccttcgtagaccttcctacaccaacggtccccaggaaatctacatccaacaaggtaacggtatttttggcatgatatacccgggttgtcctagcacatttgaagagcctcaacaacctcaacaaagaggacaaagcagcagaccacaag

SEQ ID NO: 250396 - DNA, 390 bp, Glycine max
gtttggcatcagctatcctgaagggaaatgggagatccgtggtgatccagcatacgtgagggatgcttgtgagggcagtttaaagaggcttggtatcgattgcatcgatctctattaccaacatcgtattgatactcgtgtgcctattgaagtcacgattggggagcttaaaaaacttgttgaggaaggcaaaataaaatacattggtctgtctgaggcctcggcttcaacaatcagaagagcacatgcagttcatccgataacagctgtgcagttggagtggtcactatggtcaagagatgtggaggaggaaatagttccaacatgcagggaacttggtattggaattgttgcatatagtcctcttgggcgaggattcttgtcattggg

SEQ ID NO: 250397 - DNA, 474 bp, Glycine max
ccactaccttgcctgtccaagactacgtactcacgtcggacgcacgcgtacgtaagctcggaattctccaaagtttgtatagtgtaggatttgttggtattcgtgataaaaacacctcatcctattcattttgccatgacgggcgaactccagataaaggttttgaaagtaatgagaaattattaattcatccatgttactggcttggtttgaatccaaatcgtaatgcacttgctccagaggaagcagaggagataaatgacgaatatgatattaatattatttcagataattcagccattagaaataaaacaatatgtcaaataactactcatctagatcagataccgataggaaatgaaggtgccactgaatttgaacaaagggtgttagacgcactaagaatagtattggcatccaactaacagacatccaatcccatccaaatggtaacgcacattcagagaacagata

SEQ ID NO: 250398 - DNA, 341 bp, Glycine max
ggagagaaagagagagagagagagaaaaatggctgatacaagtggaggagatgcagtgagaccggtggtaatatgtgataacaagtgtggctgcacagttccatgcactggtggttccacttgcaggtgcacaagtgtcggcatgacaactggaggcggtgatcacgtgacatgctcgtgcggagagtactgtgggtgcaatccatgctcatgtcccaagactgcggcttctggaactggttgcagatgtggcacagattgctcatgtgcctcttgccgcacttaacatcataccttaattaagtctcaaacttcacaaatcttgaatgtgctttaaatct

SEQ ID NO: 250399 - DNA, 375 bp, Glycine max
tggaaaggttcctgttttggaaacgcccgatggtccagtctttgagagcaatgcaatcgctcgttacgttgctcgactaaagggtgacaacgctttgttctcatcttctgccattgataatgcccacattgaccagtggattgaattttcatccttggagatcgatgctaatcccatgaaattgcccctaacaagacttggatttgccccaaaacctcctccagtttaggagggtgcaaaatcctgcgttaaagagagcatttgaggcccttgaacactcatcctgcctcaaatacttaccttgttggccattctgttacccttgctgacatcataacaacatgcaacttgtatttacgattcagccaactctta

SEQ ID NO: 250400 - DNA, 307 bp, Glycine max
ttgaacactcatcaccatggccaagcttgttctttccctttgtttccttcttttcagtggctgcttcgctctgagagagcaggcacagcaaaatgagtgccagatccaaaagctgaatgccctcaaaccggataaccgtatagagtcggaaggtgggttcattgagacctggaaccctaacaacaagccattccagtgtgccggtgttgccctctctcgctgcacccttaaccgcaatgcccttcgtagaccttcctacaccaacggtccccaggaaatctacatacaacaaggtaatggtaatttt

SEQ ID NO: 250401 - DNA, 274 bp, Glycine max
ggagaatgtgagtctgtctcttccggcgagcatgcccatcagatgtattctgcattggcaaccgaaccaaggaagcgttgtgaacagccaagtcctgaatgagatctcgcagtgcgtcgaaagcctcaacggcgtcaaagaaggaagatgcaaagcctccctcactttctacagacccaatttacgagaccagtcggtgaccatcgatttcccgcgcgattttctggggatatcgatgctggagcagccgaacaaatactacttcatcattcgc

SEQ ID NO: 250402 - DNA, 237 bp, Glycine max
atctacacaaaagtgttccacttgagtgaaaagtagtgtgttaagaactaaacaatttttcaatggcgtccaagaaacaagaggagcgagctgaggcagctgcgaaagttgctgccaaagaactcgaacaagtcaacagagaaagaagagaccgtgatttcggtgttgttgctgatcaacttcttcgacatcatctggaagatcaacaaaagacgtggtgtaatctggttcatgttt

SEQ ID NO: 250403 - DNA, 120 bp, Glycine max
tcggggaattccaattcctcattttcaagaaataatgaggctagaatggtcatatatgaattggggttatttgctttcttattatgcctatccttaacccatttgaaatcatatcataat

SEQ ID NO: 250404 - DNA, 219 bp, Glycine max
atatcctagtataccttaataaataatttaagatactatgatgagagcacggttcccattactgttgctgggacttgttttcctggcttcagtttctgtctcatttggcattgcttactgggaaaaagagaaccccaaacacaacaagtgtctccagagttgcaatagctagagagactcgtacaggaaccaagcatgccacgctcgttgcaacctcct

SEQ ID NO: 250405 - DNA, 400 bp, Glycine max
attcaaaccttgctctatactacacagtacacacactaggagaataatggcttccatcctgcactactttttagccctctctctttcttgctcttttcttttcttcttatccgactcagtcacccctacaaaaccaataaaccttgttgttctacccgttcaaaatgatggttccacagggctccattgggccaacctccaaaaaagaacccctctaatgcaagtaccagtcctggtggacctcaatggaaatcacttgtgggttaactgtgagcagcagtactcatccaaaacgtaccaagcacccttctgccactccacccaatgctctagagccaacacccaccaatgccttagttgccccgcggcattaaggccaaagtgccacaaaaacacgtgt

SEQ ID NO: 250406 - DNA, 201 bp, Glycine max
tggagctggtaagactactttgatggatgttctggctggtgtgaaaaccggaggatatatggatggaagcatcaaaatttctgggtaccctaataagcaagaaacatatgctcgtatctctggctactgtgagcaaaatgatatccactcacctcatgttacagttaacgaatccttgctctactttgcatggcttctttt

SEQ ID NO: 250407 - DNA, 174 bp, Glycine max
aaacactcatcagtcatcaccatggccaagctagtttttgccctttgttttctgcttttcagtggctgctgcttcgctttcagttccagagagcagcctcagcaaaacgagtgccagatccaaaaactcaatgccctcaaaccggataaccgtatagagtcataaggagggctc

SEQ ID NO: 250408 - DNA, 315 bp, Glycine max
tcggggaattccaattccacattttcaagaaataaggaggcaaaaatgggcatatatgaattggaattatttgttttcttattaggcctatcctgaagccaaaggaaatgagatcggaattcctcggggaattccaattccacattttcaagaaataaggaggcaaaaatgttcatatatgaattggaattatttgttttcttattaggcctatcctgaagccaaaggaaatgagatcggaattcctcggggaattccaattccacattttcaaaaaataaagatgcaaaaatgttcatatatgaattggaatta

SEQ ID NO: 250409 - DNA, 322 bp, Glycine max
cttgcaacgattaacaatggcttcaaccgacaagtcaccgtacccaacgccggcgaagggtccggatccaactccggggaagccgatgagtgttggtcagcacgtgatcgacaagagtgcaatgatggtgcagtcgctggaccccattaagcagatgagtcagcacgtgtgctccttcgctatctacagccatgacatgtctcgccagatatagactcatcactactgctccagacttctccagaacttcttacaatgtgctgtctatgattccgaagaattcaaagcttgtctccttggtcttctatttttcttctctttc

SEQ ID NO: 250410 - DNA, 349 bp, Glycine max
gcaaaatgaccaagttcacaatcctcctcatctctcttcgcttctgcatcgcccacacttgcagcgcctccaaatggcagcaccagcaagatagctgccgcaagcagctccagggggtgaacctcacgccctgcgagaagcacatcatggagaagatccaaggccgcggcgatgacgatgatgatgatgacgacgaaaaacacaaaaacaccataacatgggagagaaaaaagaagcggcgaagaatgaagcagataagaagcctgaatcaggagcaaagcaaaacgacgaaccagtacctgtcgttttgaaactcgacatgcattgcgaggggatgtgtcaagaagat

SEQ ID NO: 250411 - DNA, 148 bp, Glycine max
cttatagagtaaaaaaaaatggctgatacaggtggaggaggtgcagtgagaccagtggtaagatgtaataacaagtgtggctgcacacttgcatgcactggttgttccactttcatgtgtactagtttttattatatttcatataaat

SEQ ID NO: 250412 - DNA, 153 bp, Glycine max
ggttccatgtgaactgcacttgcacatgggttagtcgaggctaggggactggggaagcccgtctgatagcgctctgtgcgcgtactccgaaagggaatcgggttaaaattcctgaaccgggacgtgtctgctgactgcaactttatggagtcc

SEQ ID NO: 250413 - DNA, 189 bp, Glycine max
aagaatgctattctcatgaatatgccaaatgctgttcttgcaatgtggagatattttgttggagatctcgtctttgaagtttctaagatgacttctccctacattaaatgtacagtctctttcttcatagcatttggaaatttcgctgatgacaccatcaattttgaggcttttacccacttgctggtg

SEQ ID NO: 250414 - DNA, 287 bp, Glycine max
gaagaaagcaagtggctctgatgaagaccgcacttcaccgactcacagtcaaattgatgagaaagaggaggctccagatgaagatgatggtgatgatgacgtgcaatggctgacagatacatcacttgatgctgctcgtcaacgtatccaagaacagttaagtgctgtgacagctgatatggttatgctttctacagatgaaccagagaagaagaaaaaagctacaagtaacggaaatggcggttctcagaatgggaactcaatgcactatgggaccctggttgggg

SEQ ID NO: 250415 - DNA, 122 bp, Glycine max
ttcttctcttgcggctagggttttagcgcatcttcttctgtatttaaggaagatgggtagggaaaaggttcacatcagtattgtggtcattgtccatgtctactctgggaaatccactacca

SEQ ID NO: 250416 - DNA, 309 bp, Glycine max
aaatatgccaaatgctgttctttcaatgtggagatattttgttggagatctcgtctttgaagtgtgtaagatgacttctccctacattaaatgtacaatctctttcttcatagcatttggaaatttggctgatgacaccatcaattttgaggcttttccccacaagctggtgcagtttggagagattcaggaaaaagttgtattgaaattttcacaagaggaatttcttacatcttggtcaactcaggggcgtcctgcaacaactctgttggctgaagggtgtccatatttgtatgctatggtgcatga

SEQ ID NO: 250417 - DNA, 333 bp, Glycine max
cttagagagaaaaaaaaatggctgatacaggtggaggagatgcagtgagaccagtggtaatatgtgataacaagtgtggctgcacacttccatgcactggtggttccacttgcaggtgcacaagtgctggcactgccacaggagggggtgatcacgtgacatgctcgtgcggagagcactgtggttgcaatccatgctcatgtcccaagattgcggctgctggaagtggttgcagatgtggcacatattgtgcatgtgccttctgcctcactttatgtatcacaccttaaggctttaaccttcacgttttatttgatgtctgcaaagtttttg

SEQ ID NO: 250418 - DNA, 120 bp, Glycine max
gagaaacatatccaataggaaactcgtgagaagaaataggaggaaagccgtgaaagggaataataacaactttagcatcatgaagaacaagatgaatattccctacatttttgaggaata

SEQ ID NO: 250419 - DNA, 190 bp, Glycine max
cttctgtctatacgcagccgcgccgccagggtctgctccgtggccaaggagttgcagttcgacaaagacggcaccgcaattaggaagctccagagcggtgtgaacaagctcgcggatctggttggggtcacgcttggtccgaagggaatgaatgttgttcttataagcaaatactgctgtacttatatct

SEQ ID NO: 250420 - DNA, 332 bp, Glycine max
ctaaaaagcgcaagaaaacaaaatccccaaaatatctctggctctgaaaccgccatggatttgcagcagagcgagttcgatcgcctcctgttcttcgagcacgctcgtaaggccgcagaagccgaatacgagaagaaccctctcgacgctgataacttaacaagatggggtggagctttattagagttgtctcagtttcagagttttcctgaatcgaagaaaatgacccaagaggctgtttcaaagctagaggaggcgcttgcggtgaatcccaagaagcatgacactctttggtgcctgggaaatgctcacacttcacaagcatttttaat

SEQ ID NO: 250421 - DNA, 360 bp, Glycine max
gcataagctgaagacatggcattgactagaccatatgcgggatgggacttcgccacaacattggccagacttcatcacctgacatctacaaccctcaagccggtagcgtcacaaccgccaccagccttgacttcccagccctctcgtggctcagactcagtgctgagtttggatctctccgcaagaatgcaatgttcgtgccacactacaacctgaacgcgaacagcataatatacgcattgaatggacaggcattgatacaagtggtgaattgcaacggtgagagagtgtttgatggatagctgcaagagggactggtgctgatcgtgccacaaaactttgtggtggctgcaagatcac

SEQ ID NO: 250422 - DNA, 154 bp, Glycine max
ctcagcaacgaggacgaagccagaagccccaagaccgtcggcaaaaggtacatcgcttcagagaaggtgatttgatcgcaatgcctactggtgttgcatggtggatgtacaacaatgaagacactcctggtggtgcccgttctattattgacac

SEQ ID NO: 250423 - DNA, 276 bp, Glycine max
ctcaagtccaacctacccctttttcttctcccacgcaacttgaccgtcttcttcctcgatcatgtctcacttcaagggcaagtaccatgatgagcttattgccaatgctgcttacattggcactcctggaaagggtattcttgctgctgatgagtcaacagggacaattggcaagcgtttggccagcatcagtgtagagaatgttgaatccaacaggcgtgctcttatggagctgcttttcaccgctcccggtgctcttaaatatctcagtggtgt

SEQ ID NO: 250424 - DNA, 559 bp, Glycine max
  unsure (1)..(559): unsure at all n locations
aggtagttctagatgaagtgatgatacctagtagtacantantacgatcagtaatgacttatgacgacgcacgcacgcgtacgtaagctcggaattcagctcgagaaaaaaaaatttaaaaaaaaaaaaaaaaaaaaaaaaaaaaagagaaaaggaaaaaaaaaaaaaaaaaaaaaaaaaaaaaaaaaaaaaaaaaaaaaaaaaaaaaaaaaaaaaaaaaaaaaggggcggcccccaaattttaaccttttaaacccggaatttaattcagaaccggacctttaaggctaacaaacttatacctaatatgaagtcttaaaaaaccttgcctaataacattggaataagtttataccatgtgtaaaaatagtaataccatcaaaaatttttcaaatataataaaaacccaaatcaataaattttaaaaacactggggtcccataaatatgacaccaaatatataaataaattgtataatcaaccaaatatgtacattttataatttagaaaaaacttataggccaaaataaataaaaaaaaattaaatataacccgtgag

SEQ ID NO: 250425 - DNA, 152 bp, Glycine max
gagagaaaagtagtgtattaagactacaaattttcaatttgtcaatggcgtcgaggcaacaaaaagaggatcgagctgaggcagctgcgaaagttgctgcgaaagaactcgaacaactcaaccgagaaaaagaccgtgatttcagtgttggt

SEQ ID NO: 250426 - DNA, 414 bp, Glycine max
ggaaaaacagtaaagatgggtttgaagaacaacatggtggtgctaaaggtgtgtttcttggttcttttccttgtgggggttactaatgcacgcatggaactgaacctcttcaaaagtgatcactcatcaagtgatgatgagtcttcaaaaccatgctgtgatctctgcatgtgcacagcctcaatgccacctcaatgccattgtgcagatattaggttgaattcatttcactcagcttgtgatcgctgtgcgtgcacacgctcgatgccaggccagtgtcgttgccttgacaccaccgacttctgctacaaaccttgcaagtccagtgatgaagatgatgactaggaattaatcaacaaaagctctctcaaatgaacaaagccctttaggctttctttgtcttttatgtaaggg

SEQ ID NO: 250427 - DNA, 220 bp, Glycine max
gctgctggtggttacagtgatgacattaataagcaacatgggaccaccaatgcctacggcgtagacactggtagacagcattctagtggtggctacgatggtgacactaataaacatcatggaactactggtggctataatgatgacaccaatagacatcatggaactaccggtgtatattgtatatacactgataggcaacaacatgggactactggtg

SEQ ID NO: 250428 - DNA, 284 bp, Glycine max
gcacatagtgcagtggtatcaaaagggactgaagggcgatggcaagaactctaagattttgaagaatgctcaacctttcattgattggcttcagagtgcagaatcagaaaccgaggaagaataatttttcctacattctccgttacttatgtttacttgattgtgtcatgttctttatttccaataaaggttattgtatgccccatgtgttgttgaactactatactgtgcgaatggtgcatgcttgctggaccattatgtatgctttagtgccgtatgtgatg

SEQ ID NO: 250429 - DNA, 391 bp, Glycine max
tctctccattggtccttaaacactcatcagtcatcaccatggccaagctagttttttccctttgttttctgcttttcagtggctgctgcttcgctttcagttccagagagcagcctcagcaaaacgagtgccagatccaaaaactcaatgccctcaaaccggataaccgtatagagtcagaaggagggctcattgagacatggaaccctaacaacaagccattccagtgtgccggtgttgccctctctcgctgcaccctcaaccgcaacgcccttcgtagacctttctacaccaactgtccccaagaaatctacatccaacaaagtaaagggtattttggcatgatatacccgggttgtcctagcacatttgaagaacctcaacaaccttc

SEQ ID NO: 250430 - DNA, 385 bp, Glycine max
ctcttcgacctcgcatcgcaccttcaacttaacctattccagttgtaatcgtaaacgctttgctagaagaagagacaaagtgtgtctgtgtgtgtgagagagagagcaatggctggctcgtgggcacgccgttctctgattgttctagccatcatttccttcggatgtctatttgcgatttccattgctaaggaggaagccaccaagttagggacggtcatcggcattgatcttggaacaacctattcatgtgtcggtgtttacaagaatggccatgttgaaatcatagccaacgaccaaggtaaccgtatcaccccatcgtgggttgctttcaccgacagtgagagactcattggggaggctgccaagaatcatgcagctgtca

SEQ ID NO: 250431 - DNA, 351 bp, Glycine max
gccattctttccttggtgaacaacgacgacagagactcctgcagacttcaatctggtgatgccctgagagtcccctcaggaaccacatactatgtggtcaaccctgacaacaacgaaaatctcagattaataacactcgccatacccgttaacaagcctggtagatttgagagtttcttcctatctagcactgaagctcaacaatcctacttgcaaggattcagcaggaacattttagaggcctcctacgataccaaattcgaggagataaacaaggttctgtttagtagagaggaagggcagcagcaaggggagcagaagctgcaagagagcgtgaatggggaaatctcg

SEQ ID NO: 250432 - DNA, 160 bp, Glycine max
gttcaatatcctagtacaccgtattaaagaatttaagatatgctatgatgagagcgcggttcccattactgttgctgggagttggtttcctggcctcagtttctgtctcatttggcttttcgtattgggaaagcctaacccccttctcatctttgtgccc

SEQ ID NO: 250433 - DNA, 146 bp, Glycine max
caacaatgaatacactcctgttgttgccgtttcggttatgggcaccaacagcttggataaccagctcgaccagatgcctatgagattctatcttgctgggaaccaagatctatattatctaaaatatcattcatcagcatcaagga

SEQ ID NO: 250434 - DNA, 379 bp, Glycine max
gtcttccatatccccccaaaaatgaagagcaccgagtctctgtgctctctttctcttttgtgcgcttcaccacctcatacctaccttcagccatcgctgatttcgtgctcgataatgaaggtaaccctcttgaaaatggtggcacatattatatcttgtcagacataacaacatttggtggaataagagcagccccaactggaaatgaaagatgccctctcactgtggtgcaatctcgcaatgagctcgacaaatggattggaacaatcatctcgtccccatatcgaatccgttctatcgcctaatgccatcctttgagccttaagttcgaatcatttgcagatataatgctatgtgttgaaattcctactaatggtct

SEQ ID NO: 250435 - DNA, 373 bp, Glycine max
cagaacatggtcagagcggcggagcatcaggcgctggaccccaccgccgtccacggcgtcacgcagttctccgatctcaccgaggacgagtttgagaagctctacactggcgtcaatggcggcttcccgtcatcgaataatgccgccggcggtattgcgccgccgttggaggtggacgggctgccggagaattttgattggagagagaaaggagctgtcaccgaagttaagttacagggtagatgtggatcatgctgggctttcagcaccacaggatctatagaaggagccaattttcttgccaccggaaagctcgtcagtcttagtgaacaacagctccttgactgtgacaacaagtgtgacataccagaaa

SEQ ID NO: 250436 - DNA, 360 bp, Glycine max
aagaaatgaagagtactatcttctttgctctctttctagtttgtgccttcaccatctcatacctgccttcagccaccgctcagttcgtgctcgacactgatgatgatcctcttcaaaacggtggcacatactatatgttgccagttatgagaggaaagggcggtggaatagaagtagattcaactggaaaagaaatatgccctctcactgttgtgcaatcacccaatgagctcgataaggggattggactagtctttacatctccattacatgccctttttatcgccgaaggctatcctttgagcattaagtttggttcatttgcagttataacgctgtgtgccggcatgcctactgaat

SEQ ID NO: 250437 - DNA, 207 bp, Glycine max
gaaaatctatgcttagaattagaaactccgattagaagatatgaaataactgatcgttgaaaattcatggaggatagagagcgggagagtccattaaagacacagctacacataatggtgcgtctgccgatgctggcatggagaatacaattgcacagtccaagacaatgcataacgattgatatcatgtcatactgttccaaacga

SEQ ID NO: 250438 - DNA, 248 bp, Glycine max
acccggttcatgccactagtgtcacttatgtagccaccaaaagtgttggtggctacaatgatgacgctaataagcaacatgatattactggtgtctatcccgagaaagacaccggtagacatcattttggtcgtggttacgacggtgacactaacaagcaacatgatgctactggtgtttatcccggaatagacattggtagagatcatgggactaccggtgtttaaggcctaaacaccgacagacat

SEQ ID NO: 250439 - DNA, 317 bp, Glycine max
ggagaagcatcaactccaattcccatctaaggaaacaaaggcacattctgattacttagtaaaagaatgcagcacttaagggcctccaattcaggatattccctatgttaaatacacagatttggaagattataagcttcaaggttatggttgatgtcgtcattctgaaccacagacatgtccttgatctcgagccactaacgcactcaatctcatctggtgctgcattttcatgcgattcaaatatctctgccaataactgccattatcattgatagagtcgcttaattaatcacacttacgatactacatctttc

SEQ ID NO: 250440 - DNA, 334 bp, Glycine max
ctcttcgcaatttgcgcgcactccgtcgccgttgccgacacctcctccgcgtatccttccatccccggcacggaaaccggtgagtgctccctccgcggcgtgggcgtgggcgacggtgttctggttcctccacggcgagaagtacacgaggaggggcgaatcttcgacatcactcacacatatgtcgccgagatgccggtgtgggactcgacggaggggctcgggcaacacttcctgtggctcgatacgagcatgaagaatggctcgctcgccaacagctctaacatgaagctcggtgttcacagcggcacccaggtcaacccgcccggtccct

SEQ ID NO: 250441 - DNA, 228 bp, Glycine max
gtttcgtggaaatcccgaaatttaaccatgcttctccgaaacgctgcctccgccgcttctgcttcgtccctctccctcttcagccctacctccgaatctctccgttcggttcccgctcgtggattggtggttcgcgccgcgacaggatccacgaattaccgcgcccttaccggcgtgatctttgaaccgttcgaagacgtgatgaaggagctcgatctcgttcccacc

SEQ ID NO: 250442 - DNA, 247 bp, Glycine max
  unsure (1)..(247): unsure at all n locations
gtttgcaatactagcgatagctgataagagagatacgancatgatcagacaaaaggaagagttgagattccctttgaagaaaaaatggcatccaaaaggcaaactatgaaaccgggtaaaattaagggcgaactgaagaaaagaagaaccaaaccattgggaataattgaaaaaaaggtcaagctgcaaaggagaagacccaagaaatggcccaagctgcaaaggagaagaccccagaaaaaaccca

SEQ ID NO: 250443 - DNA, 282 bp, Glycine max
acataacaatgtcgttgattccaagtttcttcggcaccgggcgaagaaccaacgtcttcgaccccttctccctcgacgtgtgggacccattccatggcttccccggcaccaccgccctctccgctccgcgctccgagacggcggccttcgccatccgcgcatcgactggaaggagacggcggaggcgcacgtgttcaaggcagacctgccggggctgaagaaggaagaggtgaaggtggagatcgaggaggagggaagggtgctgcagataagcggacagag

SEQ ID NO: 250444 - DNA, 434 bp, Glycine max
gggatattaactaccagtttccacagcttgccggtgtgcatctttctgctttgattccgtctgctagtgatgatgcaatcagccttattacatcactttgctcctgggatccctgcaagaggccaacagcttcagaggctcttcaacatcctttcttccagagttgcttttacattcctccatcccttcgcaacagagcagtagcaagaactcctccacctgctggaaccagaggagcactggatcagcaagaggtcaagagatattccggtgctttacctacttcaaagctctccaataatttttcttccatgaaattacatcctcctttagcttcaggtgtgcaacggaagcttgatatggtaaatcaggatggaattaagaacgaaaagccagtgaggactactaaaccaaaatatcgacagccaggaaag

SEQ ID NO: 250445 - DNA, 296 bp, Glycine max
cggcaacggatatctcggctcttgcatcgatgaagaacgtagcgaaatgcgatacttggtgtgaactgcagaatcccgtgaagcatcgagtctgtgaacgcaagttgcgctcgaagccatggggccgagggcacgcctgcctgggtgtcacatagcgtttctccaacgcatagatgtaacaatgttgcagcacagggtgtatgctgaccacgcgccagcagacgcctcgtggcttgtagcccacctgccaaggagatgacttgcgagtcttcccatgcggcatatgagaagaccca

SEQ ID NO: 250446 - DNA, 376 bp, Glycine max
ggggccccgagtggttctttccatttgtgatatgtgtttggccttcctctggggcttactgtgcattatatccttgctctatcagggggtcagactattgcacctgcgctcacggagcgttgtggatttgatggtcactgcatctctagtcctcctactttcgacacctcatacttcacggagttgttgactggtgagaatgaaggtctccttcagctaccttctgacaaggctcttttgtctgaccctgtattccgccctctccttgataactatgcatcggactaagatcccttctttgctgactacgctgaggctcaccatacactttccgagcttgggtttgctgatgcctaagcaacgtttaagggattgt

SEQ ID NO: 250447 - DNA, 393 bp, Glycine max
  unsure (1)..(393): unsure at all n locations
gatgccactaagggttctgaccatttgagagatgtgtttggcanagctatggggcttacggacaaaaatacctttccccaaccgggggtcacactaatggagctgcacacaaagaacgttctggatttgaaggtccctggacctctaatcctcttaatttcgacaactcatacttcacggagttgttgaatggtgagaaagaaagtctccttcaactaccttctgacaaggctcctttgtctgaccctgtattccgccctctcgttgataaatatgcagcggacgaagatgccttctttgctgattacgctgaggctcaccaaaagctttccgagcttgggtttgctgatacctaagcaacgtttaagggattgttgaaaaagcatggtgccc

SEQ ID NO: 250448 - DNA, 399 bp, Glycine max
gaaatggctgaagcacaactacgagaccagcatggcaaccctgtcccactcaccgatcaatacggtaatccggttatcttaactgacgagcgcggtaatcccgtccaactcactggtgtcgctaccaccgctaccggcacagcaggttctgggtttgggtcctatggtaccggtgcttacggtggtggtgcaagtgcaaccaccgttgcagatcttttggcaacccaaccaaggagtggcagggaggctagagagcttcgtcgttcctccagttcaagctctagctcgttttggataaatgttttatagtctgaggatgatgggcaaggtgggaggaggaagaagggagtgaaggataaaataatagagaaactaccacgggtaggatgaaggaataat

SEQ ID NO: 250449 - DNA, 338 bp, Glycine max
ggaagccgtatctatgcttaccctggcaatcttgatctcacttgtctctgccgattaccacgtcatagctgaggcgaaaccggtacagttgaggagtcacgatctaacgtcgccgatactgcaagagtctagagctgcagagatgaatgaaaatcctgatgcagtgataggacgctgctacaaatcgtcagttcgctaattatacacttgagcaattgaagcgccttcttggagtcagaccaacgcctaagaacgaactgagaagtacacctgctatatctcagccaaagtcattgacattgccacagaattttgatgcacggacagcttggtctcag

SEQ ID NO: 250450 - DNA, 408 bp, Glycine max
atccgagacagaaaaaggggttagggtttgttcttgtgatcgaagctaagcgaagcaaaatgggtggatcagtgagggacgtgaagtcgaagggcgaggtcgacgaggtggtggcgagtggctctccggttatcctccacttctgggcgtcgtggtgcgaagcttccaagcacatggaccaactcttctctcacctttccactgatttccccaacgcccgcttcttaagggtcgaggccgaagagcaacccgagatttctgaggcttactccgtctccgctgttcctttctttgccttctgcaaggatgggaagacctttgatacattggagggagctgatccgtcaagcttagccaataaggttgctaaagtagcaggctcaattaaccctggagaatctgcatctc

SEQ ID NO: 250451 - DNA, 299 bp, Glycine max
gtggtgttagatctgtacccgcctagccattgatttggaaaagtccaagcttcagagatgagtaagcttcagagtgatgctcttagagaagctatctcaggaatcatgactgattccaaggaaaagaacaggaaatttgtggagaccattgaactccaaattgggctgaaaaactatgatccccagaaggacaagcgttttagtggctctgttaagttgcctcacattcgtcgccccaagatgaagatttgtatgcttggagatgcccaacacgttgaagaggctgagaagataggatt

SEQ ID NO: 250452 - DNA, 360 bp, Glycine max
gtagtgttaaataagtatacgtctgaccattgagatagagacttttatactgcaaaaatatgtaagcttcatactgatgctcttacacaagggatcgcatgaattatgactgattccatggaggttaagatgaaatttgtggagaccattgaactccaaattgggctgaaaaaatatgatacccataatgacaagcgttttactaggtctgttaagttgcctcacattcctcggtacaagatgaagatttgtatgtttggcaatcttaagcacattaaagaggctgataagatgtgattggcctagatggatgttaaggacctaaacaagcttaacattaataagaaagttgcagaaaat

SEQ ID NO: 250453 - DNA, 318 bp, Glycine max
ctcgagccgattcggcacgagagatcatacatagtagtgttggtgggttccacagatacctgggggtctcacagagatgcgccaacagaagcgatggcaagaattatgactgcttccaagggggtgcgcaggacatttgtgtatactattcaactccaaattgtgctgcagaactatgatcgctagcacgacaacccttttattggctctgtaaagttccctcacattccactccccaagatgaggatctgtatgcttgtagatcccaaacactttgaagaggccgatacgataggattggcctacatggctgtaccg

SEQ ID NO: 250454 - DNA, 389 bp, Glycine max
gaaagtcttccatagccccccaaaaatgaagagcaccatcttctttgctctctttctcttttgtgccttcaccacctcatacctaccttcagccatcgctgatttcgtgctcgataatgaaggtaaccctcttgaaaatggtggcacatattatatcttgtcagacataacagcatttggtggaataagagcagccccaacgggaaatgaaagatgccctctcactgtggtgcaatctcgcaatgagctcgacaaagggattggaacaatcatctcgtccccatatcgaatccgttttatcgccgaaggccatcctttgagccttaagttcgattcatttgcagttataatgctgtgtgttggaattcctaccgagtggtctgttgtgg

SEQ ID NO: 250455 - DNA, 393 bp, Glycine max
gaaagtcttccatagccccccataaatgaagagcaacatcttctttgctctctttctcttttgtgccttcaccatctcatatctaccttcagccatcgctgatttcgtgctcgatcatgaaggtgaccctcttgaaaatggtggcacatattatatcttgtcagacataacagcatttggtggaataagagcagccccaacgggaaatgaaagatgccctctcactgtggtgcaatctcgcaatgagctcgacatagggattggaataatcatctcgtccccatatcgaatccgttttatcgccgaaggccatcctttgagccttaagttcgattcatttgcagttataatgctgtgtgttggaattcctaccgagtggtctgttgtggagga

SEQ ID NO: 250456 - DNA, 520 bp, Glycine max
  unsure (1)..(520): unsure at all n locations
tggtctgaatgaatatccgtacgcagatgagaaccacgtcggatcgacgcgtacgtaaactcagaattcggctcgagcagagagtgagacattgtagtgtgtctatgtagcgataggacagaaacgctcaactgtggcagaattagttcatattctttcagaagcgaatgctttagaatattcgattcttgtagcagccaccgcttcggatcctgcacctctgcaatttctggctccatattctgggtgtgccatgggggaatatttccgcgataatggaatgcacgcattaatagtccatgatgatcttagtgaaataggccgtggcatatccactaaaggttcataattgttacgccgaacaacatgccctgaagcctttccaagcgatgttttccaattacattccccgtttctaagaagaaccggcctaacgattggaacagaaaggtttaagtaactttaccggccttacccgttcatgtaaaccattccggaaacgtatcggcctaaatttcan

SEQ ID NO: 250457 - DNA, 242 bp, Glycine max
cacacacaactactacaagtacttccttacaatcaaaaccaacaacaactatggcaagttatcaaaagcactacgatgatcagggtcgcaaggttgacgagtatggcaacgttgagaagcaaaccgacgatcacggcaaccctgttcatgcagctactgtcacctaggtagccaccagaactgctgctggtggtcacagtgatgacagtaataagcatcacgatacaaccaatgcctacggc

SEQ ID NO: 250458 - DNA, 227 bp, Glycine max
gcaaaatgaccaagttcacaatcctcctcatctctcttctcttctgcatcgcccacacttgcagcgcctccaaatggcagcaccagcaagatagctgccgcaagcagctccagggggtgaacctcacgccctgcgagaagcacatcatggagaagatccaaggccgcggcgatgacgatgatgatgatgacgacgatgaacacatagagacgatagcatgggagaga

SEQ ID NO: 250459 - DNA, 368 bp, Glycine max
ttctctccattgtctttgaacactcatcaccatggccaagcttgttctttccctttgtttccttcttttcagtggctgcttcgctctgagagagcaggcacagcaaaatgagtgccagatccaaaagctgaatgccctcaaaccggataaccgtatagagtcggaaggtgggttcattgagacctggaaccctaagaacaagccattccagtgtgccggtgttgccctctctcgctgcacctttaagcgcaatgccgttcgtagaccttcctacaccaacggtccccaggaaatctagatacaacacggtaatggtagttttggcatgagaatcccgggttgtcctagcacttattaagagccgcaag

SEQ ID NO: 250460 - DNA, 403 bp, Glycine max
  unsure (1)..(403): unsure at all n locations
tgctatcgaatactcggataaggagggtaagggcggtgaagtgcagtacttcaatccccttttctctcttctccttttatttcatcactctcttcgttcctttcttcttctccaaagttttcaattttcacacttttcgaaacatcttttcaatggcgtcccaaattacccgtgagtggtctggaatcaatacattcgcacctgctacccagactaagttgcttgaactcttgggaaaacttaaacaagagaatgtgaactccttaactatacttgtgatgggaaaaggtggtgttggaaaatcttcaactgtgaactccatcattggggatagagtggtttcgattaatcctttccagtcggaagggccaagacncgtgattgtgtcgcgattcaaggctgg

SEQ ID NO: 250461 - DNA, 235 bp, Glycine max
cggctccagatgaagatcaacctcgcaagagccgcgaatggagatcgaaaaagacacaacccagaagacctagacaagaagaaccacgtgaaagaggatgcgagacaagaaacggggttgaggaaaatatctgcaccttgaagcttcacgagaacattgctcgcccttcacgcgctgacttctacaaccctaaagctggtcgcaatagtaccctcaacagcctcaccctcccaac

SEQ ID NO: 250462 - DNA, 409 bp, Glycine max
  unsure (1)..(409): unsure at all n locations
aaaaaacattgcccttgttctttcanagttacaanacacaagtacacagaacaacagcaacatatggcgtctgaacaattggctcgcagagagaacaccactaccgagaaggagattcacgttgagaaacacagggttcccaagatggccacccacttcgagcaccttgcggagcaagctaaagaatctgacatcaccgctgggaaggatactccgcagggtagcatagaagccttgcaagctggagagagggtcaaagatcatgcaggaaaagccatgggagatattggtggacgtgggaaagccagagagactcacgagctgggtgcacactttgaaaccctggctgacaaagtaactgaccatgcagcagccaatgtacttggaaacaaagagagtctaagagaaa

SEQ ID NO: 250463 - DNA, 311 bp, Glycine max
  unsure (1)..(311): unsure at all n locations
ccaacaacaactaagggcagttaacaaaacactacgatgatcagggtcccaaggttgacgagtatggcaacgttgagaagcanaccgacgaatacggcaaccctgttcatgctgctagtgtcacctatgtagcccacagaactgctgctggtggttacagtgatgacattaataagcaacatgataccaccaatgcctacggcgtagacactggtagacagcattctagtggtggctacgatggtgacaccaataaacatcatggaactactggtggctataatgatgacaccaatagacatcatggaact

SEQ ID NO: 250464 - DNA, 383 bp, Glycine max
ggcgaccagagccaagctttctttagctatcttccttttctttcttttagccttgatttcaaacctagccttgggcaaacttaaagaaaccgaggtcgaagaagatcccgagctcgtaacatgcaaacaccagtgccaacagcaacggcaatacactgagagtgacaagcgaacatgcttgcaacaatgtgacagtatgaagcaagagcgagagaaacaagtcgaagaggaaactcgcgagaaggaagaagaacatcaagagcagcatgaggaggaggaagaccaaaatccctacgtttttgaagaagataaggatttttcgaccagagtcgaaacagaaggtggcagcattcgggttctcaagaagttcactgagaaatcca

SEQ ID NO: 250465 - DNA, 346 bp, Glycine max
aacaaatatttcactagctactactcttcttagtttctctgttgtatcatttttattgctatatcctaatcaaacttcactctcaaaatgagtgatcccacactagcacaacagcatctagtcaaagtccacacaacaacacacgaaacagttgcttacacacacaatcataaccaaacaccctcaataaatgcctcaggtgaaaagaagaagattgtgggggtgttctacacagggaatgaatatgccaaattgaatccaaattttgttggatgtgttgaacgtgcattgggaatacctgagtggctggaatcacaggggtcatcagttcattgtcactgatgac

SEQ ID NO: 250466 - DNA, 353 bp, Glycine max
gtggacaggttgaagtgggggaatgatttcttgaagaagaggttggagcctggttcacactcccaggttagtcctcaggcactggagagcatcaaaagggttaagaagttgaccaagatgtctgagaaggttgccactggtgtcctctctggggttgtcaaggtgtctggattcttcacaagttctgtagtcaactccaaagctggaaagaagttctttagccttcttccaggggaaattgtccttgctaccatggatggattcaataaggttttggatgctgcagaagtagctggaaggaatgtcatgtccacttcatcagttgtgaccaccggcctagtttcgcataaata

SEQ ID NO: 250467 - DNA, 385 bp, Glycine max
cttccaccacatcgagttctggtgcaccgatgccaccaacgcctctcgccgattctcttggggacttggaatgcctattgtggcaaaatctgatctctccaccggaaaccaaatccacgcctcctacctcctccgctccggcgacctctccttcctcttctccgctccttactctccctctctctccgccggctcctccgctgcctcctccgcctccattcccagtttcgacgccgccacctgccttgccttcgctgccaaacacggcttcggcgtccgcgccatcgccttggaagtcgccgacgcggaagccgctttcagcgccagcgtcgcgaaaggagccgagccggcgtcgccgccggttctcgtcgacgatcgcaccggc

SEQ ID NO: 250468 - DNA, 401 bp, Glycine max
ggtatttttggcatgatattcccgggttgtcctagcacttatcaagagccgcaagaatctcagcaacgaggacgaagccagaggccccaagaccgtcaccaaaaggtacatcgcttcagagagggtgatttgatcgcagtgcctactggtgttgcatggtggatgtacaacaatgaagacactcctgttgttgccgtttctattattgacaccaacagcttggagaaccagctcgaccagatgcctaggagattctatcttgctgggaaccaagagcaagagtttctaaaatatcagcagcagcagcaaggaggttcccaaagccagaaaggaaagcaacaagaagaagaaaacgaaggaagcaacatattgagtggcttcgcccctgaattcttgaaaga

SEQ ID NO: 250469 - DNA, 519 bp, Glycine max
  unsure (1)..(519): unsure at all n locations
tggnnngaagaactcattcagcctgcagatcaaatcacgtccgtcgacccgtacgtaaaaccagaattcggctcgaggaaattcaaccaagcgcggttaaacgccgggattaacaataactctcttaaaggtaccaaattccctctcatcaaatagtgactcgcatgaatggattaacgagattcccactgtcnctgtctactatccagcgaaaccacagccaagggaacgggcttggcggaatcagcggggaaagaagaccctgttgagcttgactctagtccgactttgtgaaatgacttgagaggtgtacgataagtgggagctggaaacagcgaaagtgaaataccactacttttaacgttattttacttattccgtgaatcggaagcggggcactgcccctctttttggacccaaggtcngcttcggcccgtccattcgggccgaaaacattgtcaagtggggaatttggccggggccgcacatcctttttaaaataacccacgtgtctcaaaa

SEQ ID NO: 250470 - DNA, 276 bp, Glycine max
aaatcgtcatcaatttcgcgtcattcgttctcaattctcttagattctcaattgggtcttcaaaaatgcggatgagttgcaatggatgtcgagttctgagaaaaggttgcagtgaaaattgcagcatcagaccctgtttacaatggatcaaaagcccagaatctcaagccaatgctactgtgtttctcgctaagttttatggtcgtgctggtctcatgaatctcgttaacgcaggccccgaacatcgtcgtccagcgatctttcgctcgttgttgt

SEQ ID NO: 250471 - DNA, 346 bp, Glycine max
gtttgaagaacaacatggtggtgctaaaggtgtgtttgttgcttcttttccttgtgggggttacagctgcacgcatggaactgagcttcttcaaaagtgatcagtcatcaagttatcatgatgacgagtattcaaaaccatgctgtgatctctgcatgtgcacacgctcaatgcctcctcaatgcagctgtgaatataataggctgaattcacgcaactcacattgtaagacctgtatgtgcaaacgcccacaaccagtacagtgtccttgtcttgacaacaacgacttctggaacgaaccttgcaagtccagagatgacgagcaattctaatagctcactcaaat

SEQ ID NO: 250472 - DNA, 298 bp, Glycine max
gaacaatattcttgtgaccatccacctgcatcatgggattggaggaaaaaaggtgtcatcacccaagtaaagtaccaagggggctgtggaagcggttgggcgttttctgccacgggagccatagaagcagcacatccaatagcaacaggagaccttgttagcctttctgaacaagaactcgtagactgtgtggaagaaagcgaacgttgttacaatggatggcactatcaatcgttcgaatgggttttagaacatggtgggattgccactgatgatgactatccttacagagctaaag

SEQ ID NO: 250473 - DNA, 346 bp, Glycine max
aatttctgaagcgtactggatttcattgcgatatcatttgtgtcactggatggactgccaccccaatgcaggatgttcaggttacaattgattggtttatttcctctcaggaatgtgttcccaggacctattgtgttttaaatccacaaaatccttttgtgttaaatacgtggatgggaaaattgactttcccccagggcacttcccgaagtgttaagagaatgcctctttctatagggggaggagctggtgcaaagaatgctattctcatgaatatgccaaatgctgttctttcaatgtggagatattttgttggagatctcgtctttgaagttttcaagatgac

SEQ ID NO: 250474 - DNA, 388 bp, Glycine max
acagaaatgggaagctcgttatttcttccaatagtttgtcccatgcattgaatatattccacaaggggaaatccagtagaagagatacatcaaaattggaagatcaagctgtaaaatctgagaagcaaatagaggagggaactgctatgaaaccagaagcaaagtctgaaaatgccgctcctgtaaaaaaggctgaagcagaaacattaagttcagtgggaaagacagatggtgaaaaatcagttcctgcacccaaagccgctgaagttcctcctgataatgagtttgagaagcgaataaggcccgaggtaatactagcaaatgagattgatgtcacattctctgatattggtgccttagatgagaccaaagaatcccttcaagaact

SEQ ID NO: 250475 - DNA, 405 bp, Glycine max
tttcactccgccgccgatcgaggacggtttcaccgccgagaaactcttcacgcagggcttctcctacacatacgatgacgtcatctttctcccccactacatcgacttcgctgccgacgtcgtggacctctccacgcgcctcacgcgccgccttccccttgccgtgccgtttgttgcctctccgatggacagcgtgtcggagtccgccatggcctccgccatggcctccctcggcggcatcgccgtcgtccactccaacgtccccgccgccgtccaggcggccatcctccgcaaagcgaagtcccgccgcgtccccatcctctccgaccccgccttcgccgcaccttccgccgtcgtggagcacgatgacgccttcggggcctcccccttccttctcgtcaccga

SEQ ID NO: 250476 - DNA, 313 bp, Glycine max
  unsure (1)..(313): unsure at all n locations
taattattaacacttccttagttcaatatggggaagcccttcactctctctctttcttcnctttgcttgctactcttgtcgagtgcatgctttgctattagctccagcaagctcaacgagtgccaactcaacaacctcaacgcgttggaacccgaccaccgcgttgagtccgaaggtggtttgattcaaacatggaactctcaacaccctgagctgaaatgcgccggtgtcactgtttccaaactcaccctcaaccgcaatggcctccacttgccatcttactcaccttatccccggatgatcatcatcgccc

SEQ ID NO: 250477 - DNA, 352 bp, Glycine max
aattcggctccgaattggtttggacacatccatatttccacttttgggaataccttaaaacggaatctttcatccctttggattcaactcctgaccagaacatggttgggcaattgtctcaactagctcaaagaatgacatctcataagctcaacgcgttggtacccgaccaccgtgttgagtccgaaagtggtttgattcacacatggaactctcaacactctgagctgaaatgcgccggtgtcactgtttccaaactcaccctcaaccgcaatggcctccacttgccatcttactcaccttatccccggatgatcatcatcgctcaagggaaatgagcacttggagttgc

SEQ ID NO: 250478 - DNA, 360 bp, Glycine max
  unsure (1)..(360): unsure at all n locations
tcattgttcaatctgcaaggccttatgggcaaagagcggttctgaagtttgctcagtacactggtgctcatgctattgctggaaggcacactcctggtaccttcaccaatcagcttcaaacttccttcagcgagcctcgtctccttattcttaccgatccaagaacagatcaccagcctattaaggaagctgctcttgggaatattcccaccattgctttctgtgacaccgattcacctatgaggtacgtggacattggaattcctgccaacaacaagggcaaacacagcattggttgtctcttctggctccttgcaaggatggtgttgcagatgangggtaccattcgccctggcctca

SEQ ID NO: 250479 - DNA, 355 bp, Glycine max
cggctcgagtcattgttcaatctgcaatgccttatgggcaaggagcggttctgaagtttgctcactacactggtgctcatgctattgctggatggcacactcctggtaccttcaccaatcagcttcaaacttccttcagcgagcctcgtctccttattcttaccgatccacgaacagatcaccagcctattaaggaagctgctcttgggaatattcccaccattgccttctgtgacaccgattcacctatgacgtacgtggacattggaattcctgccaacaacaagggcaaacacagcattggttgtcacgtccagctccttgcaaagatggtgtttcagattatgggtaccat

SEQ ID NO: 250480 - DNA, 334 bp, Glycine max
  unsure (1)..(334): unsure at all n locations
ctcgagccgctcgagccgtacagtgtttccttgctggacttgtaattagaagtttgagtatcagtacctctaactggagatgtaagaagcctctgggggattacctagctgaaaggaatatcatgggaatttatgatgttgatactcgtgcaatcacgcggcgattgcggcaagatggcagtcttattggtgttttgagcactgacaattccaaaaaggatgaggaactgcttcacatgtctaagtcatggaacattgttggtaaggatctaataagtggagtatcatgcaaaactccacatgaatgggttganttaaacaaacaacaatggga

SEQ ID NO: 250481 - DNA, 358 bp, Glycine max
gcaaaatgaccaagttcacaatcctcctcatctctcttctcttctgcatcgcccacacttgcagcgcctccaaatggcagcaccagcaagatagctgccgcaagcagctccagggggtgaacctcacgccctgcgagaagcacatcatggagaagatccaaggccgcggcgatgacgatgatgatgatgacgacgacaatcacattctcacgaccatgcggggaagaatcaactacataaggaggaatcaaggaaaagacgaagacgaagaagaagaacgacacatgcagaagtgctgcacagaaatgagcgagctgagaagccccaaatgccagtgcaaagcgctgcagaagataat

SEQ ID NO: 250482 - DNA, 344 bp, Glycine max
gaaagagagagaagaagaaaagaagaacaaagatgcaatcctcaaaggagaagatgaaaaacatggcaagtgctgccaaggaacaagtcgacatctataaagccaaaatagacgagaaggcagagaaagcaacggcaagaacagaagaggagagggtgatagcccatgagcacgcaaaggcaaaggaagctggagcaaagatggagctgcatgaagctaaagcaaggcatgcagcagagaagctaagcgccaaccaatcacattatggtctccaccatggccacaacaaccctcccttagtacgaacaactcagactcactaccagcaagggcaccagcaccag

SEQ ID NO: 250483 - DNA, 404 bp, Glycine max
agcaaaatgaccaagttcacaatcctcctcatctctcttctcttctgcatcgcccacacttgcagcgcctccaaatggcagcaccagcaagatagctgccgcaagcagctccagggggtgaacctcacgccctgcgagaagcacatcatggagaagatccaaggccgcggcgatgacgatgatgatgatgacgacgacaatcacattctcaggaccatgcggggaagaatcaactacataaggaggaacgaaggaaaagacgaagacgaagaagaagaaggacacatgcagaagtgctgcacagaaatgagcgagctgagaagccccaaatgccagtgcaaagcgctgcagaagataatggagaaccagagcgaggaactggaggagaagcagaagaagaaaat

SEQ ID NO: 250484 - DNA, 238 bp, Glycine max
atggagagctgcaagagggacaggtgttaaatgtgccataaaactttgcggtggcagcaatatcacagatcgacatgttcgagtaattatcattcacgacgaaagagagaccctcgattggcactcttgccagtccagaatcatttcttaccgcatttccggatgaagtgattcaaccaccttgaaaccgagtgaggctgcaggccaccaaggtcatgattcgattcaccatcaacat

SEQ ID NO: 250485 - DNA, 392 bp, Glycine max
ggatgacgtttaacgaacctcgtgtggtggctgctcttggctatgataatggtttctttgcccctggaagatgctcaaaagaatatgggaattgtactgctggcaactcaggcactgagccttacattgttgcccacaatttgatattgtcgcatgcagcagctgttcaaagataccgagcgaagtaccaagaaaagcaaaagggaaggattgggatcctcttggattttgtttggtatgagcctcttacaagatcaaaggctgacaattttgcagctcaaagagccagagactttcatattggatggttcattcatccccttgtttatggagagtatccaaaaaccattcaaaatattgttgggaatagacccccaaattcactagtgaag

SEQ ID NO: 250486 - DNA, 369 bp, Glycine max
  unsure (1)..(369): unsure at all n locations
cggctcgagaataattccttcacttgcagaacttagttctctgttgcatcatcatcatcttcattagtgttagccctaaacttcaccttcaaccatgaccacagtgccaccacacagtgtccaagtgcacacaacaacacaccgctacgaagccggcgtcgtcncgccggctcgttttgaggcgccgcgttacgaagccggcatcaaggcgccctcttccatttaccattccgagagaggtccgacgacctctcaggttctcgcagttgtcgccggccttccggtcggcggcatcctcctgctcctggcaggactgaccctggctggaactctcaccgggctggtggtggcaacaccgctcttcatcat

SEQ ID NO: 250487 - DNA, 218 bp, Glycine max
gctttttctgttccacatgctactgccagatcttctgaaaatgcggaatcctctgcatgatctggaatttgtgttttctttcgcttgttcgtttgtttaattcaataaaggaaattaggcatgaccctcttgttgagtatgctctgcctatttgaaaatttccacacctcttttaattgtcgtaatgatgtgtgaagtgtgtgttattttaaaacatg

SEQ ID NO: 250488 - DNA, 310 bp, Glycine max
agatcatacatagtagtgttggtgggttgcaaatatgcgtgggggtcttctccacatgggtcataagagaccaaggacactgctgtagacacgcacaaagttgtaggacacagtgtccatgtgcacacttcaggaaaccgctacgaaacgtgcctcgtcacgctcgctcgttttcaagagccgcattacgaacccggcatcaatgcgtcttcttccatttaacaatccgagagaggtccgacgacctctcaggttctcacagttgtctcgcgcctttcggtcggtggaatcctcctgctcctggaaggac

SEQ ID NO: 250489 - DNA, 331 bp, Glycine max
cgaacactttcatttaaaaatccaaacaccattgaatgttcagttttttttgaaagataatggcagacaccgaggacattcaaccactcgtctgcgataatgggacaggaatggttaaggctggttttgctggagatgatgctccaagggcagtgtttcctagcattgttggtcggccacgtcacaccggtgtgatggttgggatggggcaaaaggatgcatatgttggggatgaggctcagtccaagcgtggtatactaactcttaaatatcccattgagcatggtattgtgagtaactgggatgacatggagaagatctggcatcacac

SEQ ID NO: 250490 - DNA, 349 bp, Glycine max
ctcgagccgctccattgtctttgaacactcatcaccatggccaagcttgttctttccctttgtttccttcttttcagtggctgcttcgctctgagagagcaggcacagcaaaatgagtgccagatccaaaagctgaatgccctcaaaccggataaccgtatagagtcggaaggtgggttcattgagacctggaaccctaacaacaagccattccagtgtgccggtgttgccctctctcgctgcacccttaaccgcaatgcccttcctagaacttcctacaccaaaggtccccaagaaatctacattccacaaaggtaagggaatttttggaatgaaattcccgggttgt

SEQ ID NO: 250491 - DNA, 405 bp, Glycine max
gaattctcgagagagaagaagaaacgtaaccgatcatcacttcacttcactaatacatcatgggagacgagacccagaacacgtatgagagctctgaggttgaggtccaggatcgtggtgtttttgactttctcggtaagaaaaaggatgaataagacaagcctcatcctcaggaggaggtcatcgccactgagtttcaaaaagtcactgtctcagacgaacgagagaagaagcacagcctcgtagaaaagcttcaccgatctgacagcagctctagctcttcaagtgaggaggaaggagaagatggagagaacatgaagaagaagaagatggaatagaaagggctgaaagagaagatctacgagaaaatacaaggtgatcatcatcatcacaatgatgaggaca

SEQ ID NO: 250492 - DNA, 397 bp, Glycine max
tcccgttttcctttactggtaagttgtaaccctataagccgttgctcccaccgccgccgcgcagatctccgtttcaacttgggttatctctaaggtcctaaacaatcctctttcaaaaacataccgagaaaagtgtggaaatgacgacaccatcattggtagagtctctagttcttcaactccatgagatctcagctgtcaaatttggcaacttcaagctcaaatctggcatcttctcaccaatctacatagacctccgcctcatcatatcttacccttctctcctccaacagatctctcaaacccttatttcttcagtctcttccacttcctttgacctcgtatgcggtgtcccttacactgccttacccattgctacatgtgtctctcttgctca

SEQ ID NO: 250493 - DNA, 473 bp, Glycine max
  unsure (1)..(473): unsure at all n locations
ttactatgccagtccaannttagtactgacggccgacgcacgcgtacataaactcggaattcggctgaggcctgagcggggcgaagccagaggaaactctggtggaggcccgcagcgatactgacgtgcaaatcgttcgtctgacttgggtataggggcgaaagactaatcgaaccgtctagtagctggttccctccgaagtttccctcaggatagctggagcccgcgggcgagttctatcgggtaaagccaatgattagaggcatcgggggcgcaacgccctcgacctattctcaaactttaaataggtaggacggtgcggctgctctgttgagccgcgccatggaatcgagagctccaagtgggccatttttggtaagcagaactggcgatgcgggatgaaccggaagctgggtttacggtgccaactgcgcgctaacctagacccacaaagggtgttgtccaataagcan

SEQ ID NO: 250494 - DNA, 180 bp, Glycine max
cagaacattgtcagagcggcggagcatcaggcgctggagcccaccgccgtccacggggtggcgcagttctccgatctcaccgatgacgagtttgatatgctgtgcaatggcgataatagtggttatttgtaataataattattcttctttaatattaatatttataaaattatattattt

SEQ ID NO: 250495 - DNA, 343 bp, Glycine max
acataacaatgtcgttgattccaagtttcttcggcaccgggcgaagaaccaacgtcttcgaccccttctccctcgacgtgtgggacccattccatggcttccccggcaccaccgccctctccgctccgcgctccgagacggcggccttcgccatccgcgcatcgactggaaggagacggcggaggcgcacgtgttcaaggcagacctgccggggctgaagaaggaagaggtgaaggtggagatcgaggaggagggaagggtgctgcagataagcggacagagaacaaaggagaaggaggacaagaacgacccgtggcacccgctcgaacgctccagcggcagc

SEQ ID NO: 250496 - DNA, 369 bp, Glycine max
gggatattaactaccagtttccacagcttgccggtgtgcatctttctgctttgattccgtctgctagtgatgatgcaatcagccttattacatcactttgctcctgggatccctgcaagaggccaacagcttcagaggctcttcaacatcctttcttccagagttgcttttacattcctccatcccttcgcaacagagcagtagcaagaactcctccacctgctggaaccagaggagcactggatcagcaagaggtcaagagatattccggtgctttacctacttcaaagctctccaataatttttcttccatgaaattacatcctcctttagcttcaagtgtgcaacggaagcttgatatgggtaaat

SEQ ID NO: 250497 - DNA, 155 bp, Glycine max
acattacattgtcgttgattccaagtttcttcggcgccgggcgaataaccaacgtcttcgaccccttctccctcgacttgtgggacccattccatggcttccccggcaccaccgccctctccgctcctctctccgagacagctgccttcgccatc

SEQ ID NO: 250498 - DNA, 389 bp, Glycine max
gtttgcaatactagcgatagctgataagagagataccaacaagaaaagaaaaaaagaagagttgagattccctttgaagaaaagatggcatcccataggcaaagctatgaagctggtcaaactaagggccgaactgaggaaaagacgaaccagacgatgggcaatattggagagaaggctcaagctgcaaaggagaagacccaggaaatggcccaagctgcaaaggagaagacccaacaaacagcccaagctgccaaggacaagacttgcgacactttccaagcggcaaaggagaagacccaacagaatacaggagctgctcaacaaaagacctcagagatgggccagtccacgaaggaatcggcccagtcagggaaggacaacaccca

SEQ ID NO: 250499 - DNA, 389 bp, Glycine max
tatggcttcaactctgcttcccctggcaaccttcttctgagttgtctccgcttcttatctccagattgctggggcgaaagcacaaccgttgactagtctcaagcttaactctccgatccttcaggagtctattgctaaagagatcaatgaaaatcctgaggcaggatgggaggctgctataaatcctcatttctccaattatacagttgaacaatttaagcgccttcttggagtcaaaccaacgcctaagaaggaactgagaagtacacctgctatatctcacccaaagtcattgaaattgccaaagaattttgatgcaaggacagcttggtctcagtgtagcactattggaagaattctagatcagggtcactgtgggtcttgttggg

SEQ ID NO: 250500 - DNA, 326 bp, Glycine max
atgaagatcaacctcgcaagagccgcgaatggagatcgaaaaagacacaacccagaagacctagacaagaagaaccacgtgaaagaggatgcgagacaagaaacggggttgaggaaaatatctgcaccttgaagcttcacgagaacattgctcgcccttcacgcgctgacttctacaaccctaaagctggtcgcattagtaccctcaacagcctcaccctcccagccctccgccaattccaactcagtgcccaatatgttgtcctctacaagaatggaatttactctccacattggaatctgaatgcaaacagtgggatctatgtg

SEQ ID NO: 250501 - DNA, 415 bp, Glycine max
  unsure (1)..(415): unsure at all n locations
ccaacaacaactatggcaagttatcaaaagcactacgatgatcagggtcgcaaggttgacgagtatggcaacgttgagaagcaaaccgacgaatacggcaaccctgttcatgctgctagtgtcacctatgtagccaccagaactgctgctggtggttacagtgatgacattaataagcaacatgataccaccaatgcctacggcgtagacactggtagacagcattctagtggtggctacgatggtgacactaataaacatcatggaactactggtggctataatgatgacaccaatagacatcatggaactaccggtgtctatggtatanacaccgataggcaacaacatgggactactggtgggcttttcctgagacactgggaggcgataattgggaaaataggaggtcttt

SEQ ID NO: 250502 - DNA, 216 bp, Glycine max
ctatgacatcacctgcacgcgtacgtaaactcggaattcagctcgaggcgacttttttcataaaacatacgctcttcgatagccagggtaatatggttcacaggtatggcaacgctgataatcatacctactaatactgcaaccctgttcatgctactattgtcacctatttatccaccaaaactgcttctattttatacaattattacattaata

SEQ ID NO: 250503 - DNA, 328 bp, Glycine max
aaaaaacattgcccttgttctttcaaagttaccaaacacgggtacacaacacaacagcaacatatggcgtctgaacaattggctcgcagagagaacaccaccaccgagaaggagattcacgttgagaaacacagggttcccaagatggccacccacttcgagcaccttgcggagcaagctaaagaatctgacatcaccgctgggaaggatactccgcagggtagcatagaagccttgcaagctggagagagggtcaaagatcatgcaggaaaagccatgggagatattggtggacgtgggatagccagagagactcacaatctggatg

SEQ ID NO: 250504 - DNA, 288 bp, Glycine max
ggcgaccagtaccaagcttgctatagctatctctcttagcattcgggtagcctggatgtcgaacctagccttgggcaaacttaaagaaaccaatgtcgaacaatatccatacctctaaacatgcatactccagtgccaacagctgcggcaatacactgagagtgacaagcgatcatgcttgcaacactgtgacatgtatgaagcaagagcgatagatacacatctaataggaaactcgtcagaaggatgaagaacttcacgagcagcatgaggaggaggatgacctga

SEQ ID NO: 250505 - DNA, 275 bp, Glycine max
gtttgaagaacaacatggtggtgctaaaggtgtgtgttgggcttcttttccttgtgggggttacagctgcacgcatggaactgagcttcttcaaaagtgatcagtcatcaagttatgatgatgatgagtattcaaaaccatgctgtgatctctgcatgtgcacacgctcaatgcctcctcaatgcagctgtgaagatattaggctgaattcatgccactcaaattgtaagagctgtatgtgcacacgctcacagccagtacagtgtcgttgtctt

SEQ ID NO: 250506 - DNA, 248 bp, Glycine max
aaatcgtcatcaatttcgcgtctttctttctcaattctcgtagattctcaattgggtcttgaaaaatgcggatgagttgcaatggatgtcgagttctgagaaaaggttgcagtgaaaattgcagcatcagaccctgtttacaatggatcaaaagcccagaatcccaagccaatgctactgtgtttctcgctaagttttatggtcgtgctggtctcatgaacctcgtttacgcatgcccctaacatctt

SEQ ID NO: 250507 - DNA, 353 bp, Glycine max
gaacaatattcttgtgaccatccacctgcatcatgggatggggaggaaaaaaggtgtcatcacccaagtaaagtaccaagggggctgtggaagcggttgggcgttttctgccacgggagccatagaagcagcacatccaatagcaacaggagaccttgttagcctttctgaacaagaactcgtagactgtgtggaagaaagcgaaggttgttacaatggatggcactatcaatcgttcgaatgggttttagaacatggtgggattgccactgatgatgattatccttacagagctaaagagggtagatgcaaagccaattagatacaagacaaggttacaattgacggatatg

SEQ ID NO: 250508 - DNA, 110 bp, Glycine max
taattattatcacttccttagttcaatatggggaagcccgtcacgctctctctatcgtgcggttgctaactactattgtctaatgcatgctatactattaactacatcat

SEQ ID NO: 250509 - DNA, 216 bp, Glycine max
ctctagcctctcgagccgtacagtgtttccttggtggagttgtaattagaagttggagtgatcagtacctctaactggagatgtaagaagcctctgggggattacctagctgaaaggaatatcatgggaatttatgatgttgatactcgtgcaatcacgcggcgattgctgcatgatggcagtcttattggtgtttttatctctgtctattttaaa

SEQ ID NO: 250510 - DNA, 325 bp, Glycine max
tcattgttcaatctgcaaggccttatgggcaaagagcggttctgaagtttgctcaggacagtgttgctcatgctatagctggaacgcacactacatatatgttgaacactcatcttcaaacttacttcaacgagcctcgactccttattcttaccgatccaagaacagatcaccaacctattaatgaagctgctcttgggaatattcccaccattgctttctgtgacaccgattcacctatgaggtacgtggacattggaattcctgccaacatctatggcaaacacaacattggttgtctcttatagctccttgcaaggatggt

SEQ ID NO: 250511 - DNA, 248 bp, Glycine max
gcaaaatgaccaagttcacaatcctcctcatctgggttggcttctgcatcgcccagacttgcagcgcctccaaatggcagcaccagcaagatagctgccgcaagcagctccagggggtgaacctcacgccctgcgagaagcacatcatggagaagatccaaggccgcggcgatgacgatgatgatgatgacgacgacaatcacattctcaggaccatgcggggaagaatcgactacataaggaggaac

SEQ ID NO: 250512 - DNA, 385 bp, Glycine max
gaaagagagagaagaagaaaagaagaacaaagatgcaagcctcaaaggagaagatgaaaaacatggcaagtgctgccaaggaacaagtcgacatctataaagccaaaatagacgagaaggcagagaaagcaacggcaagaacagaagaggagagggtgatagcccatgagcacgcaaaggcaaaggaagctggagcaaagatggagctgcatgaagctaaagcaaggcatgcagcagagaagctaagcgccaaccaatcacattatggtctccaccatggccacaacaaccctcccttagtaggaacaactcagactcactaccagcaagggcaccagcaccagccacttggggcagttcctatgcctggaaccacttatccatc

SEQ ID NO: 250513 - DNA, 306 bp, Glycine max
cgaacactttcatttaaaaatccaaacaccattgaatgtgcagttttttttgaaagataatggcagacaccgaggacattcaaccactcgtctgcgataatgggacaggaatggttaaggctggttttgctggagatgatgctccaagggcagtgtttcctagcattgttggtcggccacgtcacaccggtgtgatggttgggatggggcaaaaggatgcatatgttggggatgaggctcagtccaagcgtggtatactaactcttaaataatcccattgaccttggaatggtgagtaactgggat

SEQ ID NO: 250514 - DNA, 244 bp, Glycine max
cggctcgagaataattccttcacttgcagaacttagttcgctgttgcatcatcatcatcttcattagtgttagccctaaacttcaccttcaaccatgaccacagtgccaccacacagtgtccaagtgcacacaacaacacaccgctacgaagccggcgtcgtcccgccggctcgttatgaggcgccgcgttacgaagccggcatcaaagcgccctcttccatttaccattccgagagaggtccg

SEQ ID NO: 250515 - DNA, 191 bp, Glycine max
  unsure (1)..(191): unsure at all n locations
tgaaggccctctgngtttggagagcgcaagagccagtaccgtgatgatattgccatcttgagtggaggtactgtaatcagagaagaggttggccttactttggacaaagctgggaaagaggttctcggatatgcctccaatgtggtgcttaccaaggatacaaccacaattgttggtgatagaagtaccca

SEQ ID NO: 250516 - DNA, 535 bp, Glycine max
  unsure (1)..(535): unsure at all n locations
aggaggggtgaagtcacgtgctggtgacctacgcnctcagcnatcactatctatgacgtcgcactgcacgcgtacgtaagctcggaattcggctcgagtcaagattttgaaattgctggtaatactcttatgccaggtgtttgctgttccacaggctactgccagatcttctgaaaatgcggaatcctctgcatgatctggaatttgtgttttctttcgcttgttcgtttgtttaattcaataaaggaaattaggcatgaccctcttgttgagtatgctctgcctatttgaaaatttccacacctcttttaattgtcgtaatgatgtgtgaagtgtgtgttattttaaataattataaatagggtgcaatattatcttggggtagaatctctaataataaaatgggcggccgccgactattgagctcgtcgacccgggaattaattctggaccggttcctgcaggcgtaccacctttccctatagtgagtcctttttaaacttggcgtaattatggggcataactttttccctgg

SEQ ID NO: 250517 - DNA, 306 bp, Glycine max
cgtcagttgcatgaaaaatggtttcgctgaaactgcagaagcggcgcgccgctagcgtgctcgagtgtggcagaagaaaggtttggcttgaccccaatgaagtcaacgaaatctccatggccaattctcgccaaaacataaggaagctggttaaagatgggtttatcatcaggaagcccaccaagattcactctcgctcacgtgctcgtctaatgaatgaatccaagatgaaaggacgtcactcttgatacggtaagcgtaatggtacaatggaagcaatgctttccactaaaattctattgatga

SEQ ID NO: 250518 - DNA, 203 bp, Glycine max
ggtgtggtgatgccatcttatatgaaataatatcaaaatatgtttggtgtaataataaaactgtggcctatgtatttaccaccctccgacccagcctatgttaatatctgagtggcgttgtacctttgaatcgccttaataaaatgtcagtcttcaaattttgtctttaaaaataatataatattatttaatattatataaat

SEQ ID NO: 250519 - DNA, 88 bp, Glycine max
cttaaacactcttcagtcatcaccatggccaagctagtttgttccctttgttttctgctttgcattgtctgctgcttctctttcattt

SEQ ID NO: 250520 - DNA, 232 bp, Glycine max
acgtaacctcggaattctgctctaggcaaagtgttatactcattcttcacttgcttacaacattttgggcgagatataaatgaacacagcttgaaccaatattgtggtatgttaaatatactacttcatccattaattatttttatttttcatattttcttatattttatttttttctttatttttatttttttttattttttttttatttttattttttatttttttttat

SEQ ID NO: 250521 - DNA, 379 bp, Glycine max
aagaaaagccatttccatagcagcctaagaaaatgaggatcgctagcttgttcgctaggttggtactttgcgccttcacctcatacctaccttccgccaccgcccaggacgtgctcgacgtggatggcgatccgattcggaacggtttcatatactacgttttgccggcaataagaggaaacggtggcggaatagaacgagccgcactcgggaaagacacttgccctatcactgtagtgcaatctcccaatcctaactctaatgggttagaaattaagtttgaatctgcattccccgcctattacataaacgaaaccctaatttttcaaattaagtttcatttcccacaacagtgtgaaataaattatcctttggtggg

SEQ ID NO: 250522 - DNA, 287 bp, Glycine max
gtcacatatgctattaagggtgagatatatagaaaagcaggtgagaatagatagaaatggagaactttccagttgttgacattgggaacccttatatttaatagatatcttctacctttgatattatcaaacattccttttataactttggtttcttatcttattttttttcttttctttttcttttcttttatctatcttatctttttattttattttttattgtttttttttttttttttttattttttttcttatttattttttttttcctttttttcttattt

SEQ ID NO: 250523 - DNA, 304 bp, Glycine max
ctttgaacactcatcaccatggccaagcttgttctggccggttgtttccttcttttcagtggctgcttcgctctgagagagcaggcacagcaaaatgagtgccagatccaaaagctgaatgccctcaaaccggataaccgtatagagtcggaaggtgggttcattgagacctggaaccctaacaacaagccattccagtgtgccggtgttgccctctctcgctgcacccttaaccgcaatgcccttcgtaaacctttctacaccaacggtccccaagaaatctacttacaacaaggtaatggta

SEQ ID NO: 250524 - DNA, 389 bp, Glycine max
atatgatatataaagagagagaagaagaaaagaagaacaagtatggaatcctcaaaggagaagatgaaaaacatggcaagtgctgccaaggaacaagtcgacatctataaagccaaaatagacgagaaggcagagaaagcaacggcaagaacagaagaggagagggtgatagcccatgagcacgcaaaggcaaaggaagctggagcaaagatggagctgcatgaagctaaagcaaggcatgcagcagagaagctaagcgccaaccaatcacattatggtctccaccatggccacaacaaccctcccttagtaggaacaactcagactcactaccatcaaaggcaccaccaccagccacttggggcagttcctatacccggaaacactta

SEQ ID NO: 250525 - DNA, 371 bp, Glycine max
agccgaggcacgcctgcctgggtgtcacacatcgtttccggaaggcaaacatgtaacaatgttgctgcgcggggtgtatgctgacctcccgcgagcacccgcctcgtggttggttgaaatctgggttcatggccgacttcgccgtgataaaatggtggatgagccacgctcgagaccaatcacgtgcgagccggtcagttctggacccatcgacgaccctttgcgtgcacgcacgctcccaacgaaacctcaagtcacgcagagctacccgctgagtttaagcatatcaataatctgaggacatgaaactgacaaggattcccttagtaacggctagcgaaccgggaaaagcccaccatgaaaatcggtct

SEQ ID NO: 250526 - DNA, 216 bp, Glycine max
agaaagaaggtttttttagtatagttaacagcatggagatgtatgcaagatgttaatgttggggcggataaattctcgaataggcaatctctgggtacaggatcttataattacaaggactacaaggatgcaccaccaacacccttgtttgatccaagggagttttagtcatggtcattttacacatcttggattttcatcattttgttactattt

SEQ ID NO: 250527 - DNA, 312 bp, Glycine max
acgcgtacgtaagctcggaattcggctctagctcgagccgtattttctcgagggctgaagcacaactactagaccgtcatatcaaccctgtcgcacgcaccgatcaatacagtaatcctgttatcttaactgactatcgctgtaatcccatccaactcactgatgtcactaccacctctaccttcacatcatattctgtatttattatcttatttatactctttcataactttatttattttttttttaatactttatataatttatatacaattttttattttatatttaatttaaattaaatatttattt

SEQ ID NO: 250528 - DNA, 168 bp, Glycine max
acgcgtacgtaagctcggaattcagctcgagaggtaatggtatttttggcatgatattcccgggttgtcctagcagttatcaagagccgcaagaatggcaacaactatgactaatccaaatgccccaataccgtcaccaaaatgtacatctcttcagagaaggttatt

SEQ ID NO: 250529 - DNA, 366 bp, Glycine max
cttaattattaacacttccttagttcaatatggggaagcgcttcactctctctcttgcttgcctttgcttgctactcttgtcgagtgcatgctttgctattagctccagcaagctcaacgagtgccaactcaacaacctcaacgcgttggaacccgaccaccgcgttgagtccgaaggtggtttgattcaaacatggaactctcaacaccctgagctgaaatgcgccggtgtcactgtttccaaactcaccctcaaccgcaatggcctccacttgccatcttactcaccttatccccggatgatcatcatcgcccaaaggaaaggagcacttggagttgcaataccaggatgtcctgagacgtttg

SEQ ID NO: 250530 - DNA, 209 bp, Glycine max
cttaattattgccacttccttaaaccattatattggagcggtcacttttcttatgttgttgggtttgctcgctactctattcaaatcgcatcctctactatgctcctggcactctcaactagcgccgactcaacaacctttacgcgttggaacccgaccaccgtgttgagtccaaatgtggaccgatacacacatggcactctcatcac

SEQ ID NO: 250531 - DNA, 547 bp, Glycine max
  unsure (1)..(547): unsure at all n locations
gtattgacttaagtctacttanacttgantcttaatgtagcatctatatagatttatgacagtcgcatgcacgcgtacgtaagctcggaattctgctctagggagactgcttaggctcacgtgttcaatgcataccgtccgtgtctttataatggttgggtgtgtttttattattttttttttttttttttattttatttttttttttttattttttttattttattttttttttttttttttttttttattttttttatttttttttttattttttttatttttttttttttttatttttatttttttttttttttttttttatttttattttttttttttatttttttttttttttttttttttttttttttttatattttttttttttttattattttttattatttttattattttcttttttatattttttattttttttttttttttttttttttttttttatttttattattatatttttttttttttttttttttatttttttttttttttttttattttttttattttttttttttat

SEQ ID NO: 250532 - DNA, 427 bp, Glycine max
acgtaagctcggaattcggctctagaaaacctaatcttacaattagaaacatataattgaataatgtagggatttgatcgttgaaagtgcgtctaagaaataaagccgtatagtctatttatttaacattttcaaacattttttcttttttccaatgctttcattgatattaccattcctcttttactaaattttattttatataatttcatattttttttttcatattattatattatttatttttattatttttttatattttttttttatttttattatttttttatttatattttattattattttttttttatttattttattatttataatttttttttttaatttattttaattttttttttatatattttttattttattttattttattttattaattttttatatttttttttttta

SEQ ID NO: 250533 - DNA, 289 bp, Glycine max
gatagactctacaattttgtacttcggagtattgccctgggtttagaagatatcacgagatggtatgacaatagccagtctcaatgctgagaatgaaatactgcatacccttgcctttttagctggggtgatgatttggtcacatataactgattagcccttttctctgtactcaacttttgtgattgatgcccttcatggttttaacaagcaaacaccatggttattctttacggacatgattaaaggaattttcctttctgtaataatttggtccaactatagtggc

SEQ ID NO: 250534 - DNA, 393 bp, Glycine max
  unsure (1)..(393): unsure at all n locations
tgaagcagtaatgcttgaagcggcaatgtttggtggaattgcagaggggactgggtatcactatggttatgcaccacatgagtttatgcaaaataggggtttcaatccccggccccaatatcgtcctccttcaccatcactggcagctcaacgcttgataagggaacagcaggatgatgaatatcttgcatcgttacaagcagacagagaaaaagaattgaaggccatggaggaagctgangctgctcgtgaagaggaaagacagagagcagaagactctcgcaggaaattacaggaagaacaggaattggaaacaaaattagcagccaaagaagtctcactaccaccagaaccatcctctcatgatgataatgctgtaaacttgatggtaaa

SEQ ID NO: 250535 - DNA, 315 bp, Glycine max
ccttcacttgcagcactgttgcatcatcatcttcatggcggaaccctaaacttcaccgtcgaccatgaccacacaagtaccaccacacagtgtccaagtccacacaacaacacaccgctacgaagctggcgtcatcccccccggagcccgtttcgaaccgccgcgttatgaagccggcgtcaaagcgccctccatttaccattcctagagaggtccaacgacttcccatgtcctcgccgtcctcaccggcctcccagtctgtggcatcctgctcctcctggcatgattgaccctgtcatgaaccctaacttatac

SEQ ID NO: 250536 - DNA, 389 bp, Glycine max
tcggggaattccaattccacattttcaagaaataaggaggcaaaagatgttcatatatgaattggaattatgttgttttcttattaggcctatcctgaagccaaaggaaatgagatcggaattcctcggggaattccaattccacattttcaagaaataaggaggcaaaaatgttcatatatgaattggaattatttgttttcttattaggcctatcctgaagccaaaggaaatgagatcggaattcctcggggaattccaattccacattttcaagaaataaggaggcaaatatgttcatatatgaattggaattatttgttttcttattaggcctatcctgaagccaaaagaaatgagatcggaattcctcgggggtaccgagctcg

SEQ ID NO: 250537 - DNA, 357 bp, Glycine max
tttaatttgatcaacaaaagcactaccctgaactcatgggcggaaaaaccacaaaaattggaacaaagattcggcgaaggctaaaggaagatgagaagaagaccaggaattggagggttgcagacgcacgccgctgcaagagatcaattccgtttgcttggtgaaaatgtcgcaaagatcagaactgatttgatgaaggagcatcttgccacctttcgctctcagctcgaagatttcgctcgcaaacacaagaatgacatccgcaagaacccttcattcagatcacagtttcatgagatgtgtgctaaagttggagtagaccccttggccttaaacaaaggtttctggtcataactt

SEQ ID NO: 250538 - DNA, 290 bp, Glycine max
cttaattattaacacttccttagttcaatatggggaagccgttcagtctctctctttcttgcgctttgcttgctactcttgtcgagtgcatgctttgctattagctccagcaagctcaacgagtgccaactcaacaacctcaacgcgttggaacccgaccaccgcgttgagtccgaaggtggtttgattcaaacatggaactctcaacaccctgagctgaaatgcgccagtgtcactgtttccaaactcaccctcaaccgcaatggccttcacttgccatcttactcacc

SEQ ID NO: 250539 - DNA, 538 bp, Glycine max
  unsure (1)..(538): unsure at all n locations
gaggagagtgcaatgctagtcattgagatcgatcgctntntgtcatcanctatagaagagtctatgacgatcgcatgcanctgcgtacgtaagctcggaattcggcttcgaggaaacaaagtaaaagaagaaaggaaagaattgatcgttgaaaatgcagggaggaaagaaagcgggagagtccattaaggaaacagctacaaacattggtgcttctgccaaggctggcatggagaagaccaaggccactgtccaagagaaggcagaaagaatgacagcacgtgatccggtgcaaaaggagttggcaacccaaaagaaagaggcaaagatgaaccaggcggagctggacaagcaggcggcgcgtcagcataacacggcggccaaacagtccgccaccacggctgggcacatgggacatggccaccacaccaccggaaccgggactggaaccgccacgtattccaccaccggggaatatggtcagcctaagggggcccactagacgtcagaaatgcctggcctttgataccgggatatg

SEQ ID NO: 250540 - DNA, 290 bp, Glycine max
ggtgcatgatagttcagtgtctacaataccaggtggtttggtcattggtgttaagttgacgaccataaacaatatgtgtgcatatgggctcaatcctggtatttcaggttctcgtcttttgggcaccattcctcagtccatttcacagcaaactgtttggaatcaaatggcaacagtgagaacaccattgaattttgattctagcaagcagagcttttgtcaattctctattgatcttcttggtggatgaattttagtggacaaaactggagattggatcacacttatac

SEQ ID NO: 250541 - DNA, 349 bp, Glycine max
cgttagtccttccaatccaacactttttggaaatgcagttgtgcgagtattggcttcactggacactcggagagcatttttgagcctccgtgctgctggtgttcctcataacgaagcttcgatggcaatactgatccaagaaatgctttcaccggatttatcatttgtactacataccgtgagcccaacaaaccaggataataattgtgtggaggctgaaattgcttctggccttggtgaaactctagcttctggaacccggggtacaccatggcgtatatcatctgggaaatttgacaggcaagtgcaaacattggcttttgcaaacttcagtgaggaattgctggta

SEQ ID NO: 250542 - DNA, 399 bp, Glycine max
  unsure (1)..(399): unsure at all n locations
gcgatagaaaagaaaaacaacaaaccaatacccttccctggggcgggcccttcatcagtgttactgcgcatccctccgtttctcctaccgactccggggaaggaaggaaggagtgaacaacaaacccaaccaatacccattgcaataagtcttggtgttctaagtttctttgggtctgtttttggtgatctcactgaatcaatgattaaacgagatgcangagttaaagactctggcacactaatacctggtcatggtggagtactagacagagcggacagttatgtgttcacgggtgctctagcatacaactntatcaaaaccgttttaccactgtatggagtatgacctgaaacaatgttaggtggtatctgcatagtattgtcactgacagctttg

SEQ ID NO: 250543 - DNA, 327 bp, Glycine max
ctcaagccgctcaagcacatccaccaatacccttccctaggcagtccctacatcagggtgggtgcgcatccctccgtttctcctaccgactccggggaaggaaggaaggagtgaacaacaaacccaaccaatacccattgcaataggtcttggtgttctaagtttctttgggtctgtttttggtgatctcactgaatcaatgattaaacgagatgcttgagttaaagactctggcacactaatacctggtcatggtggagtactatacagatcggacagttatgtgttcactgttgctctagcatactactttatcaaaaccgtttt

SEQ ID NO: 250544 - DNA, 543 bp, Glycine max
  unsure (1)..(543): unsure at all n locations
nggtagagagggatgtaaagtgattgaatcgatagcattagtatcancatagaagagctatgacgtcgcacgcacgcgtacgtaagctcggaattccgctcgaggctcgaccagatgcctaggagattctatcttgctgggaacgaataccaagagtttcgaaaggatcaccagcaacagcaaggaggttccctaagccttactggaaagcaacaagaagaataaaaccaatgaagcatcatatagagtggctactcccatgaattaatgaaaaaaactgttttccttaacatgcttacaattattatttaatttatgtaataataaatagaaatgatttaatttctaatatcattaattatttaaatttattttaataatatattagcttattaaatttattacattaaatttatatattattatttaaattaatatattatattatattaagtattatattttaaatatctataatttatctattatattacttatataatataatatataattttctaattatattattattactttatt

SEQ ID NO: 250545 - DNA, 509 bp, Glycine max
  unsure (1)..(509): unsure at all n locations
tgagggntngtcgatgatgggatcgtatgtatagcagcacatataagagtctatgacgtcgcatgcacgcgtacgtaagctcggaattctgctcgagggactgacaactgaagtcaagtctgtggagatgcgccatgaatctcttacagaggcacatcctggtgacaatgtgggattcaatgttaagaatgttgctgttaaggatttgaagcgtggttatgttgcctcaaactcaaaggatgaccctgcaaaggaggctgctaacttcacagcccaagtcatcatcatgaaccaccctggtcagattggaaatggctatgcccctgtcctcgactgccacacttctcacattgctgtcaagtttgctgaactcatgaccaagattgacaggcgatccggcaaagagcttgagaaggagcccaagtttttgaagaacggtgatgctggttttgttaagatgattccaaccaaacccatggttgttgaaactttctccgagtatccctcac

SEQ ID NO: 250546 - DNA, 274 bp, Glycine max
ggaaaggtgttgcgatcaattttgtcacaaaggatgacgagaaaatgctgtttgacatccagaagtggtacaacgtgcaagttgaggagctgccttcaaatgttgctgagctcctttgatcagattttgtcctccgtcgtagtacatgaaattagtttgcgtttggaaactgttatgtaatgtttcttactctaacctgtctcccccccctttcctttctttggttgtacttccgctcttaaactttgtttaatatgcttagtaatttaatttt

SEQ ID NO: 250547 - DNA, 247 bp, Glycine max
gaacatacgataaggtcaccaaatagaatgctgaaccagatgaaatgatgtacaagtcccctgtcttcaatctatttggtgaacatatgacaaggtcatagacttcacattatctgcagcattgacccctctaccagcttgggattatagaccttccagtccttctatattgggggaggagccaattcgcactcagtgctttctggattcgaacctgccatccttgacactgcttttaatgaatcat

SEQ ID NO: 250548 - DNA, 186 bp, Glycine max
acgcgtacgtaagctcggacaacgtcctcttcactatacattctggtcttccataatggaagcacaacaatgaatagactcctattattgccggttctattattcacaccaacatcttatacaaccatctctaccatattcctatgatattctatcttactattaaccataatcaatattttctaa

SEQ ID NO: 250549 - DNA, 504 bp, Glycine max
  unsure (1)..(504): unsure at all n locations
aggagtgatgttggcagatgaaggacttagtgacacttacnagagctatgacgtcgcacgcacgcgtacgtaagctcggaattcggctctagcgcagtgcctactggtgttgcatggtggatgtacaacaaggaaaacactcctgttgttgccgtttctattattgacaccaacagcttggagaaccagctcgaccagatgcctaggagattctatcttgctgggaaccaagagcaagagtttctaaaatatcagcaagagcaaggaggtcatcaaagccagaaaagaaagcatcagcaagaagaagaaaacgaaggaagcagcatattgaatggcttcaccctggaattcttggaacatgcattcaacgtggacaagcagatagcgaaaaacctacaaggagagaactgaagggaagacaaaggaaccattgtgacagttaaaagaggtctgaacgtgataaaaccacccaccgactaaccgcaccaaaaaccccagaaaagg

SEQ ID NO: 250550 - DNA, 216 bp, Glycine max
acgtaagctcggaattcgtctcgtatcacaataccttctggttttccatcgttgatatacaacaatgaatagactccaattattgccggatggattattcacaccaacatctttaaaaaccatctcaaccatattcctattaaattctatctttcttttaaccaatatcaacaatttctaaaatatcatcaaaatcaattaattcattaaaaccat

SEQ ID NO: 250551 - DNA, 410 bp, Glycine max
aaaacactattttaaaacttattcagtatatggattaaatgcaaagatataaacattagtggggtggatgctaaaatttttatttattaaattataaaaaataattttaattataaattaaatattattaattttaaataattaaatatttaaaatattacaataatatatataatttaaaattattataataaaatattattaattttaaaaatataaataatattataatatattaattatataatattaaattaatatattttatattatatatttattagttaatatttaattttatatatcatatatttaatatatataaatatatatattaataatttttattatatatttatataatataaataataaatatatataaataattatatatatataataaataa

SEQ ID NO: 250552 - DNA, 246 bp, Glycine max
caggaacagctcaagaaacctcaaggggagcaggaccccgtaagtctgcgacgttttcaaagtgtccgacgaactcgctttcaaacccatcgcgccaagagacgcagctctcatgcaagccacggagaaccaagcattgggccaaactcaaaaaggaggtcccgcctcggtgatgcaatccgccgcaaccgaaaacctccgcgccggcgtcgtgggccgccaagacatctccgacgtggcgaggaa

SEQ ID NO: 250553 - DNA, 288 bp, Glycine max
  unsure (1)..(288): unsure at all n locations
cacccgtacgtaagctcggaattcngctctagattccactatatgataaagttctaataatctcgatgaaaggcaaggatataaacatttgtggcttgaatgcgaaaattgttatggattaaattataaaaaattttttaaatcaaaaatgaatatttgtgaatactgtggatatcatttgaaaattggcagttcagatataatctaactttttattgattctagtacttgtaatcctatggattaatacattgattatctttatcctattaaattttaattactaaa

SEQ ID NO: 250554 - DNA, 150 bp, Glycine max
aaaaaaaataaaaaaaaaagaaaataaaaaaaaaagaaataaaaaaaatatataaataaaaaataaacaaaaaaaaataaaaaaataaaaaaaaaagaaaaaaaagaaaaaaaaaaaagaaaagagagaaagaaaaaaaaaatataatac

SEQ ID NO: 250555 - DNA, 428 bp, Glycine max
  unsure (1)..(428): unsure at all n locations
tacgtaagctcggaattcngctcgagctcattaatttcaataatggcacttcgttgcttggttatcgccgtgtctgatctcttgactcgttggtcttgcgagagaaagccatgccagagacgaagatttttggcatgctgtttggccaaacactcccattccaagttcattgccagatcttctaaagcctggccctgcaagtgttgaaatcgatgatcaccctatgcaaattgaagaaacacagtacccgaaaaccttcttctataaagaagaccttcatccaagcaaaacaatgaaagtacaattcatcaagcctccctttcaacaaccatggggtgttggtacatggttaaaggaaattaaagaccctacttaataatgatatattttttaagagctttgcatcaagaaagaagccattgatggat

SEQ ID NO: 250556 - DNA, 255 bp, Glycine max
ctcattaatttcaataatggcacctactctcattgaattagccaggtttattctactagatgatggataccttaattaaatctcaccaaaaccatacctcatgtgtaatcacaatagtcaaggggaacaattaatgcactagcagccaccaacactaactttaagttggcctctaggcttctgggattgtattcaaagcctgataaaagtatactgattccatacaaggatatcaaagttgaatgtaccatatct

SEQ ID NO: 250557 - DNA, 342 bp, Glycine max
aaatctcaattcaccgcaaaccaaaaaaagcttcagcatcgtcttcttcttctctgcgtcatcacaatggctgaagtacgttcacaacaacaacaaccccagcatgtgcaagtccacgcaaccacaacacacaccccacaacaccatggcggggaaggtggcagcggcattctgaacctcatcccggagatgtccctcacgggttcccaactcctagctctcctcgccggcgttccccttggtgcaatgctgctcctcctctccggcatctcgctcatcgccagcctcttggggctggcggtggcgacgccgctcttcatcttcttcagcccgctgctggtc

SEQ ID NO: 250558 - DNA, 278 bp, Glycine max
atgacgtcgcatcgcacgcgtactaagctcggaattcgctcgagcacgtggacggaatcagatgcagccatacaggagcgggcacgcagcagcacgagtgttgaatgctgctctatttgagcacaatgagattggagaaatgctggttttgctcttcaaccgtataccctggacatggaatccagtttgttcgtaatgatgcaaagatttttcggtgctgtagatcaaaatgccacattaactattctatgatgagatatcctggtaaggtatagtgg

SEQ ID NO: 250559 - DNA, 289 bp, Glycine max
cagcttgctcatcaagtccaagaaccaacctaccttgtgcgatctcaattcaatggcgtccgctctcattgcgaagcgcttcctctcctcttccctcctctccaggtccctccttcgccccgccgcttccgcttcccaccgctctttcaacaccaacgccatgcgccagtatgacaaccgcgccgacgaccacagcaccgacatcgatcgtcactccgaacgctctttccctagcactgcgcgccgcgacgatatcttctcagatgtgttggatccattttttccgact

SEQ ID NO: 250560 - DNA, 266 bp, Glycine max
ttggactcatatttggtgccatgcttccttactggggtcggctatgaccatgaagagtgtgggaagtgcaccttcgaagatggttgacgaggttcgtacgcagttcaacactattccacgacttatggacggtcatgccaagcctgattatcccacctgcgtcaaaatttctactgatgcatccatcactgatatgattcctccaggtgcccttgtcatgctcacaccactcattgtaggcatcttctctggtgtggaaacacttt

SEQ ID NO: 250561 - DNA, 290 bp, Glycine max
  unsure (1)..(290): unsure at all n locations
aaagccttctgtggcatgatctttgtcctcgtctacgtacacgatcngcatttctggtgaccctacctcgtctactccaccacctcttttttttatttatttattacttactttttcgttttgcggcgtcaacaacataacttatgtggacacattaacactgccgtgacttttggcctgttcctggcatgcaaggtgtctctcattcgtgccatgttctacatggtagcacattgtttgggtgctatctgcggttttgggttggtgaatgccttcatgaagcactccta

SEQ ID NO: 250562 - DNA, 195 bp, Glycine max
  unsure (1)..(195): unsure at all n locations
gcgaaaacattacaaaagtctcaaaacagaagcaaagccatgcacgaagcacactctaagtgcttgcattgcctactaagtanggtacgtacacgatcaccattcaccagtgatgatctttattaatatacaacacactcatagacatcttatattatatctagctatcataatctatcacatcatttcttacta

SEQ ID NO: 250563 - DNA, 364 bp, Glycine max
attgtctttgaacactcatcaccatggccaagcttgttctgtccgtttgtttccttcttttgagtggctgcttcgctctgagagagcaggcacagcaaaatgagtgccagatccaaaagctgaatgccctcaaaccggataaccgtatagagtcggaaggtgggttcattgagacctggaaccctaacaacaagccattccagtgtgccggtgttgccctctctcgctgcacccttaaccgcaatgcccttcgtagaccttcctacaccaacggtccccaggaaatctacatacaacaaggtaatggtatttttggcatgatattcccgggttgtcctagcacttatcaagagccgcaagaatc

SEQ ID NO: 250564 - DNA, 277 bp, Glycine max
cgttgacagctttttagaatggtgttgcgtcaagagtatgagaggaatatagtgtagtgtgcaaccttaaaaaaaaaaaaaaaaaaaaaaaaaaaaaaaaaaaaaaaaaaaaaaaaaaaaaaaaaaaaaaaaaaaaaaaaaaaaaaaaaaaaaaaaaaaaaaaaaaaaaaaaaaaaaggggggcccccaaaaaaaaaccttgtaaacccgaaaataaattccaaaccggaacttgaaggcttacaaatttcccattaaggaaacttaataaaacctg

SEQ ID NO: 250565 - DNA, 333 bp, Glycine max
cacgcgtacttaagctcggaattcagctctagaaaataaaatttaacaaaaaaaaaaaaaaaaaaaaagaaaagaaaaaataaaaaaaatagaaagaaaaaaaaaaaaaaaaaaaaaaaaaaaaaaaaaaaaaaaaaaaaaaaaaaaaaaaaaaaggccctcccccaactatgaacccttttaacccgaaatttatttcaaaacctttacctttatccttacaattttcccttatattaattcttttaaaaccttgccatactcatggctaaaccttttcccttaataaaattttatcctattcaaatttccccaaactatataaccctaaac

SEQ ID NO: 250566 - DNA, 398 bp, Glycine max
gatgaagactaagatgatgaagatgaacaaattcccgctcggcctcctcgccgaccaagccgtggaaagcgtgaacaagacgaggacgaggacgaagatgaagataaacctcgtcctagtcgaccaagccaaggaaagcgtgaacaagaccaggaccaggacgaggacgaagatgaagatgaagatcaacctcgcaagagccgcgaatggagatcgaaaaagacacaacccagaagacctagacaagaagaaccacgtgaaagaggatgcgagacaagaaacggggttgaggaaaatatctgcaccttgaagcttcacgagaacattgctcgcccttcacgcgctgacttctacaaccctaaaactggtcgcattagtaccctcaacagcctcaccct

SEQ ID NO: 250567 - DNA, 314 bp, Glycine max
caagaagtcctgagtaagcatctagaacaaagctctgaatgtgagtttgaaaactggaacgcgtagaatgaacggtacccctccctcataaataaaatctactactaaacgctcttctcttctgcaatcaatttgcaaaccaaacacaacacaaggagaagaaccagatctctctttctcaaatcaccaagaatagttgaaaatggggctgtctttcacgaaactgttcagccggctcttttccaagaaggaaatgcgtattcctatggtgggtctcgactccccccgtaagaccaccattctctacaaactca

SEQ ID NO: 250568 - DNA, 234 bp, Glycine max
  unsure (1)..(234): unsure at all n locations
atagattatgactccatcgcgnctcgtaactcggaattcgctcgagtgaatacatttattgaaacgcctgaaaatgccgaaagtggtgttgaacccgtgtgggcacaaacagaacgcctccagaaagcaaaagagatctgaaatcattgcaagtaaatgggatgagtatttgatcaaatgcattcaagtgatccctctaaaagggcaattaccaatgaagtatttcagataaaa

SEQ ID NO: 250569 - DNA, 206 bp, Glycine max
actcggaattctgctcgagcacacaactactacaagtacttccttacaatcaaagcgcaagaacaactatggcaagtgatcgaaagcactacgatgatcagggtcgcaaggttgacgagtatggcaacgttgataagcaaaccgacgaatactgcaaccctgttcatgctgctagtgtcacctatgtatccaccataactgcttct

SEQ ID NO: 250570 - DNA, 406 bp, Glycine max
gcaaaatgaccaagttcacaatcctcctcatctctgttcgcttctgcatcgcccacgcttgcagcgcctccaaatggcagcaccagcaagatagctgccgcaagcagctccagggggtgaacctcacgccctgcgagaagcacatcatggagaagatccaaggccgcggcgatgacgatgatgatgatgacgacgacaatcacattctcaggaccatgcggggaagaatcaactacataaggaggaacgaaggaaaagacgaagacgaagaagaagaaggacacatgcagaagtgctgcacagaaatgagcgagctgagaagccccaaatgccagtgcaaagcgctgcagaagataatggagaaccagagcgaggaactggatgagaagcagaagaagaaaatgga

SEQ ID NO: 250571 - DNA, 544 bp, Glycine max
  unsure (1)..(544): unsure at all n locations
cggttatagagtgacatccataatgagaactaangcttagcatcancatataagattatgacctcgcacgcacgcgtacgtaagctcggaattctgctcgagacaaattgactatctacacaatcctactcatctctgttctgttatacatcacccacacttgcaccacctccaaatggcagcaccaccaagataactgccacaagcaactccaacgagtaaacctcactcactgctaaaaacacataacgtataacaatcaacgccaacaccaataactatcattatcatgaccactatcaatacttacttcaaaccataccacttataattatctacataaaataagaaccaaaactaaaacacaatatataatatcatatctaagtatagttaccattaatactattatattaataaatataaatattaaatcatcaaatttcacatattaaattatcctttcttaaacataacatattctaaaatcaaactaatcattaatcattatcatatctacataaaactatttatacaatataat

SEQ ID NO: 250572 - DNA, 277 bp, Glycine max
cggttaaaggtgagacacaatgaatggtaataattgaggttttaaaatgcagtgaggaaaggaagcttaatagtccatcaaggaaacagtttgcaacattgatgcttctgtcaaagctggcatggagaaaaccatagccactgttcatgaaaaggctcttagaatgacgggacgtgattccctgccaaacgagttggcttcccataacaaagatgccaaaaatgattagccaggcataactggacaagcaatctgctgcattagataacacggtggc

SEQ ID NO: 250573 - DNA, 373 bp, Glycine max
  unsure (1)..(373): unsure at all n locations
gtggaatacaagagggagtggaggccagtagaaccccgttgtttattcggcatacacatcgtcgggggctagccaccgagtgcagtgcaaccatcggaaaataatggcagagacagattcgtcgtcctcttcagatggagaaccctcgcaatcgctggcgtcgattgcggagaatcttcagcgttctgccattcaatctgctcgaactgtgcaacattnaaagctcttcaactcatttccgtgcctttcagaattttttaccagaagcagtatcacagtatagaacatatgaagatgcttttgtcaataaagttaaagatggactgatgattgcaaaggagaatccagctgtaagtgctggtgtagctatttc

SEQ ID NO: 250574 - DNA, 376 bp, Glycine max
ctttgaacactcatcaccatggccaagcttgttctttgcctttgttgccttcttttcagtggctgcttcgctctgagagagcaggcacagcaaaatgagtgccagatccaaaagctgaatgccctcaaaccggataaccgtatagagtcggaaggtgggttcattgagacctggaaccctaacaacaagccattccagtgtgccggtgttgcccttcctttttcgctgcacccttaaccgcaatgcccttcgtagaccttcctacaccaacggtccccaggaaatctacatacaacaaggtaatggtatttttggcatgatattcccgggttgtcctagcacttatcaagagccgcaagaatctcagcaacgagga

SEQ ID NO: 250575 - DNA, 382 bp, Glycine max
tgaggttgtagctgctactggtgatggaaccaatgaggctcctgcactgcatgagtcagacattgggcttgctatgggcatatctggaactgacgttgccaaagaaaatgctgatgtcattataatggatgataacttcactactattgtcaatgtgtgccagatggggacggtccatatacataaacattcaaaaatttgtgcagtttcaaggggttaacagtcaatattgttgctctgattattaacttagattctgcatgcatcacaggatctgctcccctcacagctgttcagttgctttgggtcaacctgattatggacactctgggtgctttggccttggccactgaacctaccaatgatggacttatgctaagac

SEQ ID NO: 250576 - DNA, 386 bp, Glycine max
  unsure (1)..(386): unsure at all n locations
gagtgtccttaacaggagtagttgtcattgtataatagtaataataaatctaattaattaaaaaaataaaagacatattaaaaaatcataatattttttatgaaatttaaaatattaattgtatttgttaatacttgtatcaaaatcttaaactatcttataaaattgaatagagagagtatactactccaaacttaaatttaattaaanaaatttaatcaatttttatgttaattaaacaaatcggtttatatcgttaattttactatttgcatttaagaaatttttttcttctaaattagtaactttcattaaaatctgatattaataataaaaaaatgacacattaaaaatagaatctcaaataatanaaaatatttttttta

SEQ ID NO: 250577 - DNA, 346 bp, Glycine max
aaataatttaagatactatgatgagagcacggttccgggtactgttgctgggacttgttttcctggcttcagttattgtctcatttgacattgcttactgggaaaaagagaaccccatacactacaagtgtattcagagttgcaatagcgagagagactcgtacaggaaccaagcatgcctcgctcgttgcaacctacttaaggtggagaataatagatcaatgtgatgaaagtgaaactccatgaccacatatcacgaccacatacatctgtacagggaacctcagcaacccttctagaatgatgactacgattatgagctgccacgtacaatcccattctgacg

SEQ ID NO: 250578 - DNA, 402 bp, Glycine max
ggataagccaaaactgaatctcgaggaagataactacaatgaagcaagaggaatggatgattacgacagcgttgctatcgttgctggttgtttcatattttccgacggtagattacggagtcgttcctcctcgtactctgctcaataagctgtcagacggcaaatatctcaacacttacgagctttggttcgaccaaaccctcgatcacttctatcactatgatcaccgtacaatttcggcaacgttactatgagtcactagactatttccggattcccgatggaccaattgttttggtaataggtggtgaaggtatattgaatggagtagctaatgactatctcgctgtactggcaaagaagtctcgagcagctatggttactcttgtacattgctactac

SEQ ID NO: 250579 - DNA, 413 bp, Glycine max
aagggaacggtgagttttggtaagagaaggaacaagacccacaccctgtgtgtgaggtgtggccgccgcagtttccacctccagaagagtcgttgcgccgcgtgcgctttccccgctgcgcgcaccaggaaatataactggagcgtgaaggccattaggagaaagaccaccggaactggaaggatgaggtacttgcgtaacgtgccccgtagatttaagagtggcttcagagacggtaccgaagctgcacccaggaagagaggagctgctgcctctacctaagctttgaataatagcaatttttgctgggtcagtgaattatataggatttaatgtttctatgctgatgccgagctctttggaacacgtttctttctggcgtcttaatttcatttaatatgtagtggctttgt

SEQ ID NO: 250580 - DNA, 335 bp, Glycine max
atcattccgagcgtccttgctaaacgtcgcactcactggatgaagccaagaactgccaggcccagatgggcaatgatctggccaaactcgaggcgagcgctactgacgtatactctaatcacggtgagcaccgatgatgtcgacatcttgagcaaggtctatgttcgtgaccactatctaacttgcatacccattagtgagatcgactacactgtcaaatgcgcatgcagctacatcgcatcaggggaaatttcacacccattatcgatgaacgcccaggacacggccatagcggatgtgcctgatgcggttgcatacagcatattgctcagctt

SEQ ID NO: 250581 - DNA, 361 bp, Glycine max
cggctcgaggtgagaaacaaagaaaggaaataattgatctttgaaaatgcagggaggaaagaaagctggagagtccatcaaggaaacagctgcaaacattggtgcttctgccaaggctggcatggagaaaaccaaggccactgtccaggagaaggcagaaagaatgacggcacgtgatccgatgcaaaaggagttggcaacccagaagaaagaaggcccaaaagatgagccaggcagagctggacaagcaagcggcgcgtcagcataacacggcggcgaagcaggctgccacggcagggcacatgggacaacccatggggacccatcagacgtcagctatgcccggtcatggaaccggaca

SEQ ID NO: 250582 - DNA, 365 bp, Glycine max
  unsure (1)..(365): unsure at all n locations
ctgatcctgattctggtaaaggaaagagcaagatgaagaagaacataactcatggctttcacttggtaaaggggagatcaggtcatgccatggaagactatcttgttgctcaattcaagcaagttgacgacaatgaattgggtttatttgcaatatttgatggccactcaggtcacagtgtacctgattacttgaagtctcatttgtttgataatatncccttctgaaagagcctaacttctggacagaacctgctgaggctgttaagagagcatatggtataactgattctactattttagacaaatcaggtgaattgggtagagggggttcaactgcggttactgcaatattgatcaactgtc

SEQ ID NO: 250583 - DNA, 374 bp, Glycine max
cgcttcagcacaatgggtgcctacaagtatgtttcggagctatggcgcaagaagcagtctgatgttatgagattcttgcagcgggtgaggtgctgggagtatcgccagcaaccttctattgtccgtttgacaaggtctactcgcccagataaggctcgtcgcttgggtttcaaggctaagcagggttacgtgatttaccgtgttcgcgttttaacgaaggggtggccgtaagagaccagttccaaagggtattgtttatggtaagcccaccaaccaaggtgttactcaactgaaatttcaacgcatcaagaagtctgttgccgaggagagagccggaaggaagttggatggcctcagggttctcaattcatact

SEQ ID NO: 250584 - DNA, 298 bp, Glycine max
tcagtttggtataaccttagccgaggtcacgaggagcactagctagtttcacaatttccaaatggctaggggattgaagaagcatctcaagaggctcaatgctcctaagcattggatgcttgacaaactgggtggtgcatttgcgcccaaaccctcatctggaccacacaaatctagggagtgccttcccctcatactcatcctacgaaaccggctaaagtatgctctgacttaccgtgaagtcatcgctattctgatgcagagacatggtctttgtgatggaaaagtcaagactgac

SEQ ID NO: 250585 - DNA, 392 bp, Glycine max
  unsure (1)..(392): unsure at all n locations
ctcgtaaatgtgttacgagaattgtatttgcacagtccagaggaagctcgccaattgagaaggaaagctctctctcgtattgaatggctgcaaaaagctgatgtgcctactatagcacagattgaagagttccattcgatgcagaggatgatgaatgctcctgattcaaatgataacatcgatctactgttgagcattgatctgttgggtttacaaggagcaggtaaagcttttccaaacaagattgtttttgatgataagcttgtgttggctaacacacaagaattctttgatggaaattttccagtggattcttggttaccaatttttgtgaattgtctttatcctgtaagtcaattaccttcagaagctgtncgtgtgaatgttacatg

SEQ ID NO: 250586 - DNA, 396 bp, Glycine max
ctcgtaaatgtgttacgagaattgtatttgcacagtccagaggaagctcgccaattgagaaggaaagctctctctcgtattgaatggctgcaaaaagctgatgtgcctactatagcacagattgaagagttccattcgatgcagaggatgatgaatgctcctgattcaaatgataacatcgatctactgttgagcattgatctgttgggtttacaaggagcaggtaaagcttttccaaacaagattgtttttgatgataagcttgtgttggctaacacacaagaattctttgatggaaattttccagtggattcttggttaccaatttttgtgaattgtctttatcctgtaagtcaattaccttcagaagctgtcgttgtgaatgttacatgtggt

SEQ ID NO: 250587 - DNA, 380 bp, Glycine max
catgcaagccccactcaaccaccacacctctactcgttcacgctaccgctttctgctctacttctacctttcaagttttaaaagtataaagatggcagagacattcctatttacctcagagtcggtgaacgagggacaccctgacaagctctgcgaccaaatctccgatgctgtcctcgacgcttgcctcgagcaggacccatacagcaaagttgcctgcgaaacatgcaccaaaaccaacttggtcatggtcttcggagaaatcacgaccaatgccaacgttgactactagaagatagtgcgtgacacctgcaggaacattcggcttcgtctcaaatgatgtgggactggatgccgacaactgcaaagtcctcgtcaac

SEQ ID NO: 250588 - DNA, 389 bp, Glycine max
  unsure (1)..(389): unsure at all n locations
catttggatgcacgccatctaacaatccgatcacctgcgagtggtaaatatgatcttgaaattgttacagatatttgtccacagaaaaacacatcattagagggactgtacaaatcatctgggaatttctgtactcaatgtgaggctgaaggctttcgtaagattacatattatcaggatcgacctgatataatggcaaaatatacagttcgcattgnagggtgcatatgaatcactgtattcagtgttattgtctaatggaaacctagctgaacaaggtgacttagaggatggcatgcactatgctgattgggaggaccacttcaagaaaccttcttatctgttagccttggttgctgggcaattgcagagcagagatgacacattta

SEQ ID NO: 250589 - DNA, 330 bp, Glycine max
ccttagtatcacttcccttagtccaatatggggaaggggttcttaactctatctctatcatcactatgcttgctactcttgtacaatgcatgctttgctattacctcacacaagtctaacgagtgacaactaatacaacctcaacacgttgcaaccctaccaccattcttgagtccgaacgtggctcttatctaaacatggaactatcaccgcaataccagatctgcattgcacctggtcactgctaacaatcccacccttaaccgcaacggactacacttgccatctcactcaccttatccgtaactgatcattctcgctcaagggaaa

SEQ ID NO: 250590 - DNA, 387 bp, Glycine max
tagttcagtgtctacaataccaggtgattttgtcattggtgttaacttgacaaccataaacaatatgtgtgcatatgggctcaatcctggtatttcaggttctcgtcttttgggcaccattcctcagtccatttcacaggaaactgtttggaatcaaatggcaacagtgagaacaccattgaattttgattctagcaagcatagcttgtgtcaattctctattgatcttattggtggaggaattttagtggacaaaactggagattggatcacacttatacaaaattctgcaattagcaacttgttgagagttgctgcttggaagaaaagctgtttaatggttaagattgcgatgtctgggaatgcagcagtcaaaacgagtgattg

SEQ ID NO: 250591 - DNA, 403 bp, Glycine max
cgcaaatcttttagataaatctctaaaggaattagaaagtggagtatactgcgatgtgtgatttgataaaaatttttattgtacagattccgaatgagaaattgtcattccatttaatttaattgggatgccctgaatctgacatgtctcttggaatgagtaacatgaaactcagaattatggatgtattgaatactccctaataaaaagggaattggtctatggtcaattcagtaacaaaaaatatgaaattataaatataaatttctaactgtacgtacctagtgaaaaaaaaaatattttttcttgtagaattagcgattccatcttttttagaaagaactgaaattatgttcaaataagcaaatatatcgtggttgcagaagtctatacatcgcatata

SEQ ID NO: 250592 - DNA, 399 bp, Glycine max
cagttcagtgtctacaataccaggtgattttgccattggtggtaagttgacaaccataaacaatatgtgtgcatatgggctcaatcctggtatttcaggttctcgtcttttgggcaccattcctcagtccatttcacagcaaactgtttggaatcaaatggcaacagtgagaacaccattgaattttgattctagcaagcagagcttttgtcaattctctattgatcttcttggtggaggaattttagtggacataactggagattggatcacacttatacaaaattctccaattagtaacttgatgagagttgctgcttggaagaaaggctgattaatggctaagattgtgatgtctgggaatgcatcactcaaaaagagtgattgggcctcattggt

SEQ ID NO: 250593 - DNA, 384 bp, Glycine max
  unsure (1)..(384): unsure at all n locations
gtctcaaagagaaccacgaagacataagaataagaacgcttttcagttcaactctaaaaggttccaaactctcttcaaaaaccaatatggccacgttcgcgtcctccagaggttcaacaaacgctcccaacagcttcagaatctccgagactaccgcattttggagttcaactccaaacccaacacccttcttctcccccaccatgctgacgctgnanttttacctcatcgttatccttaacgggactgccattcttaccttggtgaacaacgacgaccgagactcttacaaccttcaatctggcgatgccctaagagtccctgcaggaaccacatactatgtggttaaccctgacaacgacgagaatctcagaatgataacac

SEQ ID NO: 250594 - DNA, 430 bp, Glycine max
  unsure (1)..(430): unsure at all n locations
aaagacctattaccatgcatgcacgcgtactttagctcatcatntcggtcaatgcccaattcacattttcaagaaataaggaggcaaaagtgttcatatatgaattggaattattagttttcttattaggcctatcctgaagccaaaggaaatgagatcggaattcctcggggaattccaattccacattttcaagaaataaggaggcaaaaatgttcatatatgaattggaattatttgttttcttattaggcctatcctgaagcccanaaaaaggaaatgagatcggaattcctcgtggaattccaattccacattttcaagaaataaggacgcaaaaatgttcatatatgaattggaattatttgctttctttattaggcctatcctgaagccaaaggacatgagatcggaattctcgggggtaccg

SEQ ID NO: 250595 - DNA, 350 bp, Glycine max
cttgtctctgaacactcatcaccatggccaagcttggggtttacctttgattccttattttcagtggctgcattgctctgagagagcatgcacagcaaaatgagtgccagatccaaaagctggatgccctcataccggataaccgtatagagtcggaaggtgggttcattgagacctggaaccctgacaacaagccattccagtgtgcccccgtgcattgacctctctcgctgcacccttaaccacaatgcccttcgtagaccttactacaccaacagtgcctaggaaatctacgtacaacaaggttatggtatttttggcatgatattcccgggttgatctagcactta

SEQ ID NO: 250596 - DNA, 361 bp, Glycine max
gttcaatatcctagtataccttaataaataatttaagggactatgattagagcacggttcccattactgttgctgggacttgatttcctggcttcagtttctgtctcatttggcattgcttactgggaaaaagagaaccccaaacacaacaagtgtctccagagttgcaatagccagagagactcgttcaggaaccaagcatgccacgcttcggaattgcaaccttcttaaggtggagaaagacgaatgtgcacaaggtgaaattccacgaccacgaccacgtccacaacacccggagagggaacctcagcaaccccgtgagaaagatgtagaccaagatgagccaccacgtccaatccca

SEQ ID NO: 250597 - DNA, 288 bp, Glycine max
ccattcttgaacaacatgccaacatcaggtgtgtacggtcacgcatggcaatttgtaagaaagatgtttggagagttgaatgtggaatcccttctggatttccgctcacaggtatttgtaatagcatttttaatgagatgctcattagatatagctatgaaaaattactgcgccaggagagacttgttcaggtgccaagcatgccacgccgttttgatgcatccttcttacggtggagaacagacgactgtgcataatgtgaaattactcgaccaggattgcctccac

SEQ ID NO: 250598 - DNA, 502 bp, Glycine max
  unsure (1)..(502): unsure at all n locations
agaggtnttnctagagttctcgcatcgatnctacagcatgatacagtagacactatagaagagctatgacgtcgcatgcacgcgtacgtaagctcggaattcggctcgagcacctgtcggaccccaaacgatggtgaactgtgcctgagcacgcctaacccagtaggaaaactcttggtaggcctcttactatactgacctgcaaatggttcgtcctgattgggtataggggcgaaagactaatggaaccgtctagtagatgtatccctccaaaagttccgtgacgatagctggagcccgcgggcgagttctatcgggtaataagggccaatgattagaggcatcggagacgcaacgccctcgacctattctcaaactttaaataggtatgacggtgcagttgctctgttgagccgcgccatggaatcgaaagctccaagtgggccagttttggtaagcagaactggccattcgggatgaaccggaagcttggttacggtag

SEQ ID NO: 250599 - DNA, 392 bp, Glycine max
gaaagctctgtctcgtattgaatggcttcaaaaagctgatgggcctaccatagcacagattggagaggtccattcgatgcataggatgatgaatgctcctgattcaaatgataatattgatctactgatgagcattgatttgatgggtttacaaggagcaggtaaagcttttccaaacaagattgtttttgatgataaacttgtgctggctaacacacaagaattctttgctggaaattttccagtggattcttggttaccaatttttgtgaattgtctatatcctgtaagtcaattaccttcagaagctagtcgtgcaaatgatacatgtggtagtggacgtggtggtttacctaccactgcttggattaggtctgcaggtaacaatcgct

SEQ ID NO: 250600 - DNA, 379 bp, Glycine max
  unsure (1)..(379): unsure at all n locations
gaaatgactaatggaggagtagatcgtgctattgaatgcacaggaagcatccaagcatcaatctcggcatttgaatgcactcatgatggttggggtactgctgtccttgttagtgtgccaaagaaggatgcagaattcaaaactcatcctatgaagttcatggaagggagaactcttaagggtaccttctatggtcactatagaccccgcactgacatttnttcctggtgttgtggagaagtacctcaacaaggagctggagctggacaaatttatcactcactctgtcccattctcagagatcaacactgcatttgatcttatgctgaaaggggagggaataaggtgcctcatctgcatggaagagtaaatcaatgat

SEQ ID NO: 250601 - DNA, 382 bp, Glycine max
ctacaatcacgagggcgaggtttgaggaaatgaacatggatttggtcaggaagtgcatggagccggtggagaagtgtttgcgtgatgccaagatagacaagagtcatgttcatgaggttgtgcttgttggagggtccactaggatccccaaggttcagcaactcttgcaggatttcttcaatgggaaagagctttgcaagagcattaaccccgatgaaaaaaactgttgcatacggtgcttcagttcaagctgccatcttgagcggtgaaggagacgagaaggttcaggatttgttgctgctggatgttacacctctcagtctcgggctcgaaactgcgggtggtgttatgactgtactaattccgcggaacactacaattc

SEQ ID NO: 250602 - DNA, 376 bp, Glycine max
cttctcttgcggctagggttttagcgcagcttcttctagatttaatgaagatgggtaaggaaaaggttcacatcagtattggggttattggccatgttgactctgggaagtccactaccactggccacctgatctacaagcttggaggcattgacaagcgtgttattgagagatctgagaaggaagctgctgagatgaacaagaggtctctttttcaagtatgcctgggtgcttgataagcttaaggctgagcgtgaaagacgaatcacaattgatattgccttgcggaagttcgaaaccaccaagtactattgcacagtcattgatgcccctggacacagggatttcatcaaggacatgatcactgggacattcc

SEQ ID NO: 250603 - DNA, 388 bp, Glycine max
ctcaaagaaattaagagagttttttttgttcctcactgaccaagccatggcgatgagaaccaaactttctttagctatctttttcttttttcttttagccttattttcaaacctagcctttggcaaatgtaaagaaaccgaggtagaagaagaagaccctgagctcgtaacatgcaaacaccaatgccaacagccacagcaatacacttgaagggggtgacaagcgggtatgcttgcaaagatgtgacaggtatcatcgtatgaagcaagagcgagagaaacaaatccaagaggaaactcgtgagaagaaagaggaggaaagccgtgaaagggaagaagaacaacaagagcagcatgaggaacaagatgaaaatccctacatttttga

SEQ ID NO: 250604 - DNA, 359 bp, Glycine max
ctgtttttttgctgagaagagagaatggctgtggcgtggtcatcatcccttatcacgttgaaggtgaaaccttgcattttcgggtctcctcggagatccgcggtggatcggaattgtgcgaagtcaacggcggggacaatatcgacgagttggagcctggacagttggagggcgaagaaggcgcttcagcttccggagtacccagatgcggaaagatgaattggacctagtccttcaaaccctatgttcttttcccccaatcgtcttcggcggcgaggcgaggaatctggaggagaagctagctcaggctgccatggggaacgcttatctgcttcagggcggtgattgcgccgagagct

SEQ ID NO: 250605 - DNA, 406 bp, Glycine max
gaccggactggcattcttaccttggggaacaacggccaccgggactgttacaaccttcaatctggggattccctaaaagtccctggaggaaccacatactatgtggttaaacctggcaacgacgagaatctcagaatgataacactcgccatacccgttaacaaacccggtagatttgaaagtttcttcctatctagcactcaagctcaacagtcctacttgcaagggttcagcaagaatattctagaggccttatacgacaccaaattcgaggagataaacaaggttctgtttggtagagaggaggggcagcaacaaggggaggagaggctgcaagagagtgtgattgtggaaatctcaaagaaacaaattcgggaactgagcaaacatgccaaatctagttcaa

SEQ ID NO: 250606 - DNA, 334 bp, Glycine max
cagctgcacaaagcaggtgaccggatggtcaagctaccatgtgtctctgtctctcttagcgcctacgagcccgaagagtatatggcccacgagaccaatgtattaacatctgactcaaaccacgaggggcaccacgacaagctctgcgaccagatctacgatgctatgctcgacgcatgctagctacagaaccatgacagcaaggttgtctgtaacacctgcactatgaccaacatggtgacagcttacgagtagatcacgaccgatgccaacgtgaaatatgagaagaatgtgctaacacatgcatgaacattgggctgtatctgatgatggt

SEQ ID NO: 250607 - DNA, 402 bp, Glycine max
atgcaatggttcatggtaggtcagggtctacaataccaaggggccttggcattggcgtcaagttgacaaccattaacagtatgtgttcatataggctcaatactggtattataagatctagcctcttgggcaccattcctcagtccatttaacagcaaactgtttggaatcaaatggcaacagtgagaacaccattgaactttgactctatcacgcagagctattgtcagctttatattgaccttctcagtggaggaatcttagtggacaaaactggagattggatcacacttatacaaaattctacaattagtaacttgatgagagatgctgcttggaacaaaggctgtttaatggtcaagattgtgatgtctgtgcatgcaacaatcaatacgagtgatt

SEQ ID NO: 250608 - DNA, 65 bp, Glycine max
aaaaaaaaaaaaaaaaaaaaaaaaaaaaaaaaaaaaaagaaaaaagaaaaaaaaaaaaaaaaaaa

SEQ ID NO: 250609 - DNA, 373 bp, Glycine max
caccaattaagctttcaagagacatactgcgttgaaaggtggcatgccaggttgtggcatccgtcgcccttctgctctccatcaacattcttctcatttccatggttagctccagcagccactacgatccacagcctcaaccttctgacgtcactgctcttattacacgacctacttgtccggatctgagtatatgcctcaatatttcaggcgggttcccatctaggaaccgtggatgatcgatgtgccctcatcggtggccttggtgacattgaagccattgtgtgcctttgcatccaactcatggccttcggaatattaaaccttaaccgtaattagcagttgatattaaactcctgtggacgaagctacc

SEQ ID NO: 250610 - DNA, 390 bp, Glycine max
  unsure (1)..(390): unsure at all n locations
tattaacactttccttagttcaatatggggaagccctgcttcactctctctctttcttccctttgcttgctactcttgtcgagtgcatgctttgctattacctccagcaagttcaacgagtgccaactcaacaacctcaacgcgttggaacccgaccaccgcgttgagtccgaaggtggtcttattgaaacatggaactctcaacaccctgagcntgccnaaatgcgccggtgtcactgtttccaaacgcaccctcaaccgcaacggcctccacttgccatcttactcaccttatccccaaatgatcattgtcgttcaagggaagggagcaattggatttgcatttccgggatgtcctgagacgtttgagaagccacaacagcaatcaag

SEQ ID NO: 250611 - DNA, 327 bp, Glycine max
attcacgcgaagatagtatacaccttgatcaggcctgatggaaccaggaaggcctatgtcaggttgtcacctgattatcacgccttgtatgcggtcaacaagattggaattatctaaactaatatatggtcttaccaaagtagattcgtgtttagatggtagtttgctatggagtgtagaggggagacatttgaagcaacattaagttatttaaaaatgctcggttgggtatctgctgtattctagatcaatcggaattatatttactcatgttacattaccaaaaggacatctgaaggccacaaaccctatatgggactcgttgat

SEQ ID NO: 250612 - DNA, 373 bp, Glycine max
gttcaatatggggaagcccttcactctctctctttcggccctttgcttgctactcttgtcgagtgcatgctttgctattagctccagcaagctcaacgagtgccaactcaacaacctcaacgcgttggaacccgaccaccgcgttgagtccgaaggtggtttgattcaaacatggaactctcaacaccctgagctgaaatgcgccggtgttcccaactgtttccaaactcaccctcaaccgcaatggcctccacttgccatcttactcaccttatccccggatgatcatcatcgcccaagggaaaggagcacttggagttgcaattccaggatgtcctgagacgtttgaggagccacaagaacaatcaaacag

SEQ ID NO: 250613 - DNA, 327 bp, Glycine max
tgcagaccgagctagctagctggcaagcatgcacagaaatggaggcagggcgaggccatactctgatgtgcttggcacgtgttttactcttcctctgagctctaaccctatgcgctgatcacggaagcaccacggttcaagacatggcgagaaagtcgaaactcgtcggcaacgtgcttctgagcacggagaagaagttcaaggcattcatggagaattactggaggagctactccacaaaggatgtgtatctgcgccgattcaggattctctaccagatcatagtcacagcgtcggagcatcagactctggaccccatcgtcgatc

SEQ ID NO: 250614 - DNA, 386 bp, Glycine max
ggcaaaccgaactttctttcttgcaagctaacacagaaatggaagcagggccaggccataccctgatgttcctggcacgtgtttcaatcttcatacgcgctctaaccctatgcgctgctcacggaagcaccacggatcatgacattgcgagaaagttgaaactcagcgacaactagcttctgctcactgagaagaagttcaaggttttcatggagaattacaggaggtgctactccacataggaggagtatctgcgccatgaccggattctcgcccataacatggtcagagctgcggagcatcatgcgctggaccccaccgtcgagcacggcgtcacgcagtactgccatctcactgaggacgagtttgagaagctgtacactggc

SEQ ID NO: 250615 - DNA, 376 bp, Glycine max
atctacatttaatcacaatcttcctcaatcatgtcttcagggacataagcagaaacacaaactttgaccacccactcttactcctcagatgttgacaatggtatagtgaaggatgtagtcctatggagaagaaagataatatgtataagcgttcttgttgcagcaacagcggcatgggtgttgatggaagtgttagaattcaacttgctcactctcatatcatgggtggccatactcggtcttgcttgaatattcctctatgccaatatgcttatacttttgggcaaggaaccaccgaacttgttgaggttggaagcgagtgaaacaacatcaacgagaatagcacacacagtactagcatggattgaagaacgaa

SEQ ID NO: 250616 - DNA, 375 bp, Glycine max
cggctctaggccctgacttcttcgaccctaaagctggtcggggtaatggccctaacaggatcatggttgccagcctccggcaatttccactcagtgcccaatatgttgtactatacaagaatgggatgtactctccacattggaatctgaatgcatacagtgtgatctatgtgactcgaggactaggtaaggttagagtcgtgaactgtcaagggaatgcattgttcgacggtgagcttaagacgggacaattgctggtggtaccacagaactttcgtgtggcggtcaagctggaaacatggattcgtatacatcgtattcaagacacaccacatcgcatacactaactacactgaaggatgcgtgtagggcaat

SEQ ID NO: 250617 - DNA, 389 bp, Glycine max
gaacaccattgaattttgattctagcaagcagagcttgtgtcaattttctattgaccttctcggtggaggaattttagtggacaaaactggagattggatcacacttatacaaaattctccaattagtaacttgttgagagttgctgcttggaagaaaggttgtttaatggtcaagattgtgatgtctgggaatgcagcagtcaaaaggagtgattttgggggcctcattggtacaagtgtttttaacaaacagcaacagtacagagcattttgatgcatgtaagtggacaaaatcagaaccacattcctgggaattaatcttcccaatagaggtatgtggtcctaataatggttttgaaatgtggagttctgagtgggcaaatcaaac

SEQ ID NO: 250618 - DNA, 349 bp, Glycine max
caatactttcaccatctcgtggcatgctgtgcattgcggtggcaggacatattgagactctcttctagttgcagcatatcatctcaacggatcatattggaccgcgacgcatcaaaggggacgacacagaaactggtgtactcagtgactcaactgtagtaaagatagcatgtacttgtctagcatagacactagacaatagtcatgacagactatgtgaaatttatatgaagaataacttgaactatgtaaagctcatgaatgcatacagaatatcactccattttaatagattaggattgaacaagtgtgctgacattacttctcaggagatcagcaaatagtactt

SEQ ID NO: 250619 - DNA, 149 bp, Glycine max
ctcgagccgctcgagccgttaaaataacacacacttcacacatcattacgacaattaaaagaggtgtggaaattttcaaataggcagagcatactcaacaagagggtcatgcctaatttcctttattgaattaaacaaacgaacaagtg

SEQ ID NO: 250620 - DNA, 380 bp, Glycine max
  unsure (1)..(380): unsure at all n locations
ctcgagccgattcggctcgaggcaagcagagcttttgtcagttttctattgaccttctcggtggaggaatcttagtggacaaaactggagattggatcacacttatacaaaattctccaattagtaacttgttgagagttgctgcttggaagaaaggctgtttaatggtcaagattgtgatgtctgggaatgcagcagtcaaaaggagtggnaaattgggcctcattggtacaagtgtttttaacaaacagcaacagtacagagcattttgatgcatgtaagtggacaaaatcagaaccacattcctgggaattgatcttcccaatagaggtatgtggtcctaataatggttttgaaatgtggagttctgagtgggcaaa

SEQ ID NO: 250621 - DNA, 491 bp, Glycine max
  unsure (1)..(491): unsure at all n locations
aggtntctcggtcttttactgaactacgacagctactgtagcactatagaagagctatgacgtcgcatgcacgcgtacgtaagctcggaattcggctcgagggattctacccgccgctcgatgggaattgcgcttcaaggcgtctcgtagggctaatccgcctaacgagggtcaccaacggcacgtgcctttggggggccaaggccccttactgctggtcggcaaacggacggcggccgcacgcatcgcttatagcccggattctgacttagaggcgttcacccataatccaacgcacggtagcttcgcgcccccaagtggcttttaaaccaagcgcgatcaccaattgtgcgaatcaacggttcctgtagtactgaggagaattactattgccacactgtcatcagtagggtaaaactaacgtgtctcacgacggtctaaacccagctcacgttccctattggtgggtgaacaatccaacacttggtgaa

SEQ ID NO: 250622 - DNA, 374 bp, Glycine max
  unsure (1)..(374): unsure at all n locations
atcctncacgacgaccaagccatggaaagcatgaacatgacgaggacgaggacgaagaagaagatcaacctcgacctgatcaacctacacagcgaccaagcaggccccaacaacaagaaccacgtggaaaaggatgtcagactagaaatgtggttgaggaaaatatatgcaccatgaagcttcacgagaacattgatcgcccttcacgtgctgactactacaacccacaagctggtcgcattagcaccctcaacagtctcaccctgacagccctatgccaattcggactcaacgcccaatatgctgtcctatacaggcatggaatttactctccacattagaactagaactcgtacagtgtgatctatgtgact

SEQ ID NO: 250623 - DNA, 371 bp, Glycine max
ctcattgtccaactacatttcttccacctactgataaaatcctcatatgtgctcccaaaagcttgattgtgagaatggctttgggtgaattgagattcccacctcaacaacaacgaacacatcctgggaaggagcatgctatgaatccagtaccccaattcactagccctgactacaagccttcaaataaacttcaaggaaagatagcattagtgactggcggtgactctgggattggacgagcggtgtgtaacttgcttgccttagaaggtgctaccgtgggcttcacatatgcgaaagggcatgaggacaaggacgcgagggacacgttggaaatgatcaagagggctaatacttcggatgctaaagat

SEQ ID NO: 250624 - DNA, 262 bp, Glycine max
  unsure (1)..(262): unsure at all n locations
agcgactcactgaccaaggcatggtgatgagcaccaagctctatgtacctagccggtgcgggtgtctgaaagccttataggcagacctaggcttcggcaaatgtaaggaaaccgaggtggaagaagaagaccctgagctcgggacatgcagacaccaatgctctcagtcacagcaatacactgagggtgacaagctggtatgcttgcaaagatgtcgcnaacatgattcatggtctgacgcatgacctagagagacacatcc

SEQ ID NO: 250625 - DNA, 369 bp, Glycine max
  unsure (1)..(369): unsure at all n locations
gcaaaatgaccaagttcacaatcctnctcatctctctggtcttctgcatcgcccacacttgcagcgccttcaaatggcagcaccagcaagatagctgccgcaagcagctccagggggtgaacctcacgccctgcgagaagcacatcatggagaagatccaaggccgcggcgatgacgatgatgatgatgacgacgacaatcacattctcaggaccatgcggggggggaagaatcaactacataaggaggaacgaatgaaaagacgaagacgaagaagaagaaggacacatgcagaagtgctgcacagaaatgagcgagctgagaagccccaaatgccagtgcaaagcgctgcagaagataatggagaac

SEQ ID NO: 250626 - DNA, 369 bp, Glycine max
  unsure (1)..(369): unsure at all n locations
cgttcatttctacacatccctagctctgtcgttccgtcgttgacggtggcgtttcgggtgcgaagccctgacctccgctctctctttcttctctctctcttgtccatcgcttccgccaatgtcttcttcgaagagcgtttcgatgacgggtgggaaaatcgatgggttaaatcacattggaaaaaagatgagaacgtggctggtgagtggaaccgaccccacctctggtcaatggaatggagacgctaatgacaaaggtattcaaaccagtgaggattacagattctatgctatttcagctgagtaccctgaattcagcaacaagggtaagacactagtctntcaattttctgttaagcacgaacagaa

SEQ ID NO: 250627 - DNA, 323 bp, Glycine max
gggctaaagagaggcttattgaatgccaaggcttgagacttgatcatgacttgaccgctaattacgtctataactatgccggggaaacggctcatatgtcagtggactatgccggtgacactgctcagaataccaaagactatgccggtgacactgctcataaaaccatggactatgccagtgacacatgcacatacgtcaagggactaatgttccccggtgatgctgttcagaagtcactggctcatgtccgtgatgctgcacataagaccagcgaatataatggtgatgctgctcataacaccattgattataccactgat

SEQ ID NO: 250628 - DNA, 380 bp, Glycine max
  unsure (1)..(380): unsure at all n locations
attccactataggagaaagttctaataatctcgatgaaagtcaaaaatataagcatttgtggcttgaatgcgaaaattgttatggattaaattataaaaaattttttaaatcaaaaatgaatatttgtgaatactgtggatatcatttgaaaatgggcagttcagatagaatcgaacttttgattgattcgggtacttggaatcctatgggattngggaagacatggtttctctggatcctattgaatttcattccgaagaggaaccttataaagatcgtattgattcttatcaaagaaaaacgggattaactgaggctgttcaaacaggtactggtcaactaaatggtattcctgtagctattggaattatggattttc

SEQ ID NO: 250629 - DNA, 331 bp, Glycine max
gccacagggtggagtgctgcacattattctactgagaggactgtggagggaaccaaggctgcaacaaatgttgttaagggagttgctgaatatgcaggacagaaggcttctgagcttgcagctatgtcagtggatactgcgaaaggtttagctgctgctgcagctggggagaatgccaaggagtacactgcaaggaagaaggtggaagcctttggagatggatttggaggccaaaagggaagctcaaaatcaggaatcgaaggagtggccatcagcaaaatccaccactgagagcattcaaagaggacaaggacaacaagaacagcatgag

SEQ ID NO: 250630 - DNA, 359 bp, Glycine max
  unsure (1)..(359): unsure at all n locations
gccacagggtggagtgctgcacattattgtactgagagaactgtggagggaaccaaggctgcaacaaatgttgttaagggagttgctgagtatgcaggacagaaggcttctgagcttgcagctatgtcagtggatactgcgaaaggtttagctgctgctgcagctggggagaatgccaaggagtacactgcaaggaagaaggtggaagctgaaagnaatggatttggaggccaaaagggaagctcaaaatcaggaatcgaaggagtggccatcagcaaaatccaccactgagagcattcaaagaggacaaggacaacaagaacagcatgagcaaggagaaaaatgggaacatggtgcac

SEQ ID NO: 250631 - DNA, 137 bp, Glycine max
aatgaataaaagaaacaaaggcttaaatgccctttgttaagtgtagaataacgggtatagtaactatgtacccttgtgtaatgagtcactcaagtacctatgcgggaaaagcataaataaaagaagaaattccaata

SEQ ID NO: 250632 - DNA, 332 bp, Glycine max
ccaatgtctatacattcattatatttctgtgtaaatggaggaaagactcgatggaaaaatggtggtttaattctatgttgtttaataggaagttagaatacaagtgtgaattaagtatatcaatggatagtcttggtcctattgaaaatacctgtctaagggaagaccctaaaattttaaccgatgtagaaaaaatgattcacagggatttggattatttagaaatggaaggtgttttttctagcgatctgaatactgtttctaacaatgatgactatcattacatgtattagacttaatttagatgtaacaatgattttactagtttcatt

SEQ ID NO: 250633 - DNA, 325 bp, Glycine max
gcagattgaaccagacatgaattcaaggtttcagcttttgagtaccactaccaatggtgattttgttcaagggaaagatctcgcaatggttaaagttaatgtagcatgtgctgctgttggcttgacatcaagttacactccaactccattgttggaatctggtttgcaaaaagacagagggttaattgtggagtattttggaaggatgtcttacgttgctcataacgttaatcagccccaagagaaagatttgttggagggaaatttttcctttgatattaaatctcgctctagattggaaaaagtttcctctacaaaagcacaa

SEQ ID NO: 250634 - DNA, 364 bp, Glycine max
cacttatacaaaattctccaattagtaacttgttgagagttgctgcttggaagaaaggctgtttaatggtcaagattgtgatgtctgggaatgcagcagtcaaaaggagtgattgggcctcattggtacaagtgtttttaacaaacagcatcagtacagagcattttgatgcatgtaagtggacaaaatcagaaccacattcctgggaattgatcttcccaatagaggtatgtggtcctaataatggttttgaaatgtggagttctgagtgggcaaatcaaacttcatggcatttgagtttccttattgacaattccaaacagtctacagcttttgatattctcttgggaatctctcaagattt

SEQ ID NO: 250635 - DNA, 372 bp, Glycine max
gcacgacgtgagagagattgtgaagtagaaatcggtgcaagaaattctccactttatctaaaaaaattcggtgagtttgtgaagacaaaaaatcactagctactcaaaaatggccacagtaggaaggaacgttgcagctcctttgctgtttcttaacttgatcatgtattttattgttcttggctttgctagttggtgcctcaacaggttcatcaatggccaaacttaccaccctagttttggtggaaatggtgcaaccatgtttttcttaaccttctccatactagcagctgttctgggcatcgtgtccaaacttttgggtgggaatcacatgaggacattgaggagtgacactttatcatctgcaggagc

SEQ ID NO: 250636 - DNA, 359 bp, Glycine max
cctcagtattggggatatgaacgagggagctcttctgctaccacacttcaattcaaaggcgatagtgatactggtaattaatgaaggagatgcaaacattgaacttgttggcctaaaagaacaacagcaggagcagcatcaggaagagcaacctttggaagtgcggaaatatagagccgaattgtctgaacaagatatatttgtaatcccagcaggttatccagttgtggtcaacgctacctcaaatctgaatttctttgctattggtattaatgccgagaacaaccagaggaactttctcgcaggttcgcaagacaatgtgataagccagatacctagtcaagtgcaggagcttgcat

SEQ ID NO: 250637 - DNA, 326 bp, Glycine max
cttaaacactcatcagtcatcaccatggccaagctagtttgttccctttgttttctgcttttcagtggctgctgcttcgctttcagttccagagagcagcctcagcaaaacgagtgccagatccaaaaactcaatgccctcaaaccggataaccgtatagagtcagaaggagggctcattgagacatggaaccctaacaacaagccattccagtgtgccggtgttgccctctctcgctgcaccctcaaccgcaacgcccttcgtagaccttcctacaccaacggtccccaagaaatctacatccaacaaggtaagggtatttttgg

SEQ ID NO: 250638 - DNA, 517 bp, Glycine max
  unsure (1)..(517): unsure at all n locations
agttagttntaagaggtctcgtactgaagacccgccacatacagtgacaccatagaagagctatgacgtcgcatgcacgcgtacgtaagctcgtaattcccgtgtcgcctaaacactcatcagtcatcaccatggccaagcgagttggttccctttgttttctgcttttcagtggctgctgcttcgctttcagttccagagagcatcctcagcaaaacgagtgccagatccaaaaactcactgccctcaaaccggataaccgtatagagtcagaaggagggctcattgagacatggaaccctaacaacaagccattccagtgtgccggtgttgccctctctcgctgcaccctcaaccgcaacgcccttcgtagaccttactacaccaacggtccccaggaaatctacatccaacaaggtaagggtatttatggcatgatatacccaggttgtcctagaacatttgatgagcctcaacaacctcaccaaagaagacaaagctacataacccagtaccg

SEQ ID NO: 250639 - DNA, 385 bp, Glycine max
ctttgaacttagtgttgggccaaataatttgggcgttttcgtctctctcgcctgttgcttgaggacttggaaaaatccgattacccttcaaagcgcttgatcatcgttggttcaatatcacggaacacacacacattggctggtaatgtacctcccaaggctaaccttggtgacttgaggggacttcaaggtggtttgaatgggcttaacagctcagccatgattgatggtggagacttcgatggtgccaaggcgtacaaggacagcaaagtctgcaatatgctcacaatgcaagaattccacagacgatttcatgaggaaaactgaatcacatttgctttcctttaaccccggtgcattgccacaacaggcctgttcagagagc

SEQ ID NO: 250640 - DNA, 319 bp, Glycine max
ctttgaacactcatcaccatggccaagcttgttctttgcctttgggtccttcttttcagtggctgcttcgctctgagagagcaggcacagcaaaatgagtgccagatccaaaagctgaatgccctcaaaccggataaccgtatagagtcggaaggtgggttcattgagacctggaaccctaacaacaagccattccagtgtgccggtgttgccctctctcgctgcacccttaaccgcaatgcccttcgtagaccttcctacaccaacggtccccaggaaatctacatacaacaaggtaatggtatttttggcatgatat

SEQ ID NO: 250641 - DNA, 359 bp, Glycine max
caagatcgttccttttcttgggacgcatgtcgtgtttgtcttgttgtggctgctgacactatcatagttttttgttaggtgaaatcaagcccactaatgtgtgtacgcattagagaagggcattgaaacaaagtgtgatttctggtggagcttgattagtcatcttctatgctgtcttttgtaacagaaaacatgggcttactctgtagcagaaatcgccggtataatgatgctgatgctgaagaaagtgcacagactgcagagattgaaagaagaatagaattagaaacgaaggctgaaaagcatattcagaaacttctactacttggagctggagagtcatggaagtccacaatatt

SEQ ID NO: 250642 - DNA, 307 bp, Glycine max
cgcaggtgatgctgcacagaatgtcaaagattatgcaagtgatgcagtgcagaagagaaaagagtattctggtgatgcttctcacaagagcaaagaggcttctgattatgccagtgagacggctaagaagaccaaagattatgtcggtgatgctgctcagagaagcaaaggggctgctgaatatgctagtgatgcggctcagaggaccaaagagtatgctggtgatgctaccaagagaagcaaagaggcttctaatgatcatgccaatgacatggctcagaagaccaaagactacgccagtgacact

SEQ ID NO: 250643 - DNA, 400 bp, Glycine max
gggaggataagagctgctttgatggtgtgtaggcatatgccaaggatgaatgtggtggcatggaatgccatgctttgtgggttggccatgcatggtatgggtaatgttgaggtggacatgtttgctggcatgctggaagacgtgaatgctgatgctgtgactcacatagcttagtgaagttgtcgcagccattcgggtctagatgaacatgattagcagtcttaccatgaactttagcgttcttataggatcaggccatatattgagcactatgctttcaatactaatattcttggtcgagctagacgtctgaaagaagcttacgaattacattagaacatggcagattctccaaatgaaatttttatgaggtacatcaatggtgcttggtatacacact

SEQ ID NO: 250644 - DNA, 322 bp, Glycine max
aaaaaagaaagcacgttgaagattgtaacttgtaacgacaactatggctagcgatggcagcgaagagttcaggctagtgtcaccggcgttcaaaaacggggggaagttaccgaggcactacaccgacgatggtcagggtacgaagaagaacatatcccctccattggagtggtataaccttccggaggggacgaagactcttgccctcgtggtggaggatattgatgcgaccgattctggtgggcccatggtgccatggactcactgggtcgtcgcaaacatattggccacagtgaaaggcttttcggagggatttttcggc

SEQ ID NO: 250645 - DNA, 405 bp, Glycine max
tagcgccagactgagaggaagagagagggagattctttgtttgctaccttctctcggaaaaatggttacgttcaggtttcaccagtaccaggtggttgggagggctcttcccacggaagcagatcagcaccccaagatctaccgaatgaagctctgggccaccaacgaggttcgcgccaagtccaagttctggtattttctgaggaaactgaaaaaggtgaagaagagcaatggccaagtgcttgccatcaacgagatttttgagaagaacccaaccaaaattaagaactatggtatatggttgcggtatcagagtaggactggttaccacaacatgtacaaggagtaccgtgacaccactctaaacggtgcagttgaggcaatgtacaatgaaatggcttctcg

SEQ ID NO: 250646 - DNA, 399 bp, Glycine max
accgtattaaagaatttaagatatactatgatgagagcgcggttcccattactgttgctgggagttgttttcctggcatcagtttctgtctcatttggcattgcgtattgggaaaagcagaaccccagtcacaacaagtgcctccgaagttgcaatagcgagaaagactcctacaggaaccaagcatgccacgctcgttgcaacctccttaaggtggaggaagaagaagaatgcgaagaaggtcaaattccacgaccacgaccacaacacccggagagggaacgtcagcaacacggtgagaaagaggaagacgaaggtgagcagccacgtccattcccattcccacgcccacgccaacctcatcaagaggaagagcacgagcagaatgaggaacacgaa

SEQ ID NO: 250647 - DNA, 214 bp, Glycine max
ccgctcgagctctccattggtccttaaacactcatcagtcatcagcatggccaaactagttttttccctttggtttctgcttttcaatggctgctgcttcgctttcagttccagagagcagcctcagcaaaacgagtgccagatccaaaaactcaatgcccctaaaccggataaccgtatagagtcagaaagagggctcattgagacatggaac

SEQ ID NO: 250648 - DNA, 387 bp, Glycine max
ctcgagccgaatcggctcgaggatcagtaacaagtacaatggtaagattcttcataacaaagagatcaacaacaacaccaacaatgaaagcaacaacacaaatgcaaccgacaaaaggtttaagaccttgcctgctgcggagacactcccgcgcaatgaggtgcttggaggatacatctttgtctgtaacaatgacacaatgcaagaagacttgaaacgtcagctatttggtttgccttcaaggtatcgagattctgttagggctataacacctgggttaccattatttctttataactatactactcatcagctgcatggtatttttgaagcagcaagttttggtggctctaacatagatccaactgcctgggaggattaaaaatg

SEQ ID NO: 250649 - DNA, 349 bp, Glycine max
gttcaatatcctagtataccttaataaataatttaagatactatgatgagagcacggttcccattactgctgctgggacttgttttcctggcttcagtttctgtctcatttggcattgcttactgggaaaaagagaaccccaaacacaacaagtgtctccagagttgcaatagcgagagagactcgtacaggaaccaagcatgccacgctcgttgcaacctccttaaggtggagaaagaagaatgtgaagaaggtgaaattccacgaccacgaccacgaccactacacccggagagggaacctcatcaacccggtgagaaagaagaagacgcagatgagcaaccacgtt

SEQ ID NO: 250650 - DNA, 400 bp, Glycine max
aagaatcccaggcgaggagaaagatggaggggaaggagcaggatgtgtcgttgggagcgaacaagttccccgagagacagccgattgggacggcggcgcagagccaagacgacggcaaggactaccaggagccggcgccggcgccgctggttgacccgacggagtttacgtcatggtcgttttacagagcagggatagcagagtttgtggccacttttctgtttctctacatcaccgtcttaaccgttatgggagtcgccggggctaagtctaagtgtagtaccgttgggattcaaggaatcgcttgggccttctgtggcatgatcttcgtcctcgtttactgcaccgctggcatcttatggggacacataaacccggcggtgacatttgtgctgctttt

SEQ ID NO: 250651 - DNA, 374 bp, Glycine max
  unsure (1)..(374): unsure at all n locations
ggctagtactgatgcctctggggttgaaaatggcatgcctgagggtggagataagcctttgcaaaaggatactgataccaaggttcaggctccaaagaaaaaggttaagaaaacaaacattcctgtagcagagttagtttatggagcaatggtgcctgtggatgtccagaaagcactagaaaaggagtttgaaatggctttgcaagatcgtgtgatggaagaaacaaaagacaagaaaaatgcagttgaggcttatgtttatgacatgagaaacaagcttaatgacgaataccaagagtttgtcactgcttcagagagagatgattttactgctaaacttcangaagtggaagattggctttatgatgagggtg

SEQ ID NO: 250652 - DNA, 325 bp, Glycine max
aaaaaaaacaaaaacaaaaaaaaaaaaaagaaaaaaaagaaaaaaaaaaaaaaaaaaaaaaaaaaaaaaagaaacaaatgccaacgaacaaccaaacgaaacaaaaaggcccaagaaaacaaacatggaccgtaccctactagcttaccgagcaaccgtacactgagcatgttcagaacgcactagtaaccatggtcataaattgcttcccaagatacaattgaatgccgataccaattacacacaaacattcaactccagactcataaattttacatcctaaactgcctaaaaggcgaactccctgaaattattaccgcttcac

SEQ ID NO: 250653 - DNA, 524 bp, Glycine max
  unsure (1)..(524): unsure at all n locations
agttgaggggntccgtagaggtcgtntttctgaanctacgacgatatattgtcactactcggagagacaagcttgcatgcctgcaggtcgactctagaggatcccctcggggaattccaattccacattttcaagaaataaggaggcaaaaatgtggatatatgaattggaattatttgttttcttattaggcctatcctgaagccaaaggaaatgagatcggaattcctcggggaattccaattccacattttcaagaaataaggaggcaaaaatgttcatatatgaattggaattatttgttttcttattaggcctatcctgaagccaaaggaaatgagatcggaattcctcggggaattccaattccacattttcaagaaataaggaggcaaaaatgttcatatatgaattggaattatttgttttcttattaggcctatcctgaagccaaaggaaatgagatcggaattccttcggggtaccgagctcgaattccctatagtgagtcgtattaaattcgg

SEQ ID NO: 250654 - DNA, 402 bp, Glycine max
atcataaaattcttccaccaagttatgggtttccttgtgttgcttcttttctccctcttaggtctctcttctagttccagcatatcaactcatcgttccatattggaccttgacctaaccaagtttaccacacagaaacaggtgtcttcactgttccaactatggaagagtgagcatggacgtgtctaccataaccacgaagaagaggcaaagagacttgagattttcaagaataacttgaactatatcagggacatgaatgcaaacagaaaatcaccccattctcatcgtttaggattgaacaagtttgctgacatcactcctcaagagttcagcaaaaagtacttccaagctcccaaggatgtgtcgcagcaaatcaaaatggccaacaagaaaatgaag

SEQ ID NO: 250655 - DNA, 397 bp, Glycine max
caaaccttgctctatactacacagtacacacactagaagaataatggcttccatgctccactactttttagccctctctctttcttgctcttttcttttcttcttatccgactcagtcacccctacaaaaccaataaaccttgttgttctacccgttcaaaatgatggttccacagggctccattgggccaacctccaaaaaagaacccctctaatgcaagtaccagtcctggtggacctcaatggaaatcacttgtgggttaactgtgagcagcagtactcatccaaaacgtaccaagcacccttctgccactccacccaatgctctagagccaacacccaccaatgcctcagttgccccgcggcatcaaggccagggtgccacaaaaacacgtgt

SEQ ID NO: 250656 - DNA, 275 bp, Glycine max
  unsure (1)..(275): unsure at all n locations
ctctcaacaccctgagctgaaatgcgccggtgtcactgtttccaaactcaccctcaaccgcaatggccttcacttgccatcttactcaccttatccccggatgatcatcatcgcccaagggaaaggagcacttggagttgcaattccaggatgtcctgagacgtttgaagagccacaagaacaatcaaacagaagaggctcaaagtcgcagaagcagcagctacaggacagtcaccagaagattcgtcacttcaatgaangagacgtactcgtga

SEQ ID NO: 250657 - DNA, 360 bp, Glycine max
caatggcaggcgtttctctcaagtgcggtgactgcggggctctgctgagaaccgtagaagaagcgcaagagcacgctgaactcacctaccactccaacttctgcgaatccaccgaaccggttctcaacctcatctgcaccgcttgctccaaaccctgccgatccaaaaccgagagtgatttgcacacgaaaagaaccggccataccgagttcgttgacaagacttccgaggccgttaaaccgattagtttggaggctccgaaggtggatgcaactgcttcatcggaaaaccctttcgctgctgcatccactgaccaaaatgaagaaatggttgttcctgaagtggacaaaaagctgcttg

SEQ ID NO: 250658 - DNA, 284 bp, Glycine max
tagattttctagtatataggtttaatgtatgtagccggtgccccataactgactttggtataatgggaactggttagtgtacaaagcaatatatagagaagacactgaaaatacatgtataaaaaaaaaaaaaaaaaaaaaaaaaaaaaaaaaaaaaaaaaaaaaaaaaaaaaaaaaaaaaaaaaaaaaaaaagaaaagaacatacaaaaaaaaaaaaacaagaattaaaaagacgataaaaacgattagaaaggaagctaaaaaaagaagatgcgggtgcccc

SEQ ID NO: 250659 - DNA, 341 bp, Glycine max
caaatatatagctacgagggaacttcttcagtcattgctagctagctcactaatcactatatatacgacatgctacaagtgaagtgaccatatcttaatttcaaatcataaaattcttccaccaagttatgggtttccttgtgttgcttcttttctccctcttaggtctctcttctagttccagcatatcaactcatcgttccatattggaccttgacctaaccaagtttaccacacagaaacaggtgtcttcactgttccaactatggaagagtgagcatggacgtgtctaccataaccacgaagaagaagcaaagagacttgagattttcaagaataac

SEQ ID NO: 250660 - DNA, 349 bp, Glycine max
tctctccattggtccttaaacactcatcagtcatcaccatggccaagctagttttttccctttgttttctgcttttcagtggctgctgcttcgctttcagttccagagagcagcctcagcaaaacgagtgccagatccaaaaactcaatgccctcaaaccggataaccgtatagagtcagaaggagggctcattgagacatggaaccctaacaacaagccattccagtgtgccggtgttgccctctctcgctgcaccctcaaccgcaacgcccttcgtagaccttcctacaccaacggtccccaggaaatctacattcaacaaggtaagggtatttttggcatgatata

SEQ ID NO: 250661 - DNA, 344 bp, Glycine max
gatgtggggctctgaatcccaaggccgattactgtcgatcccaacaaaacctaacccagatgatgctcctgcctctgctcgttggctcgtctccctcaatttctggggagtcttgaatactatctcatctgatttgggtggagctccctttgggaatgtggtatcatatagtgatggactacctaacgaaagcactggaatcccatacttttacttgacaactctagacccgacagcaagaaatgcactgcaagatgataaagcttcattcacggtcagtgaataccctcttgggacctgtggcaggagagacccaatgaaccctacttgttccaaaatttctc

SEQ ID NO: 250662 - DNA, 389 bp, Glycine max
ctttgaacactcatcaccatggccaagcttgttcttgccctttgtttccttcttttcagtggctgcttcgctctgagagagcaggcacagcaaaatgagtgccagatccaaaagctgaatgccctcaaaccggataaccgtatagagtcggaaggtgggttcattgagacctggaaccctaacaacaagccattccagtgtgccggtgttgccctctctcgctgcacccttaaccgcaatgcccttcgtagaccttcctacaccaacggtccccaggaaatctacatacaacaaggtaatggtatttttggcatgatattcccgggttgtcctagcacttatcaagagccgcaagaatctcagcaacgaggacgaagccagaggcccca

SEQ ID NO: 250663 - DNA, 356 bp, Glycine max
ctgagctgtttgaaagtcttggaattgcacaaccaaggggtgtcctgctctatgggccacctggtacaggaaaaacattgttggctagggcagtggctcatcatactgactgtacattcatcagggtgtctggttctgaattagttcagaaatacattggagaaggttctagaatggtcagggaactttttgttatggccagggaacatgctccatcaattatcttcatggacgaaattgacagtattggatctgctcggatggaatctggaagtggcaatggtgatagtgaggtacagcgtactatgctggaacttctcaatcagctggatggatttgaagcttctaacaagatc

SEQ ID NO: 250664 - DNA, 397 bp, Glycine max
tatacacacacacacacacactaagaataatggcttctatgctccactactttttagccctctctctttctttctctttccttttcttcttatccgactccgtccccattccccaacaccacactaaccctacaaaacctataaaccttctggttctacccgttcaaaatgatgcttccacagggctccattgggccaacctccaaaaaaggacccctctaatgcaagtaccagtcctggtggacctcaatggaaaccacttgtgggttaactgtgagcaacactactcatccaaaacataccaagcacccttctgccactccacccaatgctccagagccaacactcaccaatgcctcagttgcccagcggcatcaaggccagggtgccacaaaaa

SEQ ID NO: 250665 - DNA, 402 bp, Glycine max
cacacaactactacaagtacttccttacaatcaaaaccaacaacaactatggcaagttatcaaaagcactacgatgatcagggtcgcaaggttgacgagtatggcaacgttgagaagcaaaccgacgaatacggcaaccctgttcatgctgctagtgtcacctatgtagccaccagaactgctgctggtggttacagtgatgacattaataagcaacatgataccaccaatgcctacggcgtagacactggtagacagcattctagtggtggctacgatggtgacactaataaacatcatggaactactggtggctataatgatgacaccaatagacatcatggaactaccggtgtctatggtatagacaccgataggcaacaacatgggactactggtggc

SEQ ID NO: 250666 - DNA, 408 bp, Glycine max
cacacaactactacaagtacttccttacaatcgagaccagcaacaactatggcaagttatcaaaagcactacgatgatcagggtcgcaaggatgacgagtatggcaacgttgagaagcaaaccgacgaatacggcaaccctgttcatgctgctagtgtcacctatgtagccaccataactgctgctggtggttacagtgatgacattaataagcaacatgataccaccaatgcactacggcgtagacactggtagacagcattctagtggtggctacgatggtgacactaataaacatcatggaactactggtggctataatgatgacaccaatagacatcatggaactaccggtgtctatggtatacacaccgataggcaacaacatgggactactggtggctatgc

SEQ ID NO: 250667 - DNA, 405 bp, Glycine max
ccactatctccaacggatatggtcgtttaactgaagttggtcctgacgatgatgaaaagagttggcttcaaagactcaatctcatgcttacctttaccaacatcacccagagatctatgagtactattcactacaactcacatgcaacgaagatagcactggtgatcgatggcagagggcatcttcaaatatcatgtccacacatgtcatcaaggtcgtcacactcgaagcatgataagagtagcccttcataccatagaatcagttccgatttgaagccctgaaatggtgtttgttgtccctcccggtcatcccttcgtcaccatagcttccaataaagagaatctcctcatgatttgcttcgaggttaacgctcgagacaacaagaagtttacatttgcaggg

SEQ ID NO: 250668 - DNA, 359 bp, Glycine max
gctacctagagcttgcacctattggtatcttctacaatatcctagagtgtttttcttcttcttcatcaccatgtctttactttcagacctcatcaacctcaatctctcagaatccacagaaaagatcattgctgagtacatatgggttggtggatctggtatggacctcagaagcaaagccaggactcttcctgggccagtgagtgaccctgcaaaacttccgaagtggaactatgatgggtctagcacagatcaagctccaggggatgacagtgaagtcattctatacccacaagctattttcaaggacccctttaggagaggaaacaatattcttgtcatttgtgatgtgtacaccc

SEQ ID NO: 250669 - DNA, 414 bp, Glycine max
gttctagttcttcttcgtcgttatcttcttcttttgttgtttgtgtgtttgttttttctctcacctgaaaatgtcttgctgcggtggtaactgtggttgctgaagcgcctgctagtgctgcaacggctgcagaggctgcaagatgtacccagacttgagctacaccgagtcaaccaccaccgagaccttggtcatgggagtggcaccagttaaagctcaattcgagagtgctgaaatgggtgttcccgctgagaacgatggctgcaaatgtggagctaactgcacctgcaacccctgcacttgcaagtgaagtgttggagagctaaagcttcaagcataaatggcccttataaataatgagtaaaactatatgtagtttcaaaacttcaaaattatgtagtatgtattatgttg

SEQ ID NO: 250670 - DNA, 332 bp, Glycine max
gggcaccattcctcagtccatttcacagcgaactgtgtggaatcaaatggcaacagtgagaacaccattgaattttgattctagcaagcagagcttttgtcaattttctatcgaccttctcggtggaggaattttagtggacaaaactggagattggatcacacttatacaaaattctccaattagtaacttgttgagagttgctgcttggaagaaaggctgtttaatggtcaagattgtgatgtctgggaatgcagcagtcaaaaagagtgattgggcctcattggtacaagtgtttttaacaaaaaacatcagttcaaaacatttttatg

SEQ ID NO: 250671 - DNA, 369 bp, Glycine max
tcaatatcctagtacaccgtattaaagaatttaagatatactatgatgagagcgcggttcccattactgttgctgggagttgttttcctggcatcagtttctgtctcatttggcattgcgtattgggaaaagcagaaccccagtcacaacaagtgccttcgaagttgcaatagcgagaaagactcctacaggaaccaagcatgccacgctcgttgcaacctgcttaaggtggaggaagaagaagaatgcgaagaaggtcaaattccacgaccacgaccacaacacccggagagggaacgttagcaacacggtgagaaggaggaagacgaacgtgagcagacacgtgcattcccattcccacgcccacgc

SEQ ID NO: 250672 - DNA, 394 bp, Glycine max
agagataggagacaaaatttacatggatatagtaagtcttgcttgggctgctttaatggtagttttttcattttctctttccctcgtagtatggggaagaagtggactatagggatactcaaaattgagttaagggatcaaagtacccattttgttttctacttgggtttttcaatttcttaactttaactattgaattaaagtatttcatttatactaattaattgagttcaaatataaacaaatataaaatagatctgcatttcagggttctattatattctagtagtgtaatgtattctatgtatatgtatattatagaaattgaaaatactctttcaatcaaacaaagatttgaattatatctatattcgtattttgagaaaatcaagag

SEQ ID NO: 250673 - DNA, 400 bp, Glycine max
agaaagtcttccatagccccccaaaaatgaagagcaccatcttctttgctctctttctcttttgtgccttcaccacctcatacctaccttcagccatcgctgatttcgtgctcgataatgaaggtaaccctcttgaaaatggtggcacatattatatcttgtcagacataacagcatttggtggaataagagcagccccaacgggaaatgaaagatgccctctcactgtggtgcaatctcgcaatgagctcgacaaagggattggaacaatcatctcgtccccatatcgaatccgttttatcgccgaaggccatcctttgagccttaagttcgattcatttgcagttataatgctgtgtgttggaattcctaccgagtggtctgttgtggaggatctacc

SEQ ID NO: 250674 - DNA, 343 bp, Glycine max
tctcggtgaattccaattccacattttcaagaaataaggaggcataggtgttcatagatgaattggaattatttgttttcttattaggcctatcctgaagccaaaggaaatgagatcggaattcctcggggaattccaattccacattttcaagaaataaggaggcaaaaatgttcatatatgaattggaattatttgttttcttattaggcctatcctgaagccaaaggaaatgagatcggaattcctcggggaattccaattccacattttcaagaaataaggaggcaaaaatgttcatatatgaattggaattatttggtttcttattaggcctattctg

SEQ ID NO: 250675 - DNA, 337 bp, Glycine max
agattattctagaggcctcatacgacaccaaattcggggagatagacaaggttctgtttggtagagaggaggggcagcaacaaggggaggagaggctgcaagagagtgtgattgtggaaatctcaaagaaacaaattcgggaactgagcaaacatgccaaatctagttcaaggaaaaccatttcttctgaagataaacctttcaacttgagaagccgcgaccccatctattccaacaagcttggcaagttgtttgagattaccccagagaaaaaccctcagcttcgggacttggatgtcttcctcagtgttgtggatatgaacgagggagctctttt

SEQ ID NO: 250676 - DNA, 367 bp, Glycine max
ctcgagccggtttcagacccttattgacctttctgtgatagaaagcttgtcaaggcatgcatctgatgaggtgtaccttggggagagggacaatccaaattggacatctgatacaagagcattagaggcttttaaaaggtttggaaataaactggcacaaattgagaataaactctcagagagaaacaacgatgagaaactgagaaaccgttgtggaccagttcaaatgccttatactctgcttttgccttctagtaaggaaggattaactttcagaggaattcccaacagtatctctatctgaagaggtttgtggttccttaaaaattgtggcttttaataaaagattgaagagaaggaatctgaa

SEQ ID NO: 250677 - DNA, 380 bp, Glycine max
tcggggaattccaattccacattttcaagaaataaggaggcaaaagggttcatatatgaattggaattatttgttttcttattaggcctatcctgaagccaaaggaaatgagatcggaattcctcggggaattccaattccacattttcaagaaataaggaggcaaaaatgttcatatatgaattggaattatttgttttcttattaggcctatcctgaagccaaaggaaatgagatcggaattcctcggggaattccaattccacattttcaagaaataaggaggcaaaaatgttcatatatgaattggaattatttggtttcttattaggcctattctgaagccaaaagaaatgagatcggaatttctcgggggttcc

SEQ ID NO: 250678 - DNA, 369 bp, Glycine max
gttctaagaaaccttaaaaaacaagtagtgttccgaagagatggctcagcaggaagtggtagaagggttcaagttcgaacagaggcacgggaaagagcgcgtgagagtggcgcgcgtgtggaagacgaggcaggggcagcacttcgttgtggagtggcgcgtgggcatcactctcttctcagactgcgtcaactcgtatctccgcgatgacaactctgacatcgttgctactgataccatgaaaaacacagtgtatgcaaaagcaaaggaatgctcagacatactctctgctgaggactttgctattttgcttgctaagcactttgtatcattttacaagaaggttactggtgctattgtgaatattgt

SEQ ID NO: 250679 - DNA, 271 bp, Glycine max
agacatctccgacgtggcgaggaacgaaggcgtgagcgtgaccgaaaccaaagtgggctgccaccgcgtcatcacggagttcgtgggaagacacgtggtggggcagttcgtggagcccgacgtccccatgaacaccccaggcaccgcgctggagcgtgacgccataaccatcggcgaggctctcgaggcatcggcgatagccggagcaagcgacaagccggtggatgaaagcgacgccgtcgcgatacaagctgcggagatgagagcgaca

SEQ ID NO: 250680 - DNA, 399 bp, Glycine max
aagaaaagccatttccatagcagcctaagaaaatgaagagcactagcttgttcgctatctttctactttgcgccttcacctcatacctaccttccgccaccgcccaggacgtgctcgacgtggatggcgatccgattcggaacggtttcatatactacgttttgccggcaataagaggaaacggtggcggaatagaacgagccgcactcgggaaagacacttgccctatcactgtagtgcaatctcccaatccaaactctaaggggttagaaattaagtttgaatctgcataccccgcctattacataaacgaaaccctaattttgcaaataaagttcagttacccacagcagtgtgaaagaaagaatccttggtgggccatttctaaggatatatctg

SEQ ID NO: 250681 - DNA, 361 bp, Glycine max
agacaaacactgccaacgcccccgaggaagccaaagcaaaagcagaagaaatggcattgacgagaccatatgcaccatgagacttcgccacaacattggccagacttcatcacctgacatctacaaccctcaagccggtagcgtcacaaccgccaccagccttgacttcccagccctctcgtggctcagactcagtgctgagtttggatctctccgcaagaatgcaatgttcgtgccacactacaacctgaacgcgaacagcataatatacgcattgaatggacgggcattgatacaagtggtgaattgcaacggtgagagagtgtttgatggagagctgcaagaaggacgggtgctgatc

SEQ ID NO: 250682 - DNA, 309 bp, Glycine max
gccatattttagtggttctaaattgaaaagtttcctagctagtcagaacatcaccattactgatggaattgacaaaactagtgcaactttacagtttagaaagttgtcagagtgtgattttcttaaaagaaattttaagcaaatgtccaatgttttgtgggtagctcctgaagacaaagctagtttgtggtcacaattacactatgtttcatgtaacaatttggaaatgcaagaagcttatcttgttaacctggttaatgtgttgcgtgagttgtacctgcacagtccaaaaaaagctcgtcaattgag

SEQ ID NO: 250683 - DNA, 370 bp, Glycine max
gtagaaaagaaggcattaggttaagagtgaaggcagtgagcgaaagagagcatagtaatacttactgagtgcttacagttgctgcgtcgcaaggtaccggcggcgacggagaactatcttctcaattttcgatcactgcattggttctgttgacaagggttttgttcttcctgacttgcatacttgatggcttcaaagttgcagaagttgcaggccacagcatctcaagcgtctcaatttgtatccagtcgtggaactaactactacaagcaattgctggaacagaacaagcaacacattcaggagcctcctacagtagagaaatgcaacctgttggcaaagcaattgttttacactcgccttgctagta

SEQ ID NO: 250684 - DNA, 282 bp, Glycine max
  unsure (1)..(282): unsure at all n locations
attcaaaccttgctctatactacacagtgcacacacgggaagaataatggcttccatcctccactactttttagccctctctctttcttgctcttttcttttcttcttatccgactcagtcacccctacaaaaccaataaaccttgttgttctacccgttcaaaatgatggttccacagggctccattgggccaacctncaaaaaagaacccctctaatgcaagtaccagtcctggtggacctcaatggaaatcacttgtgggttaactgtgagcagcagta

SEQ ID NO: 250685 - DNA, 309 bp, Glycine max
caataattccttcacttgcagaacttaggtctctgttgcatcatcatcatcttcattagtgttagccctaaacttcaccttcaaccatgaccacagtgccaccacacagtgtccaagtgcacacaacaacacaccgttacgaagccggcgtcgtcccgccggctcgttttgaggcgccgcgttacgaagccggcatcaaggcgccctctttcatttaccattccgagagaggtccgacgacctctcaagttctcgcagttgtcgccggcctttcggtcggcggcatactcctgctcctggcaggactga

SEQ ID NO: 250686 - DNA, 380 bp, Glycine max
gagagagagagagagagagagaaaacaacaacaaacctcatgaccacacagagtagtagagagagagagagaaaaaaaaagagagtccgttagttaatttcagtttatttattttatatttttaaaaagaagagaaaaagcaatggtgacagaggaagaaatatctgaagcggttcagtctctgctgcgggaatcaaaccctagtagattcacgacgctaaaccaggtggtggaggagctccaggccaagctcggccacgacctcactcacaaaatcgatttcatcaccgcgcagatcaaccttctttttggatcccgacaaccgtaacaaccgccgcaaaacccgcataggcagttacaacagcctaaggaccattttg

SEQ ID NO: 250687 - DNA, 405 bp, Glycine max
gtaattgccgagattcgcgcaggaacatacacttttaatggaaaagaaaaagttcgaaaacatgtctattctgacttagaaggagaaatgcattggagtaccgatgtgtaccatgcatcagaatttagatatagtaatgtccatatcttaccaaaaacaagtcatttatggattttatcaggaaaatcatacaggtccggttcagtctctttttcaatccgaaaagatcaagatcaaatgaacattcattatctttctactggagaaagagatttttgtaaccttttagcaagtaaaaaaaaagtaagacataaattgtttcgtttcaatccttctgataaaaaagaaagaaggatttcagattattcaatatttaatcaaatcatatctatagatcattgtcat

SEQ ID NO: 250688 - DNA, 401 bp, Glycine max
  unsure (1)..(401): unsure at all n locations
ttcttctcttgcggctagggttttagcgcagcttcttctagatttaaggaagatgggtaaggaaaaggttcacatcagtattgtggtcattggccatgtcgactctgggaaatccactaccactggtcacctgatttacaagcttggaggcattgacaagcgtgttattgagaggtttgagaaggaagctgctgagatgaacaagaggtctttcaagtatgcctgggtgctggacaaacttaaggctgagcgtgaaagaggaatcaccattgatattgctttgtggaagtttgaaacaacaaagtattattgcacagttattgatgcgcctggacatagggatttcattaagaatatgattactgggacatcccaagctgactgtgctgntcttatcattg

SEQ ID NO: 250689 - DNA, 332 bp, Glycine max
tcgtgccacactacaccctgaacgcgaacagcataatatacgcattgaatgggcgggcattggtacaagtggtgaattgcaatggtgagagagtgtttgatggagagctgcaagagggaggggtgctgatcgttccacaaaactttgctgtggctgcaaaatcccagagcgataactttgagtatgtgtcattcaagaccaatgatagaccctcgatcggaaaccttgcaggggcaaactcattgttgaacgcattgccagaggaagtgattcagcacacttttaacctaaagagccagcaggccaggcaggtgaagaacaacaaccctttc

SEQ ID NO: 250690 - DNA, 265 bp, Glycine max
tagagcgaaagcgtgacaccaccaaaaaccgaactgtgcccagatctctctctctctctctctcttccaacaatccaaatccaaatccaaaaccctaccaacaccacactcaatcgatcgatggggcagaagtctctgatctacgcgttcgtgtcgcggggaactgtgattctcgcggagtacacggaattcagcggaaacttcaacttcatcgcctttcagtgccttcagaagctccctgtcaccaacaacaagttcacctaca

SEQ ID NO: 250691 - DNA, 357 bp, Glycine max
gccacattgtggagtgctgcacattatgggactgatgtaactgtggagggaaccaaggctgcaacaaatgttgttaagggagttgctgagtatgcaggacagaaggcttctgagcttgcagctatgtcagtggatactgctaaaggtttagctgctgctgcagctggggagaatgccaaggagtacactgcaaggaagaaggtggaagctgagatggatttggaggccaaaagggaagctcaaaatcaggaatcgaaggagtggccatcagcaaaatccaccactgagagcattcaaagaggacaaggacaacaagatcagcatgagcaacgagaaaaatgggaacatggtgcacaa

SEQ ID NO: 250692 - DNA, 228 bp, Glycine max
ctgttccaccaccacaacaaatccctgtgcctccctgtggaattgactctgtccaaccaactggctgggaataaactagtgttttttgatgctatgattttgccctgtccttcaatttagttgtctttcttagaagtaaaatatggatcagtttttttgtagcaaagcaacttggttttttttttttctagtttgttatgagtggcaaaatattatttttaacatggt

SEQ ID NO: 250693 - DNA, 409 bp, Glycine max
gtggtgttagatctgtacccgcctagccgttgatttggaaaagtccaagcttcagagatgagtaagcttcagagtgatgctcttagagaagctatctcaggaatcatgactgattccaaggaaaagaacaggaaatttgtggagaccatcgaactgcaaattgggctgaaaaactatgatccccacatggacaagcgctttagtggctctgctaagttgcctcacattcctcgccccaagatgaagatttgtatgcttggagatgcccaacacgttgaagaggctgagaagataggattggactacatggatgttgaggccttggagaagcttaacaaagaccagaaattggtgaaaaaactagcccaaaaatatcatgcctttttggcctctgaagcactcatcaagc

SEQ ID NO: 250694 - DNA, 344 bp, Glycine max
ggagcaggtaaagcttttccaaacaagattgtttttgatgataaacttgtgctggctaacacacaagaattctttgctggaaattttccagtggattcttggttaccaatttttgtgaattgtctttatcctgtaagtcaattaccttcagaagctgtcgttgtaaatgttacatgtggtagtggacgtggtggtttacctaccactgcttggattagttctgcagttaacaatcgctcctcagatatcaacaaaaagattcgcacagcactttggaaaaggtagaaaattgtttttcttactaaaggtgatcctttttcagtagctctactggctgttctttt

SEQ ID NO: 250695 - DNA, 361 bp, Glycine max
gagaaaggagtgaaccaagattgctgcatggtgtgggaggaatttggatgccaagaggacatgatattttgtgggatatttgatgggcatggaccatggggtcactttgtggccaaaagaataagagagtcaatgccaccatctttgctatgcaactggcaggagacattagcccaaacttcaattgatcatccggctattgatgtagaggaagagaaaagtaaacattacagattcaacatatggaagcattcttacttgaagacttgtgctgccattgatcaagaactagagcaatatcgcaagatagactcgttttacagtggaacaactgccctatcaattgttagacagggtgaac

SEQ ID NO: 250696 - DNA, 258 bp, Glycine max
caaaagtgttccacttgagtgaaaagtagtgtgttaagaactaaacaatttttcaatggcgtccaagaaacaagaggagcgagctgaggcagctgcgaaagttgctgccaaagaactcgaacaagtcaacagagaaagaagagaccgtgatttcggtgttgttgctgaacaacaacaacaacatcatcaggaagatcaacaaaaacgtggtgtaatcgggtccatgtttaaggcggtgcaagacacctacgagaacgc

SEQ ID NO: 250697 - DNA, 233 bp, Glycine max
  unsure (1)..(233): unsure at all n locations
gcagaatgactcaattcacaatcctgctcatctctctactcttctgcatcgcccacacttgcagcgcctccaaatggcagcaccagcaagatagctgccgcaagcagctccagggggtgaacctaacgccctgcgagaagcacatcatggagaagatccaaggccgcggcgatgacgatgatgatgatgacgacgacaatcacattctcaggaccatgcggngaagaatcaac

SEQ ID NO: 250698 - DNA, 403 bp, Glycine max
  unsure (1)..(403): unsure at all n locations
aatgatttcacatccaccctacactgagtatgtctccacacgatggtatcgtgctcctgaagtgctgcttcagtcttatatgtatacctgtaaagttgatatgtgggcaatgggtgctataatggctgagctttgctctcttcgtactcttttcccaggtgccagtgaagcgtatgagatttacaaagtatgtggcgtgataggcaatccaacctttgaatcatgggcggatggactcaaacttgcaagggatattaactaccagtttccacagcttgccggtgtgcatctntctgctttgattccgtctgctagagatgatgcaatcagccttattacatcactttgctcctgggatccctgcaagaggccaacagcttcagaggctcttcaacatcctttc

SEQ ID NO: 250699 - DNA, 242 bp, Glycine max
attgcatttcgttactgtcatttggtgtgcaatcttacaagttccaaacttgtctattctggcattattgggtctcacttgtcacacatacagatttgagccttttatattatcatggcttctaaggtggtttcggttttggtcatagcgatgatgttggttgccatgaactgcaactgcactagtgctggccacatgctcttggccaatgaggaaggtcacgattttcacgagtctaaagc

SEQ ID NO: 250700 - DNA, 235 bp, Glycine max
gttgcataccgagctagctagctagcaagcaagcacagagatggaagcatagcgaggccatgccctcatgtgcttggcacgtgtttcactcttactgtgcgctctaaccctatccgctgctcacggaagcaccacggttcaagacatcgcgagaaagttgaaactcggggacaacgagcttctgcgcacggagaagaagttcaaggatttcatggagaattactggaggagctac

SEQ ID NO: 250701 - DNA, 395 bp, Glycine max
  unsure (1)..(395): unsure at all n locations
taaaattcttccaccaagttatgggtttccttgtgttgcttcttttctccctcttaggtctctcttctagttccagcatatcaactcatcgttccatattggaccttgacctaaccaagtttaccacacagaaacaggtgtcttcactgttccaactatggaagagtgagcatggacgtgtctaccataaccacgaagaagaggcaaagagacttgagattttcaagaataacttgaactatatcagggacatgaatgcanacagaaaatcaccccattctcatcgtttaagattgaacaagtttgctgacatcactcctcaagagttcagcanaaagtactttgcagctcccaaggatgtgtcgcagcaaatcaaaatgccaacaangaaatga

SEQ ID NO: 250702 - DNA, 328 bp, Glycine max
ggcagtctcttttcgggcaacaactgggccaaggggcactacacggtgggcccctagctaatcgactccgtcattgacgtcgtgcgcaaggaggcccaaacctgcgactgccttcaaggtttccaggtctgccactcgctcggcggaggaaccggctcctggatggggacacttttgatttccaagatcattgaggactaccctgacagaatgatgctcaccttatccgaggttccttatcccaaggtctatgatactgtggttgagccttataacgctactgtttccgttcatcagttggcctagaatgctgatgagagtatggtgc

SEQ ID NO: 250703 - DNA, 391 bp, Glycine max
  unsure (1)..(391): unsure at all n locations
cacatttcacaatcagaccggcatagtcatgtgctcctacctcccaatgttcaccagctttaatagaacaaggggtggcttgattcaattgaaccatggcaggcctcagcctctccaatatgttgtcaatgcagcctttttggctgctctttacagtgattatctcgatgctgctgatacacctggatggtattgtggacccaatttcttctcgactgatgtccttcgagactttgcanagacccagattgattacatnncttggaagaaccctcggaaaatgagctatattgtangttttggtaatcattatccaaaacatgttcaccatagaggtgcgtctataccgaagaacaaggttaagtacaactgtaaaggaagatggaaatgg

SEQ ID NO: 250704 - DNA, 355 bp, Glycine max
attggctttgaacactcatcaccatggccaagcttgttctttccctttgttgccttcattgcagtggctgcttcgctctgagagagcatgcacagtaaaatgagtgccagatccaaaagctgaatgccctcaaaccggataaccgtataaagtccgaaggtgggttcattgagacctggaaccctaacaactagccattccagtgtgccggtgttaccctatctagctgcacccttaaccgcaatgcccttcgtagaccttcctacaccaacggtcctcaagaaatctacatacaacaaggtaaatggtattgttggcatgatattcccgggttgtcctagcacttatcaagagc

SEQ ID NO: 250705 - DNA, 492 bp, Glycine max
taaggtatctacagagggggagtgatggtaatagtatagaagagctatgacgtcgcatgcacgcgtacgtaagctcggaatttggcgcgagctaaattttctgaggtcgattttataaaaaagggacagacttagttgtcaagttggaatcaacccatactccatggaatggactggtttggccaatcaattactgagttagggccatgatattctcggttgcgattatgctagttttgaagggttgattaccaagcaagttatgagccagatggcagaaatgattaacaggctttgtggtggtgatgaaaaattgatgcctttaaagacccacctgcttttggccttgtgttcaaggatggcaatttgtaagaaagaactttggaggagttaaatttggaatcccttttggatttccgctcaaagttattggcaaaagccttttaaaaaggaacgcctccttaaaaatacctttagaaaaaaacccggccc

SEQ ID NO: 250706 - DNA, 267 bp, Glycine max
aaatggtaagagtacagcttgttaccatcagctcagatactatacataattgagcacactgacgttgcacttacctactacactggaattctcggtatgccaggagtgactgcatatgcaggtctacttgaagtaggatctctgcagaaaggagagaatgtgcttgattcgactgactgtggcgcaattagtcaacttgttgggcaatttgctaaactgaatggatgtgatgtagtcggaagtgctggatctaaagagaagggggat

SEQ ID NO: 250707 - DNA, 435 bp, Glycine max
  unsure (1)..(435): unsure at all n locations
aagagctatgacgtcgcatgccccccttccttaacctcggattccggttcaggcaattccttctttacattcaaacccaccaccacctttggcaggttttcaaaggcactacaatgatcagggtcgcagggttgacaagtttggcaccgttgaaaagcaaaccgacgaatacggcaaccctgttcatgctgctagtgtcacctatgtagccaccaaaactgctgctggtggttacagtgatgacattaataagcaacatgataccaccaatgcctacngcgtagacactggtagacagcattctagtggtggctacgatggtgacactaataaacatcatggaactactggtggctataatgatgacaccaatagacatcatggaaactaccgtgtctatggtatagacaccgataggcaacaacatgggactac

SEQ ID NO: 250708 - DNA, 503 bp, Glycine max
cagatgtgttaagggggaggaaggggggatatattcaagagctatgacgtcgcatgcacgcgtacctaagcctcgggatttcggttcagggccaaccgagcttgctagctagcaagcaagcacagagatgggggcaaagcgaggccatgcccttatgtgcttggcacgtgtttcactctttctctgcgctctaaccctatccgctggtcaaggaagcaccaagggtcaagacatcgcgaggaagttgaaactcggggacaacgagcttcttcgcacggagaagaagttcaaggttttcatggagaattacgggaggagctactccacaaaagaagagtaattgcgccgtttggggatttttcgccagaacatggtcagagcggctgagcatcatgcgcttgaccccaccgtcgttcacggcgtcacgcagttcttcgatctcaccgaggacgagtttgagaagctctacactggcgtcaatggccgctttccgtcatcgaatc

SEQ ID NO: 250709 - DNA, 383 bp, Glycine max
attctcatcctcctctgtctctctctctccaccattgccatggatccttacaagctccggccatccagcgccttcaattctcccttctggactacaaattctggtgctcctgtttggaacaacaactcctctttaaccgttggagctagaggtccaattctgcttgaggattatcatcttgtggagaagcttgcaaactttgacagggaacgtatcccagaacgtgttgtccatgccaggggagctagtgcaaagggtttctttgaggtcacacatgacatttctcacctgacatgtgcagatttccttcgagcccctggagttcagacgcctgtaattgttcgtttctcaactgtcattcatgagcgtggtagccctgaaac

SEQ ID NO: 250710 - DNA, 402 bp, Glycine max
ctcgagccgtgcaattcatccttcgtggccccctagtaccaaggacattcaactcataggtgacatgggcaatattgtagctgccactagggaccttgaggattctttccggagtatatccttctcaaaatcaattgacaattcaactgagtttagcagctctagattctccgacatcatggggattggcaatgaagatgaggagggaaaggtaagaccactagttctcaagaacaagtctccaaggtggcatgaacagctgcaatgttggtgcctcaactttagaggaagggtcactgttgcctctgtcaagaattttcagctgattgctgcgacaccaccaccagccattgttactacaggaacaggacctacaccatctcagccaacacaaatcttctt

SEQ ID NO: 250711 - DNA, 339 bp, Glycine max
tgagaaacaaagaaaggaaataattgatctttgaaaatgcagggaggaaagaaagctggagagtccatcaaggaaacagctgcaaacattggtgcttctgccaaggctggcatggagaaaaccaaggccactgtccaggagaaggcagaaagaatgacggcacgtgatccgatgcaaaaggagttggcaacccagaagaaagaggcaaagatgagccaggcagagctggacaagcaggcggcgcgtcagcataacacggcggcgaagcaggctgccacggcagggcacatgggacaacccatggggacccatcagacgtcagctatgcccggtcatgga

SEQ ID NO: 250712 - DNA, 498 bp, Glycine max
  unsure (1)..(498): unsure at all n locations
gagtgttttaagcgggggaagaggggagtcttcaagagctatgacgtcgcatgcacgccttccttagcctcggatttcggttcaggcaccgccagtttggcaaaaaaaaaaaaaaaaaaaggaaacccagccaaaaccttggagaaaaggtcggtggtttctggtttaattgcaaaattgaccgtgggccatttgggtttacaaatggctccgtgtccagggcccttaataatggtttgggggcttttaacaatcttctttgggatccaaggccgtttcggaactttggggttgccgtatcaggatattttgggaaagattcgcctttggaagttgatcatgtccatattttccttctcgtcaacaccagagttgatgtttggactgtatcttctatattacttcagggtctttgagcgacagataggttccaataaatactcagtctttatcgtgttctccatattaacttcactactgcttgaggtncttgctgta

SEQ ID NO: 250713 - DNA, 411 bp, Glycine max
atcgtcttctgcttcaaggaaggagagcttgttattctctatcaacaaggaaaatgtcaggtgaagaggttgttgttgcagctgagccagctgctgccatcccaggcgagcctatggatatcatgactgccttgcaacttgtgctcagaaaatctctggcttatggtggtcttgcacgaggccttcacgaaggggcaaaagtgattgagaagcatgctgcacaactctgtgttctagcagaagactgtgaccagcctgactatgttaaactggttaaggccctttgtgcagagcacaatgttagcctgctgacagttccgagtgcaaagacccttggagaatgggctggtttgtgcaagattgattccgaaggaaaagctagggaagttactggttgctcctgtgtgggtg

SEQ ID NO: 250714 - DNA, 421 bp, Glycine max
gagagagagaggagagagtattggcgcttcatcaagatgggtatttctagggattccatgcacaagaggcgtgccactggtggcaagaaaaaggcttggagaaagaagagaaagtatgagcttgggcgtcaagcagcaaacaccaagttatcaagcaacaagacaatcaggaggattcgtgttagaggtggcaatgttaaatggagggcattgaggctggatactggcaattactcatggggtagtgaagcagttactcgcaagactcgtattctagatgttgtttacaatgcctcatacaacgagcttgtgcgaactcagaccctggtcaagagtgctattgtccaggttgatgctgctcctttcaggcagtggtaccttcagcactatggtgttgaaaatggtagaaaaaagaaagtgg

SEQ ID NO: 250715 - DNA, 289 bp, Glycine max
atttagcagttaaagtcaccttgttaatgtccttcgtggttggggctttaggatttattcttctcatggtcacaagaaacatttgggggcatatttttaccaatatacctgaagtaatccgttatgtggcatccatgacaccaattcttgcaagctctgtctttgtagattcaattcaaacagcattatcaggtattgtaagaagatgtggttggcagaagcttggtgcatttgtcaatcttggatcctattatcttgtggggctttcctttgcaattgggttggcttt

SEQ ID NO: 250716 - DNA, 296 bp, Glycine max
cggctcgagtgtacaacagtgaagacactcctgttgctgccgtatctattatagacaccaacagctaggaggaccatgtagaccagatgcctaggagattctatcttgctggtaaccatgagcaagagtttctaaaatatcagcaagagcaaggaggtcatcatagccagaatggaaagcgtcatcatgaagaagaaaacgcaagaggcaagatattgagtggcttcaccctggaattctaggaacatgcattcagcgtgcacaagcagatagcgaaaaacctacactgagagaac

SEQ ID NO: 250717 - DNA, 492 bp, Glycine max
aagtcttgacgagggggaacgtgacatctccaagagctatgacgtcgcatgcacgcgtacgtaagctcggaattcggctcgaggaactatgcctgatcggggcgaagccatgagaaactctgggggaggcccgcatcgatactgacgtgcaaatcgatcgtctgacttgggtataggggcgaaagactaatcgaaccgtctagtagctggttcccttcgaagtttccctcaggatagcttgagcccgctggcgagttctatcgggtaaagccaatgattagaggcatcgggggcgcaacgccctcgacctattctcaaactttaaataggtaggacggttcagctgctctgctgagccgagccatggaatcgagagctccaagtgggccatttttggtaagcatgactggcgatgctggatgaaccggaagctggttacggtcccaactgcgcgctaacctagaccccacaaagggtgttggtcgaataaaa

SEQ ID NO: 250718 - DNA, 497 bp, Glycine max
  unsure (1)..(497): unsure at all n locations
aagttgataaagcggaatacgtgacactatcgaagagctatgacgtcgcatgcacccttccttaagctcggaattcggctcgggctcaatggtcccttaaccactattaagccttaaccttggccaacctagttttttcccttggtttccggcttttaaggggctgttgcttcgctttaagttccagagagcagcctaagcaaaacgagtgccagatccaaaaactcaatgccctaaaaccggttaccgtatagagtcagaaggaaggctcattgagacatggaaccctatacacaagccaatccagtgtgccggtgtttgccctctctcgctgcacccctaaccgtcacgcccctcgtagacccttctacaacaacggtccccagganatctacattcaacaaggtaagggtatttttgcatgatatacccggtttgtcctagcacatttgaagagcctaaacaacctcaacatagaggacaaagcagcataccac

SEQ ID NO: 250719 - DNA, 495 bp, Glycine max
aggctctgaagaaggcagaccagtaattcatcaagagctatgacgtcgcatgcacgccttccttagctcggaattcgggtcgaggttccgtttcctttggtggcgttgccgggaaccggtttgcggggcttaatttgtggcacagtcaaagggatagaaggttacaattaccctttttaacttacaaggttttaacagtttcaaacttttgtttgaaacccaaaccggctgattccgactcctgaaaaaattcaccaatcgttcccaaaaacttgggaacctttgaaactaccggatggcccagttccagtcaaaaccaaacacattccttctaccccaccatgctgacgccgatttactcctccttgtactaatcgggagagccatacttacctcgggaacaacgacgtctgagtactctacaaccttcaccctgtcgatgcccagagaatccgagctggaaccacttactgattggtgtactctcacgacaac

SEQ ID NO: 250720 - DNA, 352 bp, Glycine max
caggtccttccttacaatcaaaacgaacaccaactatggcaagttatcaaaagcactacgatgatcagggtcgcaaggttgacgagtatggcaacgttgagaagcaaaccgacgaatacggcaaccctgttcatgctgctagtgtcacctatgtagccaccagaactgctgctggtggttacagtgatgacattaataagcaacatgataccaccaatgcctacggcgtatacactggtagacagcattctagtggtggctacgatggtgacactaataaacatcatggaactactggtggctataatgatgacaccaatagacatcatggaactatccgtgtctatggtat

SEQ ID NO: 250721 - DNA, 385 bp, Glycine max
ttcccaggttgtgatggcagcagcaccagcagctaccttcgctattggaaccaccggttccctcggccaaagaggaagctcgcttcctcaatcaaagtcctttgggttgaaattcaactctctgaatcatttgaagagcttctgtggcctcaaggccatgtcatccgtgagatgtgagtcggaatcctgcttcttcggtaacaaaaccggtgctgctctacgggcgtcttttgcatccaaagctcaaaaggaaaacaaccacaactcgcagcctcaagcttcgtacaaagttgcggttcttggtgctgctggagggataggtcagccgctctcgcttctcatcaagatgtcgcctttagtttccaacctgcatctttatgatatt

SEQ ID NO: 250722 - DNA, 347 bp, Glycine max
cttcgtcgttatcttcttcttttgttgtttgtgtgtttgttttttctctcacctgaaaatgtcttgctgcggtggtaactgtggttgcggaagcgcctgcaagtgcggcaacggctgcggaggctgcaagatgtacccagacttgagctacaccgagtcaaccaccaccgagaccttggtcatgggagtggcaccagttaaggctcaattcgagagtgctgaaatgggtgttcccgctgagaacgatggctgcaaatgtggagctaactgcacctgcaacccctgcacttgcaagtgaggtgttggagagctaaagcttcaagcagaaatgggcccttagaaataat

SEQ ID NO: 250723 - DNA, 339 bp, Glycine max
gccgcgaccccatctattccaacaagcttggcaagttgtttgagattaccccagagaaaaaccctcagcttcgggacttggatgtcttcctcagtgttgtggatatgaacgagggagctctttttctgccacacttcaattcaaaggccatagtggtactagtgattaatgaaggagaagcaaacattgaacttgttggcattaaagaacaacaacagaggcagcaacaggaagagcaacctttggaagtgcggaaatatagagctgaattgtctgaacaagatatatttgtaatcccagcaggttatccagttgtggtcaacgctacctcagatctga

SEQ ID NO: 250724 - DNA, 252 bp, Glycine max
tgctgctggtggttacagtgatgacattaataagcaacatgataccaccaatgcctacggcgtagacactggtagacagcattctagtggtggctacgatggtgacactaataaacatcatggaactactggtggctataatgatgacaccaatagacatcatggaactaccggtgtctatggtatagacaccgataggcaacaacatgggactactggtggctatgccggtgacactggtaggccacatgg

SEQ ID NO: 250725 - DNA, 407 bp, Glycine max
gccggtagcgtcacaaccgccaccagccttgacttcccagccctctcgtggctcagactcagtgctgagtttggatctctccgcaagaatgcaatgttcgtgccacactacaacctgaacgcgaacagcataatatacgcattgaatggacgggcattgatacaagtggtgaattgcaacggtgagagagtgtttgatggagagctgcaagagggacgggtgctgatcgtgccacaaaactttgtggtggctgcaagatcacagagtgacaacttcgagtatgtgtcattcaagaccaatgatacacccatgatcggcactcttgcaggggcaaactcattgttgaacgcattaccagaggaagtgattcagcacactttcaacctaaaaagccagcatgccaggca

SEQ ID NO: 250726 - DNA, 245 bp, Glycine max
gcccgtagccgttctaaccggcaccagccttgacttcccggcggtcttgtggctcatactgagggctgaccttggatctctacgcaagaatgcaatgttcgtgccacactacaacctgaacgcgaacagcatactatacgcattgaatggacgggcattgatacaagtggcgaattgcaaccgcgagagagtgtctgacgctgagctgcaggagggacggattctgacacggccacaaaaccttc

SEQ ID NO: 250727 - DNA, 526 bp, Glycine max
  unsure (1)..(526): unsure at all n locations
actgtttgacgaggggggaaaggaggaactattcaagagctatgacgtcgcatgcacgcgtacgtaagcttggaattccgcttgagggtgtacctaaatggatgccggaatagctcatagtgagcgagggaaggatcgggctatttaactattacctgagcctcatctattgattaattaatcaacatttggagcctttggtttgggtaaaaaaaaaaaaaaaaagggccggccgccacctatggactcgttgaacccggaaataattcccggaccggtacctgcagggcgtcccagctattcgctatagtgagtcgtatttagagcttggtcgtantcattggtcatagctgtttccctgtgtgaaaatcgtnattccggtcacaaatttcacacatacattacgagcccgggaagcataaaagtgtaaaagccctgggggtgccctaatgaaagtgatgctaactcacatttaattgcggttgcgcttgactgcccgcttttccaagtcggtaaaccttgtcct

SEQ ID NO: 250728 - DNA, 398 bp, Glycine max
gttttgtgggtggctcctgaagacaaggcgagtttatggtcacaacttcattatgtttcgtgtaataatctggaaatgcaagaagcttatcttgtcaatctcgtaaatgtgttacgagaactgtatttgcacagtccagaggaagctcgccaattgagaaggaaagctctctctcgtattgaatggctgcaaaaagctgatgtgcctaccatagcacagattgaagagttccattcgatgcacaggatgatgaatgctcctgattcaaatgataatatcgatctactgttgagcattgatttgttgggtttacaaggagcatgcaaagcttttccaaacaagattgattttgatgataagcttgtgttggctaacacacaagaattctttgatggaaa

SEQ ID NO: 250729 - DNA, 335 bp, Glycine max
  unsure (1)..(335): unsure at all n locations
ctcaagagaaactttaagcagatgtctaatgaagttgtgaccataaactggaaatgcaagaagcttatcttgtcaatctcgtaaatgtgttacgagaattgtatttgcacagtccagaggaagctcgccaattgagaaggaaagctctctctcgtattgaatggctgcaaaaagctgatgtgcctaccatagcacagattgaagagttccattcgatgcanaggatgatgaatgctcctgattcaaatgataatattgatctactgttgagcattgatttgtngggtttacaaggagcangtaaagcttttccaaacaagatggtttttgatgat

SEQ ID NO: 250730 - DNA, 365 bp, Glycine max
  unsure (1)..(365): unsure at all n locations
cactcatcaccatggccaagcttgttctttccctttgtttccttcttttcagtggctgcttcgctctgagagagcaggcacagcaaaatgagtgccagatccaaaagctgaatgccctcaaaccggataaccgtatagagtcggaaggtgggttcattgagacctggaaccctaacaacaagccattccagtgtgccggtgttgccctctctcgctgcacccttaaccgcaatgcccttcgtagaccttcctacaccaacggtccccaggaaatctacatacaacaaggtaatggtatttttggcatgatattcccgggttgtcctagcacttatcaagagccgcangaatctcagcaacgagga

SEQ ID NO: 250731 - DNA, 508 bp, Glycine max
  unsure (1)..(508): unsure at all n locations
caatgtttctcnttacgtagaacctcatcggaaccctatagaagagctatgacgtcgcatgcacgcgtacgtaagctcggaattcggctcgagctttgatgcctggtggttcattcgaggcctacaagtacatagaagacattctcctcaaggtggccgcacaagtccctgatagtggtccttgtgtgacctacatcggcaaaggtggatcaggaaattttgtgaaaatgatccacaatggaattgagtatggtgacatgcagctcattgctgaggcctatgatgtgctaaagtcggttggaaagttgtcaaatgaggagctgcaaagtgcgttttcggaatggaacaaaggggaactcctgagtttcctcatcgagatcaccgctgacatatttggaatcaaggatgacaaaggagaagggcatttggtagataaggtttggacaaaactggcatgaagggaactgcanatggaccgtgcaacaagctgctgaattatcaattgctt

SEQ ID NO: 250732 - DNA, 399 bp, Glycine max
tcctcatctcaagccacttcagagaaaatggcggtacctctgctctcgaagaagatcgtgaagaagagggtgaagaagttcaagaggcctcagagtgacaggaaaatttccgtcaagacaaactggcgtagaccaaagggtatagattcccgtgttaggagaaagttcaagggatgcactttgatgccaaacatcggttatggttctgacaagaagacccgccactatctccctaatggttttaagaaatttgttgttcacaatgtgaaggacttggaactgctcatgatgcacaacaggacttactgtgctgagattgctcacaatatatccacaagaaagagaaaagatatagttgagagagctgcgcaacttgatgttggtgtgacaaacaaaaca

SEQ ID NO: 250733 - DNA, 389 bp, Glycine max
ccccgcccaaaccctaactccctaccctattccgctttctctcatccatcatgaaaggaggaaagtccaagaccgaatctaagagagccgatgccaaacttgctgtgaataagaagggcgccgtcaccaagactaggaaacccgccggaaaggggaaggcagcgaaagatcctaacaagccaaagaggcctccaagtgctttcttcgttttcatggaggaattcaggaaggtgttcaacaaggaacatcccgacaacaaagcagtgtctgctgtgggcaaagctgctggagcaaaatggaagacgatgtctgatgctgaaaaagcaccttatgtggcaaagtctgagaaaaggaaagtggagtacgagaagaacatgagagcttataac

SEQ ID NO: 250734 - DNA, 501 bp, Glycine max
  unsure (1)..(501): unsure at all n locations
cagtttctgacagggggggaagggaggtagtcctcaagagctatgacgtcgcattgcacccttccgtaagctcggatttcggctcgggaaccgttttgttgtcctggtggctcattctacctccttaattccggttcatggccggggttacgcattggcatccgttgtatcggtacaagttggatggggtaatattggccgaaggaatggaatcgtggaaggtgtacacgagaagcctgattcaagacatggttgataagcctactcaactgattgctccccatactcattatcaggtcactataggcccattaaccacacccatgaaattgacccggtggagcttaggcatangttgctccgatcaccttcactagagcctagaggagttgctggacacgcatgacatgcccaaatattacttaagatttggtatggtttggtttggttcgttaaggtaaccttgagctgtagcttcaaacaatcaaaggttttgttaaa

SEQ ID NO: 250735 - DNA, 496 bp, Glycine max
cgagtttaacggggggagaaggcgcactatacaagagctatgacgtcgcatgcacgcgtacctaagcctgggatttcggttcgggttccaaagtcttccttaggcttacggttcctattttaggggacgaattgattaacacaggctggaattaatgcaggtcttgcaatggaaacccttaagctgaccgacatttgctaatggtacctgccctggattaaggccaagtctatgtggtggatgtgaaaacagatccaggggctgcatcttggcccaaagttgcggagcctgccattatcgtacagaaaactggattagctaatccacacccatctgactgccttgcttatggtgatataatgatctcgagtcttggaaatgaagatggaaatgctgcaggaaatggatcgctgtctattgattctgagcttaatgtgaacggaaggtgcgagagaccgggtcacagtccactatttgggtatgacttatggtcacc

SEQ ID NO: 250736 - DNA, 393 bp, Glycine max
gttttgtgggtggctcctgaagacaaggcgagtttatggtcacaacttcattatgtttcgtgtaataatctggaaatgcaagaagcttatcttgtcaatctcgtaaatgtgttacgagaactgtatttgcacagtccagaggaagctcgccaattgagaaggaaagctctctctcgtattgaatggctgcaaaaagctgatgtgcctaccatagcacagattgaagagttccattcgatgcacaggatgatgaatgctcctgattcaaatgataatatcgatctactgttgagcattgatttgttgggtttacaaggagcatgcaaagcttttccaaacaagattgattttgatgataagcttgtgttggctaacacacaagaattctttgat

SEQ ID NO: 250737 - DNA, 396 bp, Glycine max
  unsure (1)..(396): unsure at all n locations
gggaaagaggcttctcaccaaagagtaagacatgggttccattgatgatgatacaccgcttctggaagagggtctccttcaggatgatgaagggagtgagcaattcacaggagatggctcagttaactttagaagagagcctgctcttaagaagggtaccggcaattggagggcttgtccttttatcctaggcaatgagtgttgtgaacgtttggccttcttcggaattacaacaaatcttgttacctatcttaccaccaaattccatgaaggaaacgtttctgctgcaagaaacatcagcatctggcaaggcacttgttatctcactcctatcattggagctgttctagcagatggttactggngtcgatactggacaattgctgntttctctgc

SEQ ID NO: 250738 - DNA, 406 bp, Glycine max
cttctctggttggttccggtctagagtcttcaatttcttcctggtggtcctcgctttcctggtttcaatttcgattctttcgttaatttaataagatgtttgggagggcaccgaaaaagagcgattatacgaggtactacgaaatcctcgcgtcttcagaacgctttgcacgatgatctgaagaagcttacaagaaagccgccattaagaatcaccccgacaagggcggtgatcccgagaagtttaaagagctggcgcaagcttatgaggttctgagtgaccctgagaagcgtgagatatatgatcagtatggtgaagatgcgcttaaggaaggaatgggtggtggcggtggccatgatccatttgatatcttttcatctttctttggcggtggggagttcctttg

SEQ ID NO: 250739 - DNA, 362 bp, Glycine max
cttcacttgttgctcgtcttagtttctgtgttgtgtcatttttattgctatatcctaattaaacttcaccctcaaaatgagtgatcccacactagcacaaccacacctagtcgaagtccacacaacactcgaaaccgttgttaccacacacaaccataaccatagaccctaaataaatgcctcaggtgaaaagaagaaaattgtgggggtgttctacaaagggaatgagtatgctaaattgaaccccaatttcgtggggtgtgttgaaggagcattgggtatacgtgagtggctggaatcacagggtcatcagtacattgtcactgatgacaaagaaggaccagattctgaacttgagaaac

SEQ ID NO: 250740 - DNA, 509 bp, Glycine max
  unsure (1)..(509): unsure at all n locations
aaggtttttttatgaggggggatggatggtaattctaagagctatgacgtcgcatgcacgcgtacgtaagctcggaattcggctcgagatggaagcacttagagtgtgctacgtgcatggccatgactctgtgttgagacttatgtaatgttttcgagtataaatcttagcctttgcgaaaaatatacaaaaaacaacaatgaaaataagggcggccaccgactagtgagctcgtcaacccgcaaattaattacggaccggtacctgcaggcgtaccagctttgcctatactgagtcgtataaaagcttggcgtaatcatggtcatagctgaatcctgtgtgaaatcgcaatccgatcacaattccacacaacatacgagccgtaagcataaagtgtaaaacctgagctgcctaatgagtgagctaactcacattaattgcgttgagctaactgcccgatctccagtcnggtaacctgtactgccagctgcattaatgnatccgccaaa

SEQ ID NO: 250741 - DNA, 350 bp, Glycine max
accatccttttcttgaaagatgatggcaccttaaagccattggccatcgaattaagtttgccacatcctaggggagatgagtttggtgccgttagtagagtcgtcttgcccgcagaccaaggtgctgaaagtacaatttggctaattgccaaggcatatgttgttgtcaatgactcctgctatcatcaactcatgagccactggttaaatactcatgctgtgattgaaccatttgtcatagcaacaaacaggcatcttagtgtgctccaccctatttataaacttttgttgcctcactatcgtgacaccatgaacatcaatggactcgcaagacaatcactcatcaatgc

SEQ ID NO: 250742 - DNA, 355 bp, Glycine max
  unsure (1)..(355): unsure at all n locations
gtcaaattcacccgctaccttttcccgtgtacgaacgaatccaatccaccaaatcggcggcgacgcctncgctctgtctcgaaaccacagatctgcggcggaaccgccgtctccgactatctccgattgatcttccggtaaagtggaccggagatgccggttgccgcttccgccatttacttcctcaacctccgcggcgacgttctcatcaaccgcctctatcgcgacgatgtcgggggaaatatggtggatgcttttaggacgcatattatgcaaacgaaggagcttggtacttgcccagtgaggcagattggtggatgctctttcttttacatgaggatcagtaatgtctaca

SEQ ID NO: 250743 - DNA, 291 bp, Glycine max
gtccaaaatcctagtttaccttaataaatattttaagatgctatgataagagcacggttcccattactgttgctgggactggttttcctggcttaaatttctgtctcatttggcattgcttactgggaaaaatagaaccccaaacacaacaagtgtctccagagttgcaatagcgagagagactcgtactggaaccaagcatgccacgctcgttgcaacctccttaaggtggagaaagaagaatgtgaagaaggcgaaattccacgaccacgaccacgaccacaacacccg

SEQ ID NO: 250744 - DNA, 278 bp, Glycine max
aactcatctcatgagctgcaagatcaggtcatgcccctgaacctgttgatgttggacgcatattgcaagtcgatgttatatcagaaagcgagcacgtcacactttcaaccgctggtccaatagatccagttaagagattgaaacgtgttctgcaatcatgtcgagcttaaatttctttcgtactctcatgcagctgctggtttgggaacctatgtacaggcactaatgcgcaaacatgacactgaattcaacgtggtagtaacacacatgaatggttc

SEQ ID NO: 250745 - DNA, 387 bp, Glycine max
tagaacagctatgacgtatgatgcacgcgttcagctggtagtacggctccaggagaactgattcatacatatacatgatctctcatcacttctcggaatcgtaagctatgggaaagtcttacccaactgtgagtgctgattaccagaatgccgttgagaaggcgaagaagaagctcagaggctacatcgctgagaagagatgcgctcctctaatgctccgtttggcatggcactctgctggaacctttgacaagggcacgaagaccggtggacccttcggaaccatcaagcaccctgccgaactggctcacagcgctaacaacggtcttgacatcgctgttaggcttttggagccactcaaggcggagttacctattttgagctacg

SEQ ID NO: 250746 - DNA, 400 bp, Glycine max
aacagaaccaaactcagaaccaaactcagaaccaaactcgccaaaactagggttttgcattgatggcactgtgcaaccgcgtcagatcgggaatctctctcttcaccaaatccacgttccttacttcccagcgatccagtctccaacgatccctcgttgcccctttcatttccctcgcctccagaaattacgccaacgtgccggggcaaaaggaaaccaaagttaaggtccctctggctatgattggaggttcaggaaactatgcctatgctttgtatattgcatctgtgaaagccaatgcagtggaaaaggttgagactgagcttctgcaattgttgaggcagtaaagaatagtcccatatttcacagttaataagggactcgtctgtggctaaggatg

SEQ ID NO: 250747 - DNA, 354 bp, Glycine max
  unsure (1)..(354): unsure at all n locations
gatgattccttcttatctaccactcaagcccaacagtcctacttgcaaggcttcagccataatattctagagacctccttccatagcgaattcgaggagataaacagggttttgtttggagaggaagaggagcagaggcagcaagagggagtgatcgtggaactctcaaaggaacaaattcggcaactgagcagacgtgccaaatctagttcaaggaaaaccatttcctccgaagatgaaccattcaacttgagaagccgcaaccccatctattccaacaactttggaaagttctttgagatcacccctgaganaaacccacagcttcgggacttggatatcttcctcagttct

SEQ ID NO: 250748 - DNA, 507 bp, Glycine max
gggaaggtctgattaaacgacacgtatgatcgaactgctcatgaggtatgacgtcgcatgcacgcgtacgtaagctcggaattcggctcgacctgggatgaaggaaaaatttgtgcaaatgatgaagagcatctatgaaacagaagttacagattggccagtaccactgaaaatcatttctggaaccattcttgcaacaattttgggaacaaccttctggaaactcttttcctttcttagagatgctggtaatggaggagtttttgttggcaatgttgcttcagcattcacaacttcaagtgtgcttgaggcccaaagtagaaagcccaacagatatgaagtttcccaatacagatatcgcaatgtgccaataaagcgcagagcatgggttgaaggccagatgtctttcgatcagtctgtagtagcaattatgtctaaatgcaaagccagcatgagaatgggaaacactgatgctcaaatttgattgttccagggcgcagattcata

SEQ ID NO: 250749 - DNA, 392 bp, Glycine max
caacaacaactatggcaagttatcaaaagcactacgatgatcagggtcgcaaggttgacgagtatggcaacgttgagaagcaaaccgacgaatacggcaaccctgttcatgctgctagtgtcacctatgtagccaccagaactgctgctggtggttacagtgatgacattaataagcaacatgataccaccaatgcctacggcgtagacactggtagacagcattctagtggtggctacgatggtgacactaataaacatcatggaactactggtggctataatgatgacaccaatagacatcatggaactaccggtgtctatggtatagacaccgataggcaacaacatgggactactggtggctatgccggtgacacttgtaggcaacat

SEQ ID NO: 250750 - DNA, 253 bp, Glycine max
agaaagtcttccatagccccccaaaaatgaagagcaccatgttctttgctctctttctgttttgtgccttcaccacctcatacctaccttcagccatcgctgatttcgtgctcgataatgaaggtaaccctcttgaaaatggtggcacatattatatcttgtcagacataacagcatttggtggaataagagcagccccaacgggaaatgaaagatgccctctcactgtggtgcaatctcgcaatgagctcga

SEQ ID NO: 250751 - DNA, 359 bp, Glycine max
ctctagccgctcgagcgacattcattcatctatggctacgcttattgctcccagcgaccactctccccaagaagacgctgaggctctcacaaaggcttttgaaggatgggggactgatgagaaaactgtcatagtaatattgggtcatagaactggttatcagaggcagcaaatcagaagagtctatgaggaaattttccaggaggatcttgtgaaacgcctagagtctgagatcaaaggagactttgagaaagccgtgtaccgatggatactagaacctgcagatcgtgatgctgttttggccaatgttgccatcaagaatggcaaaaactacaatgccattgtggaaatcgccacta

SEQ ID NO: 250752 - DNA, 330 bp, Glycine max
aaacactcatcagtcatcaccatggccaagctagttttttgcctttgttttctgcttgtcagtggctgctgcttcgctttcagttccagagagcagcctcagcaaaacgagtgccagatccaaaaactcaatgccctcaaaccggataaccgtatagagtcagaaggagggctcattgagacatggaaccctaacaacaagccattccagtgtgccggtgttgccctctctcgctgcaccctcaaccgcaacgcccttcgtagaccttcctacaccaacggtccccaggaaatctacatccaacaaggtaagggtatttttggcatgata

SEQ ID NO: 250753 - DNA, 406 bp, Glycine max
cttgcaagctcccaaggatgtgtcgcagcaaatcaaaatgggcaacaagaaaatgaagaaggaacaatattcttgtgaccatccacctgcatcatgggattggaggaaaaaaggtgtcatcacccaagtaaagtaccaagggggctgtggaagcggttgggcgttttctgccacgggagccatagaagcagcacatgcaatagcaacaggagaccttgttagcctttctgaacaagaactcgtagactgtgtggaagaaagcgaaggttgttacaatggatggcactatcaatcgttcgaatgggttttagaacatggtgggattgccactgatgatgattatccttacagagctaaagacggtagatgcaaagccaataagatacaagacaaggttacaattgac

SEQ ID NO: 250754 - DNA, 410 bp, Glycine max
tagtagaagagggaattaccaagtttccaagctttcctttagagtagaagcaaagaggtaaagtgtcataaaaagctgtaggcttccttcaatgggtgctcctaagcagaaatggactgcggaagaagaagcggcactgaaagctggtgtactcaagcatggggcaggaaaatggcgcaccatacttacagatcctgagttcagtgccattttgcatatgcgttcgaatgtagatcttaaggataaatggaggaatataaacgtgacagcgatatggggatcccggcagaaggcaaagcttgctcttaaaaggaacctgccagcccccaaaattgacaataaccatatggccttgagtaccgtagttcgacatgatgaagttcttgatactaaacccttggcagtttctg

SEQ ID NO: 250755 - DNA, 343 bp, Glycine max
  unsure (1)..(343): unsure at all n locations
ttgaagaacaacatggtggtgctaaaggtgtgtttgttgcttcttttccttgtgggggttacagctgcacgcatggaactgagcttcttcaaaagtgatcagtcatcaagttatgatgatgatgagtattcaaaaccatgctgtgatctctgcatgtgcacacgctcaatgcctcctcaatgcagctgtgaagatattaggctgaattcatgccactcagattgtaagagctgtatgtgcacacgctcacagccaggacagtgtcgntgtcttgacaccaacgacttctgctacaaaccttgcagtccagagatgactaganaaactaatagctctctcaaat

SEQ ID NO: 250756 - DNA, 489 bp, Glycine max
atagctattactcagctatgacgtcgcatgcacgcgtacgtaagctcggattcggctcgaggagaaaagtattggtttaagactacaaattttcaatttttcgatgggcgtccaggcaacgaaaagaaggtcgagctgaggcaactgcgatagttgctgcgaaagaactcgaacaactcaaccgagaaaaagaccgtgatttcagtgttggtgttgcagaccaacaccaacaagaagaacatcagttagatcaacaaaagcgtggtgtaatcggatccatgttcaaggcggtgcaagacacctacgagaacgccaaggaagctgtcgttggcaagaaagaaccttcgacgacgactaactcgtacagtaccagagaggttattcacgacgttgacattcaacccgatgacgcggctgcagcgagggaagtgagagacaaatcagcctcaaagtcaccaggtatctacaattctgccactgctgacaaca

SEQ ID NO: 250757 - DNA, 374 bp, Glycine max
cagaagctgtcgttgtaaatgttacatgtggtagtggacgtggtggtttacccaccactgcttggattagttctgcagttaacaatcgctcctcagatatcaacaaaaagattcgcacagcacttgggaaaggtaagaaaattgtttttcttactagagttgatccttttccagtagctttactggctgttctttttggcgttaagaatgaaattctgagttctaacgccactaatcctatgctgacgcgacttcttgagaactgtaggagtctcaaatatctggttgacgagtgtccttttgcatttgtgaactagtatgtaatattttattcacttaaataaagcgcattactatgtgcaatgagtgtgttt

SEQ ID NO: 250758 - DNA, 296 bp, Glycine max
gaggaattttagtggacaaaactggagattggatgacacgtatacaaaattcttcaatgagtaacttgttgagagttgctgcttggaagaaaggctgtttaatggttaagattgtgatgtctgggaatgcatcagtcaaaaggagtgattgggccttattggtacaagtgtttttaacaaacagcaacagtacagatgatttagatgcatgtaagtggacaaaatctgaaccacattactgggaattgatcctcccaatagaatgatgcgggcctaataatggttttgaaatgtgg

SEQ ID NO: 250759 - DNA, 417 bp, Glycine max
  unsure (1)..(417): unsure at all n locations
atcaccaccgtcaccgacgctcaagccaaggccgccggcgggcgtggccgtgcctacgtcaccttcctcgccggaaacggtgactatgtgaaaggtgtcgttggcttggccaaaggtctgaggaaggtgaaaagcatgtaccctctggtggttgcagtgttacccgatgttccagaacatcaccgaaacattctcacctcccaaggttgcattgttagagaaattgaacccgtgtaccctcctgagaatcagacgcagttcgccatggcatattacgtcatcaactattccaagctacgtatttgggagtttgtggagttcagcaagatgatatacctagacggtgatatacaagtgtttgacaatattgaccacttgtttgacttgcctgataactactnttatgcggtgatggac

SEQ ID NO: 250760 - DNA, 313 bp, Glycine max
attggatcggagcgtaccgcggaggccagagaagcagggactggtgcgacccttcatcaccattcactgatttgtgggaccctcgtcgtgtcggtgacgctgatgatatcacctcctctctcgcccatgctcacgttgactggcgtgagactgataaagctcatatcttccgtgctgatcttccaggggtgaagaaagaggatctgaaggtgcaggtggaagagaataagatcctgcagataagcggggagagggtgaaggagaaggaggaccagaacgacaagtggcaccgcgtcgagaggcagtgcggaag

SEQ ID NO: 250761 - DNA, 393 bp, Glycine max
aaaggatccaaagacaagaaggccatgaggagagctgagaaggagagacagaaggaaggtgaattagctgatgaggaacagaagaaagtgaagaaagaggttaagaagaaaggctcttcatcttctaaggatggcactgctaaatcaacctcttctaagaaaaaagcaagtggctctgatgaagaccacacttcacctactcacagtcaaattgacgagaaagaggaggctccagatgaagatgatgacgacgacgtgcaatggctgacagatacatcacttgatgctgcccgtcaacgtatccaagaacagttaagtgctgtgacaactgatatgggtatgctttctacagatgaaccagagaagaagaaaaaaacattaagtaacagaaat

SEQ ID NO: 250762 - DNA, 507 bp, Glycine max
gggagtgtgtatctttttaaagagagggagagaatgtttacagcagagctatgacgtcgcatgcacgcgtacgtaagctcggaattcggctcgaggaaatctcgtgtggaacaaaagggtaaaagctcgtttgatgctgatttccagtacgaatacgaaccgtgaaagcgtggcctatcgatcctttagtccttcggaatttgaagctagaggtgtcagaaaagttaccacagggataactggcttgtggcagccaagcgttcatagcgacgttgctttttgatccttcgatgtcggctcttcctatcattgtgaagcagaattcaccaagtgttggattgttcacccaccaatagggaacgtgagctgggtttagaccgtcgtgagacaggttagttttaccctactgatgacagtgtcgcaatagtaattcaacctagtacgagaggaaccgttgattcgcacaattggtcatcgcgcttggtttgaaagccagtggcgcgagct

SEQ ID NO: 250763 - DNA, 406 bp, Glycine max
ctttggaagtgcggaaatatagagctgaattgtctgaacaggatatatttgtaatcccagcaggttatccagttgtggtcaacgctacctcagatctgaatttctttgcttttggtatcaatgccgagaacaaccagaggaacttccttgcaggttcgaaagacaatgtgataagccagatacctagtcaagtgcaggagcttgcgttccctgggtctgcaaaagatattgagaacctaataaagagccaaagtgagtcctactttgtggatgctcagcctcagcagaaagaggaggggaacaagggaagaaagggtcctttgtcttcaattttgagggctttttactgaataagtatgtagtactaaaatgtatgctgtaatagctcatagtgagcgaggaaagt

SEQ ID NO: 250764 - DNA, 407 bp, Glycine max
  unsure (1)..(407): unsure at all n locations
ctctctcgctcttcttctcatccagcaccgagtcacagacgtgagcgatcttccgattccctttcgtcttggtttatgagctcgaaggagagacccactcttggtggcacgcggattaagacccgcaaacggaatattgctgcgccgctggaccctgcagcattctcggatgcagtggtccagatttatttggataatgctggtgatctggaacttattgctaagagcattgaatcttcagaccttaacttttcaagatacggcgataccttttttgaggttgttttcactgggggtcgtacacaacctggaactaccaagcctgatgagggggaccgncatccatactctataatagagtgtgagcctaagcgggaagtcattttaccatctgtaatctacataca

SEQ ID NO: 250765 - DNA, 407 bp, Glycine max
  unsure (1)..(407): unsure at all n locations
aagaaggcttttttttgccaacaccagttgcaaaactaatatcgtttcaaacggatttgatctacaatggcctggtttctctcttttcctctatccactctcttttttccgtggctacagagtcctaccaccgtgctgaggagaccaaagacagtgttgaatcagcagtgcaacgtgctccttctcaaagcactcatggcagcgcactcttgctgaagaaactgggactttgcttcctgagtgttgcgtatgtgtgcatggttatgattttggctctcattctggctgctgtggtgggtgttgctttggttcggttgtgggtggaggaacccgtgtctgtcaaggaaaatctgcattntgattacactgaaactcaccctacggctgtgttnntattcaatggagtt

SEQ ID NO: 250766 - DNA, 407 bp, Glycine max
tcacacacaactacaagaaagaacttccttataaccaaagcgcaacaacaactatggcaagttatcagaagcactacgatgatcagggtcgcaaggtcgacgagtatggcaatgttgagaggcaaactgacgaatatggcaacccggttcatgccactagtgtcacttatgtagccaccaaaagtgttggtggctacaatgatgacgctaataagcaacatgatattactggtgtctatcccgagaaagacaccggtagacatcattttggtcgtggttacgacggtgacactaacaagcaacatgatgctactggtgtttatcccggaatagacattggtagagatcatgggactaccggtgtttatggcctaaacaccgacagacatcatggaacttctggggtg

SEQ ID NO: 250767 - DNA, 418 bp, Glycine max
ctagttcaatatcctagtataccttaataaataatttaagatactatgatgagagcacggttcccattactgttgctgggacttgttttcctggcttcagtttctgtctcatttggcattgcttactgggaaaaagagaaccccaaacacaacaagtgtctccagagttgcaatagcgagagagactcgtacaggaaccaagcatgccacgctcgttgcaacctccttaaggtggagaaagaagaatgtgaagaaggtgaaattccacgaccacgaccacgaccacaacacccggagagggaacctcagcaacccggtgagaaggaggaagacgaagatgagcaaccacgtccaatcccattcccacgcccacaacctcgtcaagaagaagagcacgagcagagagaggaacaggaat

SEQ ID NO: 250768 - DNA, 377 bp, Glycine max
ttcacttgcagcactgttgcatcatcatcttcattgcaaagccctaaacttcaccttcaaccatgaccacacaagtaccaccacacagtgtccaagtccacacaacaacacaccgctacgaagctggcgtcgtcccccccggagcccgtttcgaaccgccgcgttatgaagccggcgtcaaagcgccctccatttaccattccgagagaggtccaacgacttcccaggtcctcgccgtcctcgccggcctcccggtcggtggcatcctgctcctcctggcgggattgaccctggcaggaaccctcaccggactggcagttgccacgccgctcttcgtcctcttcagcccggtgctggttccagccacggtcgccatc

SEQ ID NO: 250769 - DNA, 393 bp, Glycine max
  unsure (1)..(393): unsure at all n locations
ctggtgggttggaggaggagtcttcatatccctacactggggagagaggtgaatgcaagtttgatccagagaaaatagcagttaagatcacaaatttcaccaatatccctgctgatgagaaccaaattgccgcatatttagtaaaaaatggtccacttgctatgggcgtgaatgcaattttcatgcaaacatacattggtggtgtctcatgccctctcatatgtagcaagaaaaggctgaaccatggtgtgttacttgtgggatatggtgcaaaaggcttctcaattcttaggcttggcaacaaaccatactggatcatcaagaattcgtggggggagaaatggggagaagatggctattacaagctctgcanagggcatggcatgtgtggaa

SEQ ID NO: 250770 - DNA, 400 bp, Glycine max
  unsure (1)..(400): unsure at all n locations
gaacaacagctccttgactgtgacaacaagtgtgacataagaggaaagacttcatgtgacaatgggtgtaatggaggtcttatgacaaatgcctacaattatttgctcgagtctggtgggttggaggaggagtcttcatatccctacactggggagagaggtgaatgcaagtttgatccagagaaaatagcagttaagatcacaaatttcaccaatatccctgctgatgagaaccaaattgccgcatatttagtaaaaaatggtccacttgctatgggcgtgaatgcaattttcatgcaaacatacattggtggtgtctcatgccctctcatatgtagcangaaaaggctgaaccatggtgtgttacttgtgggatatggtgcataaggcttctcaattc

SEQ ID NO: 250771 - DNA, 341 bp, Glycine max
gtgaagttttttctttgagaagtaaaagatcttagtgcaagtagttaacatggaatctcagcaagcaaaccgtgaagaacttgatgagaaggcaaggcaaggtgaaactgttgttcctggaggaactggtgggaagagtcttgaggctcaagaacatcttgctgaaggaaggagccgtggagggcagacgaggaagcagcagctagggtcacaggggtatcatgaaatggggaccaaaggagggcagacaaggaaggaacagatggggagagaagggtaccaagagatgggacgcaaaggaggactcagcaccatggacaagtctggtggagaacgtgctg

SEQ ID NO: 250772 - DNA, 416 bp, Glycine max
gatgagtttgaagaacaacatggtggtgctaaaggtgtgggtgttgcttcttttccttgtgggggttacagctgcacgcatggaactgagcttcttcaaaagtgatcagtcatcaagttatgatgatgatgagtattcaaaaccatgctgtgatctctgcatgtgcacacgctcaatgcctcctcaatgcagctgtgaagatattaggctgaattcatgccactcagattgtaagagctgtatgtgcacacgctcacagccaggacagtgtcgttgtcttgacaccaacgacttctgctacaaaccttgcaagtccagagatgactagaaaaactaatagctctctcaaatggacgaagcccctttaggctttgtttgttatgttaggggagacaaattaaacaagaaataaaagc

SEQ ID NO: 250773 - DNA, 398 bp, Glycine max
caaaatgctctgtactgttgctgtttgtaagtggacaaaagcagaaccacattcctgggaattgatcttcccaatagaggtatgtggtcctaataatggttttgaaatgtggagttctgagtgggcaaatcaaacttcatggcatttgagtttccttattgacaatcccaaacagtctacagtttttgatattctcttgggaatctctcaagattttgaaattgctggtaatactcttatgccagctttttctgttccacaggctactgccagatcttctgaaaatgcggaatcctctgcatgatctggaatttgtgttttctttcgcttgatcacttgtttaattcaataaaggaaattacgcatgaccctctagttgagtatgctctgcctatttg

SEQ ID NO: 250774 - DNA, 399 bp, Glycine max
gttcaatatcctagtacaccgtattaaagaatttaagatgtgactatgatgagagcgcggttcccattactgttgctgggagttgttttcctggcatcagtttctgtctcatttggcattgcgtattgggaaaagcagaaccccagtcacaacaagtgcctccgaagttgcaatagcgagaaagactcctacaggaaccaagcatgccacgctcgttgcaacctccttaaggtggaggaagaagaagaatgcgaagaaggtcaaattccacgaccacgaccacaacacccggagagggaacgtcagcaacacggtgagaaggaggaagacgaaggtgagcagccacgtccattcccattcccacgcccacgccaacctcatcaagaggaagagcacgag

SEQ ID NO: 250775 - DNA, 353 bp, Glycine max
tgcaaacattgaacttgttggcctaaaagaacaacggcaggagcagcaacaggaagagcaacctttggaagtgcggaaatatagagccgaattgtctgaacaagatatatttgtaatcccagcaggttatccagttgtggtcaacgctacctcaaatctgaatttctttgctattggtattaatgccgagaacaaccagaggaacttcctcgcaggttcgcaagacaatgtgataagccagatacctagtcaagtgcaggagcttgcattacctgggtcttcacaagctgttgagaagctattaaagaacccaaagagaatcctactttgtggatgctcagcctaagaagaaa

SEQ ID NO: 250776 - DNA, 393 bp, Glycine max
gcttttccccacaagctggtgcagtttggagagagtcaggaaaaagttgtattgaaattttcacaagaggaatttcttacagcttggtcaactcaggtgcgtcctgcaacaactctgttggctgatgggtgcccatatttgtatgctatggtgcatgatagttcagtgtctacaataccaggtgattttgtcattggtgttaagttgacaaccataaacaatatgtgtgcatatgggctcaatcctggtatttcaggttctcgtcttttgggcaccattcctcagtccatttcacagcaaactgtttggaatcaaatggcaacagtgagaacaccattgaattttgattctagcaagcagagcttttgtcaattctctattgatcttcttggt

SEQ ID NO: 250777 - DNA, 423 bp, Glycine max
  unsure (1)..(423): unsure at all n locations
ctcgagccgctaatagtgagagtaggagcaatgatgtttatcttccaagagatgaggcttttggacacttgaagtcatctgactttcttacttatggactaaaatccgtatctcaaaatgttcttccattattgcaatctgcttttgatttgaatttcacaccccgtgagtttgatagctttgatgaagttcatggactctattcaggcggaattaagctgccaacagatataatcagcaagattagtccactacccgtgcttaaagaaatcttccgaactgatggtgaacaggcccttaagtttccttcttctaaagtaattcaagtgagtaagtctgcatggatgactgatgaagaatttgcaagagaaatgctngctggtgtaaatccaaacttgattcgttgtcttaaggatttccctc

SEQ ID NO: 250778 - DNA, 412 bp, Glycine max
  unsure (1)..(412): unsure at all n locations
cttccttagttcaatatggggaagcccttcactctctctcgttgttccctttgcttgctactcttgtcgagtgcatgctttgctattagctccagcaagctcaacgagtgccaactcaacaacctcaacgcgttggaacccgaccaccgcgttgagtccgaaggtggtttgattcaaacatggaactctcaacaccctgagctgaaatgcgccggtgtcactgtttccaaactcaccctcaaccgcaatggcctccacttgccatcttactcaccttatccccggatgatcatcatcgcccaagggaaaggagcacttggagttgcaattccaggatgtcctgagacgtttgaggagccacangaacaatcaaacagaagaggctcaaggtcgcagaagcagcagctacagg

SEQ ID NO: 250779 - DNA, 395 bp, Glycine max
  unsure (1)..(395): unsure at all n locations
gtagctattatactctctagagtaattgcggaatctgctggaagtttctaataatggcgaaagacgttgagcaggtcacagagcaaggtgaatactccgcgaaggactaccatgaccctcctccggcaccgttgatcgacccagatgagctcacaaagtggtccttgtacagagccgccatagctgagttcatagcaacactcctttttctttacatcaccgtgttgaccattattggctacaagagacagagtgacaccaaaatccccggtaacaccgaatgtgacggcgttggcattttgggcatcgcttgggccttcggtggcatgatcttcatccttgtttactgcacttgccgaatctctggnggacacatcaacccctgcgtgacattc

SEQ ID NO: 250780 - DNA, 381 bp, Glycine max
cgcgtacgcatgctggggcttgggattcagctcgagctctttgccatcccaatgcgccttaaagagacttggggtgacagaattctctggggtgagatccacttcatgtgtcacatatgctaacagtgctagagaatcttgcttttttgatcttgtagcttcccaactcactcccaagaccaatggatcaactactgtgaggggagagacagtggccaagttgaaggtggcaatcaatggtttcggacgcattggtagaaacttccttcgctgctggcacggccgaaaagactcaccccttgaagtcggtggtgtcaacgacagtggtggtgtcaggaatggctcgcacctgctgaaatatgattctatgctgggaacctt

SEQ ID NO: 250781 - DNA, 374 bp, Glycine max
  unsure (1)..(374): unsure at all n locations
gctcgaagtcgattgcccctgcgtcactcccgaaatcgttctcaaggcctctgggcacgtggacaaattcaccgatctcatggtcaaagacgagaagaccggcacgtgctaccgcgccgatcacctgctcaaggacttctgcaacgacaagctccagcgtgaccttgcgttgtcttctgataaggttgcggagcttaagcacgtgcttgccatgctggatgatttctctgctgaagagcttggtgccaagattaaggactatgggattgtttctcctgagactaagaactctctctctgatccctaccctttcaatttgatgtttcagacttccattggtccctccggcttcagccctggctntatgagacccg

SEQ ID NO: 250782 - DNA, 421 bp, Glycine max
aattattaacacttccttagttcaatatggggaagcccttgactctctctctttcttccctttgcttgctactcttgtcgagtgcatgctttgctattagctccagcaagctcaacgagtgccaactcaacaacctcaacgcgttggaacccgaccaccgcgttgagtccgaaggtggtttgattcaaacatggaactctcaacaccctgagctgaaatgcgccggtgtcactgtttccaaactcaccctcaaccgcaatggcctccacttgccatcttactcaccttatccccggatgatcatcatcgcccaagggaaaggagcacttggagttgcaattccaggatgtcctgagacgtttgaggagccacaagaacaatcaaacagaagaggctcaaggtcgcagaagcagcagctaca

SEQ ID NO: 250783 - DNA, 404 bp, Glycine max
ctagtataccttaataaataatttaagatactatgatgagagcacggttcccattactgttgctgggacttgttttcctggcttcagtttctgtctcatttggcattgcttactgggaaaaagagaaccccaaacacaacaagtgtctccagagttgcaatagcgagagagactcgtacaggaaccaagcatgccacgctcgttgcaacctccttaaggtggagaaagaagaatgtgaagaaggtgaaattccacgaccacgaccacgaccacaacacccggagagggaacctcagcaacccggtgagaaggaggaagacgaagatgagcaaccacgtccaatcccattaccacgcccacaacctcgtcaagaagaagagcacgagcagagagaggaacaggaa

SEQ ID NO: 250784 - DNA, 418 bp, Glycine max
ctctttcccaacccaatgcgccttaaagagacttgaggtgacagaattctctgggcttagatccacttcatgtgtcacatatgctaacagtgctagagaatcttccttttttgatcttgtagcttcccaactcactcccaagaccaatggatcaactcctgtgaggggagagacagtggccaagttgaaggtggcaatcaatggtttcggacgcattggtagaaacttccttcgctgctggcacggccgaaaagactcaccccttgaagtcgttgttgtcaacgacagtggtggtgtcaagaatgcttcgcacctgctgaaatatgattctatgctgggaacctttaaggcagatgtgaaaatactagacaatgaaaccatcactgttgatggtaagtccatcaaggttgtttcaagc

SEQ ID NO: 250785 - DNA, 367 bp, Glycine max
  unsure (1)..(367): unsure at all n locations
ttaatactgagaatggacatattcttattcattataagatagttttcaagtacaaaacgggcataacagcatgttatacctattccacataaagaaaggcctctacatatagagtagtagactaatattagaaatcacatccacaatttgaacactaacattgaacgagactatctagtacatagctagatttaaagcacattcaagatttgtgaagtttgagacttaattaaggtatgatgttaagtgcggcaagaggcacatgagcaatctgtgccacatctgcaaccagttccagaagccggagtcttgggacatgagcatggatngcacccacagtactcttcgcacgagcatgtcacgtgat

SEQ ID NO: 250786 - DNA, 408 bp, Glycine max
  unsure (1)..(408): unsure at all n locations
ctgaagaaaacctaagcttagaattagaaacaaagaaaagaagaaaggaaagaattgatcgttgaaaatgcagggaggaaagaaagcgggagagtccattaaggaaacagctacaaacattggtgcttctgccaaggctggcatggagaagaccaaggccactgtccaagagaaggcagaaagaatgacagcacgtgatccggtgcaaaaggagttggcaacccaaaagaaagaggcaaagatgaaccaggcggagctggacaagcaggcggcgcgtcagcataacacggcggccaaacagtccgccaccacggctgggcacatgggacatggccaccacaccaccggaaccgggactggaaccgncacgtattccaccaccggggaatatggtcagcccatgggggc

SEQ ID NO: 250787 - DNA, 389 bp, Glycine max
  unsure (1)..(389): unsure at all n locations
gcagctgttaaggttgttgacattgttgacacattcagacttcaggagcaacccgcattcgataagaagcagtttgttaccttcatgaagaggtttatcaagaatttgactcccaagctcgatgcagagcaacaggagttgtttaagaagcacatcgagggagcaactaaatacctgctctctaagattaaagatttccaattttttgttggtgagagcatgggtgatgatgcttgcttggtctttgcctactacaaggacggcgctgctgatccaacattcctgtactttgcatatgccttaaaggaggtcaagtgctaagtgacttaatgtaccgagctatctactcattntatctagttntttttttacgttctgtcctaagttac

SEQ ID NO: 250788 - DNA, 382 bp, Glycine max
gtgcagaagagcgtcgcagtcgcaaccctaatcagaagaagcgcgagcttcaagcgagtgacagccaccagccatgggtcgtatgcacagccgcggtaagggtatatcctcttctgctttgccctacaaaaggacacctcctagctggctcaagatctcttcgcaagatgtcgaagaaaatatctgcaagtttgcgaagaaaggtttgaccccgtctcagattggtgtcattctcagagattctcacggtattgctcaggtcaatagcgtcactggcagcaaaatccttcgcatcctcaaagctcacggacttgcgcctgaaattccagaggacctgtaccatttgattaagaaagcagtttcaattaggaagcatcttgag

SEQ ID NO: 250789 - DNA, 412 bp, Glycine max
  unsure (1)..(412): unsure at all n locations
gcacaagttgaacttcgtgacgagcatgggaacccagttgaactaacagatgcatatgggaatccggtttggttaacggacgagaaaggcaacccggtgcacctcacggctgtggcaaccaatgcacacaaatctatgcttcagaatgacaccccacaagagcttcctcactccaagagttcaagctcgtctgaggatgaagggcatggagagaggatcaggaagggactgaaggataacatagaagaaaagttaccagctggagaaggagtagtgaaggagaataaacacaccacaattgctgcttctacttctacaacagatactagtgatgctaatcaccacccaaccactgagcatgagaagaagagtatcatagacaagattaaagaaaaattccaatanatcagca

SEQ ID NO: 250790 - DNA, 395 bp, Glycine max
aagcccttcactctctctctttcttccctttgcttgctacgctggtcgagtgcatgctttgctattagctccagcaagctcaacgagtgccaactcaacaacctcaacgcgttggaacccgaccaccgcgttgagtccgaaggtggtttgattcaaacatggaactctcaacaccctgagctgaaatgcgccggtgtcactgtttccaaactcaccctcaaccgcaatggcctccacttgccatcttactcaccttatccccggatgatcatcatcgcccaagggaaaggagcacttggagttgcaattccaggatgtcctgagacgtttgaggagccacaagaacaatcaaacagaagaggctcaaggtcgcagaagcagcagctacaggacag

SEQ ID NO: 250791 - DNA, 406 bp, Glycine max
taagaaccaaatgatccagctgaaatgcgctgcttgtggggttgcgtctgatgttgatatgagagacaagctgactaccttcatcattaagaaccctccagaggttaagaaaggatccaaagacaagaaggccatgaggagagctgagaaggagagactgaaggaaggtgaaatggctgatgaggaacagaagaaagtgaagaaagaggttaagaagaaaggctcttcatcttcaaaagatggcactgctaaatccacctcttcaaagaagaaagcaagtggctctgatgaagaccgcacttcacctactcacagtcaaattgatgagaaagaggaggctccagatgaagatgatggtgatgatgacgtgcaatggctgacagatacatcacttgatgctgctcgt

SEQ ID NO: 250792 - DNA, 378 bp, Glycine max
ttcagatcttagtttctgaactgaaagatgctactttagtgtatgttgatatttataccattaagtatgacctcatcacaaatgccgcgaaatatggtttctcgaatccgttgatggtatgttgcggctatggagggcctccttacaattttgacgtaagggtgacatgtggtcaacctggttatcgggtttgtgatgaaggggctcggtatgtgagttgggatggaattcatcaaactgaggctgcaaatacattgatagcttctaagatactttccatggcttattccacaccacggacaccttttgatttcttctgccaccaatgattatgcacactgagtgtgcaaaacagtgaatccactgttagttcattag

SEQ ID NO: 250793 - DNA, 363 bp, Glycine max
cgtgtgtcactcttgctctgcgctctaaccctatccgctgctcacggaaacaccacgggtcaggacatcgcgagaaaattgaaacttcgggaccaccaaccttttccccccggggaaaaatttcagggttttaatggaaaataccggaggaagttattcaccagagaagaatatttgggcccgtttgggaattttggcccaaacaatggtcaaaccgccgagacatcaggcgctgtaccccaccgcggtccacggcgtcacgcagttttccgatctcaccgaggacgagtttgagaagctctacactggcgtcaatggcggcttcccgtcatcgaataatgccgccggcggtattgcgccgcc

SEQ ID NO: 250794 - DNA, 424 bp, Glycine max
ggaaaaatggtttcgctgaaactgcagaagcggctcgcagccagcgtcctcaagtgtggcagaggaaaggtttggcttgaccccaatgaagtcaacgaaatctccatggctaattctcgccaaaacataaggaagctggttaaggatgggtttattatcaggaagcccaccaagattcactctcgctcacgtgcccgccgaatgaaggaagccaagaggaaaggacgtcactctggatatggggtgcaaaggcaggaattgcatgattacttatagtgcttgcctgaatgctactagggaatctaagaagattgacaagcacatgtatcatgacatgtacatgaaggtcaagggtaacgttttcaagaacaaaagagttttaatggagagcattcataagtccaaagccgagaaggcaagagag

SEQ ID NO: 250795 - DNA, 362 bp, Glycine max
taaaattcttccaccaagttatgggtttccttgtgttgctggtggtctccctcttagggctgtcttctagttccagcatatcaactcatcgttccatattggaccttgacctaaccaagtttaccacacagaaacaggtgtcttcactgttccaactatggaagagtgagcatggacgtgtctaccataaccacgaagaagaggcaaagagacttgagattttcaagaataacttgaactatatcagggacatgaatgcaaacagaaaatcaccccattctcatcgattaggattgaacaagtttgctgacatcactcctcaagagttcagcaaaaagtacttgcaagctcccaaggatgtg

SEQ ID NO: 250796 - DNA, 411 bp, Glycine max
aaaaaagagaagaagatgggtttgaagaacaacatggtggggctaaaggtgtgtttggtgctacttttccttgtggggggtactactagtgccagcttgaggctgaatgagcttggcctgctcatgaaaagtgatcatcatcaacactcaaatgatgatgactcttcaaaaccatgctgtgatcaatgcgcatgcacaaagtcaaaccctcctcaatgccgctgttcagatatgaggctgaattcgtgccattcagcttgcaaatcttgtatttgcgcattatcgtatcctgcacagtgttcatgtgttgacataacggatttctgctatgaaccttgcaagcccagtgaggatgacaaggaaaactactaatgaacaagtgttatgcatgtaagctctctctccaatggg

SEQ ID NO: 250797 - DNA, 398 bp, Glycine max
ctgcaacgtcgctatgtcggactccaccgccaaacccctggaccagcacgccaccacgggctctgaccctactgcgccagcggttcacatcgtgtacaccgagagaccacagaacgaggagcctgaggcctaccacatcagaaccctcacttcagtccttggcagtgaggaggctgcaaaggaagctttgttgtatagttacaagtctgcagccagtgggttctcagctaagcttactccggagcaggttgaacagatttcaaagctaccaggtgttcttcaagttgttcctagcaggacatatcagctccatggaccaaataacctgcagtagagaatgttcacctaaagttgtatcggttaaaccgttatctatgccatgtataaactaaactagt

SEQ ID NO: 250798 - DNA, 420 bp, Glycine max
aaaatgaccaagcttacaattctcctcatcgctcttctcggcatcgcccacacctgctgcgcctccaaatggcaacagcaccagcaagagagctgccgcgagcagctcaaggggatcaacctcaacccctgtgagcacatcatggagaagatccaagctggccgccgcggcgaggacggcagcgacgaagatcacattctcatcaggaccatgccgggaagaatcaactacatcaggaagaaggaaggaaaagaagaagaagaagaaggacacatgcagaagtgctgcagcgaaatgagcgagctgaaaagccccatatgccagtgcaaagcgctacagaagataatggataaccagagcgagcaactggaggggaaggagaagaagcagatggagagagagctcatgaacttggctatt

SEQ ID NO: 250799 - DNA, 415 bp, Glycine max
  unsure (1)..(415): unsure at all n locations
caagaagcttatcttgtcaatctcgtaaatgtgttacgagagttgtatttgcacagtccagaggaagctcgccaattgagaaggaaagctctctctcgtattgaatggctgcaaaaagctgatgtgcctaccatagcacagattgaagagttccattcgatgcagaggatgatgaatgctcctgattcaaatgataatattgatctactgttgagcattgatttgttgggtttacaaggagcaggtaaagcttttccaaacaagattgtttttgatgataagcttgtgttggctaacacacaagaattctttgatggaaattttccagtggattcttggttaccaatttttgtgaattgtctttatcctgtaagtcaattaccttcagaagctgtcngtgtaaatgttacatgtg

SEQ ID NO: 250800 - DNA, 277 bp, Glycine max
tgtaattgtagtagtagacagtagcaccatgagccaggaacagctcaagaaacctcaaggggagcaggaccccatcaaatacggcgacgttttcaaagtctccgacgaactcgctttcaaacccatcgcgccaagagacgcagctctcatgcaagccacggagaaccaagcattgggccaaactcaaaaaggaggtcccgcctcggtgatgcaatccgccgcaaccgaaaacctgcgcgccggcgtcgtgggccgtcaagacatctacgacgtggcg

SEQ ID NO: 250801 - DNA, 423 bp, Glycine max
atgagatgctcattagatatagctatgaaaaattactgcgccaggctaaagctccaagtatgtttttacaatccttcaaaaattttgtttctttgtgtgtgtatggtgatgataacttaattagtgttcatgaatatgtcaagccttactttagtggttctaaattgaaaagctttctagctggtcataatatcaccattactgatggtattgacaaaactagtgcaactttgcaatttagaaagttagcagattgtgattttctcaagagaaactttaagcagatgtctaatgttttatgggtggctcctgaggacaaggcgagtttatggtcacaacttcattatgtttcgtgcaataatctggaaatgcaagaagcttatcttgtcaatctcgtaaatgtgttacgagaattgtatttgc

SEQ ID NO: 250802 - DNA, 254 bp, Glycine max
caacaatggaccatttgtttttctcggcttcagcagttcagcaaagaaaaaccaccctgagtttttggcgggaaagggatcagtgcttcatattctagacaaaaagatactggccaggtctttgggtgtgagtaacagaaccattgatgagcttctgcgttctcccgaggactccatcattttcagatgcagttcctgcgcagaggaagaggagaagataatgaaggaagaggaggaggaagaggagagcaaga

SEQ ID NO: 250803 - DNA, 424 bp, Glycine max
  unsure (1)..(424): unsure at all n locations
acaccgtattaaagaatttaagatatactatgatgagagcgcggttcccattactgttgctgggagttgttttcctggcatcagtttctgtctcatttggcattgcgtattgggaaaagcagaaccccagtcacaacaagtgcctccgaagttgcaatagcgagaaagactcctacaggaaccaagcatgccacgctcgttgcaacctccttaaggtggaggaagaagaagaatgcgaagaaggtcaaattccacgaccacgaccacaacacccggagagggaacgtcagcaacacggtgagaaggaggaagacgaaggtgagcagccacgtgcattcccattcccacgcncacgccaacctcatcaagaggaagagcacgagcagaaggaggaacacgaatggcatcgncaggaggaaaacac

SEQ ID NO: 250804 - DNA, 411 bp, Glycine max
cagataactcaggagtatgatcagcatttgggggctgtgagtaccatcacctttgttgataacaacaggaggtttgttacttccagtgatgacaagtccctcagggtctgggaattcggtattcccgtggttataaagtatattagtgagccccacatgcactccatgccttccatttcgcttcaccccaatgccaattggctcgccgcgcagagcttggataaccagatacttatttatagcacaagggagaagttccaacttaacaagaagaagagatttgggggacatattgtggctggatatgcgtgtcaggtcaatttttctccagatggacgatttgtcatgtcgggggatggtgaagggaagtgttggttctgggactggaagacttgcaaggtctacagaact

SEQ ID NO: 250805 - DNA, 384 bp, Glycine max
cttaataaataatttaagatactatgatgagagcacggttgccattactgttgctgggacttgttttcctggcttcagtttctgtctcatttggcattgcttactgggaaaaagagaaccccaaacacaacaagtgtctccagagttgcaatagcgagagagactcgtacaggaaccaagcatgccacgctcgttgcaacctccttaaggtggagaaagaagaatgtgaagaaggtgaaattccacgaccacgaccacgaccacaacacccggagagggaacctcagcaacccggtgagaaggaggaagacgaagatgagcaaccacgtccaatcccattcccacgcccacaacctcgtcaagaagaagagcacgagcagagag

SEQ ID NO: 250806 - DNA, 409 bp, Glycine max
ctccctatggagtttaatcttgtggtccgtcaaaagttttgaaattttgtgaggttcattatgaagaaaagggacaaacttagttgtcaagttggaatcaacccatactccatggaatggactggtttggccaatagattactgagtaagggcaatgatattctgtgttgcgattatgctagttttgatggtttgattaccaagcaagttatgagcaagatggcagaaatgataaacagtctttgtggtggtgatgaaaaattgatgcgtgaaaggacgcacctgctgttggcttgttgttcaaggatggcaatttgtaagaaagatgtttggagagttgaatgtggaatcccttctggatttccgctcacagttatttgcaatagcatttctaatgagatgctcatta

SEQ ID NO: 250807 - DNA, 432 bp, Glycine max
aaaaaattgattctctcataatcattaatatcaaaataacgacctataaaagggatcagtagtagaagagggcaacgagtccctactcagttcacagagaaagatggctgcggaaaacgttgtagagttcacagacttacccgtcaagagacctagagaagaagaagaagaagaacaaaccaatggagtctccaacgacgccgtttcaacgctacccaatgaccctcaataccctggtatctctgctgttattcccggttggttctcagaaatcagcccaatgtggcctggggaggcgcactccttgaaggtggaaaagattttgtttcaagggaagtctgactatcagaatgtcatggtcttccagtcatcaacatatggcaaggttcttgttttggatggagtcattcagctcacagaaagggatgagtg

SEQ ID NO: 250808 - DNA, 372 bp, Glycine max
ggcaaagttacctagaggtgtgttgctggtgggtcctcctggaactgggaagacactacttgcgcgtgcagtggcaggggaagcaggtgtaccctttttcactgtatctgccagtgagtttgtggagttgtttgttggaagaggggcagctagaatcagagaccttttcaatgcagcaagaaaatttgcaccatcaatcatattcattgatgaacttgatgcagttggaggcaagcgtggaagaagtttcaatgatgaacgtgaccagacgttaaatcagttgctgacagaaatggatggatttgaatccgagatgagagtggttgtcattgcagcaactaatcggcccgaaaccttggatccagccctatg

SEQ ID NO: 250809 - DNA, 416 bp, Glycine max
cggctcgagctcgagccgaatcggctcgaggcaccatgtggctgtgggccctctttgtaatcgccctcaccgcttcatatctcagcttccaaggcttcgttgattccggcagccgctacctctccgcctcctggggcgggatccagtgggagaagcaggtccgcacctccgcccagatccaccgtcaaggcggcatgtccgtcctcgtcaccggcgctgccggcttcgtcggctcccacgtctccctctcgttaaaacgacgcggagacggcgtcgtcggactcgacaacttcaacgactactacgatccgtctctgaaaaaagcccgcaagtccctcctcgccaagcatgacgtcttcatcgtcgatggcgacctcaacgacgccaagctcttggcaaagctcttcgatgtggtc

SEQ ID NO: 250810 - DNA, 289 bp, Glycine max
ccaaaacattggtcagaattcatcacctgacatctagaacgctcaagctggtagcatgacaaccgccaccagccttgacttcccagccctctggcttctcaaactcagtgcccagtatggatcactccgcaagaatgctatgttcgtgccacactacaccctgaacgcgaacagcataatatacgcattgaatgggcgggcattggtacaagtggtgaattgcaatggtgagagagtgtttgatggagagctgcaagacggatgggtgctgatcgttccacaaaacttt

SEQ ID NO: 250811 - DNA, 406 bp, Glycine max
cgaccacaacacccggagagggaacgtcagcaacacggtgagaaggaggaagacgaaggtgagcagccacgtccattcccattcccacgcccacgccaacctcatcaagaggaagagcacgagcagaaggaggaacacgaatggcatcgcaaggaggaaaaacacggaggaaagggaagtgaagaggaacaagatgaacgtgaacacccacgcccacaccaacctcatcaaaaggaagaggaaaagcacgaatggcaacacaagcaggaaaagcaccaaggaaaggaaagtgaagaagaagaagaagaccaagacgaggatgaagagcaagacaaagagagccaagaaagtgaaagttctgagtctcaaagagaaccacgaaaacataagaataagaacccttttc

SEQ ID NO: 250812 - DNA, 407 bp, Glycine max
  unsure (1)..(407): unsure at all n locations
tcctagtataccttaataaataatttaagatactatgatgagagcacggttcccattactgttgctgggacttgttttcctggcttcagtttctgtctcatttggcattgcttactgggaaaaagagaaccccaaacacaacaagtgtctccagagttgcaatagcgagagagactcgtacaggaaccaagcatgccacgctcgttgcaacctccttaaggtggagaaagaagaatgtgaagaaggtgaaattccacgaccacgaccacgaccacaacacccggagagggaacctcagcaacccggtgagaaggaggaagacgaagatgagcaaccacgtncaatcccattcccacgcccacaacctcgtcaagaagaagagcacgagcagagagaggaacaggaat

SEQ ID NO: 250813 - DNA, 403 bp, Glycine max
aacaacaactatggcaagttatcaaaagcactacgatgatcagggtcgcaaggttgacgagtatggcaacgttgagaagcaaaccgacgaatacggcaaccctgttcatgctgctagtgtcacctatgtagccaccagaactgctgctggtggttacagtgatgacattaataagcaacatgataccaccaatgcctacggcgtagacactggtagacagcattctagtggtggctacgatggtgacactaataaacatcatggaactactggtggctataatgatgacaccaatagacatcatggaactaccggtgtctatggtatagacaccgataggcaacaacatgggactactggtggctatgccggtgacactggtaggcaacatgggaacatcggt

SEQ ID NO: 250814 - DNA, 399 bp, Glycine max
ataaaattcttccaccaagttatgggtttccttgtgttgcgtcttttctccctcttaggtctctcttctagttccagcatatcaactcatcgttccatattggaccttgacctaaccaagtttaccacacagaaacaggtgtcttcactgttccaactatggaagagtgagcatggacgtgtctaccataaccacgaagaagaggcaaagagacttgagattttcaagaataacttgaactatatcagggacatgaatgcaaacagaaaatcaccccattctcatcgtttaggattgaacaagtttgctgacatcactcctcaagagttcagcaaaaagtacttgcaagctcccaaggatgtgtcgcagcaaatcaaaatggccaacaagaaaatgaag

SEQ ID NO: 250815 - DNA, 416 bp, Glycine max
ggaacaatcatctcgtccccatatcgaatccgttttatcggcgaaggccatcctttgagccttaagttcgattcatttgcagttataatgctgtgtgttggaattcctaccgagtggtctgttgtggaggatctaccagaaggacctgctgttaaaattggtgagaacaaagatgcaatggatggttggtttagacttgagagagtttctgatgatgaattcaataactataagcttgtgttctgtccacagcaagctgaggatgacaaatgtggggatattgggattagtattgatcatgatgatggaaccaggcgtttggtggtgtctaagaacaaaccgttagtggttcagtttcaaaaacttgataaagaatcactggccaagaaaaatcatggcctttctcgcagtgagtg

SEQ ID NO: 250816 - DNA, 406 bp, Glycine max
cggctcgaggtgggggtttctcatttctctgccgttccatggatcgggaaggaggatccaacggcggatcttgctactactccgttctcgggattcgtagggacgcctccttctctgatattcgcactgcctaccgcaaactcgctatgaggtggcacccggacaagtgggctcagaatcctgcaaccgctggcgaagccaagcggcggtttcagcaaatccaagaagcctactcagttctctccgatcagtctaaaaggtcaatgtacgatgcggcgctctacgatcctttggaggaagaagaccaagacttttgtgacttcatgcaagagatgatctcaatgatgaacaatgtgaaagacgagggggacagtttggaggacctacagaggatgttcgtggagat

SEQ ID NO: 250817 - DNA, 386 bp, Glycine max
aacgtgacaatggtggcgacgaacgtgaaggcagaaaccgtgtgctgatggacaagcgcagcgccttggaggctgagatgaactccatcatcgcccgcctctcccagcccggcgctcctggcctctccggaaatctcgtcgactctgagggttttccccgttccgatatcgacatccccgttgttcgagccgaacgacgtcgcctggcagagctgcgcagtgaccacaacgaagtaactgagaaaattaacctaaatattcagattctccattcggcaagactcggaaataggtcattgcccttcaagaattcaggtaacgatgatggttcagatactcagatctcatcaaatatggacactgttgcatcaacaccatcacaaaat

SEQ ID NO: 250818 - DNA, 416 bp, Glycine max
tgagagtgcggtttcctttgttggtgttgctgggaagctgggtcctggcatcagtgggtgtctcattaaaggtgagagaggatgagaataaccctttctacttgagaagctctaacagcttccagactctctttgagaaccaaaacggtcgcattcgtctcctccagagattcaacaaacgctccccacaacttgagaaccttcgagactaccggattgtccagtttcagtcaaaacccagcacaatccttctcccccaccatgctgacgccgatttcctcctctgtgtccttagcgggagagccatacttaccttggtgaacaacgacgacagagactcctacaaccttcaccctggcgatgcccagagaatcccagctggaaccacttactatctggttaaccctgacgaccac

SEQ ID NO: 250819 - DNA, 403 bp, Glycine max
gtcaccaggcgtgctaggaaaccaaccagacattgtcatggacagcttggctgtacatggccttggcctagtgcacccaaagaaggttttcaatttctacaacgagctccatgcttacttagcttcttgtggagtagatggagtgaaggttgatgtgcagaacattattgagacccttggtgcgggacatggtggccgagtgtcacttactcgcagctatcatcacgcgcttgaggcttccattgctagcaattttactgataacggatgcattgcgtgtatgtgtcacaacactgatggactttatagtgctaagcagactgctattgtgagagcttctgatgatttttaccctcgtgatcctgcttcccataccatccatatttcttctgttgcatacaac

SEQ ID NO: 250820 - DNA, 423 bp, Glycine max
aagtctccgcctctccttccattccaacagattgaagaaggcaattcgtgtattcttcttctgctttggaacatggctgatagtattgttacctccagcaattcttctacgtcctcgctgaaccctactcggataatctgtcacgtatgtcagaagcagttttcccagtacacgtgtcctcgatgcaattcgcgatactgctccctccaatgttacaaatctcatagtctccgttgcactgaatccttcatgaaagaaaatgtagttcaggaacttcaccaaatgcagcccgatgaacaaactaaaaataagatgttggacatactgaaaagatttcattcacaagaggaaatggatgagaattattcaactttatccgaggagacaatggaaaattttttgtctggacaggaaatcagcttt

SEQ ID NO: 250821 - DNA, 408 bp, Glycine max
gtcgctgctcatcctccataacctccgagctctacaccgaggaaggaagccatggggaagacacatggaatgggagctgctcgcaagctcaagtctcaccgcaggaggcaaaggtgggctgataagtcatacaagaaatcccatcttgggaatgaatggaagaaaccttttgccggttcatcccatgccaagggaattgtccttgaaaagataggtattgaagctaagcagcccaactctgctattcgtaagtgtgccagagttcaacttatcaagaatgggaagaaaattgcagcttttgtccctaatgatggttgcttgaactacattgaagagaatgacgaagtcttgattgctggatttggacgaaagggtcatgctgtgggagatattcctggtgtcagattt

SEQ ID NO: 250822 - DNA, 262 bp, Glycine max
gagaatcctactttgtggatgctcagcctaagaagaaagaggaggggaataagggaagaaagggtcctttgtcttcaattttgagggctttttactgaataagtatgtactaaaatgtatgctgtaatagctcatagtgagcgaggaaagtatcgggctatgtaactatgactagagcttcaactatgaataaataaatcgacagcatatgatgcttttgttttgtgtcaaaaaaaaaaaaaaaaaataaaaaaaataaaaa

SEQ ID NO: 250823 - DNA, 382 bp, Glycine max
ctagttcaatatcctagtataccttaataaataattgaagatactatgatgagagcacggttcccattactgttgctgggacttgttttcctggcttcagtttctgtctcatttggcattgcttactgggaaaaagagaaccccaaacacaacaagtgtctccagagttgcaatagcgagagagactcgtacaggaaccaagcatgccacgctcgttgcaacctccttaaagtggagaaagaagaatgtgaagaaagtgaaattccacgaacaacaacacgaccacacaaccggagagggaaccttaacaaacccgttgagaaggaggaagacgaagatgagcaaccacgtccaatcccattcccacgcccacaccctcgtc

SEQ ID NO: 250824 - DNA, 414 bp, Glycine max
ctgaaagaaacagtttccgctggaacaagttcgtgccgaggcaaccaaacatgatcctccaaggagacgctattgtgacctcctcgggaaagttacaactcaataaggttgacgaaaacggcaccccaaaaccctcgtctcttggtcgcgccctctactccacccccatccacatttgggacaaagaaaccggtagcgttgccagcttcgccgcttccttcaacttcaccttctatgcccctgacacaaaaaggcttgcagatgggcttgccttctttctcgcaccaattgacactaagccacaaacacatgcaggttatcttggtcttttcaacgaaaacgagtctggtgatcaagtcgtcgctgttgagtttgacactttccggaactcttgggatccaccaaatccacaca

SEQ ID NO: 250825 - DNA, 390 bp, Glycine max
  unsure (1)..(390): unsure at all n locations
gcttgttcctcggctagcattgtttggcttaagaacacaaacaggagaactgttgatgttattgcatccagactgtatttttactattcgtatagctatgagcttacaggagatcttgctgaaattcggggcaacctccttgcattgcaccgatttgcgactctccgccatgatgagctgggacaggaaacacttcttaatttgttacttcgaaactaccttcactacaacctatatgatcaggctgagaagttgaggtccaaggctcctcgatttgaagcacattcaaaccagcagttttgtcgttatctcttctaccttgggaaaattcggacaattcagctggagtatacagatgcaaaagagtctcttctgcnaggccgccggaaa

SEQ ID NO: 250826 - DNA, 403 bp, Glycine max
caacatcaagggaaagtgaaaaagaaaggtatatttgatcggggatatggcaactcgaagatatgagtttggaaggatgaatgaggctagccacccagactccatcagagctgccttggctgaattcctctccacttgcatctttgtctttgctggagaaggctctgcccttgctttgcgacaaatttacaaggaaccagggtcatcagcgggtgagctagtggtaattgcactagctcatgcatttgctctatttgctgctatttctgctagcatgcatgtgtctggtggacacgtcaaccctgccgtcacttttggcgctcttcttggtggaaggatctccgtccttagagcagtttactattgggttgctcaacttctaggttctatagtggctgctctc

SEQ ID NO: 250827 - DNA, 404 bp, Glycine max
aaaattcttccaccaagttatgggtttccttgtgttgcttcgtttctccctcttaggtctctcttctagttccagcatatcaactcatcgttccatattggaccttgacctaaccaagtttaccacacagaaacaggtgtcttcactgttccaactatggaagagtgagcatggacgtgtctaccataaccacgaagaagaggcaaagagacttgagattttcaagaataacttgaactatatcagggacatgaatgcaaacagaaaatcaccccattctcatcgtttaggattgaacaagtttgctgacatcactcctcaagagttcagcaaaaagtacttgcaagctcccaaggatgtgtcgcagcaaatcaaaatggccaacaagaaaatgaagaaagaac

SEQ ID NO: 250828 - DNA, 394 bp, Glycine max
cggctcgagtaaaccgcgatcacaggttgccgcaccttagggccggaaacaaaagcagtcgttacttgatttcaagaatctctcaatttcttcctacttctttgtgtacgatttcttaagggaaagaaaatcactctctgtgctggccacagacttcgtgaatcattttcttttccactcttagtttatttgctgaacactctcctatttgatataggacttcgtgtcagatttaaacttcttctgtttctttctcagttctctgcttaatttcaagttcaagctggtgaaatcttggattagtgctctcactcttctatctggtataggacttcgtgggtagacttttccatttctctcctttctttcactctcttcttctcactgatccgca

SEQ ID NO: 250829 - DNA, 411 bp, Glycine max
cacagagtgacaacttcgagtatgtgtcattcaagaccaatgatacacccatgatcggcactcttgcaggggcaaactcattgttgaacgcattaccagaggaagtgattcagcacactttcaacctaaaaagccagcaggccaggcagataaagaacaacaaccctttcaagttcctggttccacctcaggagtctcagaagagagctgtggcttagagccctttttgtatgtgctaccccacttttgtctttttggcaatagtgctagcaaccaataaataataataataataatgaataagaaaacaaaggctttagcttgccttttgttcactgtaaaataataatgtaagtactctctataatgagtcacgaaacttttgcgggaataaaaggagaaattccaatg

SEQ ID NO: 250830 - DNA, 380 bp, Glycine max
gtccagcagcagtgccagttccattgcctgatatggccatgccagcatcctttgacagtgagaatccagcctatagataccgtttcttagagccaacttcacaactcctgacaaggccagtcttagacaaccatggatgggatcacgattgtggttatgatggtgtaaacattgaacagagtctagctatcatcaataaattcccagcagctgtcactgttcacgtaacaaaggataagaaagacttcaccatccagttggattcctcagttgctgcaaaacttggagagaatggatcagccatggcaggctttgacattcaaagcgttggaaagcagctatcttacagtgttagaggagagacaaaattgaaaaatttc

SEQ ID NO: 250831 - DNA, 378 bp, Glycine max
  unsure (1)..(378): unsure at all n locations
ccaagtgcacaatcctcctcatctctgttctcttctgcatcgcccacacttgcagcgcctccaaatggcagcaccagcaagatagctgccgcaagcagctccagggggtgaacctcacgccctgcgagaagcacatcatggagaagatccaaggccgcggcgatgacgatgatgatgatgacgacgacaatcacattctcaggaccatgcggggaagaatcaactacataaggaggaacgaaggaaaagacgaagacgaagaagaagaaggacacatgcagaagtgctgcacagaaatgagcgagctgagaagccccaaatgccagtgcaaagcgctgcagaagataatggagaaccagagcgaggaactggangaga

SEQ ID NO: 250832 - DNA, 517 bp, Glycine max
gtttagtatctgtaataagcggggaggggataggtaagactacagaagagctatgacgtggaatgcacgcgtacgtaagctcggaattcgggtcgagcaagccttcaaataaacttcaaggagagatagccttggtgacgtgcggtgactctgggattggacgatcggagtgtaacttgtttgccttacaaggtgctaccgtgggcttgacatatgtgaaggggcatgaagacaatgacgcgagggacactgtatggaaatgatcaataggcctaagacttctgatgctaaagatccaatggcaggtccagctgatttgggttacgacgataattgcgagatagtggttgatgaggacgtgaatgctgatggttgtattgacattatgggcaacaatgcagctgagcaatacgagtgtggaacagtggaggacattgatgaccctatgcttgagaggctctttcgtacaaatatcttctcctatttcttcgtgaccacgcatgctcttgagcacatg

SEQ ID NO: 250833 - DNA, 392 bp, Glycine max
agagtctttactctctctctctctctctctctctcgctcgctcttcgtaaatcgcgtgttccaccaatcagatggcaatgccggagacaatccctcccactactcccagtgctcaagttgtcggcaatgcctttgtggagcaatattatcacattctgcatcaatccccagaattggtgcacagattttatcaggattcaagtttcttaaccagatcagacagcaatggtgtgatgacaactgtgacaactgtacaagaaatccatgaaaagattatttccctgaaatatgaagattatacagcagaaataaaaactgcagacgctcaggagtcacataagggaggtgtgatagttttagtaactggatgcttaactgggaaggataatgtg

SEQ ID NO: 250834 - DNA, 396 bp, Glycine max
  unsure (1)..(396): unsure at all n locations
ggagcagccatatacataaaaagggacctgaaagtctcggacgagcaaatcgagatcctgctcggaatcatcaacctatactctctgataggctcatgtctcgccggcagaacctccgactggataggtcgccgttacacgattgttttcgccggcgccatcttctttgtcggagcacttctcatgggtttctcccccaattattcctttctcatgtttggccgtttcgtcgctggcattggcatcggctacgccctcatgatagcccccgtctacaccgncgaggtctccccggccttctctcgtggctttctcacttccttccctgaaggaattattaatggagggattttaaatgggatacatatcaaactatgcattttcgaagctgacact

SEQ ID NO: 250835 - DNA, 340 bp, Glycine max
caagagatggcttctcctcttcttactccttacaagatgggcaaattcaatctgtcccatagagttgttttggcaccgctgaccagacagaggtcttacgacaacgtcccacaaccccatgccatcctctactactcccagagaacttccaacggaggccttctcattactgaagccactggcgtctctgacacggctcaaggctatccgcaaacccctggcatatggactaaagaccatgttcaagcttggaaacccattgtctatgccgtccacgccaaaagcggtgttttcttctgtcagatttggcacgttggaagagtttcagattcagtttatc

SEQ ID NO: 250836 - DNA, 405 bp, Glycine max
ttccttagttcaatatggggaagcccttcactctctgtctttcttccctttgcttgctactcttgtcgagtgcatgctttgctattagctccagcaagctcaacgagtgccaactcaacaacctcaacgcgttggaacccgaccaccgcgttgagtccgaaggtggtttgattcaaacatggaactctcaacaccctgagctgaaatgcgccggtgtcactgtttccaaactcaccctcaaccgcaatggcctacacttgccatcttactcaccttatccccggatgatcatcatcgcccaagggaaaggagcacttggagttgcaattccaggatgtcctgagacgtttgaggagccacaagaacaatcaaacagaagaggctcaaagtcgcagaagcagcagc

SEQ ID NO: 250837 - DNA, 421 bp, Glycine max
gcagccatgttcttaaccagaagcgcgctttttcgctttggaaagtctctcccttatgcccgttcactctcccttaaaccctccatggtcaccttctcctctactcccaattcaggctggagaaatgcagcagaaggaggaagaagagacggaagaaccaattggacgtatgattctgccgaggcaagacgcgaggcagatgaaatgtctgagagtgccaaagaaacgatgaatgaaggctatgacagggccaaggatcaagcgcgggaagccaaagacagaacaaaggatttcgcacacgacgcaaaggagaagacgaaggacgctgcggggtcgatgagggacagggcggagagtgcggcggagaagacgaaagagtatgcttacgacacaaaagagagtgccaaggacgcggcgggaa

SEQ ID NO: 250838 - DNA, 386 bp, Glycine max
  unsure (1)..(386): unsure at all n locations
cttcatcatctgcttcttcttttgatcataatatctgttgagtgatctttcatagagagagagagagagagatggagaggtgtgacaaggtgatgaaccaacgcaacatgcatgattgtcctaaaacaggtcctggctatccttcacccctggcagccatgtctggtcccaaagagactctcctttatgtcactgctatctactcaggaacaggaagggataagcctgactttctggccacagtggatgtggatccaagctctccaacgtattcaaaagttatccataggttacctgtaccttatttaggtgatgaactgcaccattttgngtggaattcatgcagctcttgctatggagatccatcagcagttcggcgatatctg

SEQ ID NO: 250839 - DNA, 422 bp, Glycine max
aacaaagaagagtgttcccacattacatggcctccttgcggttggggcaccaccaccatcaccaaccggcggcggcgactatacacccgtcgcaaccgccgcagtgtcagccgcaacccgaagttcctcgccggagctccgatatggagaccgataaggatatgtcagctactgtcattgaggggaatgatgccgttactggccacataatctccaccacaattggaggcaaaaatggggaacctaaacagaccatcagttacatggcagaacgtgttgttggcactggatcatttggagttgttttccaggcaaagtgcttggagactggagaggcagtggctattaaaaaggtcttgcaagacaagcggtacaaaaatcgtgaattgcagttaatgcgcttaatggatcacccaaatgta

SEQ ID NO: 250840 - DNA, 389 bp, Glycine max
aatggcttcaaccgacaagtcaccggacccaacgcctgcgagagggtccggatccaactccggggaagccgatgagtgttggtcagcacgtgatcgacaagagtgcaatgatggtgcagtcgctggaccccattaagcagatgagtcagcacgtgtgctccttcgctatctacagccatgacatgtctcgccagatagagacacatcactactgctccagactccaccagaacttcatacaatgtgctgtctatgattccgatgaatccaaagctcgtctcctcggcgtggagtacatcgttcctgctgatgtctttgaagcctttcctccggaggagcagaaactttggcattctcatgcttatgagattaaatcaagcctgttggtg

SEQ ID NO: 250841 - DNA, 418 bp, Glycine max
gaaaaggagaaaaactgcgtctaatagttttagatgctggggaggaagagaaagatacgttgtaactagcaaaggatacgccctgtttggcgtaatccttaaacgtagcattagtgttaacgttgtaggttgtgaagccaaccttgtgatccccttctgcgcctttagcatagcctttgaaagtatccgaaccagggttaaaagaattcccgtagtttttgaaatccagtttggtcctttctttggtgttcttagcataagattgaaacgagtcatcagctatgttagcctggtctatgtaattagcaaaactctcagtgctagcgtgagttctaacagcgtagctcttgaaagtcacttctggaacgttcatctcaacgccataatttatgaaagccaacgtggcaacgttggagtt

SEQ ID NO: 250842 - DNA, 415 bp, Glycine max
tatatacgacatgctacaagtgaagtgaccatatcttagtgtcaaatcataaaattcttccaccaagttatgggtttccttgtgttgcttcttttctccctcttaggtctctcttctagttccagcatatcaactcatcgttccatattggaccttgacctaaccaagtttaccacacagaaacaggtgtcttcactgttccaactatggaagagtgagcatggacgtgtctaccataaccacgaagaagaggcaaagagacttgagattttcaagaataacttgaactatatcagggacatgaatgcaaacagaaaatcaccccattctcatcgtttaggattgaacaagtttgctgacatcactcctcaagagttcagcaaaaagtacttgcaagctcccaaggatgtgtcgc

SEQ ID NO: 250843 - DNA, 418 bp, Glycine max
  unsure (1)..(418): unsure at all n locations
gttcacaatcctcctcatctctcttctcttctgcatcggcgacacttgcagcgcctgcaaatggcagcaccagcaagatagctgccgcaagcagctccagggggtgaacctcacgccctgcgagaagcacatcatggagaagatccaaggccgcggcgatgacgatgatgatgatgacgacgacaatcacattctcaggaccatgcggggaagaatcaactacataaggaggaacgaaggaaaagacgaagacgaagaagaagaaggacacatgcagaagtgctgcacagaaatgagcgagctgagaagccccaaatgccagtgcaaagcgctgcagaggataatggagaaccagagcgaggaactggangagaagcagaagaagaaaatggagaaggagctcattaacttggctact

SEQ ID NO: 250844 - DNA, 356 bp, Glycine max
  unsure (1)..(356): unsure at all n locations
tgaaaccagttaatggcatgctcgaaacatatgatgatttgaatgatgataccatggatgccaacggggaagctagattgattaatggttctgtctccaaaagagtttctcagttccttaatgcaaatatgaagaagcccaaggtggtttctggtgatgatgatttaccaaagagagatgatattggtgaaagacgaaggaaacatgagcttcgggtgttggctggtgctggaattaggactgangatgatgatgatgatcaaatggctgatcttggacctaatgaggttaccgatgaanaggaagatggtggaagtgggactcagaaaatgaatttacanacaagtggaacaact

SEQ ID NO: 250845 - DNA, 239 bp, Glycine max
gtgcggtttcctttgttggtgttgctgggaactgttgtcgtggcatcagtttgtgtctcattaaaggtgagagaggatgagaatatccctctctacttgagaagctctatcagcttccaaactctctttgagaaccaaaacggtcgcattcgactgcttcagagattcaacaaacgctgcccacaacttgagaaccttcgagactaccggattgttcagtttcagtcaaaacccatcac

SEQ ID NO: 250846 - DNA, 248 bp, Glycine max
cctgaacatcctgcattggggtggcagtccatccagtgagacaaatgattggtttatttcctctcaggaatgtgttcccaggacttattgtgttttaaatccacaaaatccttttgtgttaaataggtggatggggaaactgactttcccccagggcacttaccgaaatgttaagagaatgcctctttctataaggggaggagctggtgcatagaatgctatcctcatgattatgccaaatgctgttc

SEQ ID NO: 250847 - DNA, 283 bp, Glycine max
ccaaaggctgaatgcaaaaaaaaaaaaaaaaaaaaaaaaagaaaaaaaaaaaaaaaaaaaaaaaaaaaaaaaaaaaaaaaaaaaaaaaaaaaaaaaaaaaaaaaaaaaaaaaaaaaataaaaaaaatataataagaacataataagataataaacaaagtcaaggaaataacatattatgataataaagacgaaaaataaattcttttgaccattgcgttgaagaatcaactacataaagtggaactaatgttaaaacgaagaacaagaataatacggaaaca

SEQ ID NO: 250848 - DNA, 344 bp, Glycine max
  unsure (1)..(344): unsure at all n locations
ttacttcccctatggctcgtcactccttgctcttagccctgctcgtcttcgccgccgtggccaccgccgcgatggcggtggccgcgtccgacgccgacgacatcctgatccgtcaggtggtgccagatgttggcgaagccgaagaggaggacaacctgctgaacgccgagcaccacttcgcgagcttcaaggccaagttcgccaagacctacgccaccaaggaggagcacgatcatcgcttcggcgtcttcaagtccaacctccgcagagccaggctgcacgccaagctcgacccctccgncgtccacggcgtcaccaaattctccgatctaactccggccgag

SEQ ID NO: 250849 - DNA, 409 bp, Glycine max
ctctacaattgtgatcttcacaaatcaacaacgtctctctgtgtgactctgaaagtaggtgaccatggagcatcatcttcatatgtgtgccatgatcattttgatgggtgcaattttcttgttcagttttgatcctgtgccttatttttttgtggagttttatattattattattattattattattattattattattattattattattacaagtgctagtatgttgatctcattcttggtagttagatcgtgttttttgtacggatattgatataaagattgggttttctgtctttctttcggggtcttacttagattagttagtgcagccaccttatttttttatatgattggagctgtaacccattttttaatgctaatatagtgatccaattgtgagtagtag

SEQ ID NO: 250850 - DNA, 486 bp, Glycine max
ttaaatattcctcgagctatgacgtcgcatgcacgcgtacgtaagctcggatttcggttcgggaccgcacatcggagaatcttgggggccccagccaggggcaagaccaccgcctggaggaggaaggcgccagtgtgctcaagggcttcagcatacatttcttagcacaatccttcaacaccaacgaggacacagctgagaaacttcggtctccagatgacgaacggaagcagatcgtgacagtggagggaggcctcagcgttatcagccccaagtggcatgaacaagaagacgaagacgaagatgaagacgaagaatatgaacaaactccctcttatcctccacgacgaccaagccatggaaagcatgaagatgacgaggacgaggacgaagaagaagatcaacctcgtgctgatcacccttcacagcgacccagcctgccccgacatacagaaccacgttggaatagatgtccgactagaaaag

SEQ ID NO: 250851 - DNA, 410 bp, Glycine max
ggaagagcaacctttggaagtgcggaaatatagagccgaattgtctgaacaagatatatttgtaatcccagcaggttatccagttgtggtcaacgctacctcaaatctgaatttctttgctattggtattaatgccgagaacaaccagaggaacttcctcgcaggttcgcaagacaatgtgataagccagatacctagtcaagtgcaggagcttgcattccctgggtctgcacaagctgttgagaagctattaaagaaccaaagagaatcctactttgtggatgctcagcctaagaagaaagaggaggggattaagggaagaaagggtcctttgtcttcaattttgagggctttttactgaataagtatgtactaaaatgtatgctgtaatagctcatagtgagcgagga

SEQ ID NO: 250852 - DNA, 326 bp, Glycine max
aaaaaaaaaaaaaaaaaaaaaaaaaaaaaaaaaaaaggaaaggaaaaaaaaaaaagaggaaaaaaaaaaaaaaaaaaaaaaaaaaaaaaaaaaaaaaaaaaaaaaaaaaaaaaaaaaaaaaaaaaaaggggcggcccccaccttatgactttttcaacccggaaattaattccggcccggtccttgaaggcttcccaattttccctaaatggagcccttttaaaccttgcctaaatcatggaaatagctttcccctgggtaaaatttttatccgttaaaatttccacacaatttacgacccgaaagcttaacgtgtaaaccctggg

SEQ ID NO: 250853 - DNA, 412 bp, Glycine max
  unsure (1)..(412): unsure at all n locations
gcctcatacgacaccaaattcgaggagataaacaaggttgtgtttggtagagaggaggggcagcaacaaggggaggagaggctgcaagagagtgtgattgtggaaatctcaaagaaacaaattcgggaactgagcaaacatgccaaatctagttcaaggaaaaccatttcttctgaagataaacctttcaacttgagaagccgcgaccccatctattccaacaagcttggcaagttgtttgagattaccccagagaaaaaccctcagcttcgggacttggatgtcttcctcagtgttgtggatatgaacgagggagctctttntctgccacacttcaattcaaaggccatagtggtactagtgattaatgaaggagaagcatacattgaaacttgtggcattaaagaacaac

SEQ ID NO: 250854 - DNA, 396 bp, Glycine max
gctactcagaagactaaggactatgcaagtgatgcaactgatgctgcaaaaaagactaaagattatgctgctcagaagaccaaggattatgcaagtgatgcaactgatgctgcaaaaaagactaaggattatgctgcgcagaagaccaaggactatgccagtggtggtgcgcagaagaccaaggactatgccagtggtgctgcgcagaagaccaaggactatgcaagtgatgctgcgcagaggaccaaggaccatgcaagtgatggtgctcaaaagagcaaagaatatgcgggtgatgtagcacagaatgccaaagattatgctcaaaagagcaaagattatgcgggtgatgctgtacagaatatcaaagattatgcaaatgatgcagcgcacaag

SEQ ID NO: 250855 - DNA, 506 bp, Glycine max
  unsure (1)..(506): unsure at all n locations
nggtagtctctagtcnctactagcaacaagatagttatcctacagaagagctatgacgtcgcatgcgcgcgtacgtaagctcggaattcggatcgagccccttccttttttctcacccttttgaaattcgaggggtggcactgttgctacgcgatcaacatcatgaacatgaacatgaacatgaacatgaacactaagagcaggatgatcaccctttgggttgagctctatttttgctccatcacaaactcactagctgcttcaaagcagagccataatcctgccatcatcaactttggtgactacaattcagacactggaggactatctgctgcctttggacaagctggtacttctcatggagagtgctacttacatcacactgctggtcgatactgcgatgagacggtcattgctgatgtcttatccaagaagctgaggctgccttatttgagtgcattactcgatccagctgggtcaaagtataagcatggagccaactatgc

SEQ ID NO: 250856 - DNA, 262 bp, Glycine max
ctcgagccgattcggctcgaggtttctttgagattggaagagcctgaagtaaggcgtggccaagggcactgtaagctttgtgacaacagaatttcttgcagaactgcagtaagcaggtctatggtatacagacctgcaatgctctcaatggtggcaatagcggcagtctgtgtctgtgtggcccttctgtttaaaagctcacctgaagtcatatgtatgttccgacccttcagatgggaaaatttggacttttgaacaagct

SEQ ID NO: 250857 - DNA, 408 bp, Glycine max
caacatttcccttcttcctacctccgactggctgcacaccgtgttgctcaacactacaacatgcaaacaatggttcaagataatggcttagatggccagggaagtaaaattctggtgaggaagttaccagaaagcaagtatcctgtggttcgattatctgaaatacctgctaagcagttggaaaatgataaatctgagctgaaaaaatttgttattagacctaggcccaatagaaacagtttgaatgatgccaacggagttgggacgaaaggaaatcctgtaagaagtgtggaagaaaggaaagaagaatatgaccgggcgcgggcacgtatctttagtagccctagaagctctgaatcaggcgatacctcatccatggttccaatggacgggagaaattcttctact

SEQ ID NO: 250858 - DNA, 423 bp, Glycine max
acaggatgtggggaactgtgaaaggaggaggaaatgatgagagatggtttaaggactttgaacattagccaatgcactgcactcaccccatctgctgttcaagctgtttgtgactcattcccttctctccacacatgctcagggaggcactcactcatcatgagtggctgcctcaacttgacatcagtgcattgtgcctgtgctgtccatgcgcaccgtgcattcaccactttcccttatcctgcccattaagaagctcatgcttttgatgttgaacacacttcgaggatgtgccccttgaaagggctcagagaagtgaaagaagtgaaatccaccccccttgtagatgtatgcctgcataagagagacttgaatctagctgattatgtacatcttttcttcaactttatgtcttaaactcgg

SEQ ID NO: 250859 - DNA, 343 bp, Glycine max
tgtacctaacactgctgatggatataatagttccacatccgggtgttgctacgttaactctgtggataaacatttggtgaaaggaaagatcgttctgtgtgacggaaacgcgagtcctaaaaaagttggggatttgtctggggcagctgggatgcttcttggagccactgatgtaaaagatgctccattcacttatgcactgcccacagctttcattagtttaaggaactttaaactaatacattcttacatggtttcattgagaaattcaacggccacaatatttaggagtgacgaagacaacgatgattcacaaacccctttcatagtttcattttcatct

SEQ ID NO: 250860 - DNA, 419 bp, Glycine max
  unsure (1)..(419): unsure at all n locations
gtggagatcatgcgccacttgccgcagcatccgaacgatcgggaccttgaaggatacctacgaggacgacaatgccgtgcatctcgtcatggagctctgcgagggtggggagctcttcgaccgcatcgtggcccgaggccactacaccgaacgcgccgccgccgccgtcaccaagaccatcgtcgaagtcgttcagatgtgccacaaacaaggtgtgatgcatagggatctcaagccggagaactttttgtttgcaaataaaaaggaaaccgcagctctgaaagctatagnatttgngttgtcggtgttctttaaaccaagggaaagatttaatgagatagttggaagtgcatattacatggctcctgaggtattgaagagaaatatgggccagaagtggacatctggagtgctggagt

SEQ ID NO: 250861 - DNA, 393 bp, Glycine max
ttgcagaccgagctagctagctagcaagcaagcacggagagggatgcaaagcgaggccatgccctcatgtgcttggcacgtgttacactcttcctctgcgctctaaccctatccgctgctcacggaagcaccacggttcaagacatcgcgagaaagttgaaactcggggacaacgagcttctgcgcacggagaagaagttcaaggttttcatggagaattacgggaggagctactccacagaggacgagtatttgcgccgataggggattttcgcccagaacatggtcagagcggcagagcatcatgcgctggaccccaccgtcgtccactgcgtcacgcagatctccgatctcaccgaggacgagtttgagaagctctacactgccgtcaat

SEQ ID NO: 250862 - DNA, 342 bp, Glycine max
aactaagaaagtcttccatagccccccaaaaatgaagagcggcatcttctttgctctctttctcttttgtgccttcaccacctcatacctaccttcagccatcgctgatttcgtgctcgataatgaaggtaaccctcttgaaaatggtggcacatattatatcttgtcagacataacagcatttggtggaataagagcagccccaacgggaaatgaaagatgccctctcactgtggtgcaatctcgcaatgagctcgacaaagggattggaacaatcatctcgtccccatatcgaatccgttttatcgccgaaagccatcctttgagccttaagttcgattc

SEQ ID NO: 250863 - DNA, 386 bp, Glycine max
gtgatttcagtgagtgatcggtgttcacttgatctcagcgtgaatcgtcagcgtgaattgaagaagatgccgatcagaaacatcgccgtcggaaggcctgaagaggcgactcaccccgacacgttgaaggcggctttggctgagttcatctcaaccttcatcttcgtgttcgccggctcacgctccggcatcgcctacaacaagctcaccgacaacggcgctgccacccctgccgggctcatctgcgcctccatcgcccatgcattcgccctcttcgtcgccgtctccgtcggcgccaacatctgcggcggtcacgtcaaccccgtcgtcaccttcggcgccttcgtcggctgcaacatcaccttactacggggcatcggctacgt

SEQ ID NO: 250864 - DNA, 404 bp, Glycine max
ccagaacaagccccccagcgagcagtccactaccgagactgagcacgagcgcgaagctggtggcggaggcggcgcagtcggctctgaagagcgacagcgacaaagtggacaaggccaaggtggctgacgctgccggcgatcttctcgacgcggcggggaagtatggaaaacttgatgacaaacaaggcatagggcaatatgttgacaaggctgctgattatctgcataattaccagggtgataataccactgctccttcacagcctgcagagtctaaaggtgaagaaagtggtggtgggttaggtggtcttgcaaacttggctggaggcttcttcaaaaagtagttacaaagcaactaaataagaccttaattgagtccttattctcggtctagtagtggggtt

SEQ ID NO: 250865 - DNA, 189 bp, Glycine max
cgcataaatgacaagcatgatggtgtgaggatgaggccatgttatgaaataataacaaataaataaattttgtatgataataaaaagtatggcccatgtaccatcccagcgagcctatgtttatatctgagtggcgttgtacctttcaatcgccttaataaaatgtcagtcttcacgttttgtctttaa

SEQ ID NO: 250866 - DNA, 367 bp, Glycine max
aaaaccaacaacaactatggcaagttatcaaaagcactacgatgatcagggtcgcaaggttgacgagtatggcaacgttgagaagcaaaccgacgaatacggcaaccctgttcatgctgctagtgtcacctatgtagccaccagaactgctgctggtggttacagtgatgacattaataagcaacatgataccaccaatgcctacggcgtagacactggtagacagcattctagtggtggctacgatggtgacactaataaacatcatggaactactggtggctataatgatgacaccaatagacatcatggaactaccggtgtctatggtatagacaccgataggcaacaacatgggactactggt

SEQ ID NO: 250867 - DNA, 415 bp, Glycine max
gtatttcgtttgttgttcaatctaacaaacttctctatatggtggactttttcaacacaccgtacacacttctttatttgagcctttcatataaatatcatggcttcgagggtggtttcggttttggtgatagcgatgatgttgtttgccatgaactgtaactgcactagtgttggccacatgccttcaaccaaagaggaaggtcacgattttcaggaggctaaagccaagacaacacaaactgcgaacaaggccatggaaactggtaaagatgggaaagaagccgcagagtcatggacagaatgggctaaagagaaactcactgaaggtcttggcttcaaacatgatcaagaatccaccactaagaaagtctctgactatgccggtgatgctgctcagaaatcaaaggactatg

SEQ ID NO: 250868 - DNA, 397 bp, Glycine max
gaaagtcttccatagccccccaaaaatgaagagcaccatcggctgtgctctctttctcttttgtgccttcaccacctcatacctaccttcagccatcgctgatttcgtgctcgataatgaaggtaaccctcttgaaaatggtggcacatattatatcttgtcagacataacagcatttggtggaataagagcagccccaacgggaaatgaaagatgccctctcactgtggtgcaatctcgcaatgagctcgacaaagggattggaacaatcatctcgtccccatatcgaatccgttttatcgccgaaggccatcctttgagccttaagttcgattcatttgcagttataatgctgtgtgttggaattcctaccgagtggtctgttgtggaggatcta

SEQ ID NO: 250869 - DNA, 382 bp, Glycine max
ggaagaggagcagaggcagcaagagggagtgatcgtggagcgtctgaaaggaacaaattcgggaactgagcagacgtgccaaatctagttcaaggaaaaccatttcctccgaagatgaaccattcaacttgagaagccgcaaccccatctattccaacaactttggaaagttctttgagatcacccctgagaaaaacccacagcttcgggacttggatatcttcctcagttctgtggatatcaacgaaggagctcttcttctaccacacttcaattcaaaggccatagtgatactagtgattaatgaaggagatgcaaacattgaacttgttggcattaaagaacaacaacagaagcagaaacaggaagaggaacctttgga

SEQ ID NO: 250870 - DNA, 414 bp, Glycine max
taaaattcttccaccaagttatgggtttccttgtgttgctgcttgtctccctcttaggtctgtcttctagttccagcatatcaactcatcgttccatattggaccttgacctaaccaagtttaccacacagaaacaggtgtcttcactgttccaactatggaagagtgagcatggacgtgtctaccataaccacgaagaagaggcaaagagacttgagattttcaagaataacttgaactatatcagggacatgaatgcaaacagaaaatcaccccattctcatcgtttaggattgaacaagtttgctgacatcactcctcaagagttcagcaaaaagtacttgcaagctcccaaggatgtgtcgcagcaaatcaaaatggccaacaagaaaatgaagaaggaacaatattctt

SEQ ID NO: 250871 - DNA, 327 bp, Glycine max
atcggcaaggtaaggcaattgaagttgtgaaatggagactgtctgctctgcattggtgttcccatctttcagaatcacaacttcagctttctccaaatgtggcatcagggcttccattgccgttgagcaacaaacttcgcagactaaggttgctctcctcaaaattggtaccagaggaagtccactagctctggctcaggcatatgagaccagagacaagctcatggcatcacatccagagctagcggaagaaggggctattcagattgtgataatgaaaacaactggtgacaaaatactatcacagccacttgcagacatcggcgg

SEQ ID NO: 250872 - DNA, 400 bp, Glycine max
caaacctaagacgcgctgcttcactattctccctatggaggttaatcttgtggtccggcagaagtttttaaattttgtgaggttcattatgaagaaaagggacaagcttagttgtcaagttggaatcaacccatactccatggaatggactggtttggccaataggttactgagtaagggcaacgatattctgtgttgcgattatgctagttttgatggtttgattaccaagcaagttatgagcaagatggcagaaatgatcaacagtctttgtggtggtgatgaaaaattgatgcgtgaaaggacacacctgctgttggcttgttgatcaaggatggcaatttgtaagaaagatgtttggagagttgaatgtggaatcccttctggatttccgctcaca

SEQ ID NO: 250873 - DNA, 396 bp, Glycine max
  unsure (1)..(396): unsure at all n locations
cacgtatactacaattgcatagtgctgcgatcgccgtttgttctctgaaacaaacacaccgacaccaatcactctctttgatccattccgtttagacgattagcttttacgatggccagccataactacaaagtcttcagctgcttcaacaggaagttcaccgtcaccgagccgggcccaccgccggacgtccaaaaagcgttttctgaatttgccgacggagcctcctccctgtccggcgatcacctcctccgatttctggcgaagcaccagggcgaagtggactgcaccgcagtggattcggagcggatcctncagcaatcgcggaaagaggatcggaaagtggactggatctncacgacttcttncgtttcctgctacatgacgatttcaata

SEQ ID NO: 250874 - DNA, 402 bp, Glycine max
gttacaattcctgattataagcctgctccccgggtgggtgatttttcatcaagagggccttcattgattacaagcaatgttctcaagcctgatattgcagccccgggagttaacattctcgctgcatggtttggaaatgacacatcagaggttccaaaaggaagaaagccctcactatatcgcatactctcaggaacttccatggcactccacatgtttcagggcttgcatgcagtgtcaaaagaaaaaaccccacttggagtgcctccgcaatcaaatctgccatcatgacttcagcaattcaaaatgacaatttgaagggtcccataacaacggattcagggttgatagccacaccttatgactatggagcaggggcaattacaacatctgaaccattgc

SEQ ID NO: 250875 - DNA, 401 bp, Glycine max
cattatttttttgtgaaatagattaattaatctattggatgtaacatatatccgttttgtagtaattattagaatttgtagtaattattataagtattagaagcagcaattcttatttatttcagattaatacttgataacctaaacaatatatctatatatagaatatagatagatatatatataatagaacgtaaaaaaaaaaaagaataataaatagaaaaaggagcatgttgattatatagaaagtaaagggcaacaatcatttttgtttaccatgggtaaggacaccatcgctgacataataacctatataagaaatgctgacatgaataaaaaaggaatggttcaaataccatttactaacataacagaaaacattgtaaaaatacttttacgcg

SEQ ID NO: 250876 - DNA, 405 bp, Glycine max
  unsure (1)..(405): unsure at all n locations
gggagctcttcttctaccacacttcaattcaaaggcgatggtgatactggtaattaatgaaggagatgcaaacattgaacttgttggcctaaaagaacaacaacaggagcagcaacaggaagagcaacctttggaagtgcggaaatatagagccgaattgtctgaacaagatatatttgtaatcccagcaggttatccagttgtggtcaacgctacctcaaatctgaatttctttgctattggtattaatgccgagaacaaccagaggaacttcctcgcaggttcgcaagacaatgtgataagccagatacctagtcaagtgcatgagcttgcattccctgngtctgcacaagctgttgagaagctattaaagaaccaaagagaatcctactttgtggatgctca

SEQ ID NO: 250877 - DNA, 405 bp, Glycine max
gtggattcttggttaccaatttttgtgaattgtctttgatcgtgtaagtcaattaccttcagaagctgtcgttgtaaatgttacatgtggtagtggacgtggtggtttacctaccactgcttggattagttctgcagttaacaatcgctcctcagatatcaacaaaaagattcgcacagcacttgggaaaggtaagaaaattgtttttcttactagagttgatccttttccagtagctctactggctgttctttttggcgttaagaatgaaattctgagttccaacgccactaaccctatgctgacgcgacttcttgagaactgtaagagtctcaaatatctggttgatgagtgtccttttgcatttgtgaactagtatgtaatattttattcacttaaataaag

SEQ ID NO: 250878 - DNA, 406 bp, Glycine max
gaaagatgtttggagagttgaatgtggaatcccttggggagttccgctcacaggtattggtaatagcatttttaatgagatgctcattagatatagctatgaaaaattactgcgccaggctaaagctccaagtatgtttttacaatccttcaaaaattttgtttctttgtgtgtgtatggtgatgataacttaattagtgttatgaatatgtcaagccttactttagtggttctaaattgaaaagctttctagctggtcataatatcaccattactgatggtattgacaaaactagtgcaactttgcaatttagaaagttagcagattgtgattttctcaagagaaactgtaagcagatgtctaatgttttgtgggtggctcctgaagacaaggcgagtttatggt

SEQ ID NO: 250879 - DNA, 406 bp, Glycine max
gtagcctcgagaagcgtggcaacgcctgggtactaacccgcgacggcgacgacggcgacgtgcaacaccgcctcaacccaaccctaattgattccctcctctcaacgcttaaccgtctcgcatctcaagccactcccggctccgtcctcgtcaccaccgccaccggcaaattcttctccaacggcttcgacctttcctgggcgcgcgccgccgcttccgcctccgccgccaccgaccgcctccagttcatggtggactccctcaagcccgtcttggcggcgatcatgtcccttcccatgcccaccatcgtcgccatcaacggccacgcctccgccgccgggttcctcctcgcggtcagccacgattacgtcctcatgcgcagcgaccgcggcgtgctctacatgcc

SEQ ID NO: 250880 - DNA, 372 bp, Glycine max
atatatacatatatacgagagagtgagtaatcgagaaagagaagaagcatatatatcaaagtggctgcagagatggagagggagtcattgataactgaagctcctaatgcaccagttactgcacagagaagggtcagaaatgacttagaaaattctctaccaaaaccatacttgccaagagcattgaaagctcctgatacgggtcacccaaatggaacagcaggccacaggcaccacaacttatctgttcttcagcagcattgtgctttttttgatcaagatgacaatggaatcatttacccttgggaaacttacatggggctgcgttctattggatttaaaggtggtgcctctggtaataaggctaatggt

SEQ ID NO: 250881 - DNA, 410 bp, Glycine max
cttaattattaacacttccttagttcaatatggtgaagcggttcgctctctctctatcttgcgtatgcttgctactcttgtcgagtgcatgctttgctattagctccagcaagctcaacgagtgccaactcaacaacctcaacgcgttggaacccgaccaccgcgttgagtccgaaggtggtttgattcaaacatggaactctcaacaccctgagctgaaatgcgccggtgtcactgtttccaaactcaccctcaaccgcaatggcctacacttgccatcttactcaccttatccccggatgatcatcatcgcccaagggaaaggagcacttggagttgcaattccaggatgtcctgagacgtttgaggagccacatgaacaatcaaacagaagaggctcaaggtcgcat

SEQ ID NO: 250882 - DNA, 407 bp, Glycine max
cggctcgagcggctcgagcggctcgaggtttcgtctggtgcgtctttactcttgtggggaccgaagcgaaaaagaaaaggcttgacttgagagaaatagagcttcgaatcgaaactcagaattagaaaaaaacacaaatcacaatcacaatggcaaggtacgaccgagcaatcaccgttttctcccccgacggccacctcttccaggtcgagtatgccctcgaagccgtccgcaagggcaacgccgccgtcggcgtccgcggcaccgacaacgtcgtcctcggcgtcgagaagaaatccaccgccaagctccaagactccaggtgtaaaccaaaaaaaaacgacgtcgtttcaaattaaacactgatttggtgtggtcggtttcgcaggtcggtgaggaagattgtg

SEQ ID NO: 250883 - DNA, 391 bp, Glycine max
gcgtcttcgagtttcacagcgaagtcgtaggagggtttcagaagatggagaacatgcagagcttctggcaattgggcgatgaactccgtggacactcaaaagcatcggaggatcacaaatggttaatggttgcttcgaaattggcggaacagacaagattgaagggggagcgtgtgaacaaccttgatctttcaaagggccccattgaaacaaggtcaagggataaatttgggttccaggaagagaacaaatttgattctcttaacttaagcatgttgaacctggactctaaatttactgagaatgtgagcaaaagctcgcttcgaaatggtgtttatggtatgaatgcagtgtatcagaaaaacaatgcaaacttggtgagtaatgtgat

SEQ ID NO: 250884 - DNA, 417 bp, Glycine max
catattgttatgtggaagtagaccattttgggcacgcacggaatcaggaattttccggtctgtcttgagagcgaatcctaactttgatgattcaccttggccatccatatcacctgaagctaaagactttgtgaagagacttctgaacaaggaccacaggaaaaggatgactgctgctcaagctttagctcacccatggttgagaaacgaaaaaaatgctattcctttagatattttgatatacaagttagtaaagtcatatgtgcgtgcctcacctttgagacgtgcagcattgaaggctcttgcgaaagcattgaccgaagacgagctaatataccttagagcgcagtttaacctcttggagcctaaagatggctgcattttacttgagaattttagagttgctctcatgaaaaa

SEQ ID NO: 250885 - DNA, 386 bp, Glycine max
gtttgttgttcaatctaacaaacttctctatatcggttactttttcaacacaccttagacacttctttatttgagcctttcatataaatatcatggcttcgagggtggtttcggttttggtgatagcgatgatgttgtttgccatgaactgtaactgcactagtgttggccacatgccttcaaccaaagaggaaggtcacgattttcaggaggctaaagccaagacaacacaaactgcgaacaaggccatggaaactggtaaagatgggaaagaagccgcagagtcatggacagaatgggctaaagagaaactcactgaaggtcttggcttcaaacatgatcaagaatccaccactaagaaagtctctgactatgccggtgatgct

SEQ ID NO: 250886 - DNA, 404 bp, Glycine max
atttccgcagagttcgaggcgtagatatgaagaatgattgggcctttgttgaatttagtgatcctcgagatgctgatgatgctagatacaacctggatggtcgtgatgttgaaggaagtcgtattattgtggaatttgccaaggggggtcctcgtggttcccgggaccgggaatatatgggtcggggtccacctcctggatctgggcgatgctttaactgtggcattgatggtcattgggcccgagattgcaaagccggggattggaagaacaagtgttaccgttgtggggaaagaggtcatatagaaaagaactgtaagaacagtcccaaaaagttgagccaacgtggacggagtctttcacgttcaccagtaaggtcacgttctcctcgtcgtggaagaagc

SEQ ID NO: 250887 - DNA, 399 bp, Glycine max
atgagagtgcggtttcctttgttggtgttgctgggaactgggttcctggcatcagttggtgtctcattaaaggtgagagaggatgagaataaccctttctacttgagaagctctaacagcttccaaactctctttgagaaccaaaacggtcgcattcgtctcctccagagattcaacaaacgctccccacaacttgagaaccttcgagactaccggattgtccagtttcagtcaaaacccaacacaatccttctcccccaccatgctgacgccgatttcctcctctttgtccttagcgggagagccatacttaccttggtgaacaacgacgacagagactcctacaaccttcaccctggcgatgcccagagaatcccagctggaaccacttactatttg

SEQ ID NO: 250888 - DNA, 404 bp, Glycine max
ctcatgacatggtgccacagtcgccggggttgatttgcagcgaggattcgccgcagtggttgctgaagctggtggaggggtggtttccgtggtgttacttgcacgttggagaggagttgcagttggaccataagaaatccccgtttctcaaccctgacggggatgcttcctgcgcccataacttggaggctcacttgcacttgctagatgggtgagttatagtacattaatagttagaaaaaattatatttttggtctatccctttatctctaattttaaatttaattcccactaatttaattcataaatttcatctttctattttgtgaaattgtgcaatattaacacaattaaatattgattattaataagtgatgttgataatcacatgtcacctttttat

SEQ ID NO: 250889 - DNA, 404 bp, Glycine max
gaaaggaagcagtgattgaattggggatttagggattgggtacagtaacaatgaatgtcaagatggattccgatagcgcgaagctgttcgtaggaggcatttctcgcgacactaccgaacacgttctcaaactccacttcgccaagtacggcgtcgtttcggactccacaatctccgtagaccgcaccacccgaagccctagaggttttggcttcgtcaccttctccgacctctccgcagctgataaagccctccaagacacccacgtcatcctcggaagaacggtagaagtgaaaaaagcaattcccaggagtgaacaacatcaacaccaaaacccattacagagtagaaggggtggttattattataataataataataataataatgatgataataataat

SEQ ID NO: 250890 - DNA, 410 bp, Glycine max
  unsure (1)..(410): unsure at all n locations
gagaagcccgagggcgaccctacccgcgatgacatcatcgatagctacattaaaaccttggccaaggtcatcggaagtgaagaggaggcgaggatgaagatatattcggtttcgactaggcactactttgcgtttggggctcttgtgtctgaagagctttctatcaagcttaaagaattgcctggagttcggtgggtgcttcctgattcttacttgaatgttaaggaaaaggattatggaggtgagccctttattaacgggcaagcagttccctatgatcccaagtatcacgaagagtgggttagaaacaatgcacgtgccaatgagagaaacaggcgcaatgacaggcctcgtaatgctgacaggtcaagaaactttgaaagganganggaaaatgtggtgaacagaga

SEQ ID NO: 250891 - DNA, 381 bp, Glycine max
attagtgttcatgaatacgtcaagccttactttagtggttgtaaattgaaaagctttctagctggtcataatatcaccattactgatggtattgacaagactagtgcaactttgcaatttagaaagttagcagattgtgattttctcaagagaaactttaagcagatgtctaatgttttgtgggtagctcctgaggacaaggcgagtttatggtcacaacttcattatgtttcgtgtaataatctggaaatgcaagaagcttatcttgtcaatctcgtaaatgtgttacgagaattgtatttgcacagtccagaggaagctcgccaattgagaaggaaagctctctctcgtattgaatggctgcaaaaagctgatgtgcct

SEQ ID NO: 250892 - DNA, 275 bp, Glycine max
attagagaacatgaatactataagccttactttagtggatctaaattgaaaagctatctagctggtcataatatcaccattactgatggtattgacaagactagtacaactttgcaatttagaaagttagcagatcgagattctcacaagagatactctaaacagatgtctaatgtgttgaatgtagactcttgaggacaaagcgaatgtacggtcacaatggcattatatttcttgtaacaatcaggctaagccagatgcttatcatggcaatg

SEQ ID NO: 250893 - DNA, 381 bp, Glycine max
atcctactaaaaaacattgcccttgttctttcaaagttaccggacacaagtacacaacacaacagcaacatatggcgtctgaacaattgggttcgcagagaggacaacaacaaccggaaaggaaatcacggtgagaaacacaaggttcccaagatgggcaaccactttgagcaccttgcggagcaagctaaagaatctgacatcaccgctgggaaagatactccgcaaggtagcatagaagccttgcaagctggaaagaaggtcaaagatcatgcaggaaaagccatgggagatattggtggacgtgggaaagccagagagactcacgagctgggtgcacactttgaatccctggctgacaaagtaactgaccatgcagca

SEQ ID NO: 250894 - DNA, 419 bp, Glycine max
cttccatagctccccaaaaatgaagagcaccatcttctttggtctctttctcttgggtgccttcaccacctcatacctaccttcagccatcgctgatttcgtgctcgataatgaaggtaaccctcttgaaaatggtggcacatattatatcttgtcagacataacagcatttggtggaataagagcagccccaacgggaaatgaaagatgccctctcactgtggtgcaatctcgcaatgagctcgacaaagggattggaacaatcatctcgtccccatatcgaatccgatttatcgccgaaggccatcctttgagccttaagttcgattcatttgcagttataatgctgtgtgttggaattcctaccgagtggtctgctgtggaggatctaccagaaggacctgctgttaaaattggtg

SEQ ID NO: 250895 - DNA, 360 bp, Glycine max
atgaaaaagttttgcgttaaaggacacattcgctgctgactgtggagatcaaggatggcaatatgtgctaaagatgtttggagagtataatgtggaatcccttttctatttacactcacagttatttgcaatagcatttctaatgagatgctcattagatatagctatgaaaaattactgcgccaggctatagctacaagtatgtttttacaatactttaataattatggatctctgtgagtgtatggtgatgataacttaattagtgatcatgaatatgtcaagccttactttagtgggtctaaattgaaaagctttatacctggtcataatatcaccattactgatggtattgacaaa

SEQ ID NO: 250896 - DNA, 198 bp, Glycine max
atgacttctcatccgcgcgtacctaatctcggaattcggctctagtattacaccgttttaaataatagacgatattctatgatgaggtcgcggttcccatgactgttgcccggagtagttatcctggcattacattctgtctcatatgtcattgcgtatactgaaaatcatatacccgatcacatcaagagcctccta

SEQ ID NO: 250897 - DNA, 412 bp, Glycine max
atagcatctcctttaccaccattctagatatcagagaactgtgcagctctcttaggtttttaaaaaacaccacgcaaacagcaagatggccacttccgacagtaacatgctactaaattatgttccagtttatgtgatgctcccactcggagttgtcaatgttgacaatgtttttgaagacccagatggccttaaagaacagctcttgcagcttcgagctgcgggtgttgacggggttatggttgatgtgtgggtggggatcatagaactgaaggggcctaagcagtatgattggagagcctaacagagtttgtttcagctggttcaagaatgtggcttgacactgcaagctattatgtcattccatcaatgtggagggaacgtaggagatatagttaacatcccaattccc

SEQ ID NO: 250898 - DNA, 527 bp, Glycine max
  unsure (1)..(527): unsure at all n locations
agtnnnaagatggtgntttatgggatggggagttaatggcatcactctagaagagctatgacgtcgcatgcacgcgtacgtaagctcggaattcggctcgaggcggatgttgacgcaatgtgatttctgcccagtgctctgagtgtcaaagtgaagaaattcaaccaagcgcgggtaaacggcgggagtaactatgactctcttaaggtagccaaatgcctcgtcatctaattagtgacgcgcatgaatggattaacgagattcccactgtccctgtctactatccagcgaaaccacagccaagggaacgggcttggcggaatcagcggggaaagaagaccctgttgagcttgactctagtccgactntgtgaaatgacttgagaggtgtaggataagtgggagctggaaacagcgaaagtgaaataccactacttttaacgttattttacttattccgtgaattcgaaagcgggcactgcccctctttttggacccaagggtcgcttcggccggtcgatccgggcc

SEQ ID NO: 250899 - DNA, 428 bp, Glycine max
  unsure (1)..(428): unsure at all n locations
aagccttactttagtggttctaaattgaaaagctttctaggtggtcataatatcaccattactgatggtattgacaaaactagtgcaactttgcaatttagaaagttagcagattgtgattttctcaagagaaactttaagcagatgtctaatgttttgtgggtggctcctgaggacaaggcgagtttatggtcacaacttcattatgtttcgtgtaataatctggaaatgcaagaagcttatcttgtcaatctcgtaaatgtgttacgagaattgtatttgcacagtccaaaagaagctcgccaattgagaaagaaagctctctctcgtattggatggcttcaaaaagctgatgtgcctaccatagcacagattgaaaagttccattcgatgcanaggatgatgaatgctcctgattcaaatgataa

SEQ ID NO: 250900 - DNA, 386 bp, Glycine max
gttcctcactgaccaagccatggcgatgagaagcaaagtttctttagctatctttttcttttttcttttagccttattttcaaacctagcctttggcaaatgtaaagaaaccgaggtagaagaagaagaccctgagctcgtaacatgcaaacatcaatgccaacagccacagcaatacactgagggtgacaagcgggtatgcttgcaaagatgtgacaggtatcatcgtatgaagcaagagcgagagaaacaaatccaagaggaaactcgtgagaagaaagaggaggaaagccgtgaaagggaagaagaacaacaagagcagcatgaggaacaagatgaaaatccctacatttttgaggaagataaggattttgagaccagagtcg

SEQ ID NO: 250901 - DNA, 424 bp, Glycine max
agagcgaagagaatggctcccaagggtttaatctttttggctgtgttatgcttctcagcactgtcactgagtcgttgtcttgcggaggataatggacttgttatgaacttctacaaggaatcatgccctcaggctgaagacatcatcaaagaacaagtcaagcttctctacaagcgccacaagaacactgctttctcctggctcagaaacatcttccatgactgtgctgttcagagttgtgatgcttcactgttgctggactccacaagaaggagcttgtctgagaaggaaacagatagaagctttgggttgagaaatttcaagtacattgagaccatcaaagaagctttggaaagggaatgcccaggagttgtttcctgtgctgatatcctcgttctctctgccagagatgggcattgttcgc

SEQ ID NO: 250902 - DNA, 411 bp, Glycine max
  unsure (1)..(411): unsure at all n locations
ctgattttgaatcttagtggaaaaacttcaaaaaatagaaagaaaacatcataccgattcttcattagaaaaacccaagtacaacgagagaaatcttgtatagatgtgacaaaataaaaataatctaatttggaatagactcaattgggaccccaaatattggagtgaactaagacaaaaggtaacgcatcacccttattgacatgagagccataactgatacgagtatgtttacctagttgacacgactcgcatggaaaggacttaaaattagaatgattgggaactaatacatgcaaatgcagatgagacacaaacaacccgaggtgtaagttgatataatcctncagactcatatcctgctccaatcatccattcagtgcgtcgatcttgtacaagaacgaaattact

SEQ ID NO: 250903 - DNA, 353 bp, Glycine max
gatttaatattgacgctctacaaaatcccaatggttgtgagtctgataatgagttgagtgatgccttctgggaaaacttgagtgtctgtgaatatgcactgtacaacgttgatgcaagactatatgttgatcagagatgcttgtatttgcaaaagcctcttcttgagtctgcaactctcggagccagatgcaatacgcagatggtaattgcccacctgacagaaaactatagtgcattaatagatccacctgagaaacaggcaccaatgtgcactgtacactcatttacacacaatattgaccattgcttgacatgggcgcgaactgagtttgagggtttgcttgacaaaact

SEQ ID NO: 250904 - DNA, 340 bp, Glycine max
aagaaaacgttttctaataattagaaacatagaacagaagatgtgacttaattgagcgttgaggatgcatcgaggaaagaaagcggcagagtccattaaggaaacagctacaaacattggtgcttctgccaaggctggcatggagaagaccaaggccactgtccaagagaaggcagaaagaatgacagcacgtgatccggtgcaaaaggagttggcaacccaaaagaaagaggcaaagatgaaccacgcggagctggacaagcaagcagcgcgtcagcataacacggcggccaaacagtccgtcaccacggctgggcacatgggacatggccaccacacc

SEQ ID NO: 250905 - DNA, 384 bp, Glycine max
ctcatcccggacctcgtaattagcctcgagggcttgacctcatctgattccaacaagctcggcaaggggaccgagattaccccagaggagaaccctcagcttctggacttggatgtcttcctcactgttgtctatatgaacgagggagctctttttctgccacacttcaattcaaaggccatactggtactagtgattaatgaaggagaaacaaacattgaacttgatggcattaaagaacaacatcacaggcagcaacaggaagagcaacctttggaagtgcggaaatataaagctgaattgtctgaaccagatatatttgtaatcccaacaggttatccagttgtggtcaacgctacctcagatctgaatttctttgctttt

SEQ ID NO: 250906 - DNA, 355 bp, Glycine max
aagagagttttttttgttcctcactgaccaagccatggcgatgagaaccaaactttctttagctatctttttcttttttcttttagccttattttcaaacctagcctttggcaaatgtaaagaaaccgaggtagaagaagaagaccctgagctcgtaacatgccaacaccaatggcaacaggcacaggaattcactgtgggtgacacagcgggtattcctggcagatatgacacgggtttaatcgtgtgacgcgagagcgagagacacatatccgaggggaaactcgtgaaaaaaaaaggaggggaaagccgtgaaaggggaagaagaacaacaagagcatcatgaacaacatga

SEQ ID NO: 250907 - DNA, 308 bp, Glycine max
cgatttgtggttcgctttagcaacaaggacattgttgcacagataatgtctgctagcattgccggcgatttagttcttgctacagcatattcacatgagctgccacgatatggtcttgaagtaagacttacaaattatgcagcagcttattgcactggtctcctgttggcccgaagagtcctcaaaacacttgaaatggatgaggagtatgaaggaaatgttgaggctactggagaggattattcagtggaacctgcccagagcaagaggccatttcgtgcactccttgatgttggtcttgttaggac

SEQ ID NO: 250908 - DNA, 345 bp, Glycine max
ctggattcttcaaatcaaatggcacgtatgtcactgagaaagggaagttcttcttgacctggtattctaacaaattgctgaatcatggtgatcaaatactagatgaagccaacaaagctttcctgggctgtaaagtcaaattagcaatcaaagtatctggaattcactggtggtacaaagttgaaaatcatgctgcagagcttactgctggatattacaaccttaatgatagagacggataccgccccattgcaaggatgctgtctcgccatcatgccattttgaactttacatgtcttgagatgagggactcagagcaaccctcagatgccaaaagtggaccac

SEQ ID NO: 250909 - DNA, 406 bp, Glycine max
atacgttcatgacttgttgctctaaacccaaaaacacctcagaaatatttagttagaactattacattgatccatgcactcacaaaagatgtacctaaatgactaagttggtatatatatcaaatacattcatataattcatggctatggctattgtatattaagaagttgacatagaaatgaaataattgacccatctctagtcaggtcgattgttttaatacattacaaatagtttttactaacatatgctactatgttttggatttcttttcttgtttgcaggaaaactttgccggtggaagaaatcttgaccattgacattaaacccggttggaaaagggggacaaagatcacattccctgaaaaaggaaatgagcagccaaatgttattgctttcgatctt

SEQ ID NO: 250910 - DNA, 306 bp, Glycine max
tcggtgaattccaattccacattttcaagaattaaggaggcaaagaatgtgcatatatgaattggaattattggttttcttattaggcctatcctgaagccaaaggaaatgagatcggaattcctcggggaattccaattccacattttcaagaaataaggaggcaaaaatgtacatatatgaatgggaattattggtttcctaattaggcctatcctgaagccaatggaattgagatcggaattctctcggggaatcccaattacacattctcgagatatagggacgcaaatgtgcacatatgtg

SEQ ID NO: 250911 - DNA, 428 bp, Glycine max
aatctgcttttgatttgaatttcacaccccgtgagtttgatgagcttggatgaagttcatggactctattcaggcggaattaagctgccaacagatataatcagcaagattagtccactacccgtgcttaaggaaatcttccgaactgatggtgaacaggcccttaagtttcctcctcctaaagtaattcaagtgagtaagtctgcatggatgactgatgaagaatttgcaagagaaatgcttgctggtgtaaatccaaacttgattcgttgtcttaaggatttccctccacgaagcaagctagatagccaagtctatggtgatcatactagtcaaataaccaaagaacacctagagcccaacttagaagggctcactgtagatgaggcaattcaaaacaagagattgttcctactagatcatcatga

SEQ ID NO: 250912 - DNA, 513 bp, Glycine max
agtaagagatttttagcaggggagatagtatactacccagattatgacgtcggatgcacgcgtacgtaagctcggaattaggctcgaggtggttagcttagatgcttgggggtcttctccataggggtggtaatatagaacggacagtggtgttgatgcgcaagaatgtgttagacgtgactagcgtaaccagcgttaggggaattattgttcaaggtctcgacttagttggctcaacactcgatactctgactgccttcttgggccgatccgtgtctatacagcttattagtgctaccaaagctgatgccaacagaaaagtgcaactcgaaaaggctacgctgttgtaacgtattactacttcatagccaactttggtagcagaccaatctgcattaaaaatcatttttgaatggaatgatccaaatggaattcctggaccattttatatcaggaattttatgcaaactgacttattccttgtgagtaaaactcttgaagacattccaaacc

SEQ ID NO: 250913 - DNA, 330 bp, Glycine max
tacctacagctcggaactcagatttagactcgaggcttttaccttatctattacaacaagctaaacaaggtttaggttattacgccacacgggaaccctcatcttctgaacttgcatgtctctctgagagatgtggatatgaacgagggagctctttttctgccacacttcaattcaaaggccatagcgatactagtgattaatgaaagagaagcaaacattgaacttgttggcattaaagaacaacaacagattcagcagcaagaagagcaacctttgtaaatgcggaaatatacagctgaattgtctgaacaagatatatgtgtaatc

SEQ ID NO: 250914 - DNA, 419 bp, Glycine max
  unsure (1)..(419): unsure at all n locations
caagagagagatagaaggtttggaagaatcgcgatggaggagtangagggaggaggcataatgctgagcaagcgaatcgcaaacggagaggttgactacaagacgaaatccggcaccgactggagccactcctatctcaaccagaagccatggcaccctctttcttaccccaaccaacgccgcaagtggatcgccgaacagacccacgccaatcgccaacgccgcaccgaagaggtttctcgcgagttcgctcaggagcaagagttctttcgccaaaccgctctcatctccaaaaaagagaatgaaaaggtggagctcatgcaagctgttagtttcatgtacgttcgtcctccgggctacaacgccgagagtgccaaagctgctgaaatgaacgacgagaagaaaaaagaggacatgag

SEQ ID NO: 250915 - DNA, 393 bp, Glycine max
gaaatatcattttccgagacaatcccatcttccatttccatggtcagtgatttcttctcatcgagaagcttcgcgaacgaaaacaaagaaccctagacagatccattccatagccatgtcaggtgttggccctctatctcaggattgggaacccgtcgtcctccgcaagaaggctcccaccgtcgccgtcaagaaggacgagaaagccgtcaacgccgcccggcgctccggcgcggaaattgaaaccctaaaaaagtataatgctgggacaaataaagcagcatctagcagcacttcattgaacactaagaagctggatgatgatactgagaatctagctcatgagaaggtaccaactgaacttaagaagggctatatgcaagctaggatgga

SEQ ID NO: 250916 - DNA, 323 bp, Glycine max
gatattctcttgggaatttctcaagattttgaaattgctgggaatactcttatgccagctttttctgttccacaggctactgccagatcttctgaaaatgcggaatcctctgcatgatctggaatttgtgttttctttcgcttgttcgtttgtttaattcaataaaggaaattaggcatgaccctcttgttgagtatgctctgcctatttgaaaatttccacacctcttttaattgtcgtaatgatgtgtgaagtgtgtgttattttaaaaaaaagaactcatgaaaaatgatatgagtggttcaacaacaattttaggaaca

SEQ ID NO: 250917 - DNA, 399 bp, Glycine max
gagagagagagagaaactgagagaaattcgcaaaccctaatttcggaaagatcggcgatggctgcctccaaggatcgcgagaacttcgtctacatcgccaagctcgccgaacaggccgagcgatacgaagagatggtggaatcaatgaagaacgttgcgaatctcgacgttgaactgactgtggaggagcggaatttactttctgttgggtacaagaatgtgattggtgctcggagagcatcgtggaggatcctgtcttccattgagcaaaaggaagaaacaaaagggaacgagttgaatgcgaagcggattaaggagtacaggcagaaggttgaattggagctttcaaacatctgtaatgatgttatgacagtgattgatgagcaccttatcccttcg

SEQ ID NO: 250918 - DNA, 411 bp, Glycine max
tgtgctcacaccaggggtgttggcagaagaggcagctaagagtgcttctacctacagtgatgttttcactgctaaaatattaaatgccgagcaatgtgctgaattaaaaatgggatcctatctgggtgttgctgcagcctcggaaaatcctcctcattttatccatctatgttacaaacctctgagtggacctgtcaatgtcaagttggctttagttggcaaaggtttgacttttgacagtggtggctacaacatcaagactggacctggctgttcaattgaactcgtgaaatttgatatgggtggttcaacaacagttttaggaacaacgaaagctcttggtcaaatcaaacctctaggggttgaggttcattttattgttgcaacctgtgagaatatgataagtggaac

SEQ ID NO: 250919 - DNA, 345 bp, Glycine max
cacaactacattaaagaacttgcttataaccaaaaccaacaggacctatggcaaggtatcagaagcactacgatgatcacggttgcatggtcgacgagtatggcaatgttgctaggcaaactgacgaatatggcacacccgcttcatgccactagtgtcacttatgtagccaccaaaagagtaggtggctacaatgatgacgctcataagcaacatgatattactggtgtctatgctgagatagacacctgtagacatcattctggtcgtggttactaccgtgacactaacaagcaacatgatgctactggtgtttatccacgtaatagacattggtagaaatca

SEQ ID NO: 250920 - DNA, 239 bp, Glycine max
ccccactagctattacttcactctcagcactgatgcatcatgatcttgattgcaggaccctaaacttcaccttcaaccatgaccacacaagtaccaccacacagtatccaactccacacaacaacacaccgctacgaaactggcaatctcccccccagagcccgcttctaaccgcctaattatgaagccagcgtcaaagcgccctacatttaccatacctagagaggtccaactacttc

SEQ ID NO: 250921 - DNA, 416 bp, Glycine max
  unsure (1)..(416): unsure at all n locations
gatgtgacaggtatcatcgtatgaagcaagagcgagagaagcaaatccaagaggaaactcgtgagaagaaagaggaggaaagccgtgaaagggaagaagaacaacaagagcagcatgaggaacaagatgaaaatccctacatttttgaggaagataaggattttgagaccagagtcgaaactgaaggtggcagaattcgggttctcaagaagttcactgaaaaatccaagcttcttcagggcattgagaacttccgtttggccattttggaagctagagcacacacgttcgtgtctcctcgccactttgattccgaggttgtttttttcaacatcaaggggcgagccgtacttgngttggtgagtgaaagtgaaacaganaaaatcacccttgaacctggggacatgatacacata

SEQ ID NO: 250922 - DNA, 354 bp, Glycine max
ggctcactgagaaaacaatttttacttgcagagatttggacgtcttggttgtttattatacaatagcaactcaatttagaaaatttctaccgcattacattaggtggcatctgtacaccttgttgatctacattctcccatcttttctcactgctgaaattaaatataagcggaatttgagtaatattcatatttccggcttattttacgacggcagatacaaattctggactaaacacgagaaaaatcttgctttgacagaagaggaaaagatggaggtgattagaaatagaggcattcctgctggaggtctttgcaaacgagctcatgaatttggaaaacatggtgctcatg

SEQ ID NO: 250923 - DNA, 398 bp, Glycine max
cacacacaactactacaagtacttacttacgatcaagaccggcaacagctatggcgagttatcaaaagcactacgatgatcagggtcgcaaggttgacgagtatggcaacgttgagaagcaaaccgacgaatacggcaaccctgttcatgctgctagtgtcacctatgtagccaccagaactgctgctggtggttacagtgatgacattaataagcaacatgataccaccaatgcctacggcgtagacactggtagacagcattctagtggtggctacgatggtgacactaataaacatcatggaactactggtggctataatgatgacaccaatagacatcatggaactacccgtgtctatggtatagacaccgataggcaacaacatgggactact

SEQ ID NO: 250924 - DNA, 387 bp, Glycine max
  unsure (1)..(387): unsure at all n locations
aaccttgctctatactacacagtacacacactagaggaatagtggcttccatcctccactactctttagccctctctctttcttgctcttttcttttcttcttatccgactcagtcacccctacgaaaccaataaaccttgttgttctacccgttcaaaatgatggttccacagggctccattgggccaaccttcaaaaaagaacccctctaatgcaagtaccagtcctggtggacctcaatggaaatcacttgtgggttaactgtgaacagcaagactcatccaaacgtacccagcacnctttctgcactcaacccaatgctctagagccaacacccaccaatgcctcatttgccccgcgcatcaggccagggtgccacaaaaaca

SEQ ID NO: 250925 - DNA, 245 bp, Glycine max
tcttatccgactccgtccccattccccaacaccacactaacgctaccaaacctataaaccttctggttctacccgttcaaaatgatgcttccacagggctccattgggccaacctccaaaaaaggacccctctaatgcaagtaccagtcctggtggacctcaatggaaaccacttgtgggttaactgtgagcaacactactcatccaaaacataccaagcacccttctgccactccacccaatgc

SEQ ID NO: 250926 - DNA, 275 bp, Glycine max
cgtctcgaggtttttgaacactcatcaccatggccaagcttgttcttgtccttaggttacttctgctcagaggctgcttctctctgagagagcaagcacagcaaaatgagtgccagattcaaaagctgaatgccctcaaaccggataaccgtatacagtccgacggtgggttcattgagacctggaaccctaacaacaagccattacagtgtgccgacgttgccctctctctgtgcacccttaaccgaaatgcccttcgtacacattcctacacc

SEQ ID NO: 250927 - DNA, 407 bp, Glycine max
ctgtttctgttatctggaacaagttcgtgccgaagcaaccagtcatgggcctacgaggagacgctgttgtgacctcctcgggaaagttacaactcaataaggttgacgaaaacggcaccccaaaaccctcgtctcttggacgcgccctctactccacccccatccacatttgggacaaagaaaccggtagcgttgccagcttcgccgcttccttcaacttcaccttctatgcccctgacacaaaaaggcttgcagatgggcttgccttctttctcgcaccaattgacactaagccacaaacacatgcaagttatcttggtcttttcaacgaaaacgagtctggtgatcaagtattcgctgttgagtttgacactttccggaactcttgggatccaccaaatccacac

SEQ ID NO: 250928 - DNA, 270 bp, Glycine max
tacctaagctcggaattcggctctagtatgacccgtttacagacaacagcccatatttgaggtaagtgtacacgtcattccaggagctagcaacatttatggctcacggtaacactgctcagctctcgaatgaaggcggtgatccagtgctggcgcgcctatgctggaccatcgcatcgtacgagatgccgcacgataacacgttcttaagaatcgtggaaaaacttctggaaatagaccccaccggtgcaattgtggccataaggaaca

SEQ ID NO: 250929 - DNA, 319 bp, Glycine max
aagaacttccttataaccaaaaccaacaacaactatggcaagttatcagaagcactacgatgatcagggtcgcaaggtcgacgagtatggcaatgttgagaggcaaactgacgaatatggcaacccggttcatgccactagtgtcacttatgtagccaccaaaagtgttggtggctacaatgatgacgctaataagcaacatgatattactggtgtatatcccgagagagacaccggtagacatcattgtggtcgtggttacgacggtgacactaacaagcaacatgatgctactggtgattatcccggaatagacatt

SEQ ID NO: 250930 - DNA, 279 bp, Glycine max
gcttcactactaaccacaacaccaataccccctccgctaccgtaacgatccacaccaacaaacccgttcctccacccaccaggtcgtcaaggccgtcaccgccgtcacagcgggcggctccctcttgatcctcgcctcgttgatcctcgccgacaccgtcattgccctcaccatcgtcacccctctgttcgtcattttcagtccggttctcgatcccgccgtaatcaccgttgcgctcctgagcctggggtccctcgcctcgagtgagttcggtgtggc

SEQ ID NO: 250931 - DNA, 328 bp, Glycine max
  unsure (1)..(328): unsure at all n locations
aaaaagttgtattgaaattttcacaagaggaatttcttacagcttggtcaactcaggtgcgtcctgcaacaactctgttggctgatgggtgcccatatttgtatgctatggtgcatgatagttcagtgtctacaataccaggtgattttgtcattggtgttaagttgacaaccataaacaatatgtgtgcatatgggctcaatcctggtatttcaggttctcgtcttttgggcaccattcctcagtccatttcacagcaaactggtttggaatcaaatggcaacagtgagaacaccattgaattntgattctagcaagcagagctttt

SEQ ID NO: 250932 - DNA, 215 bp, Glycine max
cggctcgagctccattggtccttaaacactcatcagtcatgagcatggccaagctagttttttccctttggtttctggttttcaatggcttctggtttcctttcaagtccaaaaaaccaccctaggcaaaccaattgcaaaacccaaaacttaatggccttaaaccggattacccgattgagtccgaaagaaggctcattgggaaactggaaccc

SEQ ID NO: 250933 - DNA, 346 bp, Glycine max
  unsure (1)..(346): unsure at all n locations
gaggaagatgaggatgaggatgaggaacaagatgaacgtcaattcccattcccacgcccacctcatcagaaggaagagcgaaagcaagaggaagatgaggatgaggagcagcagcgagagagcgaagaaagtgaagattctgagttacgaagacataagaataagaacccttttctcttcggctctaacaggttcgaaactctcttcaaaaaccaatatggtcgcattcgcgtccttcagaagttcaaccaacgcttcccacaacttcagaatctncgagactaccgcattttggagttcaactncaaacccaacacccttcttttccccaaccatgctgacgctg

SEQ ID NO: 250934 - DNA, 407 bp, Glycine max
  unsure (1)..(407): unsure at all n locations
tttgaagaacaacatggtggtgctaaaggtgtgtttgttgcttcttttccttgtgggggttacagctgcacgcatggaactgagcttcttcaaaagtgatcagtcatcaagttatgatgatgatgagtattcaaaaccatgctgtgatctctgcatgtgcacacgctcaatgcctcctcaatgcagctgtgaagatattaggctgaattcatgccactcagattgtaagagctgtatgtgcacacgctcacagccaggacagtgtcgttgtcttgacaccaacgacttctgctacaaaccttgcaagtccagagatgactagaaaaactaatagctctctcaaatggacgaagcccctttaagctttgnttggtatgttaggggagaccaattaaaccaggaattaa

SEQ ID NO: 250935 - DNA, 529 bp, Glycine max
  unsure (1)..(529): unsure at all n locations
gagtntaaagtgatctgatttatgacatgggggggatattagtatcactacctatgaatctatgacgctcgatgcacgcgtacgtaagctcggaattcgactcgagagtcttgatgtgacctcatgtgctgtgactgacaggaaacgttgccaaagaacgtggctgcacaactgctctcttgcaaattggatactgttactgtcctatattatcctgagtgggctccaattaattgtcgagttcatcgacaaccaattcacatcactgaacgatattatgtcatgaaagcaatgatgtcatcattgaatatgatgcatgtactattccaaatgattgcagttcataggttgttgccaaggttggagatcacaatcaaatggttggattgcatgcagcttgaagcttaggtagactgagatatacttcattgataccatatattgaaccagttgtgcaagctcaaatagctgacattactttgactgatcactgttgatgctgaatgtaaaatggaagcgctcacatagg

SEQ ID NO: 250936 - DNA, 406 bp, Glycine max
gtgctattgactaacagcaacagtacttaccattatgatgcgtgtcagttaacaggatcgtaaccacattcctgagaatcgatcttcccaatataagtatgctgtcctaataatggatctgaaatgcggatatctgagtggtcaaaataaacttcatggcatctagagtttccttattgacaatcccaaacagtatacagattacgacattctcttgcgaatttctcacgatttctaaattgctgacaatactcttatgccagctatttctgtttcacatgctactgccagatcttctgaaaatgctacaatcctctgtatgatctgcacttagtgacatctttcatttgtccgtttgtataattcaatcaccgaaattaggcatgaccctactgctgaatattct

SEQ ID NO: 250937 - DNA, 410 bp, Glycine max
gttcaatatcctagtataccttaataaataatttacgatgcggtgatgagagcacggttcccattactgttgctggcacttgttttcctggcttcagtttctgtctcatttggcattgcttactgggaaaaagagaaccccaaacacaacacgtgtcttcagagttgcaatagcgagagagactcgtacaggaaccaagcatgccacgctcgttgcaacctccttaaggtggagaaagaagaatgtgaagaaggtgaaattccacgaccacgaccacgaccacaacacccggagagggaacctcagcaacccggtgagaaggaggaagacgaagatgagcaaccacgtccaatcccattcccacgcccacaacctcgtcaagaagaagagcacgagcagagagaggaaca

SEQ ID NO: 250938 - DNA, 404 bp, Glycine max
tgtatactgtttctgaccaatgttatcctgagtgggctccagttaattgtcgaggtcatcgacttccaattcacatcacttaaggaaattatatcagaaagcaagatgtcagcattgaatatgatgcatgtacaattccaaatgatattggatcattggttgatgccaatgttgctaaatcacaaacatatagttgctttccatgttgctgtaagcatatgaagactgtgatatgcatcattgataccatatgtttagccagtagttcatgctctaagtgctgaagtttactttgacttcttcactgaggagcatgattgtcaagacatagttgctcacattggtgaattgaaatctagtgtctatgttccactgcctacaaaaactaatactattgaatctcc

SEQ ID NO: 250939 - DNA, 393 bp, Glycine max
ttcttaggacagagacagactaccaaggttttcattgtgcagtgcaaggctaaaatcatcatgcatttccatggacttgcattatggtatcctcactttgtgactcgtgagatcattccaaaagtgatgaagtgtattcgttgacatgctgtgatctcttcatattcacacgctcagtgcctcctcaatgcagctgtgaagatattacgctgaattcatgccactcagattgtaagagctgtatgtgcacacgctcacagtcaggacagtgtcgttgtcttgacaccaacgacttctgctacaaaccttgcaagtccagagatgactagataaactaatagctctctcaaatggacgaaacccctttaggctttggttgttatgttaggggag

SEQ ID NO: 250940 - DNA, 378 bp, Glycine max
  unsure (1)..(378): unsure at all n locations
gcagcacctttaaacgccgaaggttcatccaatctccgaaggccttcaccggattgcaaccatgtcgaggagaaaggttagagagccaaaggaggaaaacgtgactctgggcccagctgttagagatggtgaacatgtttttggagtcgctcgcatctttgcctccttcaatgacaccttcattcatgtcactgatctgtctgggagggaaacacttgtccgcatcactggcgggatgaaggttaaagctgacagagatgaatcatctccatatgctgctatgcttgctgcgcangatgttgctgctagatgcaaggaactgggcataactgctcttcatatcaagctccgtgccacaagtggaaaccagacaaaaac

SEQ ID NO: 250941 - DNA, 398 bp, Glycine max
cttaaacactcatcagtcatcaccatggccaagctagtttggtccctgtgttttctgcttttcagtggctgctgcttcgctttcagttccagagagcagcctcagcaaaacgagtgccagatccaaaaactcaatgccctcaaaccggataaccgtatagagtcagaaggagggctcattgagacatggaaccctaacaacaagccattccagtgtgccggtgttgccctctctcgctgcaccctcaaccgcaacgcccttcgtagaccttcctacaccaacggtccccaggaaatctacatccaacaaggtaagggtatttttggcatgatatacccgggttgtcctagcacatttgaagagcctcaacaacctcaacaaagaggacaaagcagcag

SEQ ID NO: 250942 - DNA, 367 bp, Glycine max
cttcaaagttgaaaacccagaatgtggttgtatctctctccgtaaccttaaccttggtactggtgctactgaccagcaaggcaaactcagcggaaactgtttctttcagctggaacaagttcgtgccgaagcaaccaaacatgatcctccaaggagacgctattgtgacctcctcgggaaagttacaactcaataaggttgacgaaaacggcaccccaaaaccctcgtctcttggtcgcgccctctactccacccccatccacatttgggacaaagaaaccggtagcgttgccagcttcgccgcttccttcaacttcaccttctatgcccctgacacaaaaaggcttgcaaatgggcttggcttctt

SEQ ID NO: 250943 - DNA, 415 bp, Glycine max
ctcgagccggacgggttgagactggtgtcttgaagcctggaatggtggtgacttttgcaccaactggactgacaaccgaagttaagtctgtggaaatgcaccatgaagctctcacagaggctcttcccggtgataatgttggattcaatgttaagaatgttgctgttaaggatctcaagcgtggttatgttgcctcgaactcaaaggatgatcctgccaaggaggctgctaacttcactgcccaggttatcatcatgaaccatcctggtcagattggaaatggctatgcccctgttcttgactgccacactttccacattgctgtcaagtttgctgaactcatgaccaagattgacaggcgatctggcaaagagcttgagaaggaacccaagtttttgaagaatggtgatgctgg

SEQ ID NO: 250944 - DNA, 354 bp, Glycine max
  unsure (1)..(354): unsure at all n locations
aattagagagagaaaggtgtgagtgtttgtttttgagagagagaaagagtgtgagtgttgtgttgagtgcagtttctttctcacatggcctctatgccgttggggccgcagcaacagcttccaccgccgccgccgcaacaaccgtcgccagcggagaatgacgcgatgaaagtggactctcgcggcggctccgacgccggcaccgaaaaggaaatgtcagctcctgtcgcagatggtaatgatgcactcactggtcacataatctcaaccacaattgcaggcaaaaatggcgaacctatacaaaccatcagttacatggccgaacgtgttgttggcactggatcattnggcatt

SEQ ID NO: 250945 - DNA, 417 bp, Glycine max
ctctccattggtccttaaacactcatcagtcatcaccatggccaagctagttttttccctttgttttctgcttttcagtggctgctgcttcgctttcagttccagagagcagcctcagcaaaacgagtgccagatccaaaaactcaatgccctcaaaccggataaccgtatagagtcagaaggagggctcattgagacatggaaccctaacaacaagccattccagtgtgccggtgttgccctctctcgctgcaccctcaaccgcaacgcccttcgtagaccttcctacaccaacggtccccaggaaatctacatccaacaaggtaagggtatttttggcatgatatacccgggttgtcctagcacatttgaagagcctcaacaacctcaacaaagaggacaaagcagcagaccaca

SEQ ID NO: 250946 - DNA, 351 bp, Glycine max
gcctttcagattctgatggcctattcaggtggttacattttgtaatacgattgtgcagattgaaccagacatgaattcaaggtttcagcttttgagtaccactaccaatggtgattttgttcaaggaaaagatctcgcaatggttaaagttaatgtagcatgtgctgcttttggcttgacatcaagttacactccaacttcattgttggaatctggtttgcataaagactgaaggttaattgtggaatattttggaaggctgtcttacgttgctcataacgttaatcagccataagagtaagatttgttggaggcatataattcctttgatattaaatctcgctctagatt

SEQ ID NO: 250947 - DNA, 169 bp, Glycine max
ctctaaccgttcattattaacacttccttagttcaataagggcaagcgcttcactctctctctctcttacctcagcttgctactcttgacgagtgcatgctccgctattagctccagcatgctcatcgagtgccaactcaacatcctcaacgcgtcgaaaccctacctc

SEQ ID NO: 250948 - DNA, 401 bp, Glycine max
tcggggaattccaattccacattttcaagaaataaggaggcaaaaatgttgatatatgaattggaattatttgttttcttattaggcctatcctgaagccaaaggaaatgagatcggaattcctcggggaattccaattccacattttcaagaaataaggaggcaaaaatgttcatatatgaattggaattatttgttttcttattaggcctatcctgaagccaaaggaaatgagatcggaattcctcggggaattccaattccacattttcaagaaataaggaggcaaaaatgttcatatatgaattggaattatttgttttcttattaggcctatcctgaagccaaaagaaatgagatcggaattcctcggggaattccaattccacattttcaagaaa

SEQ ID NO: 250949 - DNA, 282 bp, Glycine max
  unsure (1)..(282): unsure at all n locations
agcaaagcaatggctacttcaaagttgaaaacccagaatgtggttgtgtctctctccctaacgcttaaccttggtactggtgctactgaccagcaaggcaaactcagcggaaactgtttctttcagctggaacaagttcgtgccgaagcaaccaaacatgatcctncaaggagacgctattgtgacctcctcgggaaagttacaactcaataaggttgacgaaaacggcaccccaaaaccctcgtctcttggtcgcgccctctactccacccccatccacat

SEQ ID NO: 250950 - DNA, 410 bp, Glycine max
  unsure (1)..(410): unsure at all n locations
gcaaaattgatgcgtgaaaggacacacctgctgttggcttgttgttcaaggatggcaatttgtaagaaagatgtttggagagttgaatgtggaatcccttctggatttccgctcacagttatttgcaatagcatttttaatgagatgctcattagatatagctatgaaaaattactgcgccaggctagagctccaagcatgtttntacaatccttcaaaaattntgtttctttgtgtgtgtatggtgatgataacttaattagtgttcatgaatatgtcaagccttactttagtggttctaaattgaaaagctttctagctggtcataatatcaccattactgatggtattgacaaaactagtgcaactttgcaatttagaaagttagcagattgtgattntctcaagag

SEQ ID NO: 250951 - DNA, 416 bp, Glycine max
ctcttctgcatcgcccacacttgcagcgcctccagatggcggcaccagcaagatagctgccgcaagcagctccagggggtgaacctcacgccctgcgagaagcacatcatggagaagatccaaggccgcggcgatgacgatgatgatgatgacgacgacaatcacattctcaggaccatgcggggaagaatcaactacataaggaggaacgaaggaaaagacgaagacgaagaagaagaaggacacatgcagaagtgctgcacagaaatgagcgagctgagaagccccaaatgccagtgcaaagcgctgcagaagataatggagaaccagagcgaggaactggaggagaagcagaagaagaaaatggagaaggagctcattaacttggctactatgtgcaagtttggacccatgat

SEQ ID NO: 250952 - DNA, 404 bp, Glycine max
  unsure (1)..(404): unsure at all n locations
ggtgaaatgctacgaccacgaccacgaccacaacacccggagagggagcctcagcaacccggtgagaaggaggaagacgaagatgagcaaccacgtccaatcccattcccacgcccacaacctcgtcaagaagaagagcacgagcagagagaggaacaggaatggcctcgcaaggaggaaaaacgcggagaaaagggaagtgaagaggaagatgaggatgaggatgaggaacaagatgaacgtcaattcccattcccacgcccacctcatcagaaggaagagcgaatgcaagaggaagatgatgatgangagcagcagcgagagagcgaataaagtgaagattctgagttacgaagacataagaataagaaccctnttctcttcggctctaacaggttcgaaac

SEQ ID NO: 250953 - DNA, 408 bp, Glycine max
  unsure (1)..(408): unsure at all n locations
ctcgagccgaatcggctcgagtcaatatcctagtataccttgagtaaagaatttaagatactatgatgagagcacggttcccattactgttgctgggacttgttttcctggcttcagtttctgtctcatttggcattgcttactgggaaaaagagaaccccaaacacaacaagtgtctccagagttgcaatagcgagagagactcgtacaggaaccaagcatgccacgctcgttgcaacctccttaaggtggagaaagaagaatgtgaagaaggtgaaattccacgaccacgaccacgaccacaacacccggagagggaacctcagcaacccggtgagaaagaggaagacgaagatgagcaaccacgtncaatcccattcccacgcncacaacctcgtcaagaagaag

SEQ ID NO: 250954 - DNA, 397 bp, Glycine max
gaattctccagagagaagaagaaacttaatcgatcatcactgcactggactaatacatcatggcagacgagacccagaacaagtatgagagctctgaggttgaggtccaggatcgtggtgtttttgactttctcggtaagaaaaaggatgaagaagacaagcctcatcctcaggaggaggtcatcgccaccgagtttcaaaaagtcactgtctcagaccaaggagagaacaagcacagcctcttagaaaagcttcaccgatctgacagcagctctagctcttcaagtgaggaggaaggagaagatggagagaaaaggaagaagaagaagaaggaaaagaaagggcttgaagagaagatcgaggagaaaatagagggtgatcatcatcatcacaagga

SEQ ID NO: 250955 - DNA, 417 bp, Glycine max
  unsure (1)..(417): unsure at all n locations
gggaattagaatggctctccttggatcaaacataacaagcgaggttggactccgtttgctcctttgtcctcttggttccaacgttgtaattagaacagcatgctgtactgtgggagttgctttgcctgtgtactctacgttcaaggcaatagaaagtaaagatcaagatgctcagcataagtgtcttctctactgggcagcctatggttcattcagtctcgctgaagtgttcacggacaagcttatttcttggtgtcctatctactatcacctgaagtttgcatttcttgtttggcttcaacttccatctaccagtggtgcaaaacaaatatatgcaaaccacttgcgccccttcttgttgaagcatcaagcacgagttgatcaagtcttgggttttgcatattgngaagtgataaa

SEQ ID NO: 250956 - DNA, 410 bp, Glycine max
  unsure (1)..(410): unsure at all n locations
ccttgctctatactacacagtacacacactagaagaataatggcttccatcctccactactttttagccctctctctttcttgctcttttcttttcttcttatccgactcagtcacccctacaaaaccaataaaccttgttgttctacccgttcaaaatgatggttccacagggctccattgggccaacctccaaaaaagaacccctctaatgcaagtaccagtcctggtggacctcaatggaaatcacttgtgggttaactgtgagcagcagtactcatccaaaacgtaccaagcacccttctgccactccacccaatgctctagagccaacacccaccaatgcctcagttgccccgcggcatcaaggccagggtgccacaaaaacacgtgtggcctcatgtncactaa

SEQ ID NO: 250957 - DNA, 324 bp, Glycine max
tattctcgtcgaaattgcccgtgcatttgcggatgaggagagtggtgggaacagagaaagcttgaataatttttttcagatggttgctggacactttactggggaaactccacatatgataagtgcagcagccaaagggttagcccgtttggcttatgagttctctgatcttgttttaacttccttcaaattgctccctggcacacttactctcctgaggagtgataacaaagagataatcaaggccaatcttggttttttgaaggtattagtagccaaatcacaagcagaagggttgcaaatgcacttgaaaagcatggtgga

SEQ ID NO: 250958 - DNA, 408 bp, Glycine max
  unsure (1)..(408): unsure at all n locations
ctcgatccgataaaattcttccaccaagttatggggttccttgtgttgcttcttttctccctcttaggtctctcttctagttccagcatatcaactcatcgttccatattggaccttgacctaaccaagtttaccacacagaaacaggtgtcttcactgttccaactatggaagagtgagcatggacgtgtctaccataaccacgaagaagaggcaaagagacttgagattttcaagaataacttgaactatatcaaggacatgaatgcaaacagaaaatcaccccattctcatcgtttaggattgaacaagtttgctgacatcactcctcaagagttcagcaaaaagtacttgcaagctcccaaggatgtgtcgcagcaaatcanaatggccaacaagaaaatgaag

SEQ ID NO: 250959 - DNA, 420 bp, Glycine max
agttgccccgcggcatcaaggccagggtgccacaagaacacgtgtggcctcatgtccactaatcccatcacccaacaaaccggtttaggtgaactaggagaagacgttcttgcaatccacgccacacaagggtcgacccaacaacttggcccattggtcacagtcccacaattcctcttttcttgtgcaccttccttccttgttcaaaagggtcttcctagaaacactcaaggtgtggctgggttaggccatgcaccaatttctcttccaaaccaactcgcttcccactttggcctacaacgccaattcaccacttgcctttctcgctaccctacttcaaagggtgctataatattcggggatgcacctaacaacatgcgacagtttcaaaaccaagatattttccacgatttggccttc

SEQ ID NO: 250960 - DNA, 396 bp, Glycine max
cacacaactactacaagtacttccttacaatcaaaaccaacgacaactatggcaagttatcaaaagcactacgatgatcagggtcgcaaggttgacgagtatggcaacgttgagaagcaaaccgacgaatacggcaaccctgttcatgctgctagtgtcacctatgtagccaccagaactgctgctggtggttacagtgatgacattaataagcaacatgataccaccaatgcctacggcgtagacactggtagacagcattctagtggtggctacgatggtgacactaataaacatcatggaactactggtggctataatgatgacaccaatagacatcatggaactaccggtgtctatggtatagacaccgataggcgacaacatgggactact

SEQ ID NO: 250961 - DNA, 389 bp, Glycine max
  unsure (1)..(389): unsure at all n locations
ccgagctagctagctagcaagcaagcacagagatggaggcgaagcgaggccatgccctcatgtgcttggcacgtgtttcactcttcctctgcgctctaaccctatccgctgctcacggaagcaccacggttcaagacatcgcgagaaagttgaaactcggggacaacgagcttctgcgcacggagaagaagttcaaggttttcatggagaattacgggaggagctactccacagaggaggagtatttgcgccgtttggggattttcgcccagaacatggtcagagcggcggagcatcaagcgctggaccccaccgncgtccacggcgtcacgcagttctccgatctcaccgaggacgagtttgagaagctctacactggcgtcaatggc

SEQ ID NO: 250962 - DNA, 392 bp, Glycine max
cgtctgtgtaacaaacacttcaacaatctactctgtacccgatttacaagatgagttcatttagccaaaatccctatgttttagttctgttcctcgttctcactgtgtggatatcccgtgtaatgtctcgcgggctcattacatctgagagacatgagaaatggatggcacaatatggtaaggtttacaaggatgctgcagagaaggagaaacgtttccaagtattcaaaaacaatgtgcagttcattgagtcattcaatgctgctggggacaaacctttcaaccttagcattaaccaatttgcggaccttcatgatgaagaatttaaggctttactaaacaatgttcagaaaaaggcaagtagggtggagacagcaacagaaacatcgttt

SEQ ID NO: 250963 - DNA, 409 bp, Glycine max
gaaaagttagggttcacaacttttccttttccttttgcttgcgaatctgaatcaaataatcaatcatccattcattattcatcatgtcgtcggcgaagaaaatcacgctgaagagttcggacggcgaggctttcgaggtggaggaggcggtggcgctggagtcgcagacgataaagcacatgatcgaggacgactgcgccgacagcggcatccctctgccgaacgtgacgagcaagatcctggcgaaggttatcgagtactgcaagaagcacgtcgaggccgcgaatcccgaagacaaaccctccgaggacgatctcaaggcctgggacgctgaattcgtcaaggtcgaccaggccacgctcttcgatctcatcctggctgctaactacttgaacatcaagagcctgct

SEQ ID NO: 250964 - DNA, 408 bp, Glycine max
attcttccaccaagttatgggtttccttgtgttgcttctttggtccctcttaggtctctcttctagttccagcatatcaactcatcgttccatattggaccttgacctaaccaagtttaccacacagaaacaggtgtcttcactgttccaactatggaagagtgagcatggacgtgtctaccataaccacgaagaagaggcaaagagacttgagattttcaagaataacttgaactatatcagggacatgaatgcaaacagaaaatcaccccattctcatcgtttaggattgaacaagtttgctgacatcactcctcaagagttcagcaaaaagtacttgcaagctcccaaggatgtgtcgcagcaaatcaaaatggccaacaagaaaatgaagaaggaacaatattc

SEQ ID NO: 250965 - DNA, 333 bp, Glycine max
tcttcacacaaacatctctctctctctctctctctggcatgggtgccagacacaatcgccaagacacacaaacactacacatgacaggcccacactgaacgcaacaacgaccaacacctactactgccagcccgccaggacactaacccgccatagccaaagagacccagctccggcacaccaacctcaactataccacgcaaaaccacaaccaactgcactgcctgactcacacaacagaatacagcaccacacaagacgcccacaaacccaagaacatcgaacaaccacacagagtgcacatataccagacccaaaacaaggtacccacat

SEQ ID NO: 250966 - DNA, 412 bp, Glycine max
gccgcgaccccatctattccaacaagcttggcaagttgtttgagattaccccagagaaaaaccctcagcttcgggacttggatgtcttcctcagtgttgtggatatgaacgagggagctctttttctgccacacttcaattcaaaggccatagtggtactagtgattaatgaaggagaagcaaacattgaacttgttggcattaaagaacaacaacagaggcagcaacaggaagagcaacctttggaagtgcggaaatatagagctgaattgtctgaacaagatatatttgtaatcccagcaggttatccagttgtggtcaacgctacctcagatctgaatttctttgcttttggtatcaatgccgagaacaaccagaggaacttccttgcaggttcgaaagacaatgtgat

SEQ ID NO: 250967 - DNA, 386 bp, Glycine max
caaaaccaaaacactcaagttaacttcaacaccttgaatttgctgaacgaaattcagccacagaatatcaaagggagcgaagatgagtcaggagcagccaaggcgcccccaaggccaagaccccatcaaatacggcgacgtttttgacgtctacggtgaccttgcacagatgcccattgcaccggaagatgctgccatgatgcaaagcgcggaagctcgagtactcggaaaaacccaacccggcggagcttcttccgtcatgcaatccgccgccacaaggaatgaacaagctggtcttgtcggtcaccaggacgtcaccgacatcaccggcgaccatggcgtcacagtcacagaaactacattccatggaagacgcataataaccg

SEQ ID NO: 250968 - DNA, 405 bp, Glycine max
acaagaatggaatttactctccacattggaatctgaatgcgaacagtgtgatctatgtgactcgaggacaaggaaaggttagagttgtgaactgccaagggaatgcagtgttcgacggtgagcttaggaggggacaattgctggtggtaccacagaacttcgtggtggcggagcaagccggagaacaaggattcgaatacatagtattcaagacacaccacaacgcagtcactagctacttgaaggatgtgtttagggcaattccctcagaggttcttgcccattcttacaaccttcgacagagtcaagtgtctgagcttaagtatgaaggaaattggggtcctttggtcaaccctgagtctcaacaaggctcaccccgtgttaaagtcgcataaatgacaagca

SEQ ID NO: 250969 - DNA, 389 bp, Glycine max
cgtgaatagcgtaaccagcgttgggggaattattggtcaaggtctcgacttagttggctcaacactcgatactcttactgccttcttgggccgatccgtgtctctccagcttattagtgctaccaaagctgatgccaacggaaaagggaaacttggaaaggctacctttttggaaggtatcattacttcattgccaactttgggagcaggccaatctgcattcaaaattaattttgaatgggatgatgggagtggaattcctggagcattttatatcaagaattttatgcaaactgagtttttccttgtgagtttgacttttgaagacattccaaaccatggaagcatccactttgtttgcaattcgtggatttacaatgccaaactct

SEQ ID NO: 250970 - DNA, 393 bp, Glycine max
tgggtttccttgtgttgcttcttttctccctcttaggtctggcttctagttccagcatatcaactcatcgttccatattggaccttgacctaaccaagtttaccacacagaaacaggtgtcttcactgttccaactatggaagagtgagcatggacgtgtctaccataaccacgaagaagaggcaaagagacttgagattttcaagaataacttgaactatatcagggacatgaatgcaaacagaaaatcaccccattctcatcgtttaggattgaacaagtttgctgacatcactcctcaagagttcagcaaaaagtacttgcaagctcccaaggatgtgtcgcagcaaatcaaaatggccaacaagaaaatgaagaaggaacaatattctt

SEQ ID NO: 250971 - DNA, 293 bp, Glycine max
  unsure (1)..(293): unsure at all n locations
agctggtgcatagaatgctattctcatgaatatgccaaatgctgttctttcaatgtggagatattttgttggagatctcgtctttgaagtttctaagatgacttctccctacattaaatgtacagtctctttcttcatagcatttggaaatttggctgatgataccatcaattttgaggcttttccccacaagctggtgcagtttggagagattcaggaaaaagttgtattgaaattttcacaagaggaatttcttacagcttggtcaactcangtgcgtcctgcaacaactc

SEQ ID NO: 250972 - DNA, 415 bp, Glycine max
gaagagtactatcttctttgctctctttctagttggtgccgtcaccatctcatacctgccttcagccaccgctcagttcgtgctcgacactgatgatgatcctcttcaaaacggtggcacatactatatgttgccagttatgagaggaaagggcggtggaatagaagtagattcaactggaaaagaaatatgccctctcactgttgtgcaatcacccaatgagctcgataaggggattggactagtctttacatctccattacatgccctttttatcgccgaaggctatcctttgagcattaagtttggttcatttgcagttataacgctgtgtgccggcatgcctactgagtgggctattgtggagagagagggtctacaagctgttaaacttgctgcacgcgatacagtagat

SEQ ID NO: 250973 - DNA, 407 bp, Glycine max
tgaggagcatgacaaagagagccaagaaagtgaaggttctgggtctgagagagaaccacgaagacataagactaagaacccttttcacttcaactctaaaaggttccaaactctcttcaaaaaccaatatggccacgttcgcgtcctccagaggttcaacaaacgctcccaacagcttcagaatctccgagactaccgcattttggagttcaactccaaacccaacacccttcttctcccccaccatgctgacgctgattacctcatcgttatccttaacgggactgccattcttaccttggtgaacaacgacgaccgagactcttacaaccttcaatctggcgatgccctaagagtccctgcaggaaccacatactatgtggttaaccctgacaacgacgagaatc

SEQ ID NO: 250974 - DNA, 323 bp, Glycine max
cctctcttcaggtcaccatctagactgcaatcatggctgagggaccgcagcatccatcagttgttcagaagctagctggacagtcttacctggtgtccaggcttagccccaactttaactctcggaattattctgcatctggttcttacgtcaatggcggaatgcactcgcctgggttggctgttgtgtcacccgtatctacagttactgtgcatgctccagcagagaatggagtgagtggctatctagaggattttctgatgggtggagtattctgcgctgtatcgaatacagcttctgctatcattgaacgtgtcaaattg

SEQ ID NO: 250975 - DNA, 355 bp, Glycine max
gatctcgcaatggttaaagttaatgtagcatgtgctgctgggggcttgacatcaagttacactccaactccattgttggaatctggtttgcaaaaagacagagggttaattgtggaatattttggaaggatgtcttacgttgctcataacgttaatcagccccaagagaaagatttgttggagggaaatttttcctttgatattaaatctcgctctagattggaaaaagtttcctctacaaaagcacaatttgttagtggaaaaaccttcaaatatgatataattggtgctggttcacattcttcagatgattttcctgaaaaggaagatcaagaaaaacccaaaaagattgatg

SEQ ID NO: 250976 - DNA, 374 bp, Glycine max
ctccattggtccttaaacactcatcagtcatcaccatggccgagctagttttttccctttgttttctgcttttcagtggctgctgcttcgctttcagttccagagagcagcctcagcaaaacgagtgccagatccaaaaactcaatgccctcaaaccggataaccgtatagagtcagaaggagggctcattgagacatggaaccctaacaacaagccattccagtgtgccggtgttgccctctctcgctgcaccctcaaccgcaacgcccttcgtagaccttcctacaccaacggtccccaggaaatctacatccaacaaggtaagggtatttttggcatgatatacccgggttgtcctagcacatttgaagag

SEQ ID NO: 250977 - DNA, 392 bp, Glycine max
gaaattttgatagacccgggatcacagggctggcgacgcttagacctggaaacaacacgcactcgttacttgatggcatgagtctctcaatttgacactacttctatgtgtacgaattcttaagggatagaaaatcactctctgagctggccacagactccgtgaatcaatttcttttacactctcagtttatttgctgaacactctcctattagatataagactgcgtgttatacttaaactccttctgtctctgtcttaaccctctgatataatataagtgcaacctggtgacattcttgcattagatgctcccactctggtatatcgtataggactccgtgggatgactgtcctattgcgctccttaatttcactctcttattctgact

SEQ ID NO: 250978 - DNA, 394 bp, Glycine max
atctccgagactaccgcattttggagttcaactgcggaccggacacccttcttgtcccccaccatgctgacgctgattacctcatcgttatccttaacgggactgccattcttaccttggtgaacaacgacgaccgagactcttacaaccttcaatctggcgatgccctaagagtccctgcaggaaccacatactatgtggttaaccctgacaacgacgagaatctcagaatgataacactcgccatacccgttaacaaacccggtagatttgagagtttcttcctatctagcactcaagctcaacagtcctacttgcaagggttcagcaagaatattctagaggcctcatacgacaccaaattcgaggagataaacaaggttctgtttggtag

SEQ ID NO: 250979 - DNA, 399 bp, Glycine max
cttagttctctgttgcatcatcatcatcttcattagggttagccctaaacttcaccttcaaccatgaccacagtgccaccacacagtgtccaagtgcacacaacaacacaccgctacgaagccggcgtcgtcccgccggctcgttttgaggcgccgcgttacgaagccggcatcaaggcgccctcttccatttaccattccgagagaggttcgacgacctctcaggttctcgcagttgtcgccggccttccggtcggcggcatcctcctgctcctggcaggactgaccctgactggaactctcaccgggctggtggtggcaacaccgctcttcatcatcttcagcccggtgctgattccggccacggtcgcaattggcctggccgtggccgggttcctg

SEQ ID NO: 250980 - DNA, 411 bp, Glycine max
gcttatcttgtcaatctcgtaaatgtgttacgagaattgtatttgcacagtccagaggaagctcgccaattgagaaggaaagctctctctcgtattgaatggctgcaaaaagctgatgtgcctaccatagcacagattgaagagttccattcgatgcagaggatgatgaatgctcctgattcaaatgataatattgatctactgttgagcattgatttgttgggtttacaaggagcaggtaaagcttttccaaacaagattgtttttgatgataagcttgtgttggctaacacacaagaattctttgatggaaattttccagtggattcttggttaccaatttttgtgaattgtctctatcctgtaagtcaattaccttcagaagctgtcgttgtaaatgttacatgtggt

SEQ ID NO: 250981 - DNA, 250 bp, Glycine max
tctccattggtccttaaacactcatcagtcatcacggtggccaagctagttttttccctttgttttctgcttttcagtggctgctgcttcgctttcagttccagagagcagcctcagcaaaacgagtgccagatccaaaaactcaatgccctcaaaccggataaccgtatagagtcagaaggagggctcattgagacatggaaccctaacaacaagccattccagtgtgccggtgttgccctctctcgct

SEQ ID NO: 250982 - DNA, 411 bp, Glycine max
gtgctgcaagctgcgctccaaaccccaaaaggaaagttagaaaagctttttgatcaacagaacgagggaagtattttcgcaataagcagagaacaggtgcgtgcgttggcccctaccaagaaaagctcttggtggccattcggtggcgaatccaagcctcaattcaatattttcagcaagcgtcccactatctccaacggatatggtcgtttaactgaagttggtcctgacgatgatgaaaagagttggcttcaaagactcaatctcatgcttacctttaccaacttcacccagagatctatgagtactattcactacaactcacatgcaacgaagatagcactggtgatcgatggcagagggcatcttcaaatatcatgtccacacatgtcatcaaggtcgtcacactcg

SEQ ID NO: 250983 - DNA, 392 bp, Glycine max
gttggtgcaatgcttttggttgatacttatcatacgaatcgtgaaaatgcagttcgtagtatttttgttgcgcctttcagaggcggaaggcccattcgggtggttacatttccgaataccattgtgcagattgaaccaaactggaattcaaggtttcagcttttgagtaccactaccaatggtgattttgttcaagggaaagatctcgcattggttaaagttaatgtaccatgtgctgctgttggcttgacatcaagttacactccaactccattgttggaatctggtttgcaaaaagacagagggttaattgtggagtattttggaaggatgtcttacgttgctcataacgttaatcagccccaagagaaagatttgttagagggaaattt

SEQ ID NO: 250984 - DNA, 397 bp, Glycine max
cccacgcccacaccaacctcatcaaaaggaagaggaaaagcgcgaatggcaacacaagcaggaaaagcaccaaggaaaggaaagtgaagaagaagaagaagaccaagacgaggatgaggagcaagacaaagagagccaagaaagtgaaggttctgagtctcaaagagaaccacgaagacataagaataagaacccttttcacttcaactctaaaaggttccaaactctcttcaaaaaccaatatggccacgttcgcgtcctccagaggttcaacaaacgctcccaacagcttcagaatctccgagactaccgcattttggagttcaactccaaacccaacacccttcttctcccccaccatgctgacgctgattacctcatcggtatccttaacggg

SEQ ID NO: 250985 - DNA, 346 bp, Glycine max
ctttttctgccacacttcaattcaaaggccatagtggtactagtgattaatgaaggagaagcaaacattgaacttgttggcattaaagaacaacaacagaggcagcaacaggaagagcaacctttggaagtgcggaaatatagagctgaattgtctgaacaagatatatttgtaatcccagcaggttatccagttgtggtcaacgctacctcagatctgaatttctttgcttttggtatcaatgccgagaacaaccagaggaacttccttgcaggttcgaaagacaatgtgataagccagatacctagtcaagtgcaggagcttgcgttccctgggtctgcaaaag

SEQ ID NO: 250986 - DNA, 394 bp, Glycine max
cacaactacaagaaagaacttccttataaccaaaaccaacagcaactatggcaagttatcagaagcactacgatgatcagggtcgcaaggtcgacgagtatggcaatgttgagaggcaaactgacgaatatggcaacccggttcatgccactagtgtcacttatgtagccaccaaaagtgttggtggctacaatgatgacgctaataagcaacatgatattactggtgtctatcccgagaaagacaccggtagacatcattttggtcgtggttacgacggtgacactaacaagcaacatgatgctactggtgtttatcccggaatagacattggtagagatcatgggactaccggtgtttatggcctaaacaccgacagacatcatggaacttc

SEQ ID NO: 250987 - DNA, 395 bp, Glycine max
caatatcctagtacaccgtattaaagaatttaagatatactgtgatgagagcgcggttcccattactggtgctgggagttgttttcctggcatcagtttctgtctcatttggcattgcctattgggaaaagccgaaccccagtcaccacaagtgccttccaagttgcgattgccagaaagacttctaccggaaccaagcatgccacgcttgttgcaaccttcttaaggtggaggaagaagaagaatgcgaagaaagtgaaatttcacgagcacgaccacaacacccggagagggaacgttagcaacaccgtgagaaggaggaagaccaaggtgagcagacacgttcattcccatttcacgcccacgccaacctcatcaagaggaagagcacgagc

SEQ ID NO: 250988 - DNA, 282 bp, Glycine max
ctcgcatagaatcacggtcgatgcacaatctaacggacttcggtatatcgataactttttcaacacaccttacacacttatgtattggagcctctgatattagtatgatggataggacggtggtgtcggttttggtgatagcaatgacgttggttgacatgaactgtaactgcactagtgttggacacatgccgttaaccaaggcggacggtcacgatttgcacgaagctagctcacggagcacacaaactgggatcaaagccatctaaactgtataagatg

SEQ ID NO: 250989 - DNA, 388 bp, Glycine max
tttgaagaacaacatggtggtgctaaaggtgtgtttgttgggtcttttccttgtgggggttacagctgcacgcatggaactgagcttcttcaaaagtgatcagtcatcaagttatgatgatgatgagtattcaaaaccatgctgtgatctctgcatgtgcacacgctcaatgcctcctcaatgcagctgtgaagatattaggctgaattcatgccactcagattgtaagagctgtatgtgcacacgctcacagccaggacagtgtcgttgtcttgacaccaacgacttctgctacaaaccttgcaagtccagagatgactagaaaaactaatagctctctcaaatggacgaagcccctttaggctttgtttgttatgttaggggagac

SEQ ID NO: 250990 - DNA, 405 bp, Glycine max
gaaccagagaagaagaaaaaagcagcaagtaacggaaatggcggttctcagaatggtaactcaatgcactatgggaccctggttggggaagtgaaagctaatttgaagaaaggtattggagcgaatgaattgctgtcccatctttcagcacatcctgcacctgctcaagaaaagatgagtgctctggttgaagctctattcgagggaactgagaaaggttttgctaaagaagctgataagaagaagaactactttgctgctgctgttgccgaagagggatcccagctgttattgcttcatgctattgaagaattttcttgcaagtctacttccaatgctttgaaggaggttgccctggttctaaaggcactctatgatgctgatgtgttggaggaagagcacata

SEQ ID NO: 250991 - DNA, 414 bp, Glycine max
ctttacttagttcaatatggggaagcccctcatgagtctcgatcattattacctttgcttgctactcttgccgagtgcatgctttgctattaccttcagcaagttcaacgagtgccaactcaacaacctcaacgcgttggaacccgaccaccgatttgagtacgaaggatgtcctattgaaacatgaaactctcaacaccctgagctgcaatgcgcacgtgacactgtttccaaacgcaccctcaaccgtaactgcctgcacttgccatcttactcaccttatccccaaatgatcattgacgttcaaaggaaaggagcaattggatttgcatttcctggatgtcctgagacgttcgagaagccacaacagcaatcaagcagaacaggcttcaagtcgcagcagcgactacaaga

SEQ ID NO: 250992 - DNA, 395 bp, Glycine max
cggctcgagcaaaaccaaaacactcaagttaacttgaacacctttaattttctgaacgaaattcagccacagaatatcaaagggagcgaagatgagtcaggagcagccaaggcgcccccaaggccaagaccccatcaaatacggcgacgtttttgacgtctacggtgaccttgcacagatgcccattgcaccggaagatgctgccatgatgcaaagcgcggaagctcgagtactcggaaaaacccaacccggcggagcttcttccgtcatgcaatccgccgccacaaggaatgaacaggctggtcttgtcggtcaccaggacgtcaccgacatcaccggcgaccatggcgtcacagtcacagaaactacattccatggaagacgcataataaccg

SEQ ID NO: 250993 - DNA, 402 bp, Glycine max
ggtggatgtacaacaatgaagacactcctgttgttgccgggtctattattgacaccaacagcttggagaaccagctcgaccagatgcctaggagattctatcttgctgggaaccaagagcaagagtttctaaaatatcagcaagagcaaggaggtcatcaaagccagaaaggaaagcatcagcaagaagaagaaaacgaaggaggcagcatattgagtggcttcaccctggaattcttggaacatgcattcagcgtggacaagcagatagcgaaaaacctacaaggagagaacgaaggggaagacaagggagccattgtgacagtgaaaggaggtctgagcgtgataaaaccacccacggacgagcagcaacaaagaccccaggaagaggaagaagaagaag

SEQ ID NO: 250994 - DNA, 366 bp, Glycine max
gtcaacaataggggtctttgcgctatagcacaggctgagtctctccgctacaagctccttggtggcctagctgtgcgcagggcttgctatggtgtcttgaggtttgttatggagagtggtgctaagggatgcgaggtcattgtgagtggaaaattgagagcccagagagccaaatctatgaagtttaaggatggttacatgatttcttctgggcaacctgtcaaagattacattgactctgcagtgagacatgtgctcctgagacagggtgttcttggcatttaagtgaagatcatgcttgattgggatcctaaggggaaacagggtcctaaaactcccctccctgatcttgtcacaatccattct

SEQ ID NO: 250995 - DNA, 417 bp, Glycine max
caactactacaagtacttccttacaatcaaaaccaggaacagctatggcaagttatcaaaagcactacgatgatcagggtcgcaaggttgacgagtatggcaacgttgagaagcaaaccgacgaatacggcaaccctgttcatgctgctagtgtcacctatgtagccaccagaactgctgctggtggttacagtgatgacattaataagcaacatgataccaccaatgcctacggcgtagacactggtagacagcattctagtggtggctacgatggtgacactaataaacatcatggaactactggtggctataatgatgacaccaatagacatcatggaactaccggtgtctatggtatagacaccgataggcaacaacatgggactactggtggctatgccggtgacactggta

SEQ ID NO: 250996 - DNA, 414 bp, Glycine max
  unsure (1)..(414): unsure at all n locations
ggttttggaaccacttctggagttgttgtgttggcaggaacaaataggcctgatatcttagacaaagctcttcttaggcctgggcgatttgaccgccagataacaattgacaaacctgatattaaaggtcgtgaccagatatttcagatctacttgaagaaaatcaaacttgatcacgagccttcatattattctcaaaggcttgcagcccttacacctggatttgctggagcagacattgctaatgtctgcaatgaagctgctctgattgctgcaagaggtgaaggaacacaagtgacaaaggaacattttgaggcagccattgataggatcattggtggcttggaaaagaggaacagggtaataagcaagctggaaaggcgtactgttgcctaccatgaagcangccatgct

SEQ ID NO: 250997 - DNA, 417 bp, Glycine max
  unsure (1)..(417): unsure at all n locations
ctccccacaacttcagaatctccgagactaccgcattttggagttcaactccaaacccaacaccctccttctccccaaccatgctgacgctgattacctcatcgttatccttaacgggactgccattctttccttggtgaacaacgacgacagagactcctacagacttcaatctggtgatgccctgagagtcccctcaggaaccacatactatgtggtcaaccctgacaacaacgaaaatctcagattaataacactcgccatacccgttaacaagcctggtagatttgagagtttcttcctatctagcactgaagctcaacaatcctacttgcaaggattcagcaggaacattttagaggcctnctacgataccaaattcgaggagataaacaagttctgttagtagagaggaag

SEQ ID NO: 250998 - DNA, 412 bp, Glycine max
gccttctttctttttttcaatttccaaatcacgaaactcaagaagatggagaaagcgatcaacagacagaagattttgcttcatcatctcaacccttcatcatccacccaccccaacgaatcatcctccctccatgcttcagcatgtgtggcgggggatagcgctgcttatcaaaggacatcgacattcggggacgatgttgtgatcgtggctgcttatcggactgctcattgcaaagctaaacgaggtggtttcaaagacactcttcctgatgatctactggctcctgttttgaaagctgtaattgagaaaaccaatgtgaacccaagtgaagttggggatattggtgtaagtagtgtattggctcctggagctcaaagagctagtgaatgccgaatggctgcattttatg

SEQ ID NO: 250999 - DNA, 413 bp, Glycine max
  unsure (1)..(413): unsure at all n locations
gcgggaaaagcataaataaaagaagaaattccacaagggtagatagttactatacccgttattctacacttaacaaagggcatctaagcctttgtttcttttattcattcttatttactgctaccagcactagctagagcccaaaaggacaaaagtgtggtagcacatgcaaaaagggctctctaagccacagctctcctctgagactcctgaggtggaaccaggaagctgaaagggttgttgttcttcacctgcctggcctgctggctctttaggttaaaagtgtgctgctctctctgtctctctctctctagacttagattttgtgaatggctgaagtggaagagggacaggtcatcggcgtccacaccgttgatgagtggaagctgcaactccagaatgcanaagactcc

SEQ ID NO: 251000 - DNA, 410 bp, Glycine max
  unsure (1)..(410): unsure at all n locations
gcatcttcggcgggcgcaatggagcaagagaattacaaaaggaaggcagtgaatttgcttcgaagcagaatctgtgatcccaaattcatcttcatcaatgaatctccagaaagcaaccacagcaagctgaaattcatgatatcgagttcggtgacggaggcgtgcaacaattctattcttcttctcggtccccgcggctctggcaagaatgcggttttggaacttgtcattcaagatttgctgcaagaatatccggactcgatctcagtgatgaagttgaacgggcttttacatagtgatgacatctctgcgttcaaggaaatagctaggcagttatgcatggagcatcaattgctattctcaaaagcggcatcatttgatgacaactnccaatttatggtggccatgct

SEQ ID NO: 251001 - DNA, 399 bp, Glycine max
ttgggattggagggattgacgctgcgtctcttcctgttctgtttcgatccatccctcattcctaatcctccaatccaaccacctcagcctcacactcacatatacacatatctgaacgcgtatcgtccctcctatggcttcaaagcgcatcctcaaggagctcaaggacttgcagaaagacccaccaacttcttgcagcgctggtccagtagctgaggacatgttccattggcaagcaacaataatgggtcctgctgatagtccttatgctggaggtgtattcctagtcactattcacttccctccggattatcctttcaagcctcctaaggttgcctttaggactaaggtgtttcacccgaacatcaatagcaatggtagcatttgtcttgatatcct

SEQ ID NO: 251002 - DNA, 397 bp, Glycine max
aaaattcttccaccaagttatgggtttccttgtggggcttggtttctccctcttaggtctctcttctagttccagcatatcaactcatcgttccatattggaccttgacctaaccaagtttaccacacagaaacaggtgtcttcactgttccaactatggaagagtgagcatggacgtgtctaccataaccacgaagaagaggcaaagagacttgagattttcaagaataacttgaactatatcagggacatgaatgcaaacagaaaatcaccccattctcatcgtttaggattgaacaagtttgctgacatcactcctcaagagttcagcaaaaagtacttgcaagctcccaaggatgtgtcgcagcaaatcaaaatggccaacaagaaaatgaag

SEQ ID NO: 251003 - DNA, 409 bp, Glycine max
agaatttccattgcatgcaaagcaaatacgcattatattactagttttaatttgttttgtcgtttgcttctttctttgattaatgatgactagctttaaggttgcatgtgtggttgcgatgatgtgcatggttgtggccatgagtgttacacccatggcacaggccgcaatcacgtgcgggcaggtcgccggcgacgtgtctccgtgcctcagttatcttcgaagcggcggaaaaccgtcggacgcctgctgcaacggagtgaagtcgctcagcggcgcggcgaagaccaccgccgaccgccaggcagcctgcaattgcctgaaaaaccttgccaataatatgggacagagtttgaatgccggcaacgcagcctctctccctggcaaatgtggcgtcaacatcccttac

SEQ ID NO: 251004 - DNA, 410 bp, Glycine max
tgggttgcaaagatgcttgggggtcttctccataggggtcataagataaaagggacagtggtgttgatgcgcaagaatgtgttggacgtgaatagcgtaaccagcgttgggggaattattggtcaaggtctcgacttagttggctcaacactcgatactcttactgccttcttgggccgatccgtgtctctccagcttattagtgctaccaaagctgatgccaacggaaaagggaaacttggaaaggctacctttttggaaggtatcattacttcattgccaactttgggagcaggccaatctgcattcaaaattaattttgaatgggatgatgggagtggaattcctggagcattttatatcaagaattttatgcaaactgagtttttccttgggagtttgactcttga

SEQ ID NO: 251005 - DNA, 412 bp, Glycine max
cttcaataaccagcttgatcaaacccctagggtatggtaccgtgctgggaacccagatatagagtacccagagaccatgcaacaacaacaacagcagaaaagtcatggtggacgcaagcaggggcaacaccagcaggaggaagaggaagaaggtggcagcgtgctcagtggcttcagcaaacacttcttggcacaatccttcaacaccaacgaggacatagctgagaaacttcagtctccagacgacgaaaggaagcagatcgtgacagtggaaggaagtctcagcgttatcagccccaagtggcaagaacaacaagatgaagatgaagatgaagacgaagatgatgaagatgaacaaattccctctcacccttctcgccgaccaagccatggaaagcgtgaacaagacgag

SEQ ID NO: 251006 - DNA, 408 bp, Glycine max
cagccatcttcagaataagcggcgtaaggagaatagcggtagcagtattagcagtgcacttcaggcacagtttccggatcctagtgtccagaacaaccagaatacacaaagtggttcattttcacctgaatcaaacgcttgtttcaacaaccagacaccgtggttgagtcctcaaacttttgcaacagatcaggctcctctcatggtgcctccacagcaatttcaacaacccatggttgggtatgtgggtgacccttacactagtggtgctgcttcaaataacatcacaacttctcataatcataacagcaacaacccctatcaacctggtgcagaacaatatcacatgttggagtcggcacattcatggcctcattctcagttcaatgttgcttgtcactatagcca

SEQ ID NO: 251007 - DNA, 340 bp, Glycine max
gttgcatcatcatcttcattgcaaaaccctaaacttcacctgcaaccgtgaccacacaagtaccaccacacagtgtccaagtccacacaacaacacaccgctacgaagctggcgtcgtcccccccggagcccgtttcgaaccgccgcgttatgaagccggcgtcaaagcgccctccatttaccattccgagagaggtccaacgacttcccaggtcctcgccgtcctcgccggcctcccggtcggtggcatcctgctcctcctggcgggattgaccctggcaggaaccctcaccggaacttgcagttgccacgccgctcttcgtcctcttcagcccggtgc

SEQ ID NO: 251008 - DNA, 398 bp, Glycine max
caataattccttcacttgcagaacttagttctctgttgcagcatcatcatcttcattagtgttagccctaaacttcaccttcaaccatgaccacagtgccaccacacagtgtccaagtgcacacaacaacacaccgctacgaagccggcgtcgtcccgccggctcgttttgaggcgccgcgttacgaagccggcatcaaggcgccctcttccatttaccattccgagagaggtccgacgacctctcaggttctcgcagttgtcgccggccttccggtcggcggcatcctcctgctcctggcaggactgaccctggctggaactctcaccgggctggtggtggcaacaccgctcttcatcatcttcagcccggtgctgattccggccacggtcgcaatt

SEQ ID NO: 251009 - DNA, 418 bp, Glycine max
  unsure (1)..(418): unsure at all n locations
ataaaattcttccaccaagttatgggcttccttggggtgcggcttttatccctcttaggtctctctactaattccagcatatcaactcatcgatccatattggaccttgacctaaccaagtttaccacacagaaacaggtgtcttcactgttccaactatggaagagtgagcatggacgtgtctaccataaccacgaagaagaggcaaagagacttgagattttcaagaataacttgaactatatcagggacatgaatgcaaacagaaaatcaccccattctcatcgcttaggattgaacaagtttgctgacatcactcctcaagagttcagcaaaaagtacttgcaagctcccaaagatgtgtcgcagcatatcaaaatggccaacangaaaatgaagaatgaacaatattcttgtg

SEQ ID NO: 251010 - DNA, 420 bp, Glycine max
tagttcaatatcctagtataccttaataaataatggaagagactatgatgagagcacggttcccattactgttgctgggacttgttttcctggcttcagtttctgtctcatttggcattgcttactgggaaaaagagaaccccaaacacaacaagtgtctccagagttgcaatagcgagagagactcgtacaggaaccaagcatgccacgctcgttgcaacctccttaaggtggagaaagaagaatgtgaagaaggtgaaattccacgaccacgaccacgaccacaacacccggagagggaacctcagcaacccggtgagaaggaggaagacgaagatgagcaaccacgtccaatcccattcccacgcccacaacctcgtcaagaagaagagcacgagcagagagaggaacaggaatggc

SEQ ID NO: 251011 - DNA, 413 bp, Glycine max
  unsure (1)..(413): unsure at all n locations
gaaaaacaaaagagtagtggcctttaggtggtgaagaacaagagctcaaatcaaatcgaatcgaaaaaagaaagaaagatcatattcatggcgatggcaagcctggctcgacggaagggttacgccgtcgttttgtcgtcgaggtcgtcgttttgtctgacaagctggaggggattcgcgtccggatctgacgaaaacgacgtcgtcgtcatcggcggcggtcccggcggctacgtggccgccatcaaagccgcgcagctcggtctgaaaaccacttgcatcgaaaagcgtggcactctcggcggtacctgcctcaacgtcggatgcatcccttccaaggcacttctgcattcttcccacatgtatcatgaggctaaacatgcatttgccaaccatggngtcaagttttcatc

SEQ ID NO: 251012 - DNA, 407 bp, Glycine max
gattatcctaagtctttgggaatagtgctgcaatggcttcgagtcaggaggaggtgacccttttgggagctactggaagcccatttgtgtgcagggttcatattgccctcaagttgaagggagttcaatacaaatatgtcgaagaaaatttgaggaacaagagtgaactgcttctcaaatccaacccagttcacaagaaggttccagtgtttattcacaatgagaagcccatagcagagtctcttgtgattgttgaatacattgatgagacatggaagaacaaccccatcttgccttctgatccttaccaaagagccttggctcgtttctggtccaaattcattgatgataaggtttttggtgctgcatggaaatccgttttcacagctgatgagaaagagcgtgag

SEQ ID NO: 251013 - DNA, 413 bp, Glycine max
gggtaaggaaaaggttcacatcagtattgtggttattggccatgttgactctgggaagtccactaccactggccacctgatctacaagcttggaggcattgacaagcgtgttattgagagatttgagaaggaagctgctgagatgaacaagaggtctttcaagtatgcctgggtgcttgataagcttaaggctgagcgtgaaagaggaatcacaattgatattgccttgtggaagtttgaaaccaccaagtactattgcacagtcattgatgcccctggacacagggatttcatcaagaacatgatcactgggacatcccaagctgactgggctggtcttatcattggttccactactggtgggtttgaagctggaatttcaaaggatggacagactcgtgaacatgctctgc

SEQ ID NO: 251014 - DNA, 377 bp, Glycine max
  unsure (1)..(377): unsure at all n locations
cccaaacacaacaagtgtctccagagttgcaatagcgagagagactcgtacaggaaccaagcatgccacgctcgttgcaacctccttaaggtggagaaagaagaatgtgaagaaggtgaaattccacgaccacgaccacgaccacaacacccggagagggaacctcagcaacccggtgagaaggaggaagacgaagatgagcaaccacgtccaatcccattcccacgcncacaacctcgtcaagaagaagagcacgagcagagagaggaacaggaatggcctcgcaaggaggaaaaacgcggagaaaagggaagtgaagaggaagatgaggatgaggatgaggaacaagatgaacgtcaattcccattcccacgccc

SEQ ID NO: 251015 - DNA, 395 bp, Glycine max
gaaagaaggacgatgatcacttttcaccagtggaatcctacttcacggaaaataaagacgtggtgctgagatgttctgaatctccccaagcctctttaagggaaagggctatgaaggttcttggccttttaggtggaggccagccaaacagctctacagttaattcagagaagactgtgaaaacagagaatgctactgttgctgagttgcctgacttgatagacactggtgattcaaatgattaccatggaactgatgacactctaaagggtacaagtgatcaaaatatagcaaatttgacatcatcaactcctctggttgatgatttatttggagattttagtgcttctattggagctagtcaagaactaaaaaatgatgattcatttgctgat

SEQ ID NO: 251016 - DNA, 291 bp, Glycine max
caggcaataaggatgcccaaattgcaattggcacctttgatgtagaagagataaacagaagcagccataggtattatagatatgttggctctcttaccactccaccgtgcaaagagggtgtcacttggaacattctaggcaaggtaactaattactatatatgctctcctttggtgggaaagtatgaatacacacataaggagggttagaaatatactatgcacaattttttcttaacacattattaatcgtaatataaaatctgtccggccaccattctatacttttaaa

SEQ ID NO: 251017 - DNA, 495 bp, Glycine max
  unsure (1)..(495): unsure at all n locations
cggttgatgaatgaatgangtggtatanaggcacntaatganaaacgcctgcatgcctgcaggacgactcaagaggatcccctcggggaattccaattccacattttcaagaaataaggaggcaaaaatgttcatatatgaattggaattatttgttttcttattaggcctatcctgaagccaaaggaaatgagatcggaattcctcgggggtaccgagctcgaattccctatagtgagtcgtattaaattcgtaatcatgtcatagctgtttcctgtgtgaaattgttatccgctcacaattccacacaacatacgagccggaagcataaagtgtaaagcctggggtgcctaatgagtgagctaactcacattaattgcgttgcgctcactgcccgctttccagtcgggaaacctgtcgtgccagctgcattaatgaatcggccaacgcgcggggagaggcggtttgcgtattgggcgctcttccgggcccttt

SEQ ID NO: 251018 - DNA, 388 bp, Glycine max
gcggcgttgtattgaatggtgtgctagattcttcatggtttggtagggctggtgaggtctccagtaacagcaacattgccacagataagttcaaggctgtttctggtttggggcatcttatggagttttcctgagactcggtcccatgtgcttgttacctccctactaatcagctggtccatcacagagatcattcgctattctttctttggctttaaagagacttttggatttactccatcatggcttttgtggcttagatatagcagcttcttagttttgtatccaacaggcataagcagtgaagttggtttaatatacattgccttaccattcattaaggcgtctgggaagtattgcataaggatgccaaacaaatggaactcat

SEQ ID NO: 251019 - DNA, 355 bp, Glycine max
tccggattcgggtccagctaactctggcaatttccgagttcaatacaacactggcaagggtggctcaatccccaataatggagctgtcaacagagctccactgagcttgaacagctctgaagctggagattcggttcccagttcagccttctttggcacaagcttgaagaaggttactgcctcaagggtccctaacgtcaagatttcttctggaagtttcaaaatcgttgccggggagaaagagattgatgagcaacaacagacaaacaaggacagatggaaaggtcttgcctatgatatttcagatgaccagcaagacatcacaagaggaaagggtatggttgattccctcttc

SEQ ID NO: 251020 - DNA, 354 bp, Glycine max
  unsure (1)..(354): unsure at all n locations
gtacgtaaaactcaaattcngctcgagtgaaagctccgacaccatcgataacgtcaaggccaagatccaggacaaggagggtatccccccggaccagcaacgtctcatcttcgccggaaagcagctcgaggacggccgcaccctcgccgactacaacatccagaaggaatcaacccttcacctcgtcctccgtctccgtggtggcatgcagatcttcgttaagaccctcaccggcaagactattaccctagaagtcgaaagctccgacaccatcgacaacgtcaaggctaagattcaggacaaggagggaatccccccagaccagcagaggctgatcttcgccgggaagcagct

SEQ ID NO: 251021 - DNA, 343 bp, Glycine max
  unsure (1)..(343): unsure at all n locations
gagaaaaaggaaaagaatgatatcaaaccgcaaatctgcacggcaatctcgcatgaggaagcagaagcacttggacgatcttgtttcccaagtggctcagctcagaaaagagaaccaacaaatactcacaagcgtcagcatcancacgcaacagtacctgagcgttgaggctgagaactcggtgcttaaggctcaagtgggtgaacttaatcacaagttaaagtctctgaatgagatcgttgacgtgttgaatgccaccactgtggcgggttttggagcagcagcaacatcgagcaccttcgttgagccaattaataataatagcttcttcaacccgttgaat

SEQ ID NO: 251022 - DNA, 321 bp, Glycine max
tgaaagctccggcatcatctgttacgtcaacgccaatctgcacgacaatgacggtatccgcccggaccagcattgtctcatcttcgctggaaagtagctcaacgaaggtcgcacactcaccgactactccatctagtcggcatcaacacttcacctcgtcctccgtctccgtggtggcatgcagatcttcgttctcacgctcatcggcatgactattagtctagatctctaaagctcctacaccatcgataacatcgacagctaagattcaggattatgagggaatctccccataccaccagatgctgatcttcgccggga

SEQ ID NO: 251023 - DNA, 397 bp, Glycine max
  unsure (1)..(397): unsure at all n locations
attctcttcactttaaagttacatagtttttcattgttttacttaatctacaatggctgcttcaacaatgactctctcttcatcatcattggctggccaagctatcaagcttgccccctccacccctgagcttggtgttggaagggttagcatgaggaaaacagcctccaagactgtttcctcaggaagcccatggtacggcccagaccgtgtcaagtacttgggcccattctctggtgagcccccatcctacctcactggtgaattcccaggtgactatggttgggacactgctgggctttctgctgacccagagacttttgccaaaaaccgtgaactcgaagtcatccactccagatgggccatgttangagccctgggctgtgttttccctgaa

SEQ ID NO: 251024 - DNA, 408 bp, Glycine max
agaagaacaagtagttgagaactaagaaggagaagcaaatggcttcctcaatgatctcttccccagctgttaccactgtcaaccgtgccggtgccggcatggttgctccattcactggcctcaagtccatggctggcttccccaccaggaagaccaacaatgacattacctccattgctagcaacggtggaagagtgcaatgcatgcaggtgtggccaccagttggcaagaagaagtttgagactctttcctacctgccagaccttgatgatgcacaattggcaaaggaagtagaataccttcttaggaagggatggattccttgcttggaattcgagttggagcacggtttcgtgtaccgtgagcacaacaggtcaccaggatactacgatggacgctttaacccct

SEQ ID NO: 251025 - DNA, 391 bp, Glycine max
aggatttgttagtgaagcaatggctcaaaccatgttgctcatgtctagtgtctctagcagttattccgtggatttgaagaaagaccttttcctccaattgcagagtcaaagtttaaggcctaagttctctcagctctcattcaacccacttccatcatcaacttcttccttttcttcaccccgtacattcacaactctggccctcttcaaatctaagaccaaagccgctcctgctaagactaaggttacaaagccaaagcaaaaggttgaagatggtatctttggcacttctggaggatttggttttactaagcagaacgagctctttgtgggtcgtgttgctatgcttggttttgcagcatcactgttgggtgaaggaataactgggaaa

SEQ ID NO: 251026 - DNA, 388 bp, Glycine max
aaccgatggagatggagaaactggcctcacaagagtcttgcaggaaataaaggaatcagagctcgcaagctacgggatgattgttaatagcttttacgaactggagcaggtgtacgcagattattatgacaagcagctgctacaggtacagggaaggagggcgtggtacataggtcctctttccctgtgcaaccaagacaaaggcaagcgaggaaagcaagcttccgttgaccaaggagacattttgaagtggctggactccaagaaagcaaattcggtggtgtacgtttgttttggaagcatagccaacttcagtgaaactcagctgagagaaatagcgaaggggcttgaggattcggggcaacaattcatatgggttgtgaggaga

SEQ ID NO: 251027 - DNA, 210 bp, Glycine max
gctgcaagacaaagtcttggaccaagatcactccaatctccatttggcttctccagaaaagcctcctttcttgttaaggcagctgctaccccccctgtcaagcaaggatcagacaggcctttgtggtttgcatcaaagcaaagtctttcttacttggatggcagccttccgggtgactatggatttgaccctctgggactttcagaccct

SEQ ID NO: 251028 - DNA, 369 bp, Glycine max
aggccgactctaacggatccctcggggaattccaattccacattttcaagaaataaggaggcaaaaatgttcatatatgaattggaattatttgttttcttattaggcctatcctgaagccaaaggaaatgagatcggaattcctcggggaattccaattccacattttcaagaaataaggaggcaaaaatgttcatatatgaattggaattatttgttttcttattaggcctatcctgaagccaaaggaaatgagatcggaattcctcggggaattccaattccacatttttaagaaataaggaggcaaaaatgttcatatatgaattggaattatttgttttcttattaggcctatcctgaagccaa

SEQ ID NO: 251029 - DNA, 359 bp, Glycine max
ttcactcccctctgctggaatgcttattccctacacctacttttttgtccctcaaggttcaggttcttcagctggtggtactgttgccaaggatgctgttggaaatgatgtaattgcagagaattggctcaaggcacatggacctggtgaccgaacccttgcacaaggattgaagggagatcctacctatcttgttgtggagaaagacagaacccttgcaacatatgcaattaatgccgtgtgcactcaccttggatgtgtcgtgccatggaatcaagcagagaacaagttcatctgcccttgccatggatctcagtacaatgaccaaggaagagttgtgagaggacctgctcccttgt

SEQ ID NO: 251030 - DNA, 353 bp, Glycine max
ctcgagccgctggaactggcaacctgccaaaggcgtgttgaagatgaaatgctgaggcattcaaaagctgtggaggtaacaagagccatgaccctcaacaatttgcaaacgggcttgcctggagtgtttcaggcactgaccagtttctcttccttgttcacagaggctcttgaatcagtgtgtacccgttcatatgccatcaagtaggtgaggtaattcatttgttctgcatgggatctaagttcttcataagggctgggggattttttggcggcaagctcttattgctctcactattttgagttatattttgaaatgtaaatatgaagaattttggggttccacctattttg

SEQ ID NO: 251031 - DNA, 397 bp, Glycine max
attccattctctctgtgtatttccctacctctcccttcaagatgcagatcttcgtcaagaccctcaccggcaagaccatcacccttgaggtggaaagctctgacaccatcgacaacgtcaaggccaagatccaggacaaggaaggaatccccccggaccagcaacgtctcattttcgccggaaagcaacttgaggacggccgtacccttgctgactacaacattcagaaggagagtactcttcacctcgtcctccgtctccgtggtggcatgcagatcttcgttaagacactcaccggcaagaccataaccctagaggttgaaagctccgacaccatcgataacgtcaaggccaagattcaggacaaggagggtatcccccgggacaacaacgtctc

SEQ ID NO: 251032 - DNA, 395 bp, Glycine max
ctcgagccgaatcggctcgagcgagtttcacagcgaagtcgtaggagggtttcaaaagatggagaacatgcagagcttctggcaattgggcgatgaactccgtggacactcaaaagcatcggaggatcacaaatggttaatggttgcttcgaaattggcggaacagacaagattgaagggggagcgtgtgaacaaccttgatctttcaaagggccccattgaaacaaggtcaagggataaatttgggttccaggaagagaacaaatttgattctcttaacttaagcatgttgaacctggactctaaatttactgagaatgtgagcaaaagctcgcttcgaaatggtgtttatggtatgaatgcagtgtatcagaaaaacaatgcaaacttggtga

SEQ ID NO: 251033 - DNA, 393 bp, Glycine max
aaaaactaatggcaggaagtgcacgagtggggcggattgtgatgtcttctgctgtgaagcatctaactcctgtgactttggagttgggtggaaaatgccctgcagttgttgattccctttcatcttcttgggacaaagaggtcactgtgaagagaataattgtggggaaatatgggacttgtgctggtcaagcatgcataacaattgattatgtccttgtggaaaagggttattgtttaaaactggtggaattgatgaaggtctggatcaagaaaatgtttggacagaaccctcgaaaatcaaaaactattgctaagatagttaataaacaccacttctctagattgaagaatcttcttgcggataaacaggtcaaaggttctgtggtttatg

SEQ ID NO: 251034 - DNA, 394 bp, Glycine max
ccacgatttcgccattacgaagaaatacgcgatcttctgtgatattcagctcggaatgaaccctcttgacatgatctccggtggctcccccgtcggctccgtcgcctccaaggtcccaaggatcggaatcctccctcgtgatgctaaggatgagtcgatgatgaagtggtttgaggtgccggggttcaacatcattcacgcgataaacgcgtgggaggaggacgagggaagaacggtggtgctggtggcgccgaatattctttcgatggagcacgcgctggagagaatggagctagttcacgcgatggtggagaaggttcggatcgagctggacacggggataatcacgcggcaaccggtgtcggcgcggaatctcgatttcgcagttataaaa

SEQ ID NO: 251035 - DNA, 342 bp, Glycine max
ttttacttgaattttcttcatccttctctgttctcctagaacttgattacttgaacattccctatgacagatgacgtggttcttctggatttctggccaagtccatttgggatgagggtcaggattgcacttgctgaaaagggtatcgaatatgagtacaaagaagaggacttgaggaacaagagtcctcttctcttacaaatgaacccggttcacaagaagattccggttctcatccacaatggcaaacccatttccgaatccctcattgctgttcagtacattgaggaggtttggaatgacagaaatcccttgttgccttcagacccttaccagagagct

SEQ ID NO: 251036 - DNA, 380 bp, Glycine max
agaaggaaatggcttcctcaatgatctcctccccagctgttaccaccgtcaaccgtgccggtgccggcatggttgctccattcaccggcctcaaatccatggctggcttccccacgaggaagaccaacaatgacattacctccattgctagcaacggtggaagagtacaatgcatgcaggtgtggccaccaattggcaagaagaagttcgagactctttcctacttgccagacctcgatgatgcccaattggcaaaggaagtcgaataccttctaaggaaaggatggattccttgcttggaattcgagttggagcacggtttcgtgtaccgtgagcacaacaggtcacctggatactatgatggacgctactggaccatg

SEQ ID NO: 251037 - DNA, 353 bp, Glycine max
cgctatcaaaaaccactggaactccaccttgaagcgcaagtgctcttcaaccatgatcgacgacaacacccaaccgctgaaaagatccgtgagtgccggcgcggctattccagtctctactggactctacatgaacccgcccacaccgggtagtccctccggatccgatgtgagcgagtccagcttaccggttgcatcctcttcgcacgtgttccgtcccgtgcctagaactgtcaaggttctaccacccgtagaaaccacgtcgtcctccaatgaccctccaacttcactttctctatcactccccggtgttggtgttgttgactcatccgaagtctccaatcgggcaactg

SEQ ID NO: 251038 - DNA, 350 bp, Glycine max
  unsure (1)..(350): unsure at all n locations
attgtangggcgaagccggaggtcattggagctgatatcacaagggcatacctcagtaatgtatgtgttgctaaagaactgcacagaaatgggttggcttatgcacttcttgaaaagtcaaagttagttgcttatgattggggcataacagatttgtacgtccatgttgctgtcgacaatgaaccagcgaagaaattgtatataaagagtgggtttgtctatgaaagtgatgaacctgcgtggcaggccaggtttctagatcgaccccgaagacttctcttatggtcagggttttcaaggacctaatttaacagtgttgtcctatatcttctgttaatttgattttctgt

SEQ ID NO: 251039 - DNA, 387 bp, Glycine max
  unsure (1)..(387): unsure at all n locations
gtttttcatttcatcgtgcattcaatggccaccacagcagctctatccggaaccatggtgagcacctccttcatgaggaggcaacctatgaccaccacaagcctaaagacattccccaacgttggtgaagctctttttggtctgaaaagtggacgaggtggtcgtgtcacttgcatggcctcgtacaaggtgaagctcataaccccagaaggagaagtggagtttgaatgcccagatgatgttttcattgttgacaaggcagaggacgaaggcattgaacttccctactcgtgcanggccggttcttgcgtttcctgtgttggcaaaattgtggaaggtaacgtggaccagtcagatggtagcttccttgatgatgagcaaatagat

SEQ ID NO: 251040 - DNA, 388 bp, Glycine max
gcccctgacagtgactctggcatgacacatatttccacccaaataaaaggaacagctggctacttggaccctgaatacctgaaaacttatcaactaactgaaaagagtgacgtgtattcatttggagttttgcttgttgaacttgtcacaggcagacgccccattgaaccaaaatttgaactcagggagcgaatcacggcaaaatgggctatgaagagattcattgatggagatgctatctcagtcttggacccaagactggatcagactactgcaaatactttggcactagaaaagattcttgagctagctttacagtgcttggctccacgcagacaaattaggcctactatgaagagatgtgctgagatcctttggtccatccgca

SEQ ID NO: 251041 - DNA, 386 bp, Glycine max
tgagctgagaaaacccccaaccccaacctcaaccttaacctctcctcactttcttttcaaccagaactatgattaagctttttaaagtaaaggaaaaacagagagaactggcagaaaatgcgagtggcggaccacccgttaagaagcaaagtgccggcgagttgcgtcttcacaaagatataagcgagctgaatctaccaaaatcatgtaccatgcaattccccaatggcaaagatgacctgatgaactttgaagtttcaattcgacctgatgatggatattacttaggtggcacatttttgttttcctttcaagtgtctcccatctatccacatgaagcaccaaaggttaaatgcaagacaaaggtctatcatccaaatattgac

SEQ ID NO: 251042 - DNA, 343 bp, Glycine max
  unsure (1)..(343): unsure at all n locations
cagttttgggtgatcggaggtgtatcttctcatctttttgccctatttcagggtttactgaaggtcttggctggtgtgaacacaaacttcactgtgacgtcaaaagcagcagatgatggagaattctcagaactctacatcttcaagtggacatcactcttgatccctccaatgaccctactaatcatgaatattgttggggtggttgttggggtctcagatgccatcaacaatggttatgattcatggggacctctctttggtagattgttctttgcattgtgggtgatcctccaactctaaccccttcttgaangggttgcttggaaaacaagatagaatg

SEQ ID NO: 251043 - DNA, 391 bp, Glycine max
  unsure (1)..(391): unsure at all n locations
ctnacttaaagatattggtgtgaagaagggagatgccgtaattatttatttgcccatgcttatggagcttcccatcgcaatgcttgcttgcgcccggattggtgctgttcattcggttgtatttgctggtttttctgcagaagctctttcccagagaatcattgattgtaaaccaaaagttgttattacttgcaatgctgttaaaaggggccctaagcctatctatctaaaagatattgttgatgctgcaatcaatgattcagcccaaaatggggtctctatagataaatgcctagtttatgaaaacccattggcaatgaagagggtagataccaaatggaaggaagggcgtgatatatggtggcaggatgtcattcctcaatatccaact

SEQ ID NO: 251044 - DNA, 270 bp, Glycine max
gctggatcttctagtggtgcaaagaaggcttttactggaatgtgagcttcgatttccagtttttattgaagaaatcagatctactaaataacaaggtaacatttttatttagtagatctgatttcttttctggaaggtgacatattaaaaccttatcaattttggattttctttgaggtttcgttctggctttatgtttaggattttgttatacattatgtttttcgaatactatttgccttttaatttttgaaactatgcagactcttc

SEQ ID NO: 251045 - DNA, 391 bp, Glycine max
tctcatttcaatttgcatttgcatttcatttggcgttttgtttctttctggaagcttcacttcggcatccatggcgtcgttcgaagaagctcctcccggaaactccaagaacggcgagaagatcttcaagaccaagtgcgctcagtgccacaccgtggataaaggtgccggtcacaaacaaggacccaatctgaatggtttgtttggaacgcaatctggcacaactcctggatattcctattctactgctaacaaaaacatggctgtgatttgggaggaaaagaccttgtatgattacttgctcaaccccaaaaagtatattccagggacaaagatggtgtttcccggtcttaagaaacctcatgaacgtgcagatcttactgcatatctt

SEQ ID NO: 251046 - DNA, 384 bp, Glycine max
acctgctaacacggttgcaaaacattaatttggctttccattttgaggtagaacagcaagtgaatggggttttcattaacttttttgggttcaatggaacggctggtgtgtggagaataaaggcccttgaggatgctggtggttggttggagaggaccacagtggaggatatggatatcgctgtacgtgcccatcttcatggctggaaatttattttcctcaatgatgttgagtgccaatgtgagctacctgaatcttatgaagcttatagaaaacagcagcatagatggcactctggcccaatgcaattgttccgtctttgtttgcccgacataatacgctccaagataagcatatggaaaaaattcaacatgatatttctct

SEQ ID NO: 251047 - DNA, 395 bp, Glycine max
ctcaatttttctctcaaccggcccaatttagcataagcccagcatggccaccgcaacagcagcagccacctcgtccttcatggggacgcgcctcctggaggcccattccggggcggggcgggtgcaggcccggttcgggtttggcaagaagaaagccgccgccccgaagaaagtttccagggggtcgggctctagctccgataggcccctgtggtatccgggcgccaaggcgcccgagtacctggatgggagccttgtcggagactacgggttcgacccatttgggctagggaagcccgccgagtacctgcagttcgagttggactcgctggaccagaaccttgcgaagaacgtggctggggacatcattgggaccaggaccgagctcgcggggg

SEQ ID NO: 251048 - DNA, 377 bp, Glycine max
tgcagagcagaagaaacagaggaagcacgcagtgtgtgttgttgttgtggttcctctgagttccgagtggactcagttacagagcaataatgagtcaggaatcgtttatatatagcttcgtggctcgtgggacgatgctgttagcagagtacacggagttcactggaaacttccctgccattgcagctcagtgtcttcagaagcttccatcttccaacaacaagttcacttacaactgtgaccaccacaccttcaatttccttgttgaagatggttatgcttactgtgttgttgctaaggaatctgttagcaagcagatctctattgctttccttgaacgtgtcaaggctgattttaagaaaagatatgggggtggg

SEQ ID NO: 251049 - DNA, 341 bp, Glycine max
  unsure (1)..(341): unsure at all n locations
gttgttttttctggtcgagtgtcaacaggtgcacttgatgacatacgacgagcaactgacatggcatacaaggctatagctgaatatggtcttaatcagaccatangtcctgtttcaatagccactctttctagtggtggaattgatgagtctgggggagcagttccttggggaagggatcagggacatcttgttgatcttgttcaaaaagaggtgcaaacattactgcagtctgcactggctgtagcactttccattatccgagccaatcctactgttttggagggccttggtgctgatttggaagaaaaggagaaagttgagggtgaagagctacagaa

SEQ ID NO: 251050 - DNA, 416 bp, Glycine max
cgtaagctcggaattcgggtcgagaatccctctctctctccgacgtacatttccatctttttacggtttcatttcagggactccgaatcctggatttccacgcgcctctcttcctcttcacgccgccaccattatcgatctgatctgtacgctgaggagagtgaacggaacgatgatttcagggcggagtttctatgcactttctgcgccgaggattacgacgtcgtttccctctgttgccacattgatgaccatcaccctatccatgccaaaaacggggtgtgtcccatttgtgggaacaaggtgagactggatctcgttggagattttactagacaacatgggaacttcttgacggtgcagcgcaaaaagacggtcacgaaaggacgctctgcatcaacaagttctatattgag

SEQ ID NO: 251051 - DNA, 406 bp, Glycine max
tcggggaattccaattccacattttcaagaaataaggaggcaaaaatgttcatatatgaattggaattatttgttttcttattaggcctatcctgaagccaaaggaaatgagatcggaattcctcggggaattccaattccacattttcaagaaataaggaggcaaaaatgttcatatatgaattggaattatttgttttcttattaggcctatcctgaagccaaaggaaatgagatcggaattcctcggggaattccaattccacattttcaagaaataatgaggcaaaaatgttcatatatgaattgggattatttgttttcttagtaggcctatcctgaagccaaaggaaatgagatcggaattcctcgggggttacgagctcgatttccctatagtgagtcg

SEQ ID NO: 251052 - DNA, 391 bp, Glycine max
gctcgtttctgggccaagttcattgatgacaagtgcgtggctctagcagcgaaatctgtttttattgttgatgagaaagagaaagagaaggcaaaagaagaattatttgaggctctgaattatcttgagaatgagttgaagggaaagttttttggtggagatgagtttggctttgtggatattgctgctgtgatcatacctataattcaagagatagcagggttgcaattgttcccaagtgagaaattcccaaagctctccaaatggagccaagacttttacaaccattcacttgttaaccaagttatgcctcctaaggaccaactttttgcctatttcaaggctcgggctcaaagcctcgctgctaaaagaaagaattaacaaagactca

SEQ ID NO: 251053 - DNA, 235 bp, Glycine max
ctccgggaaattcaaattcaaaattttcaagaattaaggaggcaaaaatgtccaaaaatgaattggaattatttgtttcctaataaggccaatcctgaagccaaaggaaatgaaatcggaattccccggggaattccaattccaaattttcaagaaataaggaggcaaaaatgttcatatatgaattggaattatttgttttcttattaggcctatcctgaagccaaaggaaatg

SEQ ID NO: 251054 - DNA, 350 bp, Glycine max
ctggacagaaaaacgctatgggagatgcagaccccacaggttatcaagcctgagttgttgaggaaaggctttgagcttgtaaatagggaaggtcttgaagttactgatgatgtgtccattgttgaacacctaaaacatcctgtttatatcactcaaggatcttataccaacattaaggtgactacacctgatgacatgttactggcagagagaatattgaatataaatgatgaagacaatatagtcttgccagttcacctttgaagggaaatcatatcctgcaagataagatagaactggaaatcttctttttcaataaatagcgatcaaacaatgaacttaaaaatcct

SEQ ID NO: 251055 - DNA, 325 bp, Glycine max
tgacaacgcatgcacgcctacgtaagctcggaaattggctccaggcaaaagaacaagtaatttgagaactaagaaaggagaaacaaatggcttccccaatgatctcttccccagctgttaccactgtcaaccgtgccggtgccggcatggttgctccattcactggcctcaagtccatggctggcttccccaccagaaagaccaacaatgacattacctccattgctagcaacggtggaagagtgcaatgcatgcaggtgtggccaccagttggcaagaagaagtttgagactctttcctacctgccagaccttgatgatgcaca

SEQ ID NO: 251056 - DNA, 381 bp, Glycine max
gaactccaaggaaggacctccaacctttgaccaaccgaagatgactttgagcaagctcttggagtatggtaacatgcttgtccaagaacaagagaatgtgaagagagtacaactggcagacaagtacttgaacgaggctgctcttggtgatgctaatcaggatgccatcaaaagaggaactttctatggcaaagcagcccagcaagtaaaaattcccgttcctgaaggttgtactgatccaaatgcctcaaacttcgacccaactgcaagaagtgatgatggaacctgcttatacacaccctgagaacctaagcattctccacttgaagagaagctatgacttgatataatcaaataatttatcctgttcatattggattg

SEQ ID NO: 251057 - DNA, 386 bp, Glycine max
cacgcctacgtaagctcggaaattcggtccaagctccctcctcaaaaaatttccgtgcgctccaacaaacattcccgttcacactttcagattgggtgaagaagggggccggtggccgaactgaagttcctcctgccaacaggaagtcagaagttgaccctttgaaaccggttccatttgaaaaacctccatttagtctcagccaaatcaagaaggtcattccacctcactgtttccagcgtttctgttttccgctcattctcctatgttgtttacgacctcaccatagccttctgcctctattatgttgccaccattacttcacctccttccagccctctctctttcttggcatggccaatctactgggctgtccaaagttgcat

SEQ ID NO: 251058 - DNA, 393 bp, Glycine max
atagccgcaagccatgggcaaagttcattaatgtagaaaatcatcacatggctgttcctgaggctgttgactttgttgacaagttattacgctatgatcaccaagaacgtcccacagcaaaagaagccatggcccatccatacttcaatccagttagaaatgcagaaagtagtagaactcgtgcacattgagttgctggtgcttgttgtgatatggtgttcgttcttgtcagggggccttcaacagtctgaactgttatttctagtggaacttgcttttagtagattcccctgttctgttgtgaaactcatttcaattagttctttatctaatcgttttgtttctggtttttaaaattatttttgggtggaaaattcagctctcaacaatttt

SEQ ID NO: 251059 - DNA, 375 bp, Glycine max
tggacagtatccatatggaggtttaatcctgaataggccaactattagcaggagattcatgcctgagaaagggtctcctgaatatgatgcgttggctaagaaccctgagaaggagtttttgaagactattactggcaagaaagagaccctcattgaccttacaattatagaaattttatcaaggcacgcatctgatgagttctaccttgggcagagagatggtggtgactactggacttctgatgccgggccattagaggcctttaagaggtttggaaagaatcttgaagagattgaaaagaagcttatagagaagaacaatgatgagacattgagaaaccgctatggggcggctaaaatgccttacactttgct

SEQ ID NO: 251060 - DNA, 316 bp, Glycine max
gcaagctcatcctagagttttaaaaatggcagcagcctcctccatggctctctcttccccatccttggctggcaaggccgtgaagctgggcccatcagcccccgaagtcgggagggtcagcatgaggaagaccgtcaccaagcaggcctcctccggaagcccatggtacggcccagaccgcgtcaagtacttgggcgcattctctggcgagcccccgtcgtacctcactggcgagttcccaggtgactacggctgggacactgctgggctttcggccgagccagaagccttcgccagaaaccgtgagctcgaagtg

SEQ ID NO: 251061 - DNA, 345 bp, Glycine max
acgatgacaagcttgatcggtctcatcaataagatccaacgagcctgcaccgttttgggcgatcacggtggcgagggcttgtcgctttgggaggctcttccctccgtcgccgtcgtcggtggacagagctcagggaaatcgtcggtgctagaaagtgtggtcggaagagattttctgcctcgtggatctggtattgttacacggaggccactagtgctgcaacttcagaagacggaagatgggacacaggagtatgctgagtttcttcacataccaagaaggagattcaccgactttgctgctgtgaggaaggaagtagcggatgaaacagatcgtagaactggg

SEQ ID NO: 251062 - DNA, 337 bp, Glycine max
gaaagtactcgaggtcgcagatgtaccacaagaggggcatttgggctatcaaggccaaaaacggtggcgttttacgtcgccacgaccccaaacccaagcctgaggcgcccagtgaagaaccacgcaaattttaccccgctgatgatgtcaagaaaccccttgtcaacaagcacagacgcagacgagctaagctcagggctagcattagccccggaacagtgttgattcgtcgtgctgggggatttaagggaaagagggtagtgtttttgaagcagctaccttctgggttgcttcgtgtaacaggtcctttcaaggggtaatggagttcctttgagac

SEQ ID NO: 251063 - DNA, 321 bp, Glycine max
gttctcacaaattagaaaataaaaatattatatatacatatatatatatatatatattctcttcgagtccgtcgtaagagaaaacaatggcgaaacccagcagcgaaaagccagaggagcatagcgattccaagtactacaaaggggtccgaaagagaaaatggggcaaatgggtatccgaaataagactacgcaacagccgtcagaggatttggttgggatcctacgacactcccgagaatgccgcgcgtgccttcgacgcggcaatgttctgcttacgtggccgcaacgccaagtttaatttccccgacaacccactcg

SEQ ID NO: 251064 - DNA, 379 bp, Glycine max
aggtcgaatctaaaggatcccctcggggaattccaattccacattttcaagaaataaggaggcaaaaatgttcatatatgaattggaattatttgttttcttattaggcctatcctgaagccaaaggaaatgagatcggaattcctcggggaattccaattccacattttcaagaaataaggaggcaaaaatgttcatatatgaattggaattatttgttttcttattaggcctatcctgaagccaaaggaaatgagatcggaattcctcggggaattccaattccacattttcaagaaataaggaggcaaaaatgttcatatatgaattggaattatttgttttcttattaggcctatcctgaagccaaaggaaatga

SEQ ID NO: 251065 - DNA, 316 bp, Glycine max
atacaccctcttttgctgcatcagaggagttgtgaattaagagcatggctgcacaagctcttgtatcatcatcttctcttagcttcgcagcggatgctgtaggacatagtcttggaccaagatcactccaatctccatttggcttctccagaaaagcctcctttcttgttaaggcagctgcgaccccccctgtcaagcaaggatcagacaggcctttgtggtttgcatcaaagcaaagtctttcttacttggatggcagccttccgggtgactatggatttgaccctctgggactttcagaccctgaaggaacagg

SEQ ID NO: 251066 - DNA, 378 bp, Glycine max
caaagtttcttcctttctctgctctttgtcttctctgacacatttggggccttgttgagtgtgtttttgcaagagggtatggcgaaggacgttgaggttgctgagcgtggctccttctctgggaaggactaccaggaccctccaccagcaccactcattgatgctgaggagctcacaaagtggtccttttacagggctcttattgctgagttcattgcgactttgctcttcctctagattactgggctcacagttatagggtacaagcaccagacggatcatgctgatgcgtgtggtggggttggcattcttggcattgcgatggcctttggtggcatgatcttcatccttgtctagggcactgctgggaattcagga

SEQ ID NO: 251067 - DNA, 364 bp, Glycine max
agcaactcattctgtttcttcagtttggtataactttagccgaggtcaggaggagcactagctaagttcacaatttcaaaatggctaggggactaaagaagcatttgaaaaggctcaatgctcctaagcattggatgcttgacaaactgggtggtgcatttgcgcctaaaccctcatctggaccacacaaatcgagggagtgcctccccctcattcttattctgcgaaaccggctgaagtatgcgctgacataccgtgaagtcattgctattctgatgcagcgccatgttcttgttgatggcaaagtcaggactgacaagacttaccctgctggtttcatggatgttgtttcaatcccaaaaac

SEQ ID NO: 251068 - DNA, 360 bp, Glycine max
gacgtctagaccacgcgtacgtaagctcggaatacggctcgagtagaatttgtgaaagaagctggacgtggaggcaaagggaatttgcccctgcaaggcactccaaccattgtaaagacagaaccatgggatggaaaagatggagaaataattgaggacgatgaattttctcttgaagaactaatgggggaagatgcttcaagcaaggatgagctatgatcaatttataaggaatttagagcagattaaggtttcaaccaccgatttttacgttacaggcaagttgttgctcatgattattgtgatcactattctgtttttccatgttccaagttaaaaaaccagtcgagtgatgagtga

SEQ ID NO: 251069 - DNA, 358 bp, Glycine max
ggtagagaaggtgttgtgaaaggttaagatcgagaaattagggtgaagtgaaggagaagctcttgagaagatgggagaagcaacagaaagatatgcagttgtgacgggtgcaaataaaggaattggattagagatagttagacagttagcttcagctggaatcaaagtgttgctcacagcaggaaatgagaagaagggtctccaagcactgggaacactcaaagactcaggtcgatcggaccttgtactgtttcagcaggtggatgtggctgatgcaacaaatgtagcttctttggcagattttgtcaaatccaagtttgggaaacttgagattctgagtaacaatgcagggattggt

SEQ ID NO: 251070 - DNA, 362 bp, Glycine max
aaaattttcacacctcattaagccctttagccaagagtccctagccaaaaaaattaacatggcatggtcaacttcctcctctagcacccctcatcaaaagcatgaagtgttcctcagcttcagaggtgaggacacacgcgacaccttcactgggcaccttcatgcctctttaacaagactccaagtcaacacatacattgactacaaccttcagagaggtgaagagatatcagcctcacttcttagggccattgaggaggcaaaactctcagtcgttgttttctccaaaaactatggaaattccaagtggtgtcttgatgagcttctgagaatacttgaatgtaagaatatgagggggcaga

SEQ ID NO: 251071 - DNA, 355 bp, Glycine max
gcccttgctccctccagaaggatcacagattggggaacgtatttctttttctgggattgatggaaagccagaagatgtactaaacccaaagaagaaacagctggataagattacaccgcatcttttcactgatgacaagggggtagccacatacaagggaataccatttatgacgtctggtggaccatgcacatcatccattcccagagcaactattaaataatggagatatggcccattcattgttcttcgccactcatagatttttggtaccacaagatatttgaagttttgattacgttaatgagacgttactatcttgttgacaagcttatgctgcacttgcacttgcatg

SEQ ID NO: 251072 - DNA, 330 bp, Glycine max
cccaattcagcaaggtcccgccagtacccactacctcaatacgttaagtatcttatctctgagtaccaaaaaattttgcagaggctatatgatcttggagctcgaagagttcttgtgacaggcacaggacccttgggttgtgttccatcagaattggcccaacgtggtagaaatggacaatgtgctcctgaactgcaacaagctgcagcattgtttaacccacaactcgaacaaatgttgctacaactcaacaggaaaattggaagtgacgtttttattgctgcaaacacaggaaaagcgcacaacgactttgttactaacccccgacaa

SEQ ID NO: 251073 - DNA, 313 bp, Glycine max
tcgggaatcggctcgagaacaagatttagaaacagagacatgttggtgaacgtgtacggtccaacctatggagcccccaagagggtgctggtgtgtctgattgagaacgaaattgagtttgagacagtagatagtgatcgcttcaagggagagaataaggaacctgagttcctaaagctgcagccatttgggtcacgtcctgttaggcaagagggtgattatgctctctatgcccgtattgatgtgggtagttgaacttcggactttggatcaagaatgttatttgagttgtggagaatctcgtgcaataatc

SEQ ID NO: 251074 - DNA, 358 bp, Glycine max
tgcatgactccaggtcgaccctaaaggatcccatcggggaattccaattccacattttcaagaaataaggaggcaaaaatgttcatatatgaattggaattatttgttttcttattaggcctatcctgaagccaaaggaaatgagatcggaattcctcggggaattccaattccacattttcaagaaataaggaggcaaaaatgttcatatatgaattggaattatttgttttcttagtaggcttatcctgaagccaaaggaaatgagatcggaattcctcggggaattccaattccacattttcaagaaataaggaggcaaaaatgttcatatatgaattgggattatttgttttct

SEQ ID NO: 251075 - DNA, 351 bp, Glycine max
cagaatccttaacagaacaagttgcagggatggcctccactctctctatatcctcttcatccacccttgttgatgccaagcctccaactccaagacaatgcgtcacccttcccactcttccccctccaccttttcactctcagactcgtccttggaagaccactgctttctgtcgtaggcttgctcgcaattttatggcaatggccaccacaagagaggcagccgcagcagaagttgccgccacaactgacctctctattgccgagacgccagagattgtgaagactattcaagaagcttgggacaaagttgaagataaatatgcagtgagttcactggcaattgctggtg

SEQ ID NO: 251076 - DNA, 356 bp, Glycine max
ggcatctgtatcggtgctctgacagtgttggcagacttcatgggggccatcggttcaggaaccggaatattgcttgcagtaacaatcatctatcagtactttgagacatttgagaaggagagagctagtgagcttggcttcttcggtttctaagttctgccaagcaaataatgttggttggtgactccaacgagctctcccacaccccttgtttgagggatcgttagacgtgtaggtcgtttaacatcgtaagggaggacataactagtttgttgtcaggatttacttttcgttttttccctttcaactgaggaagtatcaagtagtacatcgttgttaacatttttgggtttcct

SEQ ID NO: 251077 - DNA, 365 bp, Glycine max
gggaagaaaaacttagctactaaggaaggatcaaagagaatggctcaagcaatggcatcaatggctggcttgcgtggttcctctcaggctgtgttggaaggtagccttcaggtgagtggctccacacgcttgaatgtggggagtggaagcagggtggcctcagtcacacgtgcagggttcacagttagagcacaacaacaacaagtgagtggtgaggtacaaagcagccgtagggcagtgctttcacttgttgctgctggtttggccactggctcttttgttcaagctgtgcttgctgatgccaaatctatcaaagttggaccacctcccccaccttctggtggattgcctggaacgttgaactc

SEQ ID NO: 251078 - DNA, 326 bp, Glycine max
cccacacactcaaaccatcccttttattgaaatcctcaagcttcaatttgctttgtgctcactcatctatctattataaccaaacactcttcttcatattcttcttcttcttcttgttcttgttctatctgtgacgagcatcatggcctcgagagcagtgctattgttggctatgtgtgtgcttccggccatggttgtggccattcgcccagcaaagaaccctttttgcgtgaagggtcgcgtctactgtgacccttgccgtgctggttttgagacctcagcaaccacctacattgccggtgctgagattatgttgcaatgcaaga

SEQ ID NO: 251079 - DNA, 377 bp, Glycine max
gacgtcagacgcacgcgtacgtaagctcggaatacggctcgaggttggcgtaggttgaagaagaagaagagagagagagagagagagagagagagagagagagagagagagagagagagagaagggtaaggtaaccctagagtggtgaatcgaattcgaaacgatggaaagtgtttctcgaagaagaggtggaggcattttcgaaagcctctacaaggtcgttatggcgtcgcaactctgtctatgttacgtttgtcatcgctggcgccttccttggagaacgggctgtggattagggagtccacaagctctgggaggcagataatgttgggaaacgatatgaagacattcctgtgctagggcaaggggcgtcagaa

SEQ ID NO: 251080 - DNA, 386 bp, Glycine max
gacgtcagacgcacgcgtacgtaaactcggaatacggctcgagctaaatggttatacaaagggtgccagaaatgagatatttgctatgcaacctgcaccaattcaagtttcatatatgggattccctggaacaactggggctacttacatagactacttagtcactgatgagtttgtttcaccactacggtatgcaaatatatattcagagaagattgtacatctaccgcattgctactttgtaaatgattataaacagaaaaatcaggatgtgttagatccaaactgcccacacaaacgatcagattatggtctacctgaggataaatttatatttgcatgcttcaatcaactttacaagatggatcctgaaatatttaatacat

SEQ ID NO: 251081 - DNA, 396 bp, Glycine max
gacgtctagaccacgcgtacgtaaactcggaaatcggctcgagctcgagccgaatcggctcgaggaactcaaagccacagctgctgagaaagtggagcagataacagcttctctgggaacatcatcatctgatggcatcccatcatcagaagcctcagacaggatcaaagctggtttcattcacttcaagaaggagaaatatgacaagaatccagctttgtatggtgaacttgccaaaggccagagccccaagtttatggtgtttgcttgctcagactcaagggtgtgcccatctcatgtgctagatttccaaccaggagaggcctttgtggtcagaaatgttgcgaacattgtcccaccatatgagcattcaaaatacgctgggactggggcagc

SEQ ID NO: 251082 - DNA, 322 bp, Glycine max
cttacaggagagattcacgtcggggtttcagccgtgacaatctgtgcaagaactgcaagagacctggtcattatgcaagagaatgccctaatgtcgcaatttgccacaactgtggcctccctgggcatattgcttctgaatgtacgacaaagtcactgtgctggaactgtaaagaacctggccacatgggcaggcagttgtccaaatgagggtatttgccacacctgtggtaaagctggacaccgtgctagggaatgctcagcccctccaatgcctccaggggacttaaggttgtggcaaaactgttataagcaggggcaca

SEQ ID NO: 251083 - DNA, 349 bp, Glycine max
tactcaagcattttcttccaatcttgaacccaggtggatcttcaatctctctgacatacattgcttcagaaaggatcattcctggatatggtggtggtatgagttctgccaaagctgcactggagagtgatacacgagttcttgctttcgaagcaggaagaaagcgcaaaattagagtcaatactatatctgctggtccactgagaagtagggctgcaaaggctattggattcattgagatgatgatcgattactcatcagccaatgcacctctacagaaagaactatcagcagaggaagtgggcaacacagctgccttcttaacatcagctttggcatctgctatcac

SEQ ID NO: 251084 - DNA, 349 bp, Glycine max
  unsure (1)..(349): unsure at all n locations
gcatgatgagactgtcacaaatgatgagattgcagctgatcttaaagaacacgtgattaagcctgtgattcctgagaagtaccttgatgagaagaccattttccatttgaacccttctggcaggtttgtcattggagggccgcatggcgatgctggtctcaccggccgcaagatcatcatcgacacctatggaggatggggtgcacatggtggtggtgccttctctgggaaggatcctaccaaggttgatangagtggtgcctacattgtgaggcaagctgcaaagagcattgttgcaaatggacttgctaggagggcaattgtgcaagtttcctatgccattggtgtg

SEQ ID NO: 251085 - DNA, 370 bp, Glycine max
gcatgatgagactgtcacagatgatgagattgcagctgatcttaaagaacacgtgattaagcctgtgattcctgagaagtaccttgatgagaagaccattttccatttgaacccttctggcaggtttgtcattggagggccgcatggcgatgctggtctcaccggccgcaagatcatcatcgacacctatggaggatggggtgcacatggtggtggtgccttctctgggaaggatcctaccaaggttgataggagtggtgcctacattgtgaggcaagctgcaaagagcattgttgcaaatggacttgctaggagggcaattgtgcaagtttcctatgccattggtgtgcctgaacccttgtccgtgttt

SEQ ID NO: 251086 - DNA, 335 bp, Glycine max
cacagagttagaggagaaatcatcatggcatcagcagcatctgggtttgtgttgtcacttaatgttgcagctgccaccacaaactcaagggtggtcatgttcaacacaaagaacaacgcttctaggcttgttgtaagggcttcagatgagcctgcagcggcggcacccgccaccgccacacccccagctgaagctgaagctaaaccaaagccaccacctattggccccaagagaggtgctaaggtgaagattcttaagaaggaatcttactggtacaaaggcactggttcagtggttgctgttgatcaggaccccaacactcgctaccctgttgt

SEQ ID NO: 251087 - DNA, 376 bp, Glycine max
gacgtcagacgcacgcgtacgtaaactcggaaatcggctcgaggaagattgagaaaggtaaaggtccttgttgttccggtgtgctgctagagaatctggtgaaggatgtcaattgttccaatcaaccaaggtcactcccaggactcttgggatcaattcatcgattttcctctccctccttccatctccagcttcttccccggcttcgaattcggattcggctcatcggtggttaacacacgtgtggactggagggagactcccagagcccacgtgtggaaggtcgtgcttcctggcttcacaaacgaggacgtgctggttgagctacaagaccagaaggtgctccaggtcagcgtggagagtggtaacttcctga

SEQ ID NO: 251088 - DNA, 365 bp, Glycine max
caaggaagatgtgctgccctttgatatagaagggacatggaaagctatggaagagtgttacaagttgggaatagcaaagtccattggcatatgcaattatggtatcaaaaaactcactaaactcttggaaatagccaccattcctcctgcagtcaatcaggtggaaatgaacccatcttggcagcaagggaaactcagggagttctgcaagcagaaaggaattcatgttagtgcttggtcagctcttggtgcttataagatattttggggctctggagctgtcatggagaatccaatcctccaagacatagcaaaggcaaaacggaagaccatagctcaggttgcacttagatgggtgtaccaac

SEQ ID NO: 251089 - DNA, 372 bp, Glycine max
gacgtcatgaccacgcgtacgtaaactcggaaatcggctcgagcttcaacaagttcgacaagaacggcgacggaaaaatctcggtaacggagctgaaggacatgctcgcggccctcggatccaaaacgacggacgaggagttgaaacgcatgatggaggagctcgaccagaacggcgacggtttcatcgacctcaaggagttcgcggattttcactgcaatggcggtgccggaaaggacgactcgaaggagctccgcgacgcgttcgatctctacgacgtcgacaagagaggcctcatctccgcgaaggagttgcacaacgtgctccggaatctaggcgagaagtgctccctcagcgattgccggagaatga

SEQ ID NO: 251090 - DNA, 567 bp, Glycine max
  unsure (1)..(567): unsure at all n locations
ggggtgggcgagcggccggggggacggggagtgggggggggnaggggggcgggggggggagggaggcggggggtgggtggggtgcttgaatggctaaggtgacagattagaagagtcaacacgtcggacgcacacgtacgtaaactcggaattcaaccagatataaagtcgcagctgaagtgaaagggtgttataattgcgcttttgttttgatatttaaggtatcgagatcttttttatgggcaggattcatcaactgcagaaaacctccataccatcaaccttcctatgcttgtttgtattaattaactgataataatactgtatggtttggtacttgctaaagagaaagaaaaagggcggccgccgactagtgagctcgtcgacccgggaattaattccggaccggtacctgcaggcgtaccagctttccctatagtgagtcgtattagagcttggcgtaatcatggtcatagctgtgtcctgtgtgaaattggtatccgctcacaattccaggcaacatacgagccggaagcataaggtgtaaaacctggggttcccaaggaa

SEQ ID NO: 251091 - DNA, 496 bp, Glycine max
  unsure (1)..(496): unsure at all n locations
ggggggngtgggggggggtgggggggggggggggggggggggggggggagggggggttgggggctgggggcgagnggggtggcgggggacggggagnggggaggggggggggggggggggggggggggggggggggggggggggggggggggggggggggggggggggggggnnggggggggggggggggngggggggggggggggggggggggggggggggnggggngggggggggggggggggggggggggggggggggggggaggggggggggggggggnggngggggggaggggggcgagggggggggggggggggggggggggagggggggggggggggaggggcgcagggggggggggggggggggggggaggggggagggggggggcggggggggggggggggggggggggggaggggggggggggnggcggggggcgagggggggggggggggcnggggggggggggggggggggggggggagggggg

SEQ ID NO: 251092 - DNA, 346 bp, Glycine max
  unsure (1)..(346): unsure at all n locations
cgggatgataagcagttctttcaagaccatcctggtgcagtgcctatcaccacagcacagggtgaggaactgagaaagcttatcggtgctccaatttacattgaatgtagttcaaaaacacaacagaatgtgaaggctgtttttgatgcagccatcaaggtagttctccagcccccaaagcagaagaaaaagaagagaaagggacaaaaggcctgttccattttgtgatcttcagttcttaatatagtagtttgtggaggatgacatgactgtagtcttcatcattctatatcttatactatttccaacctagatgaaggaatcatcatgtccaactgancgcatc

SEQ ID NO: 251093 - DNA, 367 bp, Glycine max
ttgcaagcatcataacatctcgcaaaagtgcaagcaaatcagaagaagacatgctgcagtgcttcattgactcaaaatacaaagatggtcgctcaacaacagaagctgaagtgactgggcttctcattgctgcactttttgccggtcaacacacaagctcgattacctccacttggactggggcatatctgctgtctaacaaccagtacctttcagctgtgcaggaggagcagaagatgttgatagaaaagcatggggacagagttgatcatgatgttttggctgaaatggatgtgctgtataggtgcatcaaagaagctttgagactccatcctcctctaatcatgctgatgagaagctcacacac

SEQ ID NO: 251094 - DNA, 330 bp, Glycine max
ggaagccctcagaacacctttgtcccagggctgattgatctggccatcaagaggaacagtttgattggaggagatgactttaagagtggtcagaccaaaatgaaatctgtgttggtggatttccttgtgggggccggcatcaagccaacatctatagtgagttacaaccatctgggcaacaatgatggcatgaatctctcagcccctcaaaccttccgctctaaggaaatctccaagagcaatgttgttgacgatatggtcaacagcaacgccatcctctatgagcccggtgaacatccagaccatgtggttgtcattaagtacgtgcct

SEQ ID NO: 251095 - DNA, 383 bp, Glycine max
gacgtctagaccacgcggacgtaaactcggaatatcggctcgaggtggacactaaagagtttgaatccatgcaggccttatcaagcaagaaagacaatcatgacatattcattaaactgggatctgagaaagataagcgaaaagaggcttttgagaaggaagaaaaatccaagaagtctgtgagcatcaccgagtttctgaagcctgctgagggggaagcatactataacccaggacgtggtaggggccgtggccgtggttcacgaggcggaggcggttaccatggaagtggcaccaagaatgcacctgctccatccattgaagatgccgggcatttcccaaccttgaggtgccaagtgaagccttcccagaacgcttttgac

SEQ ID NO: 251096 - DNA, 352 bp, Glycine max
ctacccacttctcaaccaacaatggcaatggcaacccaagcctctctcttcaccccacccctctccggtctcaaacccagcgaccgagccaccgcgccatggaaacaatcctccaccctctccttctccacctcgaagcccctcaagttctcgcgaacaatcagagcagcagccaccgaccagaccacagaggcaccggttgggttcaccccaccggaactggacccaaacaccccttcgccgatcttcggaggcagcaccggcgggctcctgcgcaaagcccaagtggaggagttttatgtcatcacatgggactccccgaaagaacagatctttgaaatgcccactggcg

SEQ ID NO: 251097 - DNA, 394 bp, Glycine max
gaaaacgcagttctcaccatttccctctcgattgtgagacttgttgttgttaactgaacttttctgagcaagaatgtctgggcgtggaaagggaggcaagggtttgggaaagggaggagcgaaacgacaccgtaaggtgctgcgcgataacattcagggaatcaccaagcccgcgattcggcgtttggctcgtaggggtggcgtgaagcgtatcagtggtctcatctacgaagagacacgtggcgtgctcaagatctttttggagaacgtgattcgtgacgccgttacctacactgagcatgctaggagaaagaccgttaccgcaatggacgtggtttatgctctcaagagacaaggaaagaacctctacggaatttggggctaaggtttttta

SEQ ID NO: 251098 - DNA, 363 bp, Glycine max
cttaaaagagcctttgctttttctttaggcctttccgaattaagtacttgtttcattttctctcgaagcaagaaaaatgttcatcgagagtttcaaggttgagagtcctaacgtgaagtacacagagactgagattcagtccgtgtacaactatgaaaccactgaacttgttcacgagaacaagaatggcacttatcagtgggttgtcaagcccagaactgtcaaatatgaatttaaaaccaacacccatgtccctaaactaggggtaatgcttgtggggtggggtggaaacaatggctcaaccctcaccggtggtgtaattgctaagcgagagggtatttcatgggcaacaaaggacaagat

SEQ ID NO: 251099 - DNA, 380 bp, Glycine max
  unsure (1)..(380): unsure at all n locations
ctatttggtttgtagcgttgcgttgttcttgacattgaaggaactactactcccatatcatttgtttccgaggttctcttcccatatgcccgtgataatgttgggaggcatctatctctaacatatgatacccccgagaccaaagctgatatcaagttgcttcgttcccaagttcaaagtgaccttgaacaagggattgcangtgctgtgcctatccctccagatgatgctgggaaacaggaagtcattgctgcacttgttgccaatgtggatgctatgattaaagctgatagaaagatcactgccttaaaagagttgcagggtcatatatggaaaactggctatgagaataatgaattggagggaatagtttatgatga

SEQ ID NO: 251100 - DNA, 341 bp, Glycine max
ggaaagtgttgtttttctttttttcatttgcattgcaaagcaaaaaccttgcaaattgcaatggcttccaacaaggttattgccaccatcttggttctttctctccttgcctactcaacatcattcaccaatgcatgtggcacatgccacccaaaacctactccttctccccctcctccatcaaggaagtgccccaaggacacattgaagctaggggtgtgtgctgatgttctaggacttgttaatgttgttgttggttcccctgtctctagcaagtgttgtgcattgcttgaaggtttggctgattcggaagctgcactttgcctttgcactgctattaa

SEQ ID NO: 251101 - DNA, 394 bp, Glycine max
gacgtcagacgcacgcgtacgtaaactcggaatacggctcgagcaaattagttcattctctttgcgcagttccctacctctcctttcaagatgcagatcttcgtcaagaccctcaccggaaagaccatcacccttgaggtggaaagctctgacaccatcgacaacgtcaaggccaagatccaggacaaggaaggaattcccccggatcagcaacgtctcatcttcgccggaaagcagctcgaggacggccgtagcctcgccgactagaacatccagaaggagtcaacccttcagcttgtccttcgtctccgtggtggcatgcagatcttcgtcaagactctcactggcaaaaccataaccctagaggtcgaaagctctgacaccattgacaacg

SEQ ID NO: 251102 - DNA, 361 bp, Glycine max
ggccaccacagcagctctatccggaaccatggtgagcacctccttcatgaggaggcaacctatgaccaccacaagcctaaagacattccccaacgttggtgaagctctttttggtctgaaaagtggacgaggtggtcgtgtcacttgcatggcctcgtacaaggtgaagctcataaccccagaaggagaagtggagtttgaatgcccagatgatgttttcattgttgacaaggcagaggacgaaggcattgaacttccctactcgtgcagggccggttcttgcgtttcctgtgttggcaaaattgtggaaggtaacgtggaccagtcagatggtagcttccttgatgatgagcaaatagat

SEQ ID NO: 251103 - DNA, 267 bp, Glycine max
gggatatcgaagcgcaagcttcaccggtcgatcctcagacgcaccagctagagatttgtgactttgggagtgcagctctcgtggccggccgggaagcacgcatatcttacatctgctctaagtactatacagcacctgaacttacatctggtgcacctgattacaccagtgtcattgatatttggtcacctggttgtgtacatggtgcactaatgcgtggccaggctctattcccgggtgagattggagtacatcagcttgttgcaa

SEQ ID NO: 251104 - DNA, 381 bp, Glycine max
aggtcgaatctaaaggatcccctcggggaattccaattccacattttcaagaaataaggaggcaaaaatgttcatatatgaattggaattatttgttttcttattaggcctatcctgaagccaaaggaaatgagatcggaattcctcggggaattccaattccacattttcaagaaataaggaggcaaaaatgttcatatatgaattggaattatttgttttcttattaggcctatcctgaagccaaaggaaatgagatcggaattcctcggggaattccaattccacattttcaagaaataaggaggcaaaaatgttcatatatgaattggaattatttgttttcttattaggcctatcctgaagccaaaggaaatgaga

SEQ ID NO: 251105 - DNA, 362 bp, Glycine max
gatccctcggggaattccaattccacattttcaagaaataaggaggcaaaaatgttcatatatgaattggaattatttgttttcttattaggcctatcctgaagccagaggaaatgagatcggaattcctcggggaattccaattccacattttcaagaaataaggaggcaaacatgttcatatatgaattggaattagttgttttcttattacgcctatcctgaagccaaaggaaatgacatcggaattcctcggggaattccagttctacattttcaagaaataacgaggcaaaaatgttcatatatgaattggaattatttgttatcttattaggcctatcctgaaaccaaaggaaatg

SEQ ID NO: 251106 - DNA, 320 bp, Glycine max
gccactctaaagaaaatggcggtgcctctactctcgaagaagatcgtgaagaagagggtgaagaagttcaagaggcctcagagtgacaggaaaatttctgtcaagacaaactggcgcagaccaaagggtatcgattcccgtgttaggagaaagttcaagggatgcactttgatgccaaacattggttatgggtcagacaagaagacccgccactatctccctaatggttttaagaaatttgttgttcacaatgtgaaggacttggaactgctcatgatgcacaacacgacttactgtgctgagattgcccacaatatatc

SEQ ID NO: 251107 - DNA, 381 bp, Glycine max
acgcgtacgtaaactcggaatacggctcgagaagtagttgagaactaagaaggagaagcaaatggcttcctcaatgatctcttccccagctgttaccactgtcaaccgtgccggtgccggcatggttgctccattcactggcctcaagtccatggctggcttccccaccagaaagaccaacaatgacattacctccattgctagcaacggtggaagagtgcaatgcatgcaggtgtggccacgagttggcaagaagaagtttgagactctttcctacctggcagaccttgatgatgcacaattggcaaaggaagtagaataccttcttaggaagggatggattccttgcttggaattcgagttggagcacggtttcgtgta

SEQ ID NO: 251108 - DNA, 330 bp, Glycine max
tgaatagtgatggcacttgccaaggagtgattgccttgaatatggaggatggaacactacatcgtttcaaagctgcttcaacaattttggccacagggggttatggtagagcatacttctctgcaacctcagcacatacttgcactggagatggcaatgccatggttgcacgtgctgggatccctcttgaggatttggagtttgtacaatttcacccaacaggtatatatggagcaggttgccgtatcacagaaggatctcgtggtgaaggtggaattcttaggaatagtgagggtgagcgatttatggaacgatatgcccctactgcaa

SEQ ID NO: 251109 - DNA, 335 bp, Glycine max
tcggggaattccaattccacattttcaagaaataaggaggcaaaaatgttcatatatgaattggaattatttgttttcttattaggcctatcctgaagccaaaggaaatgagatcggaattcctcggggaattccaattccacattttcaagaaataaggaggcaaaaatgttcatatatgaattggaattatttgttttcttattacgcctatcctgaagccaaaggaaatgagatcggaattcctcggggaattccaattccacattttcaagaaataaggaggcagaaatgttcatatatgaattggaattatttgttttcttagtaggcct

SEQ ID NO: 251110 - DNA, 340 bp, Glycine max
  unsure (1)..(340): unsure at all n locations
gtgacggcttgatcgattttgaagagttttgcttgttgacaagtgagtgtgtaggaggggatcatcatgagaaagagggtggtgttatgggaaatgaagacgttgatttgaacgaggcttttgatgtgtttgatanagacaatgatgggcttatttcggtggaggagttagctttggtgcttacttcgttggggttaagggaagggagaaagattgaagagtgcaaagagatgattaagaaggttgatatggatggagatggcatggtcaattttaacgagttcaagagaatgatgatgaatggaggaaagcttgccttcaacgcatagtgattcactac

SEQ ID NO: 251111 - DNA, 388 bp, Glycine max
aaaaaaaattgaaaaaattaaaaaggggcttgtaattggagagacaaatgttcattcaaacaaaacaacttatgatagtaaaagggtagaattcgaaaaaaaaaaattgcagatattacaaagaagaagaaatgctcgattaactcgtaaatcacattcttttttaaaatttttcatgaaaaggatatacagagatatatttctatatatcagttgtattccgaggatcaatatacaactttttcttgaattaacaaaaaaatttttaaataaatccatttacgataatgaagcaaatgcagaaagaatttataaaacaaatcaaagtataattcgctttatttcaattttacacaaatattttcatactagaaatccgaattcacat

SEQ ID NO: 251112 - DNA, 516 bp, Glycine max
  unsure (1)..(516): unsure at all n locations
cgcggatcgttggtggtgtgtatattgatctcttgtaagtagcactcacgtactaccnggagagacaagcttgcatgcctgcaggtcgactctagaggatcccctcggggaattccaattccacattttcaagaaataaggaggcaaaaatgttcatatatgaattggaattatttgttttcttattaggcctatcctgaagccaaaggaaatgagatcggaattcctcggggaattccaattccacattttcaagaaataaggaggcaaaaatgttcatatatgaattggaattatttgttttcttattaggcctatcctgaagccaaaggaaatgagatcggaattcctcggggaattccaattccacattttcaagaaataaggaggcaaaaatgttcatatatgaattggaattatttgttttcttattaggcctatcctgaagccaaaggaaatgagatcggaattcctcggnggtaccgagctcgaattccctatagtgagtcggataaa

SEQ ID NO: 251113 - DNA, 358 bp, Glycine max
gatgggtctctggtccgggtagggcatctggcgcgggatgcaaacaagcttgggacctgtagataccaatccgatcccagtcaatgcattgtcctacaattccaactaagccgaaagtgatggtgatgtacacgcgatgggtgctacgaagcagaaatggactgcagaagaggaacaagcgcttaaagctggagatgtcaagcacggggttggtcaatggctcaccatactgactgatacaaagtccagaggtgtgttatacctgcggtctaatgcggctctcagggatgaatggacaaagctgaacgtgatgtcgactggatggagctctacggatacatgtacgttatgagtctga

SEQ ID NO: 251114 - DNA, 383 bp, Glycine max
acaggggcaacaatgtctgatgatgagaatgaccaagtggatagtgatgccaatctcttcgattgtagttttgatggggcagatagcatggggtttggtcctcttgttcctacagagagcgagaggtccctcatggagcgagtaagacaagaattaaagcatgaactgaaacagggttataaggagaaaattgttgacataagagaggaaattttgcgcaagagaagagcagggaaacttcctggtgacacaacttctgttcttaaagcttggtggcaatcacattccaagtggccttaccctaccgaagaggataaggcaaggttggtgcaagaaactgggttgcaattaaagcagattaataactggtttatcaatcaaag

SEQ ID NO: 251115 - DNA, 417 bp, Glycine max
  unsure (1)..(417): unsure at all n locations
cttttgccagttgctgtaatgagtttcttcaccaaagtggctataattgttggcggtcccttggttggcaaacttatggaccattttccaagagtgtctgcatataattgcttaaccattgttcaggcagcagctcagttgctatctgcagcgatgattattcgtgcccattctgtccaacctacttcattttctacactgcttctgcgtccctggtttgtcatattggtttcagctggggctattgagaggctttgtggagtagctttgggggttgcaaatgagcgtgattgggttgtgctgctggcaggagtgaataggcctattgcattagcacaggcaaatgctgntctaaatcgaattgatctcctgtgtgagatagccgggggcgatgcttgttggattccttctttctaa

SEQ ID NO: 251116 - DNA, 413 bp, Glycine max
  unsure (1)..(413): unsure at all n locations
gtaagcctctcctactatctttaaatccttttgtaccctcagcttccctaagcactagcaccacacaatggtcattgcagcaacccctcttctcttctttcttcttaatttatgcctaagaggcacttatgctgactatggaggtggatggcaaggtggtcatgctacattttatggtgggggtgatgcatctggcacaatgggaggggcttgtggttatggaaatttgtacagccaaggctatggaacccaccactgcagcactcagcactgctctattcaacaatggcatgagctgcgggtcttgctatgagatgaaatgtgacactgaccccanatggtgcctncccggtagcataatcgtcactgccacaaacttcttgcccccttactttgcattggctaataacaat

SEQ ID NO: 251117 - DNA, 405 bp, Glycine max
gtcccatagcagcgatgggaatcgatcttaaagctgggggtaagagcagaaagaccaaaagaacagcaccaaaatccaatgacatctacctcaaattacttgtcaagctttatcggttccttgttcgaaggactggcagcaatttcaatgctgttatactcaagcgcttgttcatgagcaaggttaacaagcctccaatttctttgtcaaggttaattaagtatacaaaggggaaggaggataaaattgctgtaatagtggggactgtaactgatgatatcagagtatatgaagttccagcattgaaaattacagcactcaagtttactgagagagcacgtgcaagaatagaaaaggctggtggtgaatgcttgacatttgatgagcttgcccttaggggctctt

SEQ ID NO: 251118 - DNA, 391 bp, Glycine max
atgagattaggtgtgccaatgaccacaggtggtgcctggcaggttctattgtggtcactgccaccaatttctgtcctccaaacaatgccttgcccaacaacaatggtggctggtgtaaccctgctctacaacactttgacctagctcaacctgtcttcctacgcattgctcagtacacagctggaattgtgcctgtatcctacagaaaggtggcttgtaggatgaagggagggatcaggttcacaatcaatggacactcctacttgaacctagttctcatcacaaacgttggtggtgctggtgatgtgcattctgtttcaatcaagggttcaagaactggttggatgccaatgtcaagaaactggggtcagaactggcagaagcataacta

SEQ ID NO: 251119 - DNA, 412 bp, Glycine max
caaagtctttcttcttgtcattctactactattccaggctttcgcagaagcttcatcaatcactggagtagccaattctcttgagattacaaatgaaggaagtcaaactgtggctctgaataatgaacatatccacctgcacaaaatcaattgcaaccatgaatgttctcgaagatgcagtaaagcatcaaaaaggaagagatgcaaacgagcatgcaagtcatgttgccacacatgccactgcgtaccccctgggacctatggtcataaggaggtttgcccatgctatgcacgcctcaagactcatggggataagcctaaatgcccttgaaattattattgacgggaagtatttttaatatgaaaaagggcattcaaatctatattatttgaatgttcgattaattgaatg

SEQ ID NO: 251120 - DNA, 510 bp, Glycine max
  unsure (1)..(510): unsure at all n locations
cgagtanctcnnnanttagggccactgatctcatggatagacctcagttgagctatcacgtcgcatgcacgcgtacgtaagctcggaaatcggctcgaggtggggaactgttcagaagattgaacccggtttgcgagcttatcaagaagcaagagcttctggtgctgcactctctcattcagcctttatggcccaagtcaacacaaaaataggccctgagtacttgcaatcgatcgggggcgatgacaattcagcagagaatgaaagtgtggttgcttcagagaaaccacagggcgtgaacatacccaagatgctagtcattggtggtgctgttgctcttgcttgtagtcttgataggggactggtgacaaagtatcttctatttggtgttgctagaagatttgccaatataggtaaaagatagttaaaaatagaggtggaagcagcattttcttgaatgccattcttttggacgatccacattacccttttgtgtagtcgcgttattat

SEQ ID NO: 251121 - DNA, 408 bp, Glycine max
ctgcaaagtagaatagcttgcaggacaggaaaccacgtcagttttgcttgtttggacaatggtgttattgagtaggtaccctgattggcaagcacgtgcaagggaggaagtctttcaagtctttggataccaaaaaccagattttgatgggttaagtcgcctaaagattgtcactatgattttgtacgaggttcttagattataccctccggtagctgggatgactcgatctattgaaaaggatgtgaaacttggaaccctaacattaccagctggagtacatgttttacttccaacaattttgattcaccatgatcgcaaattctggggtgaagatgctaaacagttcaatcctgagagattttccgaaggagttctaaaagcaacaaatggtagggtttcattttt

SEQ ID NO: 251122 - DNA, 394 bp, Glycine max
actcactccgcagtacttttatctcggtcaatttgcgggaggaatctgttgccaaaggcaacgtcttctgaagagcgatccactggaggaagtcaatttttcaatgagaaacgcgatggtgtcattatcctctttaacattctccaggattataagaatgagttcgataaaacggtgattgaagacacaaaagaagaagagttgtctgatgatggacagggtctgtcatttgatttgatggataagctcaattttgatacagatgacactggttctattgtcttgtatgggggtggtgccttggtggctctgtggctaacatcagctgttattggtgcaattgattctatcccattgattccgaagttgttggaagttgttgggcttgcatata

SEQ ID NO: 251123 - DNA, 415 bp, Glycine max
ctttccaccaacaagaaagaaaacagagagaaactttcattggataaattttcatcatctcagcaaaagaatcaatcaatcaagccatggcaagcttcaatggcgacgaaaccgctcctttcttcggcttcctcggtgcccctgcggccctcgtcttctcctgtatgggagcggcgtatggaacggccaaaaattggggtggggtggcgtcgatgggagtgatgaggccggagctggtgatgaagtcgatcgtgccggtggttatggcgggagtgttggggatttacgggttgattaatgcggttattatcagcactgggattaacccaaaggctaagtcttactatctctttgatggatatgctcatttgtcctctggccttgcctgtggcctagctggcctctctgctggaat

SEQ ID NO: 251124 - DNA, 422 bp, Glycine max
cactctcaagtggaccttcatttttcatagttacgatcttggtctaacccgcaatataaatatagcagtcgggcacatctgatggaacttgaatgctggtgaaagcacaatacaatatctaggagtttctcggataacttatatcttaaagatcctcaacctcaaccagaagatagaatggagtcgatttcggacccaccctttcacgaggcatacaagatcctgtttgacaagaccagaaacgggaaacaattttgaagagcattaaggagctcttggcggtggccgaggaatgcgacctttccgggatcgatctgagccgtttagaagagagcgatgaagttgtgaaggaagagtgcaagtcacagatagctagggcttcgcaggagtggggtttcttccaggttgtaaaccatgggatt

SEQ ID NO: 251125 - DNA, 407 bp, Glycine max
aatggcaggtgcaggaggagggtatggggacgcgaaccagaggatagactacgtgttcaaggtggtgctgataggggactcggcggtggggaagtcgcagatactagctcggtttgcgaggaacgagttcagcttggactccaagtccaccatcggtgttgaatttcagacaaggaccttggtcatagatcacaagaccgttaaggctcagatctgggacactgctggccaagaacgatacagagcagttacgagtgcatactacaggggtgctgtgggggcaatggtgggttatgacatcactaaacgccaaacctttgatcacataccacgttggttagaagaactgcgcaaccatgctgacaagaacatagtcatcattcttataggaaacaaatgtgatcttg

SEQ ID NO: 251126 - DNA, 414 bp, Glycine max
tgaggaagtggatttctggtgttggtgttgacagtggtgggaagaagcttgggaactcaaaagatggaccttcaacctttgagcaggccaagatgactctggagaagctcttgctggatggtaacatgcttgtccaagaacaagagaatgtcaagagagtccaattggctgacaagtacttgaacgaggctgctcttggaaatgctaacgaggatgctattcagaggggaactttcttccagtcttgaattggaggcaaagcaaacttggcaagtaaatatttctgttcgtgaaggttgttgtactaatccaagtgctagaagttgtgatggaacttgcgtgtaacattcttagcattctcaatgtcttaagtgcaaagagaagatgctaaagttgagatgatcttactatatt

SEQ ID NO: 251127 - DNA, 393 bp, Glycine max
ttggggaattccaattccacattttcaagaaataaagaggccaaaatgttcatatatgggattggaattatttggtttcttattaagcctatcctgaagccaaaagaaatgagatcggaattcctcggggaattccaattccacattttcaagaaataaagaggcaaaaatgttcatatatgaattggaattatttgttttcttattaggcctatcctgaagccaaaggaaatgagatcggaattcctcggggaattccaattccacattttcaagaaataaggaggcaaaaatgttcatatatgaattggaattatttgttttcttattaggcctatcctgaagccaaaagaaatgagatcggaattcctcgggggtaccgagctcgaattc

SEQ ID NO: 251128 - DNA, 510 bp, Glycine max
gagtgtctcgatgtttgggccctgcccctccgttcgattctgatagacaagcctgcatgcctgcaggtcgactctagaggatccccttggggaattccaatttcacattttcaagaaataaagggggcaaaaatgttcatatatgaattggaattatttgttttcttattaggcctatcctgaagccaaaggaaatgagatcggaattcctcggggaattccaattccacattttcaagaaataaggaggcaaaaatgttcatatatgaattggaattatttgttttcttattaggcctatcctgaagccaaaggaaatgagatcggaattcctcggggaattccaattccacattttcaagaaataaggaggcaaaaatgttcatatatgaattggaattatttgttttcttattaggcctatcctgaagccaaaggaaatgagatcggaattcctcggtggtaccgagctcgaattccctatagtgagtcgtattaaatttcgaatca

SEQ ID NO: 251129 - DNA, 379 bp, Glycine max
caagtgatttctcaaatcttcccacaccgaggtccgagggtgaaatcttgtcttccccaaatcttaaggcctttacctttaacaagctaaagaatgccaccaggaactttcgccccgacagccttcttggtgaaggaggatttggttatgtttacaaggggtggattgatgaacacacacttacagcttcaaaacctggatcaggaatggttgttgctgttaagaaactcaagcctgaaaggttacagggtcataaggagtggctgactgaagtggactaccttggacaacttcaccatcagaatctggtaaaaatgattggatattgcgttgaaggagagaatcggcttgtgggatatgagtttatgttcaaagggag

SEQ ID NO: 251130 - DNA, 391 bp, Glycine max
  unsure (1)..(391): unsure at all n locations
caagtgatttctcaaatcttcccacgccgangtcctggagtgaaatcttgtcttccccaaatcttaaggcctttacctttaacaagctaaagaatgccaccaggaactttcgccccgacagccttcttggtgaaggaggatttggttatgtttacaaggggtggattgatgaacacacacttacagcttcaaaacctggatcaggaatggttgttgctgttaagaaactcaagcctgaatggttacagggtcataatgagtggctgactgaagtggactaccttggacaacttcaccatcagaatctggtaaaattgattggatattgcgtggaaggatagaatcggcttgttgtatatgagtttatgttcaaaggtaacttataaaatca

SEQ ID NO: 251131 - DNA, 518 bp, Glycine max
  unsure (1)..(518): unsure at all n locations
ggggtactcanttatttgagggactgatgtcntaagncagcncgatcnagtagacactatagaagagctatgacgcctcatgcacgcgtacgtaatctcgagcttcgcttagaaggaccaactattatggtcttaatgtgtggtggtcccgtggatataacttttgcaaagaataaccctcgaattgtgggtattctgtgggctggttatccgggccaagctggtggtgctgccattgcagatatcttgtttggaacagctaacccagggggaaagctgccagtaacatggtacccagaagagtacctaacaaagttaccaatgacaaacatggcaatgcgagcgaccaaatcagcacggtatccaggaagaacgtatcggttctacaatggtccaatggtgtatccatttggacacgggttgacatacacacactttggtcatacactaacaagtgctcccacagtggtgttagttcccttgaatggtcaatgccgtgcccatggtaccaatatttg

SEQ ID NO: 251132 - DNA, 369 bp, Glycine max
attttagaagaataccccctcttttgctgcatcagaggaggtgtaaattaagagcatggctgcacaagctcttgtatcatcatcttctcttaccttctcagcggaggctgcaagacaaagtcttggaccaagatcactccaatctccatttggcttctccagaaaagcctcctttcttgttaaggcagctgctaccccccctgtcaagcaaggatcagacaggcctttgtggtttgcatcaaagcaaagtctttcttacttggatggcagccttccgggtgactatggatttgaccctctgggactttcagaccctgaaggaacaggagggttcattgagcccaaatggctagcatatggtgagataat

SEQ ID NO: 251133 - DNA, 411 bp, Glycine max
ctcacaaaggtgctgatgataaagcctaccgttgtgtttttgaggaggaagacaaagaaggtaaagtggggatttcccttcagaaggatctcatggctattgcaggtgaggctctcaagtctaacattactaccatgggtcctctcgtgcttccggcttcggagcagttgctcttccttctcactctcattgggaggaaaatcttcaaccccaaatggaagccttatattcctgacttcaaacaagcctttgagcacttctgcatccatgctggtgggcgtgctgtgattgatgagctgcagaagaatcttcagctttcggctgaacatgttgaggcatctagaatgacccttcacaggtttgggaacacttcctcttcttcgctgtggtatgagctcaactacattgagt

SEQ ID NO: 251134 - DNA, 385 bp, Glycine max
  unsure (1)..(385): unsure at all n locations
agctgccttaaagggaccaactattttgggcttaatggctggtggtcccgtggatataacttttgcaaagaataaccctcgaattgtgggtattctgtgggctggttattccggccaagctggtggtgctggcattgcagatatcttggttggaacaacttacccaaggggaaagcttgcaagtacaatggtcccaaaaaaagtcctaacaaagttaccaatgacaaacatggcaatgcgagcgaccaaatcagcagggtatccaggaagaacgtatcggttctacaatggtccagtggtgtatccatttggacacgggttgacatacacacactntgttcatacactagcaagtgctcccacagtggtgtcagttcccttgaat

SEQ ID NO: 251135 - DNA, 382 bp, Glycine max
ctttaacctcttaaagaccgggtcccttgctttggccattattgtcacaggctttactttacaagatggaacctttcactacctggaaaggcctggtcttctggtgggctacaatggtaattgggcatgcttctttgtacaaagaacaccctttaataaccaagctgatgttactaacatcacacttaaaccagccactaatgcagttttaagcgcttaattagtaggctttggcctatttgttgtccttttctgagatgaagaatggtggcatcgatccaaacccaaaatcagattcaaattcaatggattggttattgtttcattctgatcacattgtcatatccataaagaagggggaaaaaaaaagttagcactttgc

SEQ ID NO: 251136 - DNA, 399 bp, Glycine max
atcgatactccaatatagactacaacataactggcggtagaaggtatcccatacctgacaaatcagcacctatttacataacaatcggagatggaggaaatctagaaggtcttgcctcaagttatttggatccacagccagaatattctgcattcagagaagcgagctatggacacgccacactggagataaaaaacaggacccatgctatctaccactggtatcgcaatgatgacggaaagaaagtcccagctgactctctcgtattgcataaccagtattggggaagcaatggaagaaaacagaatgaggttattgatgaagttgtcaatgttaaatgaagttggagcactcgtaaatcgtaaatatggtgttttgaaaagaataaaaatgtgccta

SEQ ID NO: 251137 - DNA, 378 bp, Glycine max
tctatcacaccacatgcactcttacataatctcacatattccctctaaatcacaacttcaatatatactacaacgtatctttacaggacaatatatcccataccttacctatcaactcctattatacataacaatcctacatctatgctacatatatattcttacctccatttatttacatccacaaccataatattctccattcatataatccatctatcaccactccacactccacttaaacaacattacccactctatctaccacttttatcctatttattacccatataaaatatcaactaactctctatcattccataaccattatcatataaacattcaattaatacattattattttattcataacacatt

SEQ ID NO: 251138 - DNA, 366 bp, Glycine max
gtcttcctgagggttactccactaaagtaggtgaaagaggagtgcaactatctggtggccaaagacaaagggtagccattgcaagagctgttctaaagaaccctgaaatcttgctacttgatgaagccactagtgcacttgatgtcgagtcagagcgtattgtgcagcaagcattggacagattaatgcagaacagaacaacaattatggtggcacataggctatccactataagaaatgcagaccaaatctcagttttgcaagatggaaagataattgatcaagggactcattcaagtcttatagagaataaaaatggagcatactataaattagtcaaccttcaacaacagcatcaattatagc

SEQ ID NO: 251139 - DNA, 389 bp, Glycine max
gtgccggtttggaatctatgaccactaatccaatgggatgggatggatcagtgaatcctaaggtaaaaatgtttgaacaagcacaaaactgccttcttcctatgggaattacctctgaaaatgttgcacagcgctttggggtttcaaggaaggaacaagaccaggctgcagttgagtctcacaggcgagctgctgcagctactgctgctggtaaatttaaagatgaaattgtcccagttaccaccaagattgtggacccaaaaaccggtgaggagaaatctgtcaccatttctgttgatgatggaattcgacctggcacaacagtgtctgatctaggaagactcaaacctgtgttcaagaaagacggaagcaccactgctggtaattct

SEQ ID NO: 251140 - DNA, 402 bp, Glycine max
agaaaccagtgactgacttttcgagaaagaaaaacaaaaatgagtttccgtcattccatcatgaacgctcttcccattctcctcttcttcctcttcgtttctgcattagtttctgcgaagaaaactggtgatgtgacggagctgcaaattggcgtgaagcataaaccagtatcatgtgaagttcaggcacacaaaggtgacagagtcaaagtacactatcggggaaaactcactgatggaactgttttcgattctagctttgaaagaaataatccaattgaatttgagcttggtactggtcaagtgatcaaaggttgggaccagggattattgggaatgtgtcttggtgagaagcggaagctgaaaatcccatcaaaactggcttttgaaaagcagggttcc

SEQ ID NO: 251141 - DNA, 382 bp, Glycine max
tgtaaattaagagcatggctgcacaagctcttgtatcatcatcatctcttaccttctcagccgaggctacaagacaaagtcttggaccaagatcactccaatctccatttggcttctcaagaaaagcctcctttcttgttaaggcagctgctactccccctgtcaagcaaggatcagacagacctttgtggtttgcatcaaagcaaagtctttcctacttggatggcagccttccgggtgactatggatttgaccctctgggactttcggaccctgaaggaacaggagggttcattgagccgaaatggctagcatatggtgagataatcaatggtcgttatgcaatgttgggtgcagttggtgcaatagcacctgaaattct

SEQ ID NO: 251142 - DNA, 384 bp, Glycine max
cacattcttcatcacttcattcaacagttctacccttagcttgtttcaccaatggctgctgcggttcgtgctgcagactgttttccatccaccaagtctacctctcttgcaagcaggacctccctcattgccccagagagagttgacttcaagatggcttcattgcataacagatatgtatctagcagtggacggctagttcccatcagagctcaggtcaccactgaggcaccagccaaggttgaaacagagtccaagatacaggatgcacgtctggttgtgaacatgcttaaacccacgaccctttacattggtagatgcctgctcagcacacagatcactgtgcatgatgctccaggagagacttggcacatggtcttcatc

SEQ ID NO: 251143 - DNA, 413 bp, Glycine max
ttttgacacatggggagcggggatcactggtccagtgatattgaaaggtttggcaaatggcaacacacttgatctctcctaccagaagtggacttatcaaggtggcctcaaaggggaagacttaggtctgtctagtggaagttctggacagtggaattcacaatctaccttccctaagaaccaaccattgatttggtacaagacaacctttgctgctccatccggcagtgatccagttgcaattgacttcacggggatgggaaaaggtgaggcttgggtgaatgggcaaagcatcggacgatactggcctacatatgtggcttcagatgctggttgcacggactcatgcaattatagaggaccttacagtgcatccaaatgtcgcaggaattgtggaaagccatcacagacac

SEQ ID NO: 251144 - DNA, 368 bp, Glycine max
cgaaagcatggcttccctggcggcttccaccgcggctatgtgagaaatccttggaaaccccgttaacctcagatgcgcaaccaggtctgctccatcaccaactacacctgccaccttcaagaccgtcgcacttttctccaagaagaagccagctccacctccaaagaaaaagcctgccgctgtatcccccgccaatgaggaactcgccaagtggtatggtcctgacagaaggatcttcttgcctgagggtctcttggaccgatctgagatccccgagtacttgaccggagaagtgcctggagattatggttatgatccgtttggtcttagcaagaagccagaggacttcgccaagtaccaggccgttg

SEQ ID NO: 251145 - DNA, 332 bp, Glycine max
tcggggaattccaattccacattttcaagaaataaggaggcaaaaatgtggatatatgaattggaattatttgttttcttattaggcctatcctgaagccaaaggaaatgagatcggaattcctcggggaattccaattccacattttcaagaaataaggaggcaaaaatgttcatatatgaattggaattatttgttttcttattaggcctatcctgaagccaaaggaaatgagatcggaattcctcggggaattccaattccacattttcaagaaataaggaggcaaaaatgttcatatatgaattggaattatttgttttcttattaag

SEQ ID NO: 251146 - DNA, 382 bp, Glycine max
gcaagggctttgttctttggacaaaatgaaggaaaggatgccttgttttatgggaaccctaaccttcttattacaagttggatgagcatgccaatgcacgaagcagattttggctggggaaagcctgtgtatttaggtctaggaagtgtatctacacaagatagggcactgattattcaaagccctgatggtgacggctctattattctgtccatacactttcagatggaacatatgcagcttttcaagaaatatttttatgaagatatgtgaactatattcacatcgctactatcttgaacttcttgtatggaagcttaatttacgtgtgatctgcaatttctcatgtttaataaatttagttaaccatgtgggttaacta

SEQ ID NO: 251147 - DNA, 402 bp, Glycine max
tcggggaattccaattccacattttcaagaaatagggaggcaaagaggttcatatatgaattggaattatttgctttcttattatgcctatccttaagccaaaggatatgagatcgcaatttctctgttatctccttctcctcatcttttttatccattatttctttttttttctttttatattttgtcttcttttttctcttattttttctatttcctttcttattttcatttttcttttctcttctttatctttctttttttttacttatgttgtttttttttctttctttctttatttttatatttatatttttttctttttttttttttctactatctcttatttttattattttatattttttttcttttttttctttttattttttcttatttttt

SEQ ID NO: 251148 - DNA, 361 bp, Glycine max
gttttatccgaaagcaagcattatcagaaacagaaagaaagaataagaggttgcagcaacaatggcagccatggctgcgcttcagagctcaatggtcggtctctccctctcctccaactctttcttaagccaacgcctttctcccatcaccctcccctctcttcttccgggtaagtcaacagagaagcaatgtcctattgtaatgaggcttaaacgatgggaacggaaggagtgtaaaccaaacagccttcctatcttgcacaaaatgcatgttaaacttggagatacggtgcaagtcatatctggacgtgaaaggggtaaagttggggagattactaaaatcttcaagcataacagcact

SEQ ID NO: 251149 - DNA, 392 bp, Glycine max
ctcgccgactcggttgctatcagcgagtgagagtgagtgagtggttctcttgcagcaacaaggtttagtgacaccaaacagactggaaatgggtcgtggggtcagtgctggtggtggacagagttccttggattatctctttggcagtggggtacctgccagcagtgcaaatggtgctcgcactcaaaatgcaagtgctccttcaccaccggttgataagcaaagtccagcaccagcagcagcagcagcacctgcacctgcagcagcagcagcaccagcacctgcaccagcaccagcaccagcaccagctgataagcaaattccagctggaattcctggaagtctcaaaaacaattaccatcgcgctgatgggcaaaactgtggcaactttc

SEQ ID NO: 251150 - DNA, 514 bp, Glycine max
  unsure (1)..(514): unsure at all n locations
catattgnatttccggatagaggactaattnactactccgagagacaagcttgcatgcctgcaggtcgactctagaggatcccctcggggaattccaattccacattttcaagaaataaggaggcaaaaatgttcatatatgaattggaattatttgttttcttattaggcctatcctgaagccaaaggaaatgagatcggaattcctcggggaattccaattccacattttcaagaaataaggaggcaaaaatgttcatatatgaattggaattatttgttttcttattaggcctatcctgaagccaaaggaaatgagatcggaattcctcggggaattccaattccacattttcaagaaataaggaggcaaaaatgttcatatatgaattggaattatttgttttcttattaggcctatcctgaagccaaaggaaatgagatcggaattcctcgggggtaccgagctcgaattccctatagtgagtcgtattaaattcgtaatcatgtcata

SEQ ID NO: 251151 - DNA, 361 bp, Glycine max
atcactttcttcaccggtcggtctttctttcttccctggacaaaacatgggtttggccaatcagcaaaccgtcgattaccccagcttaaagctgcatcgccgcgacggggcacaggaaaacaccttcgtgagaggcatctcactggtgaatcgagaagaaatatgaaccgaccattggtgtgaaggttcatccgttggattttttcacgaactgtggaaagattcgcttctattgttgggatactgctgggcaagagaagtttggtggcctcagagatggatattatatccatgggcaatgtgcgattatcatgtttgatgttactgcccgtctaacatacaaaaatgtccctacctggca

SEQ ID NO: 251152 - DNA, 389 bp, Glycine max
gtcgatggtttcaagcatgttctggtgtcgaatcgtgatggcagattcgcacgcaatgggaattggaaggagaagcgatcgcggattgacgatcgtgtgttcgtctaggccgcacaagaaagcgaccgcgcatcacatgaagactcggacttggaagacgcaggcatgggatagaaaccgtaagcccaccgtctacgatccacttactcctgttcctactgatcggaccctcgatattcccgctgacgcttcttgtgctgccgttacgcctccgcctccaactccctatgcctagtcactgtctcggtactctctgtcgatatcatgtagtcttatctttaactccagcagcttgtctgtcatgattgcatgtcagatcaaaccttgat

SEQ ID NO: 251153 - DNA, 512 bp, Glycine max
  unsure (1)..(512): unsure at all n locations
agagtaanctcgnntcgttgcgcttattgatctcttagtaaggagtctcatagaactatcacgtcgcatgcacgcgtacgtaagctcggaattcggcttgaggcccacaagggtatcctccagctgggtaccctncacatgaaggctatcctgctgctggttaccccccagctggttatcctggttcatcacatgcaccaggttctcatgggcacggcggtatgggagcaatgctcgctgggggtgctgctgcggctgctgctgcttatggtgctcaccatgtctctcatggctcccatggctcctatggccaatatgcacatggtgctcacatgccacatggaaaattcaagcagcacgggcacggtaagttcaagcatggaaagcatggcaagttcggcaagcatggaaagcatggcaagttcggcaagcatggtggattcaagaagtggaagtgatgaatatgtatctatgactccaaaatgctgctctgggtaaaacctaataatgct

SEQ ID NO: 251154 - DNA, 389 bp, Glycine max
ctcgctcgcactgtccagatcttaatgcaagaggagtgagttttgtttttccagccatgacgccgctgatcctgcatgctgggaaaaccaacaaaaattcttacaagacactcattgcagccgagtatgctggcgtccaagttgattttgcccctaattttgagatgggtgtctccaataaaactcctgaatttctcaagatcaatcctattggcaaggttcctgtgctggaaacccccgatggtccaatattcgagagcaatgccattgctcgctatgttacccggctgaaaggtgataacactttgtatggatcttccttgattgaatatgcccacattgaacagtggattgatttttcatcattggagattgatgctaataatatc

SEQ ID NO: 251155 - DNA, 313 bp, Glycine max
aagctcggaattcggctctagctcgctcgcactgtccagatcttaagcgagaagaatagcttttgtttttccaggcatgacgccgctgatcctgcatgctgggaaaaccaacaaaaattcttacaagacactcattgcaaccgagtattctggctttcaagttgattttgcccctaatttttagatgggtgtctccaataaaactcctgaatttctcaagatcaatccttattggcaaggttcctttgctggaaaccccctatggttcaatattccataaccatgccatttctcgctatgttaccccgcttaa

SEQ ID NO: 251156 - DNA, 376 bp, Glycine max
  unsure (1)..(376): unsure at all n locations
agcagagcttgtatacgtcgccgcttcagcgtagcaagatgatcattcccgagaagaaccgtaaagagatctgcaaatacctcttccaagagggagtttgctttgcgaagaaggacttcaatctggcgaagcacccggagattgatgtgccgaatctgcaagtgataaagctgatgcagagcttcaaatccagagagtacgtgagggaaacatttgcgtggatgcactattactggttnctcaccaaacgatgaattgagttccttaagacttacttcaaccttncatccgaaattgtccctgccactctcaagaagcaggccaagcccgncggaagaccattcggtggcccacccggtgatcgccccaggggccc

SEQ ID NO: 251157 - DNA, 401 bp, Glycine max
caaaacaaaagccatagattgttacttctcttcgcctgttgctttgcaattgtcaccaaacaattcttgcttagctctcacaagcaagcattatcaacaatgaagaaaattgtgttaaaggtggacttacatgatgacaggatcaagcgaaaagctatgaagacagcatctggcctttcgggggttcaatcagtttctgttgacattaatgacaagaaaatgaccttattgggggatgttgatccagtgagtgcagtgtcaaagctacgaaagtggtgtcacactgaaatagtctcagttggacccgcaaaagaggaaaaggagaaagagaaagtggagccagcaaaagaacctgttcccctcaagctctatgatgcctatcccttttattatcatatgac

SEQ ID NO: 251158 - DNA, 410 bp, Glycine max
caatcgcggttcccatcatcaaagaggtcgatttgtacaagtttgatccatggcagcttccagaaattggctactacggcgagaaagaatggtacttcttttctcctcgggatcggaaatacccgaacggttcacggccgaaccgtgccgccggaagcggctattggaaagccaccggcgccgataaggcgatcggaaaaccgaaagcgctagggatcaagaaagctctggttttttacgccggaaaagcccccaaaggagtgaaaaccaattggatcatgcacgaatatcgcctcgccaatgttgaccgatctgcctccaagaaaaacaacaacaacttgaggcttgatgattgggtgttgtgtcgaatctacaacaagaaagggaagattgagaaatacaacacgacc

SEQ ID NO: 251159 - DNA, 260 bp, Glycine max
actcccttctcttcacacattttcttaactctcttcaagaatccctcttgttcacactttcagattgggtgaaaatgggggctggtggccgaactggtggtcctcctggcaacaggaagtcagaagctgaccctttgaagcgggtaccatttggaaaacctcagtttagtctcagccagattaagaaagccattccacctcactgtttccagcgctctggtctccgctcattctcctatgttggttatgacctcaccata

SEQ ID NO: 251160 - DNA, 308 bp, Glycine max
cggaaatccgctcgagaatccctgctctttacaaattttcctaaatatataccggaatccctcaggttcacactttcagattgagggaacattgttgcctgtagcccaactgatggttctcctgacaacacgaattcacatgctgccctttgaagcgggcaccatacgaaaaacctgagcttaggcttaggctaactaaaaaagccattaaacctcactgtttccagcgctctggtcttcgatcattctactatgctgcttatgacctcaccatacccttctacctctatcatgttgccacccattac

SEQ ID NO: 251161 - DNA, 376 bp, Glycine max
  unsure (1)..(376): unsure at all n locations
agcccaagccctatacaaccaaaccctaacacacaccgatttgattcagtttccatggctagcctcaaggttgcatttttggctgcagtgctctgcatggttgtggtgagtgcacccatggcacatgcagctatcacgtgcgggcaggtgacgagtagcctggccaattgcatcggttacctccagaagggaggaacgccgtcgtcgggatgctgcaacggagtgaagagcctcaatgccgccgtcaagaccaccgccgaccgccagacggcgtacaactgcctcaagtcggccgccagccaaatctccggcttcaacgccaacaacgccgnctcgctccccggcaaatgcggagtctccatcccctacaagatca

SEQ ID NO: 251162 - DNA, 363 bp, Glycine max
  unsure (1)..(363): unsure at all n locations
gttcatactggtgatattggatactttgaatctgatgggtatttgcatctcgtgggtcggatcaaggaactcatcaaccgaggaggtgaaaagatatcaccaatagaagtggatgctggtcttctttcacatccagaaattggtcaagcagttgcttttggagtgcctgatgccaagtatggagaggagatatattgtgctgtcatcccaagagaaagatcaaacgttgatgaggcagaagtgctaagatttagcaagaccaatcttgcatncttcaaagtaccaaaaaaggtcttcattactgattctttacccaaaactgccacaggcaagattttgcgccgtcttgtggcagaacacttt

SEQ ID NO: 251163 - DNA, 370 bp, Glycine max
cgaaaggggggaaaatataattaacaccgatttcgcgaccaattcttcttctgcgttgaattgggacaacgagaaattggatctcagtttttggcaggaaataaaaattgcatttgagtgtaaaataacagagtatagtgtagggccttggtcttgatactgggctaaatttggtggatggcggagaaatcatgcatcaagcgccttcagaaggaatatagagccctttgtaaagagccagtttctcatgttgtggctcgtccttctccaagtgatattcttgagtggcattatgtgttggaaggaagtgaaggaacaccttttgcaggtggatattactatggaaaaatcaagtttcctcctgaatatc

SEQ ID NO: 251164 - DNA, 420 bp, Glycine max
  unsure (1)..(420): unsure at all n locations
gtttggattggatttctaatctaatctatacctttctttttgctatgcttttaaggcacaaatccttctcccttctctcttctttcttcttcttctcctgacccttattattattccttgcccttaccctttaggcaagggaaggaagaaagaataactatattattatctttattgtaatctatctttttattataattataattataattattgttgttattattccttaaatatggattcgccgtgtctctccaacgattcggtttctggattcaaagacaaggagtcaatggttgacccctttttggtcgaggctctccagaaccctcgtcaccgcctcaccattttgaggatggagctggagatccagaagtttttgaataatgctgatcagctgcattntgagtttcatcattt

SEQ ID NO: 251165 - DNA, 324 bp, Glycine max
tcggtgaattccaattccacattttcaagaaataaggaggcataaatgtgcatatatgaattggaattatttgctttcttattaggcctatcctgaagccaaaggaaatgagatcggaattcctcggggaattccaattccacattttcaagaaataaggaggcaaaaatgttcatatatgaattggaattatttgttttcttattaggcctatcctgaagccaaaggaaatgagatcggaattcctcggggaattccaattccacattttcaagaaatcaagaggccaaaatgttcatatctgaattggcattatcatgttct

SEQ ID NO: 251166 - DNA, 335 bp, Glycine max
atattaccattcctgcagtgatagctttcggagattccatcgttgacccgggcaacaacaacaaggttaaaacactggtcaagtgcgatttcccttcttacggtaaagattttgagggagggatcccaaccggtcgattttgcaacgggaaaattccatcagatttgctagttgaagaactgggtattaaggagcttttacctgcttatttggatccaaatcttaaaccaagtgacctagttaccggagtctgctttgcttctggtgcttccggatacgatcctttaacgccaaaaatagcgtcggtgatatcaatgtccgaacaactagacatg

SEQ ID NO: 251167 - DNA, 506 bp, Glycine max
  unsure (1)..(506): unsure at all n locations
cgagggtgngttccccttttagttccctccagtaacaccacagaagagctatgacgtcgcatgcacgccttccttaacctgggatttcggttgaggcgcacgctttcgtgaaaaaactcaattttcgtcgttcagggcactctcttctcgatgtttttccaaatccaaattgatctatggcagtcaaatacttgtacaaaaggagcatgctattccagttcgtcactttgctaaagagtctgacccttctggccttaagggagaccagatgctggagaacatttttgtggaggtgaagaaccaatttgagaacggcctaggaatttttaagaaggaggaaattaccattgaccccgaagaatccagttgtggttgttaattatccaaaggtattgaaaccatttagagagaaggcaagctaattgccggagtcccaggacatactatccaccattgaaattgagacacaggatattccagatgctcgaacctatcttctgactttn

SEQ ID NO: 251168 - DNA, 372 bp, Glycine max
  unsure (1)..(372): unsure at all n locations
ttatttgattggtgtgcatccatgttaagctagtggcgatcggatccagctacagcctacaacctacagatcaaggaaggaagatgttgggtgttataaggcacaagagtattcgccccgccttctccgcaatcagacacttctcttctgcagctaaagagattactgtcagggatgctctcaactccgcactcgatgaggaaatgtcagctgatcctaaagtcttcttgatgggtgaagaggttggggaatatcagggtgcatacaagatatccaaggggctgctcgacaagtatggccccgagagggttctcgatactccaatcactgangctgngtttgctgggattggagttggcgctgcttactatg

SEQ ID NO: 251169 - DNA, 397 bp, Glycine max
gtgtggttcaaagctggagcccaaatattctcagaaggtgggcttgactatttggggaacccaaaccttgtccatgcacaaagcatcctggcagtgctgggcttccaagttatcctaatgggccttgttgaagggtaccgcatcaatgggcttgatggggtgggagagggcaatgacctctaccctgggggccagtactttgacccactgggccttgctgatgacccagtcacttttgctgagctcaaagtcaaggagatcaagaatggaaggctggccatgttctctatgtttggattctttgttcaagctattgtcactggaaaaggcccattggagaacctcttggaccaccttgacaaccctgtggctaacaatgcttgggtctatgccacta

SEQ ID NO: 251170 - DNA, 379 bp, Glycine max
ctcagactgagcagagacacacacacacatcctaatcgggaagcgttggccatggcaaacatgattggggcttccaccaaacctctggttccagtctgcaccagttcccgttcccccacacccaaagtccccattcttcaaatttcacttcccaaagccccaaccttggaactgaaacttccgatttcaaagccccagatgctgtccccttcttggagggatagcaccactggtcttggccagacccttcctcgcagaagaaattgagaaagcagcactctttgacttcaacctcacccttcccataataatggtggagtttctgccgctgatggttgccttggacaagatatggttcaccccgcttgggaaattcatg

SEQ ID NO: 251171 - DNA, 380 bp, Glycine max
ctaactcagagactaaaccataccaaaaaaaacaacatgtgggccgcagagaaggacgggatcatgctcttcggcgtgcgcctctccgtcgtggataaccaccccacctgcttcagaaagagcgctagcatgaccaacctttcttagtccgagtctccaccaccgcacgatcccaacgcagggtatgcctcagacgacgtcgttcacccctcccgtcacacccgcgaacgcaagcgaggggttccgtggacggatgaagagcacaggttgttcctgctgggattacagaacatcggtaaaggagattggagagggatttctagaaacttcgtgaagactcgtacgcctacacaggttgctagtcatgctcagaagtactt

SEQ ID NO: 251172 - DNA, 402 bp, Glycine max
cagtgcttgtgctgcttttgtccttttgccacgcttaagatcacccaagagagaacctaagacacacaacacaacacaaacacacagagttagaggagaaatcatcatggcatcagcagcatctgggtttgtgttgtcacttaatgttgcagctgccaccacaaactcaagggtggtcatgttcaacacaaagaacaacgcttctaggcttgttgtaagggcttcagatgagcctgcagcggcggcacccggcaacgccacacccccagctgaagctgaagctaaaccaaagccaccacctattggccccaagagaggtgctaaggtgaagattcttaggaaggaatcttactggtacaaaggcactggttcagtggttgctgttgatcaggaccccaacac

SEQ ID NO: 251173 - DNA, 400 bp, Glycine max
aatggcatgttcaagaggagggtatggtgactctaaccagatgatagactacgtgtggcaaggtggtgctgatacgggactcagctgtcgggaagtcgcatatactaactcggtttgctatgaacgagtttagcttcgactccaagtccaccatcctcgttcaatttcacacaatgaccttggtcatagatcacaagaccgttaacgctcatatctggtacactgctggccaataacgatacacagcagctactagtgcatactacaggggttctgttctagcaacgttggattatgacatcactaaacgccaaaccttagatcacataccactttggttagaaaaactgcacaaccatgctgacaagaacatagtcatcattcttattggaaacatatg

SEQ ID NO: 251174 - DNA, 520 bp, Glycine max
  unsure (1)..(520): unsure at all n locations
gaggcgtgatgtctgcgcctacgctcactaccgctactcccnggagagacaagcttgcatgcctgcaggtcgactctagaggatcccctcggggaattccaattccacattttcaagaaataaggaggcaaaaatgggcgatatatgaattggaattatttgttttcttattaggcctatcctgaagccaaaggaaatgagatcggaattcctcggggaattccaattccacattttcaagaaataaggaggcaaaaatgttcatatatgaattggaattatttgttttcttattaggcctatcctgaagccaaaggaaatgagatcggaattcctcggggaattccaattccacattttcaagaaataaggaggcaaaaatgttcatatatgaattggaattatttgttttcttattaagcctatcctgaagccaaaagaaatgagatcggaattccttggggggtaccgagctcgaattccctatagtgagtcgtattaaattcgtaatcatgtcatt

SEQ ID NO: 251175 - DNA, 280 bp, Glycine max
actctactaccatgcctgcacgtctactctatatcatcctctcgctcaattccaattcttcattttcaagaaattattattcaaaaattgtcatatattaatcttttgtgtatttttttcttattatgtctatcctgaatccaaattaaattatatcataattcctcatttaattccaattccacattttcaataaataactattcataattattcatatatcaattctaattattttttatcttattatccctatccttaatccaaattaatatatatc

SEQ ID NO: 251176 - DNA, 510 bp, Glycine max
  unsure (1)..(510): unsure at all n locations
agggcgtanagtacagatgatgcataccaatcngtacttcaggagagacaagcttgcatgcctgcaggtcgactctagaggatcccctcggggaattccaattccacattttcaagaaataaggaggcaaaaatgttcatatatgaattggaattatttgttttcttattaggcctatcctgaagccaaaggaaatgagatcggaattcctcggggaattccaattccacattttcaagaaataaggaggcaaaaatgttcatatatgaattggaattatttgttttcttattaggcctatcctgaagccaaaggaaatgagatcggaattcctcggggaattccaattccacattttcaagaaataaggaggcaaaaatgttcatatatgaattggaattatttgttttcttattaagcctatcctgaagccaaaggaaatgagatcggaattcctcggtggtaccgagctcgaattccctatagtgagtcgtataaaattcgaaatag

SEQ ID NO: 251177 - DNA, 503 bp, Glycine max
  unsure (1)..(503): unsure at all n locations
cagggtgngttcganctcacttgttttaggacatctataagagctatgacgtcgcatgcacgccttcctaaacctggaaattcggttcgggcttcgttggttcccaactcttgattcaaagaaatcatgggaggaaagctgcatgcaaagcaatccctgttccaataagatgtgagcaaagtacccaacaagggaatggtctggatgtgtggctaggcagactagccatggttggctttgcagtagcgatcactgttgaaatttctactggaaagggactcctagagaacttcggagtcccaactccactgcctacagttgcccttgcagtaacagcactggtgggtgtcttgacagcagtttttatcttccaatcagcctcaaagagctgattacatgtttaggctggttgtgattgttgtaaattcttaagctgggaagtttcaattttcaagataaaatttatctttttgtatcctgtaataattggttggtggaaagaa

SEQ ID NO: 251178 - DNA, 414 bp, Glycine max
aaacactcataacacaaagcacaaagcaaagctcatccttgagttaaaaaatggcagcagcttcttccatggctctctcatccccatccttggctggcaaggccgtgaagctgggcccatcagccccagaagtgggaagggtgagcatgaggaagaccgtcaccaagcaggtctcctcaggaagcccatggtacggcccagaccgagtcaagtacttgggcccattctctggcgagcccccgtcctacctaaccggtgagttcccaggcgactacggctgggacactgctgggctttccgcagacccagaaaccttcgccaagaaccgtgaactcgaagtgatccactccaggtgggccatgctcggagccttgggctgcgtcttcccggagttgctgtcccgcaacggggtga

SEQ ID NO: 251179 - DNA, 416 bp, Glycine max
ccagcttatcggactcccaagtgtgttaaaaagtgtgtaagtggaaaccaagtttggaagaagtcaaagcactatagtgttagtgcatacagagtcaactctgatccccatgatatcatggcggaagtttacaagaatgggccagttgaagttgcatttaccgtttatgaggattttgcttactacaaatcaggagtttacaaacacatcactggttatgaactaggtggtcatgcagtaaagctaattgggtggggaacaactgatgatggggaggactattggcttcttgcaaatcagtggaacagagaatggggagatgatggttacttcaagatccgaagagggacaaacgaatgtgggattgaagaggatgtaacagctggtttgccttccaccaaaaacctcgtcagaga

SEQ ID NO: 251180 - DNA, 410 bp, Glycine max
tcggggaattccaattccacattttcaagaaataaggaggcaaaaatggtcatatatgaattggaattatttgttttcttattaggcctatcctgaagccaaaggaaatgagatcggaattcctcggggaattccaattccacattttcaagaaataaggaggcaaaaatgttcatatatgaattggaattatttgttttcttattaggcctatcctgaagccaaaggaaatgagatcggaattcctcggggaattccaattccacattttcaagaaataaggaggcaaaaatgttcatatatgaattggaattatttgttttcttattaggcctatcctgaagccaaaggaaatgagatcggaattcctcgggggtaccgaactcgaattccctataatgagtcgtatt

SEQ ID NO: 251181 - DNA, 377 bp, Glycine max
  unsure (1)..(377): unsure at all n locations
gcagaaagcaagctcatcctagagttttaaaaatggcagcagcctcctccatggctctctcttccccatccttggctggcaaggccgtgaagctgggcccatcagcccccgaagtcgggagggtcagcatgaggaagaccgtcaccaagcaggcctcctccggaagcccatggtacggcccagaccgcgtcaagtacttgggcccattctctggcgagcccccgtcctacctcactggcgagttcccaggtgactacggctgggacactgctgggctttcggccgacccagaaaccttcgccagaaaccgtgagctcgaagtgatccactccaggtgggccatgctcggngccttgggctgcgtcttccccgaacta

SEQ ID NO: 251182 - DNA, 393 bp, Glycine max
gaacaacctcttctttctcttcttcttcctcttcttaggctccgccgccgccagcgtccccgcccacaacatcacccgcatgcttgccaaacaccccggcttctccaccttcaaccactacctctccctcacccacctcgccgaagagatcaaccgccgccagaccatcaccgtcctggccctcgacaatgccgccatgtcctccctcctcgacaagcacctctccctccccaccatcaaaaacgtcctctccctccacgtcctcgtcgactacttcggcgccaaaaagctccaccagatcaacaacagcaccaccctcgtctcctccatgttccaagccaccggctcagcctccggcaccgtcggctacgtcaacatcaccaacctcaaggc

SEQ ID NO: 251183 - DNA, 370 bp, Glycine max
tataaagcaggtcgatgtggtaatttctactgtaggacacctgcagctagctgatcaagataagatcatttctgcaattaaagaagcaggaaatgttaagaagttctatccatctgagtttggaaatgatgtggaccggactcatgcagttgaaccagccaagtctgcatttgcaacaaaggccaaagttcgccgagctattgaggctgaaggaattcccttcacttatgtgtcaagcaacttctttgctggttacttcctgcccaacttgtcacagcctggagccacagctgcccccagagacagagttattatcctaggagatggaaaccccaaagctgtttttaacaaggaagaggatattggaact

SEQ ID NO: 251184 - DNA, 400 bp, Glycine max
ggaaagtttgtgagccactagaggaagattcctttagacgaattcttcaccattatgatggccctaagttccgtcttgaactgagtgtgcctgaggcactgtctcttctggatatttttgcaaaccagaacagtttcgatgacattttcaaagccattccagcatagaagggtagaaattatacaagaagagagaagttacaaggacaatggataatgaatgaatactgtggattcatattattagagtgtcagaagataattaagacaacgaatattgaatttcagccgtcatatatttgtgttataattactactataatgttatttgtatagaggctgttatgcctggttgcccatttttttcttgttatgggtgtatatgaacatcacataaaaga

SEQ ID NO: 251185 - DNA, 372 bp, Glycine max
gacggcaaggactaccaggagccggcgccggcgccgctggttgacccgacggagtttacgtcatggtcgttttacagagcaaggatagcagagtttgtggccacttttctggttctctacatcactgtcttaaccgttatgggagtcgccggggctaagtctaagtgtagtaccgttgggattcaaggaatcgcttgggccttcggtggcatgatcttcgccctcgtttactgcaccgctggcatctcaaggggacacataaacccggcggtgacatttgggctgtttttggcgaggaagttgtcgttgcccagggcgattttctacatcgtgatgcaatgcttgggtgctatttgtggcgctggcgtggtg

SEQ ID NO: 251186 - DNA, 463 bp, Glycine max
gaagagcttgacgtcgcatggacgccttccttaacttgggatttcgcttggaggttgccccaaagaaggagcatctttctcctttctttcatgaccgttggaagagactgagatgggttcaaaaaccaagacttttacctttgaggaggtggctaagcacaatcacaggaaggattgctggattatagtcaaagggaaggtgtatgatgtcaccccatttttggatgatcatccaggaggtgatgaagttttagtgactgcaacagagaaggatgccaccactgattttgaagatattgggcacagtgattcagcaacagagatgatggaaaaatactttgttggtgaggttgacaccaacactcttccagcacaagttaccagcagcagcagtgtacgcccaccaacacaagcacctgtctataacaatcaatcttctggatttgttgtgaagatcttgcag

SEQ ID NO: 251187 - DNA, 502 bp, Glycine max
  unsure (1)..(502): unsure at all n locations
tagggtgngttcngcctcagttccctacgtaacactcagaagagctatgacgtcgcatgcacgcctaccgtaagctcggaattcggttcgagcttttcactacttgtctcttccctttttctttccagaacaacagaacaacagagcaaaaagctccaccaatggcgggttacagagccgacgacgactacgactacctcttcaaggtggtcctcatcggcgactccggcgtgggcaagtccaaacttctttcgcgcttcaacaagaacgagttcaacctggagtccaaagtcaccattggcgtcgagttcgccacccgcaccttgaacgtcgattccaaagtcatcaaggcccagatctgggataccgcaggccaagaaaggtatcgtgcgatcaccagtgcttactatcgtggngcagttggtgcacttcttgtgtatgatgtcactcgccatgcaacattngaaaatgttgacagatggctgaaagaatngcngnacca

SEQ ID NO: 251188 - DNA, 375 bp, Glycine max
caccttccctctcttctgttaccaatggctccctcatgagactacatttctttccttttcctcaccacccttttgtttgctcttcaaatcagtgcaagagacagccagttcttcagcaaagtcacccattttgacaaaaacagtgtcaaagagacagaacttcccaacaaagaagcaccagaagtgaacaagccagagcaacaaccacctttcattccggagactgaaaacagctatggcctatatggtcatcatgatgagtataaccaagtcccttccaccaccaccaaccccacttcttaccacccctacaagaccgagtttgagaactccaacaacaagtattacaacaatgatgcctataacacaaggttc

SEQ ID NO: 251189 - DNA, 407 bp, Glycine max
gcttcggtgtcctttgccgtgggacttttaccttacgcttcagttcgatttcccgtattgagcaacgccaactcactgaaactcagttcctcagctagcatctctactccaattcttcagcaaaagctctgctctcttctttcccccctccctctaagccctcgccctcgccctctcaccattgtatccgctaagggctacaaaatgaaaacccacaaggcatctgcaaagcggtttagggtgaccggacgaggcaaaatagtgcgtaggagagctggcaagcagcatttgctcgtcaagaagaataccaagcgcaaatcccgactctccaaaatgcacgcggtcagcaagagcgactatgacaacgtaattggagccttgccatatctgaaaggtaaccagaatgc

SEQ ID NO: 251190 - DNA, 415 bp, Glycine max
tgcaattgaagttgaagtcttgcccttctctcttcaactgcaaacacaagacatcatcatccatggctgcctccgtctccactgtcggagctgtcaacagagctcttttgaacctgaatgggtctggacctggggtttcagctcccagttcatccttctttgggagcagcttgaagaaggttattggctcaagggtccccaacacaaagatttcctctggaagcttcaagattgttgctgtagaagagaagaaagagattgaagagacccagcagaccgacaaggacagatggaagggtcttgcctatgatatctcagacgaccaacaggacatcacaagaggaaagggtttggttgactcccttttccaagctccacaggatgctggaactcactatgctgtcatgagctccta

SEQ ID NO: 251191 - DNA, 403 bp, Glycine max
agaatttctatctatctcttgtttcaatttcaacaacggttactcctttttcgttttgagtttcaatcaagccatcatcatgtctaccgcatcgcaacccaaggccaagaaaacggcgtcgtccaagaagcccctctcccaccctcccttcgccgtgatgatagcagaggcgattgcgagtctgaaagagagaaccggttcgagccaatacgcgataaccaaatacatcgaagggaagcacaaggagttgcctgcaacctacaagaagcttgtcctcgttcatctcaagaaatctgttgctgctggcaagcttgttaaggtgaaaaactcctttaagctcgcaccgactaagcctgctccggttaaagcccgtggctccaaaaagccaaccaaagctgccact

SEQ ID NO: 251192 - DNA, 385 bp, Glycine max
caaaacactcataacacaaagcacaaagcaaagctcatcgttgagttaaaaaatggcagcagcttcttccatggctctctcatccccatccttggctggcaaggccgtgaagctgggcccatcagccccagaagtgggaagggtgagcatgaggaagaccgtcaccaagcaggtctcctcaggaagcccatggtacggcccagaccgagtcaagtacttgggcccattctctggcgagcccccgtcctacctaaccggtgagttcccaggcgactacggctgggacactgctgggctttccgcagacccagaaaccttcgccaagaaccgtgaactcgaagtgatccactccaggtgggccatgctcggagccttgggctgcgtc

SEQ ID NO: 251193 - DNA, 392 bp, Glycine max
  unsure (1)..(392): unsure at all n locations
ttcccccaaaaaataaaaagcacaccttcattcgttccgctttctttcttccaactctataaatatcaatcaaaattcccctccacactcattctcccatcgttttccctttctctctctcattctcttctccatcgcgcgtaagaaacacattttagttgctactaatgggaactgttgaagctgcaaacaaggatgcaaatggaagtctcctagagaaaaatccttcagttgtttttgtgttaggtggcccaggaagtggaaagggtacccaatgtgcaaatattgtccaaaattttgggtatactcatctcagcgctggtgatcttctgcgagcaganatcaaatctggttctgaaaatgggacaatgattcagaatatgattaaagga

SEQ ID NO: 251194 - DNA, 432 bp, Glycine max
cccttccttaacctgggatttcggttcaggatggacctggatcttcctaatgggggccatttttttaagggttttaagactgttcccaaaaggatatctgaagtctgaatatttttggaaacatggccttatgaatggattgaaagtccaggttccatggactttgaccagatggaaaaatctgttccacttttaaggccaaaattaattgttgctggagctagcgcttatgcacgtctctatgattatgaacgtgtacgcaaggtttgcgataaacagaaagctatactattggcagatatggcacacatcagtggattggttgcagctggtgtcatcccatcaccttttgattatgctgatgtagttactaccacaactcacaagtcacttcgaggaccacgtggagctatgatattctacagaaaaagg

SEQ ID NO: 251195 - DNA, 406 bp, Glycine max
gggaatcggaaagtactcgaggtcgcagatgtaccacaagaggggcatttgggctatcaaggccaaaaacggtggcgttttacctcgccacgaccccaaacccaaacctgaaactcccactgaaaaaccacccaaattttaccccgctgatgatgtcaagaaaccccttgtcaacaagcacaaacccaaaccagctaagctcagggctagcattacccccggaacagtgttgattcttcttgctggtagatttaagggaaagagggtagtgtttttgaagcagctaccttctgggttgcttcttgtaacaggtcctttcaaggttaatggagttcctttgagacgtgtgaatcaggcctatgttattggcacatcaaccaaagtagatgtctctgctgttaatgtc

SEQ ID NO: 251196 - DNA, 339 bp, Glycine max
tcggggaattccaattccacattttcaagaaataaggaggcaaaaatgttgatatatgaattggaattatttgttttcttattaggcctatcctgaagccaaaggaaatgagatcggaattcctcggggaattccaattccacattttcaagaaataaggaggcaaaaatgttcatatatgaattggaattatttgttttcttattaagcctatcctgaagccaaaggaaatgagatcggaattcctcggggaatccaattccacattttcaaagaattaaggaagcaaaaatgttcatatatgaattggaattaattggtttcttaataagcctattc

SEQ ID NO: 251197 - DNA, 413 bp, Glycine max
aaagaattaggagagtgaaacaagaagaagaagaagaagaagaagaagaagaattgagaagatggtgtttgaggaaactgagctgaggctgggactgggactatgtctccctggaaatggaaccacggcaacaactgaagctgctgctgcggaattaggagtgaggaagagagggttctctgagactgaaactgatgaaacagccaccgttgatttgatgcttaacctctcacccaaggaagctgctgctgctgatggtgcagatccacgtgagaagccaaagacttcgccgaaggagaagacccttctgcttcccgatcccgccaagcctcctgccaaggcgcaagtggtgggatggccacccgtgaggtctttccggaagaacatgttcgcagcccaaaagagcagcggcg

SEQ ID NO: 251198 - DNA, 350 bp, Glycine max
aaacgaagtactactacaagggaagaaaaacttagctactaaggaaggatcaaagagaatggctcaagcaatggcatcaatggctggcttgcgtggttcctctcaggctgtgttggaaggtagccttcaggtgagtggctccacacgcttgaatgtggggagtggaagcagggtggcctcagtcacacgtgcagggttcacagttagagcacaacaacaacaagtgagtggtgaggtacaaagcagccgtagggcagtgctttcacttgttgctgctggtttggccactggctcttttgttcaagctgtgcttgctgatgccaaatctatcaaagttggaccaccttccc

SEQ ID NO: 251199 - DNA, 399 bp, Glycine max
taattacaaagtttgaccgatcaatgacattagatttacacagaagagaagattctatcagatctacccagtcccaaaactgtggaaagctcttggtgcatgctgaagaatgtgttagttcaaagactacaatagagatgattctcaggtgttcagatttggaatatagggatctcttctcaagaagtgatccctttttattgctatcaaaagttgtggaaggtggtagtcatattccaatttgtaaaacagaagttataaagaatgatcacaacccaatatggaagccagtgttcttgaatattcaacaagtaagaagcaaggaaagtcctttgattatagagtgctataacttcaaatgcaatggcaaacatgatttgatggggaaagtgcaaaaat

SEQ ID NO: 251200 - DNA, 365 bp, Glycine max
ggcacgctgagcatggaacacagaaccctagaactcaacctggcttcagcaaaggatctcaaagacttgaatatattctcaaagatggatgtatatgctgtgctttcactctccggcgatcaaaagaccaagactcccgtccacagaaacggcggcaccaacccaacatggaattttccggtcaagttcacttttgatgaatcggtggcgcggcagaaccgtttggccctcgaaatcaagatccgctccgagcgcgccctcgccaccgataaggacatcggccaggtccacgttcctctcatggaactcctcaagcaacctggcgacggtaaatccttccagcacgttagttaccaagtcagaaa

SEQ ID NO: 251201 - DNA, 401 bp, Glycine max
  unsure (1)..(401): unsure at all n locations
ttccaatatattccattctctctgtgtatttccctacgtgctcccttcaagatgcagatcttcgtcaagaccctcaccggcaagaccatcacccttgaggtggaaagctctgacaccatcgacaacgtcaaggccaagatccaggacaaggaaggaatccccccggaccagcaacgtctcattttcgccggaaagcaacttgaggacggccgtacccttgctgactacaacattcagaaggagagtactcttcacctcgtcctccgtctccgtggtggcatgcagatcttcgttaagacactcaccggcaagaccataaccctagaggttgaaagctccgacaccatcgataacgtcaaggccaagatccaggacaaggagggtatccncccggaccagca

SEQ ID NO: 251202 - DNA, 420 bp, Glycine max
cgctaacacagagtgttacagtcacctgtgttcgtcacagtggcagacaatggttccaatcaattcccgtaaattatagattctttgacgctgctcggaactctctatcatcacccaaattcgggatcttcaaatgggaaagaaaggccaattataaccggcatagttctggaatggggaccttcaccactcgggccgtggcgcagccgcttcagaacgccgacgaactcatcgactccgtcgagacatttatcttcgattgtgacggagttatatggaaaggtgataaattaatagacggagtgcctgaaacgcttgacatgcttcggtcaaagggcaaaagattagtttttgtcaccaataactcaacaaagtctaggaagcaatatggaaagaagtttgaaacacttggcctgaatg

SEQ ID NO: 251203 - DNA, 416 bp, Glycine max
tctggatgtttgcaaaagagggtggggataacagctggagatctgtgtcttgatccaaaacaaagccgagaaaaaaggaagataggtataaggcaatctacagcttctactttggggactacggtcacatttcagtgcagggttcatacctgacctatgaggacactaatctggctgtgactggtgaatctggcatctttgaaggcgcttatggacaggacaggctgcatcaaattgtgttcccctttaaactattctacacattatatcttaagggcatcagggacttgcctaaggagcttctttcccagcctgttgagcccagcccagctattgagcccagcccatctgcacaaggcctgtgaaccacatgctgatattgctggctatactgactgaggaacaatgaggatcga

SEQ ID NO: 251204 - DNA, 417 bp, Glycine max
cagcgatggcgagagtgggtagaatgaagttgggttcacaaggcatggacgtgtctttgcagggacttgggtgcatgggcatgtctgcgttctatggtcctcccaagcctgaccccgatatgattgctctcatccaccacgctgttcaaactggtgtcacttttcttgacacttctgacgtctatggtcctcacaccaacgaactccttctaggaaaggctctgaagggaggggtgagagatgaggttgaattggctacaaagtttggaatcaacgttgctgaatggaagagagagatcccgtgtgatccggcatatgtgagggctgcttgtgaaggaagcttaaagagacttggcatcgattgcctagatctctattaccaacatcgtattgatactcgtgtgcctattgaaatca

SEQ ID NO: 251205 - DNA, 354 bp, Glycine max
cacgcctacaatagctcatactttcgctcaattccaattcctctattatcaagaaataatgaagcaaaaatagtcatatattaatagtaaggataccctttcttattatgcctatcctgaaaccaaacgaaatgacatcgcaattcctcatagaattccaattccacattttcaacaaatatcgaggcaaaaatgttcatatatcaattggaattatttgttctcttattatgcctatcctgaagccaaatgaaatgacatcgtaattcctcgccgaattccaattccacattttcaatatataatgaatcaaacatgttcatatattaattctaattatcatgtatcttatta

SEQ ID NO: 251206 - DNA, 503 bp, Glycine max
  unsure (1)..(503): unsure at all n locations
tgactgggtttgaaaactgcatntcatcgtgactaccncgagagacaagcttgcatgcctgcaggtcgactctagaggatcccctcggngaattccaattccacattttcaagaaataaggaggcaaaaatggggatatatgaattggaattatttgttttcttattaggcctatcctgaagccaaaggaaatgagatcggaattcctcggggaattccaattccacattttcaagaaataaggaggcaaaaatgttcatatatgaattggaattatttgttttcttattaggcctatcctgaagccaaaggaaatgagatcggaattcctcggggaattccaattccacattttcaagaaataaggaggcaaaaatgttcatatatgaattggaattatttgttttcttattaggcctatcctgaagccaaaggaaatgagatcggaattcctcgggggtaccgagctcgaattccctatagtgagtcgtattaaancgtag

SEQ ID NO: 251207 - DNA, 397 bp, Glycine max
tcggggaattccaattccacattttcaagaaataaggaggcaaaaatggtcatatatgaattggaattatttgttttcttattaggcctatcctgaagccaaaggaaatgagatcggaattcctcggggaattccaattccacattttcaagaaataaggaggcaaaaatgttcatatatgaattggaattatttgttttcttattaggcctatcctgaagccaaaggaaatgagatcggaattcctcggggaattccaattccacattttcaagaaataaggaggcaaaaatgttcatatatgaattggaattatttgttttcttattaggcctatcctgaagccaaaggaaatgagatcggaattcctcgggggtaccgagctcgaattccctat

SEQ ID NO: 251208 - DNA, 502 bp, Glycine max
aggctgtgtcagaaactgatatcatcgtaatacgggagagacaagcttgcatgcctgcaggtcgactctagaggatcccctcggggaattccaattccacattttcaagaaataaggaggcaaaaatgtgtcatatatgaattggaattatttgttttcttattaggcctatcctgaagccaaaggaaatgagatcggaattcctcggggaattccaattccacattttcaagaaataaggaggcaaaaatgttcatatatgaattggaattatttgttttcttattaggcctatcctgaagccaaaggaaatgagatcggaattcctcggggaattccaattccacattttcaagaaataaggaggcaaaaatgttcatatatgaattggaattatttgttttcttattaggcctatcctgaagccaaaggaaatgagatcggaattcctcgggggtaccgagctcgaattccctatagtgagtcggattaaattcgtaat

SEQ ID NO: 251209 - DNA, 389 bp, Glycine max
agaagctcttcggtgacctcggtgccaattacaaggccatcgaactcgacactgaatccgatggaaaagagctccaagcagcattagttgagtggacggaccagcgaaccgtgcctaatgtgtttattggtggaaaccacattggtggctgtgactcaacaactgccctgcacactcaggggaagctggttcctctgctgatatctgctggagctgttgccaaatcaactgcttaaaggatctcccatttctaggttatgcagttaaataaaaataaaaacccaagtagttgggtcggttatataattcaggtcccagaaactaatgtgtgtattcctgtgtgattctctttaaactacaactctgtcaaacaagtctattgctgaatg

SEQ ID NO: 251210 - DNA, 344 bp, Glycine max
  unsure (1)..(344): unsure at all n locations
aagcttttcactcctgataaacccaaagacaacgcagtgatcaatggggattttgaagagggtccatggatgttcaggaacacttcactgggtgtgttgctttccacaaatttggatgaagaagcgtnctcactacccggttggatagtcgaatccaaccgtgccgtccggtacattgattctgatcattactctgttccacaaggcaggagagccattgagttgctctcagganaggaaggaatcatatctcaaatggttgagaccaaaccagacaagctctacagcttgaccttctcattgggtcatgctgatgacaagtgcaaggagcctcttgctgttat

SEQ ID NO: 251211 - DNA, 418 bp, Glycine max
aggaagtccttgagcttggaccagtttgtggtgccacagaccgtgtttgcgcttactgacaaaccagtttgctccttcctgggacatctccatgatgtgcttgacctctcatggtctaaaactcagcacttgctctcatcttcaatggacaaaactgtgcggctgtggcatctatccagcaagtcttgtttgaaaatattttcacacagtgactatgtaacttgcatccagtttaatcctgttgatgatagatacttcattaatgggatctctggatgctaaggttcgcatatggagcattcctgatcgacaagttgttgattggaccgatctacatgagatggtcactgctgcttgttatacacctgatggtcaaggtgcactggttgggtcatacaagggtagctgccatttatat

SEQ ID NO: 251212 - DNA, 419 bp, Glycine max
aataatctgagagagaaacaaaaacaatgaaggtttccattgccaagttccactcccttcccctatgttttttccttctcttggccttcaacacaaaacccctcctagcagcagaaccagagccagtggttgataagcaagggaaccctttggagccaggagtagggtactacgtgtggccactttgggctgatgaaggaggcctcacactaggccaaacaaggaacaagacatgccctctttatgttatccgtgacccttcattcattggcaccccagtttcattcttagcaccaggccttgaccatgttccaacactcactgatctaaccattgatttccctgtggtgacagtgtgtaaccagccaacagtgtggaggctcaacaaggtaaggtcaaggttctggtttgtgagcacc

SEQ ID NO: 251213 - DNA, 413 bp, Glycine max
gctaacattgtcccaccatatgaccagtcaaaatacgctggaactggggcagcagttgagtatgctgttttgcatcttaaggtgtctgagattgtggtcattggacacagtgcttgtggtggtattaaggggcttctgtctttcccatatgatggaacctactctactgattttattgaggagtgggttcaaaattgggcttgcctgcaaaggcaaaggtgaagacacaacatggggatgcaccttttgctgagttgtgctcacactgtgagaaggaagctgtgaatgtttcccttggaaaccttctaacatacccatttgttagagatggcttggtgaacaagacattgtcactaaaaggaggatactatgactttgttaagggatcttttgagctctggggccttcaattt

SEQ ID NO: 251214 - DNA, 504 bp, Glycine max
  unsure (1)..(504): unsure at all n locations
ctcgtatgacccccgttagaanctncnggnagagacaagcttgcatgcctgcaggtcgactctagaggatcccctcggggaattccaattccacattttcaagaaataaggaggcaaaaatggtcatatatgaattggaattatttgttttcttattaggcctatcctgaagccaaaggaaatgagatcggaattcctcggggaattccaattccacattttcaagaaataaggaggcaaaaatgttcatatatgaattggaattatttgttttcttattaggcctatcctgaagccaaaggaaatgagatcggaattcctcggggaattccaattccacattttcaagaaataaggaggcaaaaatgttcatatatgaattggaattatttgttttcttattaggcctatcctgaagccaaaggaaatgagatcggaattcctcgggggtaccgagctcgaattccctatagtgagtcgtattaaattcgtaatcatgtcatt

SEQ ID NO: 251215 - DNA, 270 bp, Glycine max
cggagaaagaggatgcaaggccaaccattatcaatgacctcatcttggttccctaagttaaagatgtggccaccattctgcattggaagctataggggccatgcttagaggtcgtgtgtatctgcaatgaagaggcctagccaccttcatcaccatatgatatttataaaaatatatatatatgaaactatgaactgcgtttatgcatgtcggaaaatcttcttttgataagagtttggaaatcctcttgtaacaaaattttcattattc

SEQ ID NO: 251216 - DNA, 386 bp, Glycine max
  unsure (1)..(386): unsure at all n locations
atagcccaagccctatacaaccaaaccctaacacacacccatttgattcagtttccatggctagcctcaaggttgcatttttggctgcagtgctctgcatggttgtggtgagtgcacccatggcacatgcagctatcacgtgcgggcaggtgacgagtagcctggccaattgcatcggttacctccagaagggaggaacgccgtcgtcgggatgctgcaacggagtgaagagcctcaatgccgccgccaagaccaccgccgaccgccagacggcgtgcaactgcctcaagtcggccgccagccaaatctccggcttcaacgccaacaacgccgnctcgctccccggcaaatgcggagtctccatcccctacaagatcagcaccttc

SEQ ID NO: 251217 - DNA, 402 bp, Glycine max
  unsure (1)..(402): unsure at all n locations
cacaaagcaaagctcatccttgagttaaaaaatggcagcggcttcttccatggctctctcatccccatccttggctggcaaggccgtgaagctgggcccatcagccccagaagtgggaagggtgagcatgaggaagaccgtcaccaagcaggtctcctcaggaagcccatggtacggcccagaccgagtcaagtacttgggcccattctctggcgagcccccgtcctacctaaccggtgagttcccaggcgactacggctgggacactgctgggctttccgcagacccagaaaccttcgccaagaaccgtgaactcgaagtgatccactccaggtgggccatgctcggaacccttgggctgcgtcttcccggagttgctgtccngcaccggggtgaagttcg

SEQ ID NO: 251218 - DNA, 417 bp, Glycine max
gaggaagtggatttctggtgttggtgttgacagtgttgggaagaagcttgtgaactcaaaagatggacctccaacctttgagcagcccaagatgactctggagaagctcttgctgtatggtaacatgcttgtccaagaacaagagaatgtcaagagagtccaattggctgacaagtacttgaacgaggctgctcttggaaatgctaacgaggatgctattcagaggggaactttcttccagtcttgaattggaggcaaagcaaacttggcaagtaaatatttctgttcgtgaaggttgttgtactaatccaagtgctagaagttgtgatggaacttgcgtgtaacattcttagcattctcaatgtcttaagtgcaaagagaagatgctaagtttgagatgatcttactatatttttc

SEQ ID NO: 251219 - DNA, 300 bp, Glycine max
ctggacttaacacattgggggtggcattctgaagaatagacttctaagctgatggacttaacccacctgacacacaccctcgtgccactgagattgtgtttgtgttggatggacaactagatgttggattcatcaccacagccaataaactcatctcaaaggccattaagaagggtgaaatctttgtgttcccaaaaagtttggtgcactatcagaagaacaatggggataaacctgcttctgtgctttctgccttcaacagccaacttcctggcacagtgtctatagctgcagctcttt

SEQ ID NO: 251220 - DNA, 419 bp, Glycine max
gaacacaggaaaagcctccaaaaccaacccaccgttggcgcgatggctttcccctccaaaggcgatgacgagcaagttctggtgccgcgtaaatcgaatgccaaagttttgacactaaacaggactaaacagttgaatgccctctctttttatatgggttcttggcttcttgaaattttttcttgagattaaaaagaatcctgtttttaaatggtttgtcttaaaggaaaatggaagggcttttagtcctggtggtaatgttgcagctgttgctcgtgatggaagtaaaggtgactggaggtttggtgcaaatttttttcaaagtgaatttaaattgaattacttgatggcaacatatagtaagccccaagtttcaattcttaatggaattgacatggaaggtggtgctggtgtttctg

SEQ ID NO: 251221 - DNA, 418 bp, Glycine max
agcaaagacagtcatggcgtcgtttcttcaatggtttctggatccgaagaagaactggttcgccgctcagcacatgaaatccctctccagacggcttcgcaaatacgggctccgatatgacgatttgtacgatccttactacgatctagatgtgaaggaggcgctgaatcggcttccgaaagaggtggtggacgctcgccacgcgcgtcttaaacgcgccatcgatctttccatgaagcacgagtacctccctgacaatcttcaggcaatgcaaacaccattcaggggctaccttcaggatatgctgactcttgtgaagagggagagagccgaacgtgaagcattgggaggtttgcccctatatcaacgatccattccttgagtgcattaattattttgattgaagtgggaaggttaa

SEQ ID NO: 251222 - DNA, 511 bp, Glycine max
  unsure (1)..(511): unsure at all n locations
gggctgattctgctatgcaagcactacgtactcccnggagagacaagcttgcatgcctgcaggtcgactctagaggatcccctcggggaattccaattccacattttcaagaaataaggaggcaaaaatgttcatatatgaattggaattatttgttttcttattaggcctatcctgaagccaaaggaaatgagatcggaattcctcggggaattccaattccacattttcaagaaataaggaggcaaaaatgttcatatatgaattggaattatttgttttcttattaggcctatcctgaagccaaaggaaatgagatcggaattcctcggggaattccaattccacattttcaagaaataaggaggcaaaaatgttcatatatgaattggaattatttgttttcttattaggcctatcctgaagccaaaggaaatgagatcggaattcctcgggggtaccgagctcgaattccctatagtgagtcgtattaaattcgtaatcatgtcan

SEQ ID NO: 251223 - DNA, 372 bp, Glycine max
tgcaggggagggtgctgtgcgtgttccggtggtgaggctgaggattggggaggtggcggaggcgagttcggtggtggtgttgccggtctccgcggcggaggagagggagattttggaggcgccgtatgagagtaggagccagggggtgtttggtgtggtggtggcggagaagggatggggaaaatgggtggtgttgccttcgtgggacccggtggttggtttaggaaaagggggtgttgcggtatcgtttcccgatgctagggttttgccgtggaaggtgaataggtggtataaggaggagcctatattggtggtggctgacaggagtaaaaaagaggtgggtgccgatgatgggttttatcttgtgaatgc

SEQ ID NO: 251224 - DNA, 413 bp, Glycine max
  unsure (1)..(413): unsure at all n locations
tatgacttcgcatgcacgcgtgcggaagctcggaattgggctcgagtttctctattcgtgaaacggctggtgtacacaaatgaggatngagaaattgtcaagggtgtctgctcaaatttcttgtgtgacctgaagccaggagctgaagtaacaataactggacctgttgggaaagaaatgcttatgccaaaagatccaaatgccaccatcatcatgttgggaactggaaccgggattgccccatttcgctcatttttatggaaaatgttctttgagaagcacgaagattacaagttcaatggtttggcatggctcttcttgggtgtccctacaagcagctcattgctttacaaggaggagtttgagaagatgcaagagaaaaagtctgaaaactttaagcttgacttcgctgt

SEQ ID NO: 251225 - DNA, 409 bp, Glycine max
  unsure (1)..(409): unsure at all n locations
atgatgaagtgcttccagcatttgatgtactggggaaggggtctttctttctgggtgaggttggaaatggtgcaaaaatgaaacttgttgttaacatgataatgggcagtatgatgaatgctttctctgagggactcacactagctgaaagaagtggtttgaaccctggaactcttctcgatgtgctggatcttggtgccataagtaacggcatgtttaaattgaaaggacctacaatgctccaaaacagttattccccagcttttccgctgaaacaccagcaggaaggacatgagattagctcttgcccttggagatgaaaatgctgtatcaatgccagtagcagctgctgcanatgaggctttcaagaaagccagaagcatgggggttggagaccctgattttcagc

SEQ ID NO: 251226 - DNA, 396 bp, Glycine max
tttctctatgcgtgaaacggctggtgtacacaaatgaggatggagaaattgtcaagggagtctgctcaaatttcttgtgtgacctgaagccaggagctgaagtaacaataactggacctgttgggaaagaaatgcttatgccaaaagatccaaatgccaccatcatcatgttgggaactggaaccgggattgccccatttcgctcatttttatggaaaatgttctttgagaagcacgaagattacaagttcaatggtttggcatggctcttcttgggtgtccctacaagcagctcattgctttacaaggaggagtttgagaagatgcaagagaaaagtcctgaaaacttcaggcttgacttcgctgtgagtcgagagcaaacaaacgagaaaaggg

SEQ ID NO: 251227 - DNA, 390 bp, Glycine max
  unsure (1)..(390): unsure at all n locations
gcaaaaatcatgggtccgatggtgctgagccaactcggcaccgggcttagcgttctagccggagcggttctggtgaaatcggttatggaccagaagcccatggcaggcccattcactcgctgccccacgtgcaacggaaccggtcgagtcacgtgcctctgctcgcgttggtccgacggcgacgtcggatgctccacgtgctccgggtcgggtcgcatggcctgcagcagttgcggcggctccggtaccggtcgacccttgccggcgaaaatcgcgattcgcccgccgaaccgtccaattaattagttcaccaattcgttgggctcgctcgctcgcttgctactactccttttattttagcgtcagtataacattttaattntatatagc

SEQ ID NO: 251228 - DNA, 500 bp, Glycine max
  unsure (1)..(500): unsure at all n locations
agtagtttnaagggtctgccatgatcattgaagatattgtactctcggagagacaagcttgcatgcctgcaggtcgactctagaggatcccctcggtgaattccaattccacattttcaagaaataaggaggcaaaagtgttcatatatgaattggaattatttgttttcttattaggcctatcctgaagccaaaggaaatgagatcggaattcctcggggaattccaattccacattttcaagaaataaggaggcaaaaatgttcatatatgaattggaattatttgttttcttattaggcctatcctgaagccaaaggaaatgagatcggaattcctcggggaattccaattccacattttcaagaaataaggaggcaaaaatgttcatatatgaattggaattatttgttttcttattaggcctatcctgaagccaaaggaaatgagatcggaattcctcgggggtaccgagctcgaattccctatagtgagtcgta

SEQ ID NO: 251229 - DNA, 355 bp, Glycine max
ggaaataactattaatacatcaaatcaagtggcgctgcgtctcatattcaattggaattatatgctttcttattatgcctatcctgaagccaaaggaaatgagatcggaattcctcggggaattccaattccacattttcaagaaataaggaggcaaaaatgttcatatatgaattggaattatttgttttcttattaggcctatcctgaagccaaaggaaatgagatcggaattcctcggtgaattccaattccacattttcaagatataaggaagcaaaaatgttcatatatgaattggaattatttgatttcttattaggcctatcctgaagccaaaggaaatgagatcgga

SEQ ID NO: 251230 - DNA, 384 bp, Glycine max
tataacatctattaccacacatgcagacttacataatcgtccactacggctcgatttcaatctttcctaatatcagatctaaagggataatgaatcctatacgactgggaaacatattctcttaaaaatacacatacaaaatattaataatacacattataacacccaatgcaatatatcttattcattaatcaacaatatcactacaatatgattcatctaatgattacattacacatgttttccattcacatccaacaataatccatactattaaatataccacattctccactaattacaatcccattcacatttaaaaggagccggtatctacttctatatatcatttttaatcaataattttacaaataacttctaaat

SEQ ID NO: 251231 - DNA, 417 bp, Glycine max
ggcaaactcaatggcattgcactccgtgtgccaacaccaggcgtctcagtggtggacctcgttgttcaggtctcaaagaagacctttgcagaagaagtgaatgcagcattcagagagagtgcagacaatgagctccagggaatcctctctgtgtgtgatgagccacttgtgtctgttgacttcaggtgcactgatgtgtcctcaaccgttgactcatcgttgaccatggtcatgggagatgacatggttaaggtgattgcttggtatgacaatgagtggggctactcccaaagggttgtggatttggctgacattgttgccaacaagtggaagtgagagccatcaaattctgaattggtaattcaattattatatgtatgtaccatgccattgtagttttgtatgcttactactact

SEQ ID NO: 251232 - DNA, 412 bp, Glycine max
cgccgagatccgatccgacgccgacccctccgatcccgaggaccagcagttcttcaaccctaacgacaccttcaccctcggccccaagatcgataattgggacactgagcgcaagaattggcttcaccaaaaccccgaataccctaatgtcatcggaggtaaacctcgcatcttgctccttactggttctcctcccaagccttgtgataaccctattggagatcattaccttttgaagtcgattaagaataagattgattactgtagattacacgggattgaaattgtgtataatttggctcatttggatgtggaacttgctgggtattgggctaagttgcctatgattaggaggttgatgttgtcgcaccctgaggtgggatggatttggtggatggatagtgatgctttt

SEQ ID NO: 251233 - DNA, 513 bp, Glycine max
  unsure (1)..(513): unsure at all n locations
aggctcatgtgtgcctcagtctcagtacggtaaccactnggagagacaagcttgcatgcctgcaggtcgactctagaggatcccctcggggaattccaattccacattttcaagaaataaggaggcaaaaatgttcatatatgaattggaattatttgttttcttattaggcctatcctgaagccaaaggaaatgagatcggaattcctcggggaattccaattccacattttcaagaaataaggaggcaaaaatgttcatatatgaattggaattatttgttttcttattaggcctatcctgaagccaaaggaaatgagatcggaattcctcggggaattccaattccacattttcaagaaataaggaggcaaaaatgttcatatatgaattggaattatttgttttcttattaggcctatcctgaagccaaaggaaatgagatcggaattcctcgggggtaccgagctcgaattccctatagtgagtcgtattaaattcgtaatcatgtca

SEQ ID NO: 251234 - DNA, 330 bp, Glycine max
ggcaagttcccgttcatggctaatagcaaagctaaagggattggcaatgctgaaggactggtgaagatattggctgaaaaggagacagacaagatattgggagtgcacattatggcacccaatgcatgagagcttattcatgaagcagcaatagcactacagtatgatgcatctagtgaggacattgcacgtgtgtgccatgcacatccaacaatgagcgaggctgtgaaagaagccgcaatggccacttatgacaagcccattcacatttaaaaggagccggttgctacttcatggtttcatttttgtccaagaattttacaatgactt

SEQ ID NO: 251235 - DNA, 435 bp, Glycine max
ctcatgcacgcgtgcgtgaagctcggaattcggcttcgagggcatagttcaccgttcatggtctaatagcagtagctaagtgcaattgaggatgacttaaggacttggtgaagatattggcatgaaaaggagacagtcaacgatatttgggagtgcacaattatggcacccaatgcaatgagagcttattcatgacagcagctaatatcactacatgtatgatgcatctaagtgaggacattgcacgtgtgttccatgcacatccaacaatgagcgatgctgtgaaagaagccgcaatggccacttatgacaagcccattcacatttaaaaggagccgtgtgctactttattgtttcattattgtccaagaattttacaatgacttgtacatgatacatcctgtggtaaatttataatcatgtttttaaatgcaa

SEQ ID NO: 251236 - DNA, 396 bp, Glycine max
tcggggaattccaattccacattttcaagaaataaggaggcaaaagtgttcatgtatgaattggaattatttgttttcttattaggcctatcctgaagccaaaggaaatgagatcggaattcctcggggaattccaattccacattttcaagaaataaggaggcaaaaatgttcatatatgaattggaattatttgttttcttattaggcctatcctgaagccaaaggaaatgagatcggaattcctcggggaattccaattccacattttcaagaaataaggaggcaaaaatgttcatatatgaattggaattatttgttttcttattaggcctatcctgaagccaaaggaaatgagatcggaattcctcgggggtaccgagctcgaattcccta

SEQ ID NO: 251237 - DNA, 389 bp, Glycine max
aaaatatatcaacgtgcatttggtggtcaaagcttaagctatggaaaaggtggtcaagcttaccgctgtgcatgtgctgctgatcgaactggacatgctttattgcacactctctatggccaagctatgagacataatacccagttttttgtggaatattttgcattggatcttttaattaatagtgatggcacttgccaaggagtgattgccttgaatatggaggatggaacactacatcgtttccaagctgcttcaacaattttggccacagggggttatggtagagcatacttctctgcaacctcagcacatacttgtactggagatgggaatgccatggttgcacgtgctgggatccctcttgaggatttggagtttgtacaatt

SEQ ID NO: 251238 - DNA, 385 bp, Glycine max
aaaatatatcaacgtgcatttggtggtcagagcttaggctatggaaaaggtgggcaagcttaccgctgtgcatgtgctgctgatcgaactggacatgctttattgcacactctctatggccaagctatgagacataatacccagttttttgtggaatattttgcattggatcttttaattaatagtgatggcacttgccaaggagtgattgccttgaatatggaggatggaacactacatcgtttccaagctgcttcaacaattttggccacagggggttatggtagagcatacttctctgcaacctcagcacatacttgtactggagatgggaatgccatggttgcacgtgctgtgatccctcttgaggatttggagtttgtac

SEQ ID NO: 251239 - DNA, 308 bp, Glycine max
ctactactatgcctgcacgtctacactagatgatcccctcgctgaatcccaattttatattttcaagaaataacgatgcaaaaattgtcatatttaaattttgggtatttgttttcttattactcctatcctgaatccaaatgaaattacatcttaattcctcggtaaattccaattccacattttcaataaataattgaatcaaaaatgttcatatattaattgtaattatttcttttcttattattcctatcctgaatccatatgaaattatatctgaattcctcttataattccaattacacatt

SEQ ID NO: 251240 - DNA, 408 bp, Glycine max
ttggaaaacaaagtatagagtgaaagaatgggtgagaaaagcaagattttgatcataggaggcaccggctacatcggcaaacatatagtggaagcaagcgcaaaggctggaaatcccacttttgctttggtgagggaatccacactctctgacccctccaaggcacaactcatccacaattttgaggctttgggcgttaatttggtccgcggggatctgtacgatcatgagaagttggtgaaagctatcaagcaagtagatgtcgtcatatccacgctgggtcacctgcagcttgccgatcagctcaagatcatcgctgccattaaggaagccggtaatgttaagaggtttttcccttcggaatttcgtaacgacgtggatcgtgtccatgccgtggaaccagcaaaa

SEQ ID NO: 251241 - DNA, 83 bp, Glycine max
tttgagatgagagtcttgatgaacagtaccattctggtgtattgctttccttgaaagttaatgcatgcttcttatcttctgtc

SEQ ID NO: 251242 - DNA, 390 bp, Glycine max
  unsure (1)..(390): unsure at all n locations
gaagcagttaaatgaatcttaaaatttgataagctaggattcatgctcatgctttttttgcaaatgttgttatgtcagcatgtangtacttcctactcctagctatttccaatggcatatgggattttccttgttggcagcaaaaaagttatttgcagctccttatttattgtgggagagattggatgcaatgattatggctatcctttgtctgaaacaactgcatttggagatctcgtgacttacataccccaagtaatatctgtaatcacttcagcaatcagggaattgattcatttaggggctgtaatgtttatggttcctggaagtttaccacttggatgtaattcagcctatttaacaagttttgcgactatagacaaagaggag

SEQ ID NO: 251243 - DNA, 390 bp, Glycine max
  unsure (1)..(390): unsure at all n locations
ctgagcttcttgacacccaagtgaatcctgctgtgtgggaaattagtggacacatggttttaaagaggaggaaggattatgatgaggcgtctgaaggcaatgcttggaggcttcttgctgaggtgtccctttctcaagagaggtttcaagaagtcaatgatcttgtttttgaagccattggctgtggtgaattggaggatgtcaatgttcaaagtgtcaaaaaagaagttgatgcagtcagcacaagcgaacaccctactgtggtggtggtggctggttcacaagaatgtgtggttctacagtaacaaggctcttgtattttgaacaaattcagaaaatctgcagtgttttaagaataattgctgaaatgtgtcnaccgttaagtcatac

SEQ ID NO: 251244 - DNA, 377 bp, Glycine max
ctttctctttctctgtctgcttcttcactttctctcgttggaatcgaaaaaaatcatgggcagaaaattcttcgtcggtggcaactggaaatgcaatgggaccactgaggaggtgaagaagattgttactactttaaatgaagctaaagtccctggagaagatgttgtagaagttgttgtgagccctccttttgtgttccttccttttgtaaaaagtttgctgcgccctgatttccatgtctcggcccaaaattgttgggttcgcaaaggtggtgcttatactggagaggttagtgctgaaatgcttgttaatttgggaattccttgggttattattggtcactctgaacggaggcagcttttgaatgaatcaaatg

SEQ ID NO: 251245 - DNA, 414 bp, Glycine max
agaacactccattgttgacattgagaagagaagagaagcaggagaatgcaatgggggctttgtacatgtcagttatggagatactcttgttcctcttcatattcatatgctctctcacaccaatctcacagtcacagggattacatcaatctcccccttttctctttggcacttcttcttcttcgtaccagtatgaaggagcttatttgagtgatggcaaagggataagcaactgggatgtcttcactcacaaaccaggtagtatatctgacgaaagcaacggtgatgttgctgttgatcaataccaccggtatctggaggatattgatctaatggaagctataaaaggtcattagctaccggttttcaatatcatgggcaagaattctaccaaaaggaagatttggagaagta

SEQ ID NO: 251246 - DNA, 416 bp, Glycine max
gtgaagtgttcggattgcggcgacgtgagcggttcgctggccgcgacgttgtgagaagtccactgaaccttatcatttagaggatagagagtgccgtgaagaggttgatggatgatggagagaaagggaagagaatgagaagcaaggccaaagagatgcaggagaaggcttggaaagctgttcaagaaggtggttcttcttacgacagtctcacggctctgattcatcatttcaagactcttgtgcctaatcatgtgaatgggaatgggaatatcgatcactgaatgaatattacattgattcgagtttcatgtttttgattattagttatttatcaagtgaatgcatgaatgccataattttagggaatcttaatccgggtaactggctagctaccctaaatttcctaaatctat

SEQ ID NO: 251247 - DNA, 395 bp, Glycine max
  unsure (1)..(395): unsure at all n locations
cattcctctgcggttccaaaacttacggtgacatgcggtgcggctgtgacggagatcaacgagacccaattcaaagacacggtgctgaaggctaaccgtccggttcttgttgagttcgtcgctacttggtgcggtccttgccgtctcatctcttccgccatggaatccctcgctaaggaatatgaagacagattaacggttgtaaagattgatcatgatgccaacccgcagctaattgaagagtataaagtttatggactaccgacattaatactcttcaagaacgggcaggaagttccagaaagcagaaaggaaggtgcaattacaaaattgaaacttaaagagtacgtggatgctntattggaatcaatatcagtttcatagtcatcatcata

SEQ ID NO: 251248 - DNA, 499 bp, Glycine max
  unsure (1)..(499): unsure at all n locations
agttagttnanctgggtttgtgatgaggactatgggtacatacggagagacaagcttgcatgcctgcaggtcgactctagaggatcccctcggggaattccaattccacattttcaagaaataaggaggcaaaagtgttcatatatgaattggaattatttgttttcttattaggcctatcctgaagccaaaggaaatgagatcggaattcctcggggaattccaattccacattttcaagaaataaggaggcaaaaatgttcatatatgaattggaattatttgttttcttattaggcctatcctgaagccaaaggaaatgagatcggaattcctcggggaattccaattccacattttcaagaaataaggaggcaaaaatgttcatatatgaattggaattatttgttttcttattaggcctatcctgaaaccaaaggaaatgagatcggaattcctcnggggtaccgagctcgaattccctatagtgagtcgtatt

SEQ ID NO: 251249 - DNA, 354 bp, Glycine max
ccgaccttctgcatcttcttcttcttcgcgggctaatgagaagaagcccggacctgctaagccccaacccaagcccaagcctaagcctaagcccaagcccgctgctaaagccaaggacactaaggcaactaactcaaaggcaccagctaagcccaaggcagctgctaagcctaaagccaaagctccagccaagcccaagcccgcccctaaaccaaaggctgctgctgctgctgcttccaagcccaagcctgctgccgccaagcccaaagggactaagccagctgccaagcccaagcccaagcccgctgctaaaacaaaggctgctgctgccaagcccgcggcaaagcccaaagc

SEQ ID NO: 251250 - DNA, 346 bp, Glycine max
  unsure (1)..(346): unsure at all n locations
gccttttaatatatggtgtggaggatgcaattcaatgattgcaaagggtgtccggttcaatgcagagaaaaaacaagtcgggaattattactcaacaaagatatggagcttcactatgaaatctgcctgctgtaaacaagagattgtcattcagactgatcctaagaattgcgagtatgtcattattagtggtgcccagaaaaaaaacagaagattttgatattgaggatgccgaaacttttgaattgcctgctgatgaagagaagggtaagcttgcagatccattttaccgncttgaacaccaggaagaagacttgatgaaaaagaggaagctgaaccagtgatc

SEQ ID NO: 251251 - DNA, 256 bp, Glycine max
ggcttctctagcaaccttggctgctgttcaaccagctacgatcaatggccttgctggaagttccctctctggaactaagctctctttcaagccctctcgccacagtgtcaaatccaagaacttcaggagtggtgccgtggtagcaaagtatggtgacaagagtgtgtactttgatttggaggatctgggcatcactacagggcagtgtgacttgtatggctctgatgcacattcactctattaccctattgatatc

SEQ ID NO: 251252 - DNA, 415 bp, Glycine max
ctcaatcagatttgcacatgatcgagcctcacaatttggctttaaattggtccacacccccattgtccttccccattgtgattcattagcacatttgcaaagtgttatttttctttttttctcatttgcactgcaaattgcaatggcttccaacaaggttattgccaccatcatggtgctttctctccttgcctactcaacatcattcaccaatgcatgtggcacatgccacccaaaacctaccccttctcctcctcctccatcaggaaagtgccctaaggacacattgaagctaggggtgtgtgcagatattctaggtcttgttactgttgttgttggctcccctgtctccagcaagtgttgtgcattgcttgaaggtttggctgatttggaggctgcactttgcctttgcact

SEQ ID NO: 251253 - DNA, 384 bp, Glycine max
ctcgtggctcagatttgatgcataccaagagccttgagaattctcggaaacatcaggctcatacagagatacatgatactgatacgatgctcttgcctcaactctgtgatcttcaatgggattctcaatgcaaggtcattcaagatttgaaagataatttgaaaagcaatagccaagctttcgtttctgtatcaacagagaatttcatcgaaccactcgtcaggtttctgagcaatgcatatgatctgcgtgatattaacgcactgagagctggaactcagcttatgttggagtttgtgaacaactgcagaaatggtacgactaatttgcatgaagatactttcattatgctggcaagttttctgaattcaaatgtgattggag

SEQ ID NO: 251254 - DNA, 335 bp, Glycine max
tgcatgcacgcctactatagatgatcattttggtgaatctcaattctacattttcaagaaataccgaagcacagaggttcataggtgaattggaattattagatatattattaagcctatcctgaagccaatggatatgatatcggaatttctaggggaatttcaattccacattattaagaaataaggaggcaataatgttcatatatgaatagcaattatttgtgtacttattaagcctatcctgaaaccaatggaaatgagatcggaatatctatatgaattgcaatatcacattttcatgaaatactgaagcaaaaatgtgcatatatgaa

SEQ ID NO: 251255 - DNA, 315 bp, Glycine max
  unsure (1)..(315): unsure at all n locations
aaaattctcgccttctccgaatatggcatcgcgcgtgagcattggcaaccttacctnctccgcgccgtatattaattcccctcactttcgctcaccacttaaaatttccaacaacccctctctgcaaaacgcttcgcataaggtacttatgcgcgataagactgtactggtaaccggcggagccggttacatcggcagccacaccgttcttcagctcttgctcggaggtttcagagccgtcgtcctcgacaacctcgaaaaatcctccgaggttgccatccacagagtcagggagctcgccggcgaatttgggaa

SEQ ID NO: 251256 - DNA, 388 bp, Glycine max
tcttaaaagagcctttgctttttctttaggcctttccggattaagtacttgtttcattttctctcgaagcaagaaaaatgttcatcgagagtttcaaggttgagagtcctaacgtgaagtacacagagactgagattcagtccgtgtacaactatgaaaccactgaacttgttcacgagaacaagaatggcacttatcagtgggttgtcaagcccaaaactgtcaaatatgaatttaaaaccaacacccatgtccctaaactaggggtaatgcttgtggcgtggggtggaaacaatggctcaaccctcaccggtggtgttattgctaaccgagagggtatctcatgggcaacaaaggacaagattcaacaagccaattactttgggtc

SEQ ID NO: 251257 - DNA, 383 bp, Glycine max
gcagaaagcaagctcatcctagagttttaaaaatggcagcagcctcctccatggctctctcttccccatccttggctggcaaggccgtgaagctgggcccatcagcccccgaagtcgggagggtcagcatgaggaagaccgtcaccaagcaggcctcctccggaagcccatggtacggcccagaccgcgtcaagtacttgggcccattctctggcgagcccccgtcctacctcactggcgagttcccaggtgactacggctgggacactgctgggctttcggccgacccagaaaccttcgccagaaaccgtgagctcgaagtgatccactccaggtgggccatgctcggggccttgggctgcgtctttcccgaactattgtcc

SEQ ID NO: 251258 - DNA, 296 bp, Glycine max
cccaatagcatgctcacactatagttctaaacattgctcgtgatatattacatcgcactcatctttccacacattactcctatcctgaagccaaatgaaatgacatccgaattcctcggagaattccaattccacattttcaagaaataacgacgcaaaaatgttcatatatgaatcggaattatttgttttcttattacccctatcctgaacccaaaggaaatgaaatcggaatccctcgggaaatcccaattccacattttcaagaaataaggacgcaaaaatgtccatatata

SEQ ID NO: 251259 - DNA, 396 bp, Glycine max
tcggggaattccaattccacattttcaagaaataaggaggcaaaaatgggcatatatgaattggaattatttgttttcttattaggcctatcctgaagccaaaggaaatgagatcggaattcctcggggaattccaattccacattttcaagaaataaggaggcaaaaatgttcatatatgaattggaattatttggtttcttattaagcctatcctgaaaccaaaggaaatgagatcggaatttctcggggaattccaatttcacattttcaagagatatagaggcgcaaatgttcatatatgaattggaattatttgtgttcttattaagcctatcctgaagcccaaggaaatgagatcggaattcctcgggggtacccagctcgaattcccta

SEQ ID NO: 251260 - DNA, 410 bp, Glycine max
aaatgctggaaatattgctcatcgtctagaaatggtccgaataatgttgcagcagttacattgcaatgttttcatgctttcttaccgaggttatggagcaagtgatggctatccttctcagcatggaataactaaggatgctcaggctgcattggatcatctttcccaaaggcctgatattgacacatctagaatagttgtgtttggacgatcacttgggggtgcagttggagctgtactaacaaaaattaaccctgacaaggttgctgcactgatacttgaaaatacattcacgtctatattggatatggctggagttttgttaccttttttgaagtggtttattggaggaagctcttcaaatggtcctaaagtactcaattttcttgtacgttctccgtggagtacta

SEQ ID NO: 251261 - DNA, 408 bp, Glycine max
gagatctttctatcatgatgttgcccagcttcagggtcttgcaaaaagtttgcacaaagattgcattgctaaaatggaaccatctaagtgtctctttccatcagaaattgctaaaaacataaagactccactgttccttgttcatccagcttatgatttctggcagatacgcaatattttggtgcctcaaggatcagatcctgatggtcactggcaaaggtgcagactggacattcgcagttgtaatgctaatatgattgataaacttgacagttaccgtggctctttgctgaaggctgtgaatgaattccaacaacgaaaggagattggaatgtttatagattcatgcttcgtccattgccagactgagatggaagtgacgtggcattcacccaactctcctaaata

SEQ ID NO: 251262 - DNA, 508 bp, Glycine max
  unsure (1)..(508): unsure at all n locations
gaggggnaggggtatctgttaaagaacgtattgttatgctcggacagacaagcttgcatgcctgcaggtcgactctagaggatcccctcggngaattccaattccacattttcaagaaataaggaggcaaaaatgttcatatatgaattggaattatttgttttcttattaggcctatcctgaagccaaaggaaatgagatcggaattcctcgggggtaccgagctcgaattccctatagtgagtcgtattaaattcgtaatcatgtcatagctgtttcctgtgtgaaattgttatccgctcacaattccacacaacatacgagccggaagcataaagtgtaaagcctggggtgcctaatgagtgagctaactcacattaattgcgttgcgctcactgcccgctttccagtcgggaaacctgtcgtgccagctgcattaatgaatcggccaacgcgcggngagaggcggtttgcgtattgngcgctcttccgcttcctcgctcactga

SEQ ID NO: 251263 - DNA, 396 bp, Glycine max
agtgtgttaagcctcgccgactcggttgctatcagcgagtgagagtgagtgagtggttctcttgcagcaacaaggtttagtgacaccaaacagactggaaatgggtcgtggggtcagtgctggtggtggacagagttccttggattatctctttggcagtggggtacctgccagcagtgcaaatggtgctcgcactcaaaatgcaagtgctccttcaccaccggttgataagcaaagtccagcaccagcagcagcagcagcagcagcaccagcacctgcaccagcaccagcaccagcaccagctgataagcaaattccagctggaattcctggaagtctcaaaaacaattaccatcgcgctgatgggcaaaactgtggcaactttctcactgatcg

SEQ ID NO: 251264 - DNA, 397 bp, Glycine max
  unsure (1)..(397): unsure at all n locations
gaaacaggcatagcatgctacactcgcgggcctttcctgcctagtgtttcttccaagcactctccaccctccatctctccatcttttggcttgaggagtctgaaatcgagctctttatttggagaatctctaagagtggcatccaaatcaacactaaaggtttcaaagacaaagaatacttcactcgtgaccagatgtgaaattggtgacagtctggaagaattcctcacaaaagcaacaccagataaggggttgatcaggttgttggtgtccatgggagaagcattaagaacaatttccttcaaagtgaagacggcttcttgtggtggaacacaatgtgttaatacttttggngacgagcagcttgcagtggatttgctagctaatcagcttcttt

SEQ ID NO: 251265 - DNA, 407 bp, Glycine max
  unsure (1)..(407): unsure at all n locations
caagcaaccaatttcaaatccaatcatggggagctcaaccttctgtgccttcttcctcctgtgtgcaatcttggccgtccacgtggcacaatcctcatcctccaccctcgacctggacgccttcttcctccctctcaagtccggctgtcgcggatccgtcgccgagtgcagcctcctcgccggcgacgacgccgagtttctgatggagtcggagagcaaccggcgcattctagcaggaaggagctacataagctacggtgcgctgaggaggaacactgtcccttgctcccgacgtggtgcttcctattacaattgccggcccggcgctcaggccaacccctacagccgcggatgcagtgctatcacccgatgcaggcgttgaatctattcttcttctcttntttttt

SEQ ID NO: 251266 - DNA, 337 bp, Glycine max
tgggctttcaccttcaattgagactcttgataacatagggaacttcgatcgtgttcaagaggttcctcatgaagggcccatgtgcgatctgttgtggtctgatccagatgataggtgcggctggggaatttctcctcgtggtgctggatatacatttggccaggatatatccgaacaatttaatcactcaaacaagctcaagttaattgctagagctcatcagctggttatggatggatttaactgggctcatgaacaaaaggtggttaccatttttagtgcacctaactactgttatcgatgtgggaacatggcttccattttggaggttgatgat

SEQ ID NO: 251267 - DNA, 360 bp, Glycine max
caaaaggagagtgcaataactcgttgtacattcctagtgtgtgggagagacatggctaagatgtgtgttttggtgttggttcttgctctggctgtggccacaagtgccagaaacgttcccaaccccaaggatgctggtcttaaggaccagaagaacttcatcagctatggtggagttggtggttattccgggattgggaacaatggactgccttttggaggagctggtgccggaataggtggtggttttggcggaggtggtggacttggtggtggacttggtggtggacttggtggtggcctcggcggtcctaccggtggaatcggagggtttggcggtaccggtagcggtgtcggtggc

SEQ ID NO: 251268 - DNA, 417 bp, Glycine max
caaatggcggcgagtagaagcacttttcctctgatgaaatgcttgagagtgcccgtcgacgctctttcccgcaacactcccttaaccctcgctcccaactttttgattcgccgcttctgtgaagaggttaggggttgttttctcgacaagtctgaggtcacagatcgcgtcatttcctgcgtcaaaaacttccagaaagttgatccttcaaaggttaaccctaatgctcacttccagaatgaccttggattggatagtttagattctgtagagattgtgatggctcttgaggaggagtttggtttctagattccttgtaatgaggctttcaagattctacttcataaaactttcatttgactttatttgtattttattcttatgctttatttttttattttattttttttatattat

SEQ ID NO: 251269 - DNA, 410 bp, Glycine max
tgcccttgatgatgtgtcaattactagtctgacttttggcaaggagtttactgctgcaattgaagctaagcaggtagctgcacaagaagctgagagggctaaatttgttgtggaaaaagctgagcaagacaagagaagtgctgtaattagagcacagggagaagcaaaaagtgcccaactgattgggcaagctattgccaacaatccagcttttatcacactgaggaagatagaagccgcaagggagattgcacatactatatcaaatgcggcaaacaaggtttacctgaattcagatgatctattgttgaatcttcaagagatgaaattggagccaggcagaaagtgagtgtgttagcctgtttgtttctttttggttttagcttgtaaactatcaatttcaggatcga

SEQ ID NO: 251270 - DNA, 412 bp, Glycine max
tgcccttgatgatgtgtcaattactagtctgacttttggcaagtagtttactgctgcaattgaagctaagcaggtagctgcacaagaagctgagagggctaaatttgttgtggaaaaagctgagcaagacaagagaagtgctgtaattagagcacagggagaagcaaaaagtgcccaactgattgggcaagctattgccaacaatccagcttttatcacactgaggaagatagaagccgcaagggagattgcacatactatatcaaatgcggcaaacaaggtttacctgaattcagatgatctattgttgaatcttcaagagatgaaattggagccaggcagaaagtgagtgtgttagcctgtttgattctttttggttttagctggtaaactatcaatttcaagatcgatt

SEQ ID NO: 251271 - DNA, 402 bp, Glycine max
tgcccttgatgatgtgtcaattactagtctgactttgggcaaggagtttactgctgcaattgaagctaagcaggtagctgcacaagaagctgagagggctaaatttgttgtggaaaaagctgagcaagacaagagaagtgctgtaattagagcacagggagaagcaaaaagtgcccaactgattgggcaagctattgccaacaatccagcttttatcacactgaggaagatagaagccgcaagggagattgcacatactatatcaaatgcggcaaacaaggtttacctgaattcagatgatctattgttgaatcttcaagagatgaaattggagccaggcagaaagtgagtgtgttagccttgttgtttctttttggttttagcttgataactatcaatttc

SEQ ID NO: 251272 - DNA, 405 bp, Glycine max
  unsure (1)..(405): unsure at all n locations
cgtaactattgttggtgctgtttcgccacctggaggagattgctcagatcctgtgacatctgcaaccctgagcatagttcaggttttctggggtttggacaaaaagcttgctcagaggaagcactttccttctgtaaactggcttatttcttattcaaaatactcaacggcacttgaaaccttttatgagcaatttgatccagattttatcaacattaggacaaaggctcgtgaagttctgcaaagggaagatgacctgaatgaaattgttcagcttgtgggcaaggatgctttagctgaaggagataagatcaccttagaaactgcaaagcttttgagagaggattatcttgctcaaaatgcctttacaccatatgacanattctgccccttctacaagtctgt

SEQ ID NO: 251273 - DNA, 512 bp, Glycine max
  unsure (1)..(512): unsure at all n locations
gggggnaggaaaggtgncttaacggaaggggagttaatgcaaacactcatagaagagctatgacgtcgcatgcacgcgtacgtaagctcggaattccggaccggtacctgcaggcgtaccttctatagtgtcacctaaatagctttttgcaaaagcctaggctagagtccggaggctggatcggtcccggtgtcttctatggaggtcaaaacagcgtggatggcgtctccaggcgatctgacggttcactaaacgagctctgcttatatagacctcccaccgtacacgcctaccgcccatttgcgtcaatggggcggagttgttacgacattttggaaagtcccgttgattttggtgccaaaacaaactcccattgacgtcaatggggtggagacttggaaatccccgtgagtcaaaccgctatccacgcccattgatgtactgccaaaaccgcatcaccatggtaatagcgatgactaatacgtagatgtactgccaaataggaaagtccc

SEQ ID NO: 251274 - DNA, 408 bp, Glycine max
atcaaacctaaccagtaaaaatggtgaccgtggaggaggtccgcaacgctcagcgttcccatggacccgccaccatcttggccttcggcaccgtcacgccgtccaactgcgtctcccaagccgattaccctgactactacttccgcattaccaacagcgaacacatgactgatctcaaagaaaagttcaagcgcatgtgtgaaaagtccatgataaagaagcgatacatgcacctgacggaggagtttctgaaagagaacccgaacatgtgcgagtacatggcgccatcgctggacgtgagacaagacgtagtggtgatggaggtgccgaaactgggaaaacaagccgcaacgaaagcgattaatggagtgggtcaaccaaagtcaaagatcacacactctgtgttct

SEQ ID NO: 251275 - DNA, 327 bp, Glycine max
atcaaacctaaccagtaaaaatggtgaccgtgggggaggtccgcaacgctcagcgatcccatgtacccgacaccatacttggccttgtgcaccgccacactgtccaactgcgtcttccaagtcgattaccatgactactacttccatattaccaacagcgaacacatgactgatctcgaactaaagttcatgcgcatgagtctaaagtacatcatagagaaaccatacatgcacctgacagtggagtttctggtcgagaaccagatcatctgcgagtacaaggcgccatcgacttacgtgagacaagacgtagtgatgatggaggtg

SEQ ID NO: 251276 - DNA, 314 bp, Glycine max
atcaaacctatccacttaaaatattgacccttgggtagatccttatctcttatcgttcccatgtacccaacaccatcttgtccttctgcaccatcactccatccaactacatctactaagccgattaccctgactactactttctcattaccaacatcgaacacattactgatctcaaagaaaagttcaagcgcatgtgtcaaaaatccataataaacaatctatacatgcacctaatctacgactttcttaaagataaccctaacatgttcgattacatagcaccatctatgtacatcagacattacttaatc

SEQ ID NO: 251277 - DNA, 329 bp, Glycine max
ggcaaactctttggcattgcactccgtgtgccaactcctgacgtctcagtggtggacctcgttgttcaggtctcaaagaagacctttgcagaagaagtgaatgcagcattcagagagagtgcagacaatgagctccagggaatcctctctgtgtgtgatgagccacttgtgtctgttgacttcaggtgcactgatgtgtcctcaaccgttgactcatcgttgaccatggtcatgggagatgacatggttaaggtgattgcttggtatgacaatgagtggggctacttcccaaagggttgtggatttggcttgcattgttgccaacaatt

SEQ ID NO: 251278 - DNA, 414 bp, Glycine max
  unsure (1)..(414): unsure at all n locations
ttttaggttgttttgagaaagcaaaaagaaaatcagtaggcgtggagaacagcaaagaaagaggaataatggagcaggaagagcacgaagtgtacggtgcagacattcccgacgaggagattgacatggacgcagacgccgagcaacaagatgagcaacttgcccccaatcacacaaacaaggaactggaggacatgaagaagaggctgaaggagatcgaggaggaagctagcgcccttcgcgaaatgcaggccaaggtcgagaaagagatgggcgctgttcaagattcgtcgggcacttccgcaactcaagctgaaaaggaggaagtggatgctcggtcaatctatgttggtaatgttgactatgcatgtacgcctgaagaagtccagcagcattntcagtcctgtggaactg

SEQ ID NO: 251279 - DNA, 380 bp, Glycine max
  unsure (1)..(380): unsure at all n locations
gaaatatcattttgcgaggcaatcccattctcatcttggattggcaccatcaatactattttcttgtcgttgagaagcttcgcgaacgaaagcaaagaaccctagaccgtcacagaaccattccatagccatgtctggtgttggccctctttctcaggattgggaacctgtcgtcctccgcaagaaggctcccaccgccgccgccaagaaggacgagaaagccgtcaacgccgnccgccgctctggcgccgaaatcgaaaccctaaaaaagtataatgctgggacaaacanagcagcatctagcggcacttcattgaacactaagaggctggatgatgatactgagagtctagctcatgagaaggtgccaactgaaccta

SEQ ID NO: 251280 - DNA, 404 bp, Glycine max
agaccacactaccctcaacatagtaaagcagctggtgcaagtgaagcaatggctcaaaccatgttgctcatgtctagtgtctctagcagttattccgtggatttgaagaaagaccttttcctccaattgcagagtcaaagtttaaggcctaagttctctcaactctcattcaacccacttccaccatcaacttcttccttttcttcaccccgtacattcacaaccctggctctcttcaaatctaagacaaaagccgctcctgctaagactaaggttacaaagccaaagcaaaaggttgaagatggtatctttggcacttctggaggatttggttttacttaacagaacgagctctttgtgggtcgtgttgctatgcttggttttgcagcatcattgtggggtga

SEQ ID NO: 251281 - DNA, 410 bp, Glycine max
  unsure (1)..(410): unsure at all n locations
ctcattctccatacctcaacgaagaggttaaagagacggcaacactttgctgtccgccttgaccgagcagagcttcgtcttggccctcgattttgccctaaagtactctcagtcacaacagacaccgtcgtcgtcgtcgtcgtcatcaatggcaccgaagcagaccaaggctgagaagaagatcgcttacgatgcgaagctgtgcgacctaatggaggagtacggccagatcctcgttgtgaactccgataacgtgggatcgaaccagctccagaacattcgcaagggtctccgtggcgactccgtcgtcctcatggngaagaacaccatgatgaagcgctcagtcaggatgcacgctgagaaaaccggaaacaacgcctatctcaacttatcccgctccttggtggcaa

SEQ ID NO: 251282 - DNA, 400 bp, Glycine max
ctcattctccatacctcaacgaagaggttaaagagacggcaacactttgctgtccgccttgaccgagcagagcttcgtcttggccctcgattttgccctaaagtactctcagtcacaacagacaccgtcgtcgtcgtcgtcgtcatcaatggcaccgaagcagaccaaggctgagaagaagatcgcttacgatgcgaagctgtgcgacctaatggaggagtacggccagatcctcgttgtgaactccgataacgtgggatcgaaccagctccagaacattcgcaagggtctccgtggcgactccgtcgtcctcatggggaagaacaccatgatgaagcgctcagtcaggatgcacgctgagaaaaccggaaacaacgcctatctcaaccttatcccgctc

SEQ ID NO: 251283 - DNA, 411 bp, Glycine max
  unsure (1)..(411): unsure at all n locations
caaattaatccatatatagagagagttaggaaaacaagggaagccatttctcctaagcatcttatgacatcccttgtaataattatagcttctagtttgaccgcacactgtggctgtgccaagagagggggtgaaagaccatacaaagaagccaacacactgttcataagaacatcttgcagctccacaacatatccaagactctgctacagctccttagtgaagcatgcagacttgatccaaacaaatcgtgtggttctgacaggcgcagccctgaatgtgactcttgcgtcagtgaaatcgacatcggcaatgatgtcaacgctggcaaagaagcaggggctgaagccaagagaggttgcagcgatgcangactgtgtggagcagctgagtgacactgtggatgaactg

SEQ ID NO: 251284 - DNA, 398 bp, Glycine max
agaagaacaagtagttgagaactaagaaggagaagcaaagggcttcctcaatgatctcttccccagctgttaccactgtcaaccgtgccggtgccggcatggttgctccattcactggcctcaagtccatggctggcttccccaccagaaagaccaacaatgacattacctccattgctagcaacggtggaagagtgcaatgcatgcaggtgtggccaccagttggcaagaagaagtttgagactctttcctacctgccagaccttgatgatgcacaattggcaaaggaagtagaataccttcttaggaagggatggattccttgcttggaattcgagttggagcacggtttcgtgtaccgtgagcacaacaggtcaccaggatactacgatggacgc

SEQ ID NO: 251285 - DNA, 507 bp, Glycine max
  unsure (1)..(507): unsure at all n locations
aggtgttttnagccctagcccctcgngataccgcagagacagcttgcatgcctgcaggtcgactctagaggatcccctcggggaattccaattccacattttcaagaaataaggaggcaaaaatggggagtatatgaattggaattatttgttttcttattaggcctatcctgaagccaaaggaaatgagatcggaattcctcggggaattccaattccacattttcaagaaataaggaggcaaaaatgttcatatatgaattggaattatttgttttcttattaggcctatcctgaagccaaaggaaatgagatcggaattcctcggggaattccaattccacattttcaagaaataaggaggcaaaaatgttcatatatgaattggaattatttgttttcttattaggcctatcctgaagccaaaggaaatgagatcggaattcctcggnggtaccgagctcgaattccctatagtgagtcgtattaaattcgtaatcatgtcat

SEQ ID NO: 251286 - DNA, 396 bp, Glycine max
gtcacctacaccttttggagttcaacctaacacagtgaaagggataccaagcaaggtgttacaagaactatcttcagcggcaaatggaactggtcataaccatacatcacgagcttatatcagtggcagtgcaccggctgctaaggcacaggttgctggttggcctcctataagatcatctaggaaaaactcattggccaccacttcaaagaattatgattaagtagattgaaaaccggctgcagtaacactctttgcgaaagtcagcatggatggtgctccctatcttaggaaggtagatctaagaaattatacaatgtaccaggaactgtcttactgccttgagatgatgttcagctgattcactctaggtcaatgtcgttcccatggagcttc

SEQ ID NO: 251287 - DNA, 389 bp, Glycine max
gttagagccatgtgtattaatattcccggatttgcataccacaaagcattcaaggcaaggaaaaatctagtggccatatttcaatctattgtggacgagagaagaaacttaaggaagggctatctgcctggaaaagccaaagatatgatggatgctctgatagatcttgaagatgatgaaagaaagttgagtgacgaggacatcattgacatcatgttgatgtacttgaatgcgggccacgagtcttcaggacatattaccatgtgggcaaccttcttcctgcaaaagcacccagaatatctccaaaaggctaaggcagaacaagaagaaataataaggagaaggccttcaacacagaaagggttgacacttaaggaagttcgggagat

SEQ ID NO: 251288 - DNA, 413 bp, Glycine max
  unsure (1)..(413): unsure at all n locations
agttctgacattgtgatcttagatgacaacttcaattgtgttgccactgtcttaaggtgggggagatgtgtctataacaacatccagaaattcatccagtttcaactaaccgtgaatgttgcagcactagtgatcaattttattgcagcagtttcttcgggagacgttcccctaacaacagttcaactattatgggtaaatctcattatggatactctaggagcattggcactagctacagaaaggcctacaaaggagttaatggagaaaaggccagtgggtagaactgagcctcttattactagtattatgtggagaaaccttttagctcaagctntatatcagattgctgttctcttggttttacaattcaaagggaaagtcaatcttcaatgtaaaatgggaaggtaaag

SEQ ID NO: 251289 - DNA, 404 bp, Glycine max
tcggggaattccaattccacattttcaagaaataaggaggcaaaaatgttcgtatatgaattggaattatttgttttcttattaggcctatcctgaagccaaaggaaatgagatcggaattcctcggggaattccaattccacattttcaagaaataaggaggcaaaaatgttcatatatgaattggaattatttgttttcttattaggcctatcctgaagccaaaggaaatgagatcggaattcctcggggaattccaattccacattttcaagaaataaggaggcaaaaatgttcatatatgaattggaattatttgttttcttattaggcctatcctgaatccaaaggaaatgagatccgaattccttgggggtaccgagctcgaatttcctatattgagt

SEQ ID NO: 251290 - DNA, 360 bp, Glycine max
gcctctactatactgcttcaccttctgctctaggaaagggagtgctgaaacatggcttcggctactctctctgtagccaaaccagcccttcaggcaaatgggaaaggcttctctgaattctctggcctacgaagctcatcaggcttccttcccttttctagaaaatcttcagaggatttccattctgtcattgccttacagacctatgcagttggaagcagtggaggatacaagaagggtgtgacagaagcaaaactgaaggttgccataaacgggttaggaaggattggaaggaacttcttgaggtgctgacacggtcgcaaagactcccctctagatgacattgccatcaacgacacc

SEQ ID NO: 251291 - DNA, 400 bp, Glycine max
ccaaaagccagactataatgggctaagtcaccttaaagttgtgaccatgattttatacgaggttcttaggttatacccacctttaatttattttgctcgagcgatcaagaatgatgtgaaacttggaaacctttccctacctgcgggagtgcaagtttccttaccaatactattgattcaccaggatcgtgatatttggggtgatgatgctacagagttcaacccagaaagatttgctgaaggagtagcaaaggcaacaaaaggccaagttgtgtttttcccatttggatggggtcctagagtgtgcttaggccaaaattttgctttattagaagcgaagttggttttgtcattactcttacaacgcttctcatttgagctttctcctacctatgcacat

SEQ ID NO: 251292 - DNA, 409 bp, Glycine max
ataacacaaggcagaaagcaagctcatcctagagtttgaaaaatggcagcagcctcctccatggctctctcttccccatccttggctggcaaggccgtgaagctgggcccatcagcccccgaagtcgggagggtcagcatgaggaagaccgtcaccaagcaggcctcctccggaagcccatggtacggcccagaccgcgtcaagtacttgggcccattctctggcgagcccccgtcctacctcactggcgagttcccaggtgactacggctgggacactgctgggctttcggccgacccagaaaccttcgccagaaaccgtgagctcgaagtgatccactccaggtgggccatgctcggggccttgggctgcgtcttccccgaactattgtcccgcaacggggtcaagt

SEQ ID NO: 251293 - DNA, 512 bp, Glycine max
  unsure (1)..(512): unsure at all n locations
aggtgnttgtgctgcctagctcccatcgccactaccgctagagacaagcttgcatgcctgcaggtcgactctagaggatcccctcggggaattccaattccacattttcaagaaataaggaggcaaaaatggtgatatatgaattggaattatttgttttcttattaggcctatcctgaagccaaaggaaatgagatcggaattcctcggggaattccaattccacattttcaagaaataaggaggcaaaaatgttcatatatgaattggaattatttgttttcttattaggcctatcctgaagccaaaggaaatgagatcggaattcctcggggaattccaattccacattttcaagaaataaggaggcaaaaatgttcatatatgaattggaattatttgttttcttattaggcctatcctgaagccaaaggaaatgagatcggaattcctcgggggtaccgagctcgaattccctatagtgagtcgtattaaattcgtaatcatgtcat

SEQ ID NO: 251294 - DNA, 366 bp, Glycine max
  unsure (1)..(366): unsure at all n locations
cccaaactggagctgatagagaagtacagcgtatccttatggaacttttgaatcagatggatggttttgaccaaacagttaatgttaaagttattatggcaactaacagagcagacactttggaccctgctctgttgcgtcctggaaggcttgatcgtaaaattgagttccctttgcctgatagacgtcaaaagaggcttgtatttcaggtttgcacagccaagatgaacttgagtgatgaggtagatctggaggattatgtttctcgccctgacaaaaatcagtgctgctgagatatcagctatntgtcaagaactggaattccatgctgttcgcaagattagatatgtcatactgccaaaggac

SEQ ID NO: 251295 - DNA, 409 bp, Glycine max
gtttatgataaagagcattgcattctctctggggttctggagatgtctaatagcaatggttttgttggtggatcaagaagttgtgtgaagagatggagtatgatttgtcaaacagaaatgtcacctggttgtggctttttcaagaggaaacatgttgctgtgcccgaattaccttgtcctgaaattgaggtttatgttgctggttgcttctcaggaacacctattatcttaactaagacactgcaactcaattgccggaagaagcataacaggaaatgcgccttggattccattccagaatatgaaacaactgagtgccagaaagatgtttctgatcatggacttgatttgcaggtagttgactgtagaagcttcaaactggaacaagaagaggattacaacagcatgt

SEQ ID NO: 251296 - DNA, 366 bp, Glycine max
  unsure (1)..(366): unsure at all n locations
cttggcccttgcagatgatctcatctccagggcctttcattgccggagggggaaagcatacctattcaataatgccgtgaacttcacaattggaacaccagaagaaaggatgatgctttcaggattacatactgtcgcagatattttttgctgttgctgcggtcaaataattggctggaaatatgaatctgcacacgagaagagccaaaagtataaagaagggaagtttgttcttgaaagatgaaggattgttgatgaagttgatttctccactgagttctacatcgatagtcatgccagcatgagtgatgctgaagaacctanaacatgcgggctggccttgttggatcatgagaaagatgcact

SEQ ID NO: 251297 - DNA, 412 bp, Glycine max
cggctcgagctcgagccgattcggctcgaggttgttcggcgggtccttgccttaattccattaaaatgctacctccaaacctagaatctttgctcctcaaaaaaggggtggataaaaaggcttcctcatcatcctctcccgtgaaatttgcaagttccgtcagttcacccaaatcctgcgaggaaacttctgatgctgtgacaatagcggatttacatcatctatggcagcttgtggaggagaaagatggaggtctcccttggattcagatgatggatcgttctacccctaccatgagttacaaagcatggcgtagagaaccaaaggatggtcctccccaatatagaagcagcactatttttgaagatgctacccctgagatggtgagggacttgttttgggatgacgagtt

SEQ ID NO: 251298 - DNA, 512 bp, Glycine max
  unsure (1)..(512): unsure at all n locations
gttaaatatgggtgntttaatggatcacgccatatatctgtattactcggagagacaagcttgcatgcctgcaggtcgactctagaggatcccctcggggaattccaattccacattttcaagaaataaggaggcaaaaaggttcatatatgaattggaattatttgttttcttattaggcctatcctgaagccaaaggaaatgagatcggaattcctcggggaattccaattccacattttcaagaaataaggaggcaaaaatgttcatatatgaattggaattatttgttttcttattaggcctatcctgaagccaaaggaaatgagatcggaattcctcggggaattccaattccacattttcaagaaataaggaggcaaaaatgttcatatatgaattggaattatttgttttcttattaggcctatcctgaagccaaaggaaatgagatcggaattcctcggnggtaccgagctcgaattccctatagtgagtcgtattaaattcgt

SEQ ID NO: 251299 - DNA, 511 bp, Glycine max
  unsure (1)..(511): unsure at all n locations
ggggaggaaggtttgttacgaaaagcattattgtcattactcggagagacaagcttgcatgcctgcaggtcgactctagaggatcccctcggggaattccaattccacattttcaagaaataaggaggcagaaaaggttcatatatgaattggaattatttgttttcttattaggcctatcctgaagccaaaggaaatgagatcggaattcctcggggaattccaattccacattttcaagaaataaggaggcaaaaatgttcatatatgaattggaattatttgttttcttattaggcctatcctgaagccaaaggaaatgagatcggaattcctcggggaattccaattccacattttcaagaaataaggaggcaaaaatgttcatatatgaattggaattatttgttttcttattaggcctatcctgaagccaaaggaaatgagatcggaattcctcgngggtaccgagctcgaattccctatagtgagtcgtattaaattcgtaatn

SEQ ID NO: 251300 - DNA, 513 bp, Glycine max
agtgctggttgttgtaccaagtaagcgatagttagtactatagagcatctatcacgtcatgcgcgcgtacttaagctcggaatttgattgcgagtgagatatttatgccagccagccagactcatacactcctgtacattacttaatgtgcccgctaacagcgcgatttgctggtgacccaatgcgaccagatgctccacgcccagtctcgtaccgtcttcattggagaaaattatactgttgatgggtgtcttgtcatagacttcaataaataactccgttactttatttcatgcttctttctcagcatattcattcttttcattcatcttatttattattttctttctattttcccttttcttcttatatttgtgcattttttttttatattctattttctatttttttttatctttttttcttatttttttttctttttttatattttcttttttttttattttatttttttattttttttatttttttatttattatttcttttttttt

SEQ ID NO: 251301 - DNA, 344 bp, Glycine max
accgcacgaatatcttgttgtttggagcgatccgagaaaaacgtctgtaaacatgttggtttaccaggacctccttacaggtgatgagcttctctctgactccttccgttacaaggaaattgagaatggaatgctgtgggaagttgaggggaagtgggttgttaaaggagcagttgatgtagacattggtgcaaacccttctgctgaaggtggaggagaagatgagggagttgatgatgcagctgttaaggttgttgacattgttgacacattcagacttcaggagcaacccgcattcgataagaagcagtttgttaccttcatgaagaggtttatcaagaatt

SEQ ID NO: 251302 - DNA, 401 bp, Glycine max
caaagtttcacttcagccttatccggtttagggtttcggttttggaccctacctttgacgtatcgaaaccttaagtttcggatcaggtctgagcaatctggttggtagaacctttggtcttagagagtcaagttttatgtctgaattagacgatcaaattcctactgccttcgatccttttgctgatgcaaatgctgatgactcgggtgctgggtcaaaggagtatgtgcatattcgggtacagcagcgaaatggtaggaaaagcctgacaaccgttcagggattgaaaaaagaattcagctataacaagatacttaaagatgttaagacagagttctgttgcaatggaacagttgttcatgacccagaactaggacaggttattcaacttcaaggtgatc

SEQ ID NO: 251303 - DNA, 463 bp, Glycine max
gagagacaagctagcatgcctgcacgtcaactccggatttcggttcgagccgttattgtccccaatgacccggacctcatcgacatggtcggcatgaacggcgtcgacatttccgtcgcggaaggcgaatcccccaacagcttgttcaacatcgttggcaacttgctcttccccttgctcgcgttcgcgggtttgttcttcctcttccggagagctcaaggcgggcccggtgggcctggcgggatgggtgggcccatggactttggacggaacaagtccaagttccaggaagtccccgaaaccggtgtgagcttcgctgacgttgcgggcgcggaccaagcgaagcttgagctccaagaggttgttgatttcttgaagaatcccgataagtacaccgcgttgggcgcgaagattccgaaggggtgtcttttggtggggccaccgggaaccggaaagacctttt

SEQ ID NO: 251304 - DNA, 345 bp, Glycine max
gttcctatcatcacttctcaaatctcgaaccctgtcgttcgtgccgatcactaggtcacacttcatcaatggcgggtagaggcaaaaccctaggatccagcgccgctaagaaggccacctcaaggagcagcaaagccggcctccaattccccgtcggtcgtatcgccaggttcctcaaggccggaaagtacgccgagcgcgtcggcgccggagcccccgtctacctcgccgccgttctcgaatatctcgctgctgaggttttggaattggctggaaacgctgcgagagataacaagaagactcgaattgttccacgccacatccaattggcggtgaggaacgacg

SEQ ID NO: 251305 - DNA, 507 bp, Glycine max
  unsure (1)..(507): unsure at all n locations
gtgtagtaagtttttgtaaggaggagagagtactgtanaacgancttgatctcnatgtgcctgcacgtcgactctagaggatcccctcggggaattccaattccacattttcaagaaataaggaggcagaaatgttcatatatgaattggaattatttgttttcttattaggcctatcctgaagccaaaggaaatgagatcggaattcctcggggaattccaattccacattttcaagaaataaggaggcaaaaatgttcatatatgaattggaattatttgttttcttattaggcctatcctgaagccaaaggaaatgagatcggaattcctcggggaattccaattccacattttcaagaaataaggaggcaaaaatgttcatatatgaattggaattatttgttttcttattaggcctatcctgaagccaaaggaaatgagatcggaattcctcggaggtaccgagctcgaattccctataatgagtcgtattaaattcgtaat

SEQ ID NO: 251306 - DNA, 415 bp, Glycine max
  unsure (1)..(415): unsure at all n locations
caagctccaagaagagcacctctagttttatattcacacagcaaaccactaagaaaagagaggataaaccaatggctacttcactttcagcaactgggtgtgttggaacttccttctatggaagttggggcacttcaattgttggggaggattacaccatgctggccaagtcagtgccatcacaagttcgtatggggaggggaaagccagtgagattgcagcctatgatgaagaatgtcaatgaagggaaaggtatctttgcacctcttgtggtgatcactcgcaacatcgttggcaagaagcgtttcaaccagcttagaggcaaagcaattgctttacactcccaggtgatcacggagttctgcanatcattaggagcagatggaaaacagagacaagggctgatcaggttggc

SEQ ID NO: 251307 - DNA, 451 bp, Glycine max
ctatgacgtctggtggactacttaatctcggaattcagctcgagcaagctccaataagagcacctctagttttatattcacacaggaaaccactaagaaaagagaggataaaccaatggctacttcactttcagcaactgggtgtgttggaacttccttctatggaagttggggcacttcaattgttggggaggattacaccatgctggccaagtcagtgccatcacaagttcgtatggggaggggaaagccagtgagattgcagcctatgatgaagaatgtcaatgaagggaaaggtatctttgcacctcttgtggtgatcactcgcaacatcgttggcaagaagcgtttcaaccagcttagaggcaaagcaattgctttacactcccaggtgatcacggagttctgcaaatcaataggagcagatggaaaacagagacaagggctgatc

SEQ ID NO: 251308 - DNA, 514 bp, Glycine max
  unsure (1)..(514): unsure at all n locations
agggctctcntgtgctgctacgatacncatcgcactactgcagagactagcttgcatgcctgcaggtcgactctagaggatcccctcggggaattccaattccacattttcaagaaataaggaggcaaaaatgtgcatatatgaattggaattatttgttttcttattaggcctatcctgaagccaaaggaaatgagatcggaattcctcggggaattccaattccacattttcaagaaataaggaggcaaaaatgttcatatatgaattggaattatttgttttcttattaggcctatcctgaagccaaaggaaatgagatcggaattcctcggggaattccaattccacattttcaagaaataaggaggcaaaaatgttcatatatgaattggaattatttgttttcttattaggcctatcctgaagccaaaggaaatgagatcggaattcctcggcggtaccgagctcgaaattcctatagtgagtcgtattanattcgtaatcatgtcat

SEQ ID NO: 251309 - DNA, 395 bp, Glycine max
cgttgacttgctcttcgcctgcacccactcagcactgggtcggcttcacccgcaccaccgccaccgctaccgccacgtcactgagacaattcaacagccaccgtccgcccccactcaccacgaggatctcctcgtcgccttccaccgttgtctgcaaagctgtctccgttaagccccaaaccgaaaccgaaggtctcaacattgctgacgatgtcacacagctcatagggaaaacgccgatggtttacctcaacaatatcgtgaagggttctgtggccaatattgctgcgaagcttgagattatggagccctgttgtagtgtcaaggacaggattggttttagtatgataaatgatgctgagcagagaggagctataacacctgggaagagtata

SEQ ID NO: 251310 - DNA, 418 bp, Glycine max
gttgctattccctcattcactggcctcaaggcaagcgcaggcaaagtgagtgccgcagttaaagtctcagctccccaagccacaaggttgggcatcaaggcttcgctgaaagacgttggagtcgctgttgtggccactgccgcgagtgcagtgctggctagcaacgccatggccattgaagtgttgctgggtggtgatgacgggtctctggctttcgttcccaacaatttctccgtggcctctggggagaagatcgtgttcaagaacaacgcaggtttcccccacaacgttgtgttcgacgaggacgagattcctagcggcgtggatgcagggaaaatctccatgagcgatgaagaccttctcaatgcgcctggtgagacttacagcgttactttggatgctaagggaacctacagtt

SEQ ID NO: 251311 - DNA, 399 bp, Glycine max
  unsure (1)..(399): unsure at all n locations
tgagcacgccaccctcgacaacttggtgctcactgacgccgatggccagggggtgctttacatgaaccgggagcagctggaagagctgagggtgaagccgctatcggcgtcgtcggcgtcgaagaggactcttgtcccggcgctcaacatgaggctctggtacgcgcctcacctggaattaccaactggggttgtgttgaagggtgccacgcttgttgctattagacccagcgagcaatcccccaacacggccaagaaggaggcgtcggatttgtcgtgggtttcgacggcgtttgaggagccgtataggacggccgncacaatgcttgtcaagaggaggacttattgggctgagatgaactcattctgatgcgtttctgagggaatgcagaatcattt

SEQ ID NO: 251312 - DNA, 531 bp, Glycine max
  unsure (1)..(531): unsure at all n locations
aggagggggtntgtctcacgctgagctcagctcactcagtactaccnggagagactagcttgcatgcctgcaggtcgactctagaggatcccctcggggaattccaattccacattttcaagaaataaggaggcaaaaatggtcatatatgaattggaattatttgttttcttattaggcctatcctgaagccaaaggaaatgagatcggaattcctcggggaattccaattccacattttcaagaaataaggaggcaaaaatgttcatatatgaattggaattatttgttttcttattaggcctatcctgaagccaaaggaaatgagatcggaattcctcggggaattccaattccacattttcaagaaataaggaggcaaaaatgttcatatatgaattggaattatttgttttcttattaggcctatcctgaagccaaaggaaatgagatcggaattcctcgggggtaccgagctcgaattccctatagtgagtcgtattaaattcgtaatcatgtcatagctggttc

SEQ ID NO: 251313 - DNA, 418 bp, Glycine max
  unsure (1)..(418): unsure at all n locations
attttatactatacctacattttgataattttctgtgtaggtgatagccatggctacccgtggaaagcttgaggttgacattgatctcaagtccaacgcagacaagtactggcaaacccttaggaattctactgaaatattccctaaggccttcccacatgattacaaaagcattgaggttcttgagggtgatggcaagtctcctggttctatccgccacataagttatggtgaaggttcaccacttgtgaaatcatcctttgagaagattgaggctgttgatgaggaaaagaaggtagtgtcgtacactatcattgatggngaactcctncagcactacaaaacattcaaaggagacatttcagtgactccaattggcgatggatgcgangtgaagtggagtgctgtgtacgaaaag

SEQ ID NO: 251314 - DNA, 325 bp, Glycine max
gcatctgcaatccaatcattgccaagatgtaccaaggtggtgctggtccagacgtgggtggtgctggtgcagcagaggatgagtatgctgctcctccttctggtggaagtggtgctggccccaagattgaggaagtggactaaatgtagttgctttccttcagatacctgttttaaaaacttattttactttatgcttttttaattggattttaatcgcatgatttttgttggatgggattcaaactatttttcccttctgatatgaacgttgctttaagcattatgttatttgcgttattttcattattagatggtatactcaa

SEQ ID NO: 251315 - DNA, 362 bp, Glycine max
gtgagaatggagtttcaagggttaccggaaggttgcattgctagtatactctctcgcactacgccggcggacgtgtgtaggttttccgtcgtatcaaagattttccgttcggccgctgaatcggacgctgtgtggaaacgttttctcccttccgattaccattccatcatttcccagtctccttcgcctctcaactatccttccaagaaggagctctatctcgctctctcggatcgccctatcatcatcgatcagggtaaaaagagctttcaattggagaaaaagagtgggaagaagtgttacatgcttgctgctagagctctcagcattatttggggtgacactgagcaatactggaactg

SEQ ID NO: 251316 - DNA, 287 bp, Glycine max
gggaaggccaaggaagacgcttctcttcctaaagcgacagtaacgaaggttattaaagagatgttgcccccggacgtgcgtgtcgccagagatgcacaggatttattgatcgagtgttgtgtcgagtttataaaccttgtctcgtcggagtccaacgaagtctgtaacaaagaagaaagaaggacgattgcaccggagcacgtgctgaaagctttaagggttcttggatttggcgagtacattgaagaagtttatgcagcctatgaaccacacaagttggagaccat

SEQ ID NO: 251317 - DNA, 422 bp, Glycine max
tctttgtccgtgacaaaacagttcccacataaaaaagaaaaaagaaaggagaaatgcactaataaaaaatgaagaagggtttctcccttgtgctgctgattcttctgatccagtacaacaactttttcaacgcctactacaacaaatactttttcacatattattgcctcattctcttcattttattttaattttatttcttatttttttattccatttcttctcattttttttatatttttttttcttcttattttttttttatatctttttttttttattttttttttatttttttttattttttaatttttttttatttattttattatttattatatttaattttttattttttttttttatttctttatttttattttttttatttctttattttaatgtttttatctttttttttt

SEQ ID NO: 251318 - DNA, 360 bp, Glycine max
gagcgtcggagaagagaacgagaagaacagcagcagccctgagtgcaagctttgtcaaagttagcatggatggagcaccttacctccgcaaagtggacttgaagatgtacaagagttaccgagagctctctgattctttaggcaaaatgttcagctccttcaccataggcaattgtgaatcccaaggaatgaaggatttcatgaatgagagcaagctgaatgatcttttgaacagctctgattatgtcccaacctatgaggacaaggatggtgactggatgcttgtcggtgatgtcccatgggagatgtttgttgaatcatgcaagcgtttacgcatcatgaaaggaaaggaggccattg

SEQ ID NO: 251319 - DNA, 380 bp, Glycine max
gagaatggctcaagcaatggcatcaatggctggcttgcgtggttcctctcatgctgtgttggaaggtagccttcaggtgagtggctccacacgcttgaatgtggggagtggaagcagggtggcctcagtcacacgtgcagggttcacagttagagcacaacaacaacaagtgagtggtgaggtacaaagcagccgtagggcagtgctttcacttgttgctgctggtttggccactggctcttttgttcaagctgtgcttgctgatgccaaatctatcaaagttggaccacctcccccaccttctggtggattgcctggaacgttgaactcagatgaagcaagagaccttcagctgccattgaaagataggttcttccttc

SEQ ID NO: 251320 - DNA, 244 bp, Glycine max
ccgtgatgggcgtatggagaagttctactgggcacctacaagggatgaccgagttggtgtctgcaagggaattttccgcactgacaatgttcctgaggatgaaattgtcaagcttgttgacaccttccctggccaatctattgatttctttggtgcactcagggctagagtatatgacgatgaagtgaggaagtggatttctggtgttggtgttgacttgattgggaagaagcttgtgaactcc

SEQ ID NO: 251321 - DNA, 328 bp, Glycine max
ctcgagccgtgcaaagacccttggagaatgggctggtttgtgtaagattgattcagagggaaaggctcggaaggtaactggttgctcatgtgtggttgtcaaggatttcggggaggaacatgaagcatataatgttgttctgcagcatgtgaaagccaactgaggagttgctgcagcatgcctagatttgtgggttttagtttgaagttattgtatgagtctatttttgcctctatcatagggatattgatggtttagtacaattatacccgttctcattgttgctgagtgaatgcttttttaattactattggttttctgtgttttt

SEQ ID NO: 251322 - DNA, 295 bp, Glycine max
ctcgtttcaaaaaaaggtgccgttattgttgttaccatccagaaaatggcctatcttgttgttatcatcccaatactttcttataactcttacttgaattatcaatcttatttttatttcttttttttttctttttttatatctttaatttttttttttaatcttactatttttttatattttttttcattatattatttctttttttttttttaattttttatttttattatttcttttttttttctttttttttttttttctcttattatttttttatattttttttattttt

SEQ ID NO: 251323 - DNA, 337 bp, Glycine max
aagagaatgtcaagagagtccaattggctgacaagtacttgaacgaggctgcacttggaaatgctaacgaggatgctattaacaggggaactttcttccaatcttgaattggaggcaaagcaaacttggcaagtaaatatttctgttcctgaaggttgtgctgatccaagtgctagaagttgtgatgggacttgcgtgtaacattcttagaattctcaatgtcttaagtgcaaagagaagatgccaagtttgagatgattttactatatttttcatattggactgtcttcctctataattttgagttaaagtgtccacttaaattgaatttggtgcc

SEQ ID NO: 251324 - DNA, 295 bp, Glycine max
  unsure (1)..(295): unsure at all n locations
cagttgagctgaaaccgagaagaagaagatggagatgtatcagatctggagcaggagaatagcgttgggagcgttcgcgtttgttctgcttttcctatcggcctcagcagacgacgtcgttgtgctctctgaagataacttcgagaaggaagttggtcaggacagaggagctctcgttgagttctatgctccttggtgtggacactgcaaaaagcttgctccagaatatgaaaagcttggtagcagcttcaagaaagccaaatctgttntaatcggcaaggttgactgtgatgag

SEQ ID NO: 251325 - DNA, 289 bp, Glycine max
cgagaagcgagagctggtgttcaaggaggacgggcaggatgacgcgcgggtactttggatgctactatacaggctattattaggccaattctgtatacttgtgatataggataggaatttcttgacgaattacaatttctcattttgaagaaataaggtggcaaaaatgtttatatatgaattgttattattttttttcttattaggcctatactgatttcaaaggaattgagattggaatttcttgttggtacctaactctaattccttataatgagtcttattaaat

SEQ ID NO: 251326 - DNA, 410 bp, Glycine max
gttttgatgcaacgctgtcactgagaaaggatcgctatctgcgaaggagcggaataaaacccttctctctgtgattaagagaatggcttcagatcggaaacttcacacttttgaggaggtggcaaagcacaaccagaccaaggattgctggctcatcttttctggcaaggtgtatgatgtcacccctttcatggaggatcatcccggaggtgatgaggttttgttatctgcaacagggaaagatgcaaccaatgactttgaagatgtggggcacagagattctgctagagatatgatggaaaaatactacattggtgagattgatgcatcaaccgtcccactaaaacggacctacattccaccttaacaagctcagtacaatcctgataagactccacaatttgtgatca

SEQ ID NO: 251327 - DNA, 523 bp, Glycine max
  unsure (1)..(523): unsure at all n locations
agttttaggtgtgtctgtccatgattatgaagcacctccgaagagccaagcttgcatgcctgcaggtcgactctagaggatcccctcggggaattccaattccacattttcaagaaataaggaggcaaaaatgtgcatatatgaattggaattatttgttttcttattaggcctatcctgaagccaaaggaaatgagatcggaattcctcggggaattccaattccacattttcaagaaataaggaggcaaaaatgttcatatatgaattggaattatttgttttcttattaggcctatcctgaagccaaaggaaatgagatcggaattcctcggggaattccaattccacattttcaaganataaggaggcaaaaatgttcatatatgaattggaattatntgttttcttattaggcctatcctgaagccaaaggaaatgagatcggaattcctcggggtaccgagctcgaattccctatagtgagtcgtattaaattcgtaatcatgtcatagctggttcn

SEQ ID NO: 251328 - DNA, 426 bp, Glycine max
gttttgatgcaacgctgtcactgagaaaggatctgtatctacgaaggagcggaataaaacccttctctctgtgattaagagaatggcttcagatcggaaacttcacacttttgaggaggtggcaaagcacaaccagaccaaggattgctggctcatcttttctggcaaggtgtatgatgtcacccctttcatggaggatcatcccggaggtgatgaggttttgttatctgcaacagggaaagatgcaaccaatgactttgaagatgtggggcacagtgattctgctagagatatgatggaaaaatactacattggtgagattgatgcatcaaccgtcccactaaaacggacctacattccacctcagcaagctcagtacaatcctgataagactccagaatttgtgatcaagattttgcagttcct

SEQ ID NO: 251329 - DNA, 271 bp, Glycine max
tcggggaattccaattccacattttcaagaaataaggaggcaagggtgttggtatatgaattggaattattcgtattcttattaggcctatcctgaagccaaaggaaatgagatcggaattcctcggggaattccaattccacattttcaagaaatacggaggcagaaatgttcatatatgaattggaatgatttgttttcttattaagcctatcctcaaaccaaaggaaatcggatcggaattcctaggggaatttcaattccacatttt

SEQ ID NO: 251330 - DNA, 384 bp, Glycine max
gattttcattgccttcgcgggcctgaaggttaaggacattgagatggtcgcgtcctcggtgctgcccaagttctacaccgaggacgtgcaccccgagagctggagagtcttcaactccttcgggaagcgttacattgtcactgctagtcctagggtgatggtggagccgtttgttaagacgtttcttggggctgataaggtgcttgggactgagcttgaggccacgaaatcggggaggttcactgggtttgctaaggagcctggtgtgcttgttggggagcacaagatagtggctgttgtgaaggagtttcagggtaatttacctgacttgggactaggagatagtaaaagtgattatgacttcatgtcaatttgcaagggaag

SEQ ID NO: 251331 - DNA, 268 bp, Glycine max
cacacactgtgtttgtgaaactccctctcacagacaagtcagaaaaacaacttgtgttgttccaatggcatcagcaacaccccttttgaaagatgagctcgacatcgtgatccccacgatcaggaatctggatttcttggagatgtggaggccattctttgagccttaccatctcataattgtgcaagatggtgacccttcaaagaccatcaaggtccctgaaggctttgactatgagctctacaaccgcaatgacatcaacagggat

SEQ ID NO: 251332 - DNA, 427 bp, Glycine max
catgattgccccaacagcctttcagaaaatggctcatcctgagggagaatatgcaacagcaagagctgcatctgctgctggaacaatcatgactttgtcctcatgggctacttccagtgttgaagaggtggcttcaacaggacctggcattcgctttttccagctatatgtgtacaaggacaggaatgtggttgctcagcttgtgagaagagctgaaagggctggattcaaagccattgcccttactgttgataccccaatactaggacgcagagaagctgatatcaagaacagattcacattgccgccatttttgacattgaagaactttgaaggattggaccttggaaagatggacaaagctgatgactctggacttgcttcatatgtttctggtcaaattgatcgtactttaaactgaaggatg

SEQ ID NO: 251333 - DNA, 403 bp, Glycine max
aaagtgcttaatgaactgtgaagtttcattgattcttgagcacaagtatgagcagcttcaacagacatctgatgatcccatgaatcaaatttctcaggtatttgaaaagtcactgcagtatgtgaaacgtttcagtcgctataaaaatcctgatgctgtcagacaagttcgagaaattctcgcatgatatcaattggctgaatttgagtcgtgtgtccttggcaacctttgcccagaaactgtgtaggaagctattgctatggttccatctatcaagtcaataggactagctcaggatgatgaagcactcgacaaaatgttaaatgacctgtcgttgattaagaaatttgaataaatacgtcaaaatttgtgatggaatggtggtaccgtttaacaacttatc

SEQ ID NO: 251334 - DNA, 346 bp, Glycine max
tgcggagcggcgatcctagcactctcttctgcaggtatcgccgacagcttcattcaccatggctgagcaaaccgagaaggcttttttgaaacaaccaaaagtgtttctcagctcgaagaaaactgggaagggaaagagacccggaaagggtgggaaccgcttttggaaatgcattgggcttggatttaagactcccagggaagccatcgaaggaacctacattgacaagaagtgccccttcactggcaatgtttccatccgtggccgtatcttggctggaacatgtcacagtgctaagatgaacaggactattattgttaggaggaattatcttcattttattaag

SEQ ID NO: 251335 - DNA, 417 bp, Glycine max
ttggtactatgggaacggcattaatgattatctggttccgagagatcaagatctattagccaggtatgctgcaccaacatatatgactatctgctcaagggctacttccaatggtgaaaaggtggcttcaacaggacctgtcattcacttttttcagctatgtgtgtacaatgacaggaatcttgaaccatcatcttgatgagaagagctcatagggctggattcgaagccattgggcatactgctgataccccaatactaggacgcacagaagctgctatcaagaccagattcacattgccgacatttttgacattgaagaactttgaaggattggaccttggaaagatggacaaagctgatgactctggacttgcttcatatgtttctgggtcaaatggatcgtactttaaactg

SEQ ID NO: 251336 - DNA, 374 bp, Glycine max
attccattctctctgagtatttccctacctctcccttcaagagcagggcttcgtcaagaccctcaccggcaagaccatcacccttgaggtggaaagctctgacaccatcgacaacgtcaaggccaagatccaggacaaggaaggaatccccccggaccagcaacgtctcattttcgccggaaagcaacttgaggacggccgtacccttgctgactacaacattcagaaggagagtactcttcacctcgtcctccgtctccgtggtggcatgcaaatcttcgctaagacactcaccggccagaccataaccctagaggttgaaagctccgacaccatcgattacgtcaaagccaaaatccaagacaaggaaggta

SEQ ID NO: 251337 - DNA, 394 bp, Glycine max
attccattctctctgtgtatttccctacctctcccttcaagatgcagatcttcgtcaagaccctcaccggcaagaccatcacccttgaggtggaaagctctgacaccatcgacaacgtcaaggccaagatccaggacaaggaaggaatccccccggaccagcaacgtctcattttcgccggaaagcaacttgaggacggccgtacccttgctgactacaacattcagaaggagagtactcttcacctcgtcctccgtctccgtggtggcatgcagatcttcgttaagacactcaccggcaagaccataaccctagaggttgaaagctccgacaccatcgataacgtcaaggccaagatccaagacaaggagggtatccccccggaccagcaacg

SEQ ID NO: 251338 - DNA, 253 bp, Glycine max
gcatgcacgcctgcgtaagctcggaattctgctcgaggatcatgcctgcttcattgtcctggtcttatgccaattacgataaggggatacagctactcttgatcggtcacagctatgttgtatatagctgcctcctaatgcgcttctacaatgggactattaccactagtatcattacacctataggcatcgaacccttatattgaaccatagagctttatggcaaacggatcatgctgtacatctgggaaac

SEQ ID NO: 251339 - DNA, 425 bp, Glycine max
  unsure (1)..(425): unsure at all n locations
gttcatggctgctccaccggcaagggctcgtgccgattacgattatctcataaagcttctcttgatcggtgacagcggtgttggaaaaagttgcctcctcctgcgtttctccgatgggtctttcaccactagtttcatcacaactataggcattgattttaagataagaaccattgagcttgatggaaaacggatcaagctccaaatttgggatactgcggggcaggagcggtttcggacaattacaactgcttactatcgcggtgctatgggcatattgctagtctatgatgttacagatgaagcatcatttaataatatcaggaattggattcgcaatattgagcaacatgcttcagacaatgttaacaaaatactggtggngaacaaagctgatatggatgaaagcaaaagggctgtgccta

SEQ ID NO: 251340 - DNA, 412 bp, Glycine max
caaatggaaacattagtgaggtccaatcctggttgccccctcacagtggatcagcagtttgtttgtggagctggagccggagttgctgtttccattcttgcctgcccaactgaattgatcaaatgcaggttacaagcacaaagtgcgcttgccggctccgaaacagctaccgtggctgttaagtatggaggacctatggatgtggccaggcatgttcttaggtcagaagggggcgtgagaggtcttttcaagggcttggttcccactatgggacgtgagatacctggaaatgctataatgtttggtgtatatgaagcattaaagcaaaagtttgcaggaggtactgatacttctggcctaagtagaggttctctgattgttgctggaggcttggctggagcttccttctggt

SEQ ID NO: 251341 - DNA, 427 bp, Glycine max
gtataaccgggagaaatccccccatgggcgggagaagtccgcatatatgaggaactgggatagaagtcgtcagcatgatcataaattgagaagtccaatgcgtgctgagcagtcgccaccagatcgaagttcgcatcatgatcgcagggattgtaccccaaatttggcagaagcatctccccttcaacgagcgaggaaagactgtcgacaggaatcaagtagtaaaaccttatcaagtgaaaaacatgattcccaaaatagttgcaaggatcgtgaagataagcagattcaaagggagtcaaattgttcaagtacagaatctcaaaatgaaaaaagtgtgcaagttaccattaagtctgttgagaaagacatctgcagtgaacctctaaaggaacagcatagttgcagcccaactgtcagccacaaa

SEQ ID NO: 251342 - DNA, 337 bp, Glycine max
ccctttttgtgaaacaaggtactactcttgacagacacctgcggaagcttcaaaattcccccatcaagtttggctgcatttgttactgtgtccttgcttgtttgcattgtgctctatgaccgtttctttgtgaagatcatgcaaaggtttaccaagaaccccataggcattacccttcttcagaggatgggaattggccttgtaatccacacactgatcatgatcattgcatctgggactgaaagctatagactcaaggttgcaagagaacatggagtagttgaaagtggacggcatgtccctttgagcatattcattttgcttgcttaagttatac

SEQ ID NO: 251343 - DNA, 371 bp, Glycine max
  unsure (1)..(371): unsure at all n locations
ggttcacgaggaattgaagaagccttattgaaacacttgggagtgaagcgcaatgaagtaacaccagatggtttgttttctgttggagaaatggaatgcatgggatgctgtgtgaatgctcctatgattacagtggctgattattcaaatggatcagagggatatacttataattactttgaagatgtaaccccagagaaagtagttgagatagtagaaaagctgagaaagggtgagaagccaccgcacggcacccaaaatccccgccgaattaagagtggacctgaaggagggaacactactttgttaagtgagcccaagccttctncctgccgtgacctggattcctgctgaagtgtgatatacttttt

SEQ ID NO: 251344 - DNA, 377 bp, Glycine max
ccgcagaaaaataaaaaaagagtagctagcactagctagctgaacacagtacgagtagtgatcataggcaagcaaaagcatattcataatatggcaaccatggaagacatgaacaacatgagtggtgaaattacacttccaggcttccgattccacccaactgaagaagagcttcttgatttctaccttaaaaacatggttgttggcaagaaacttcgttacgatgtcattggtttcctcaacatctatcagcatgatccatgggacttgcctggtttggcaaaggttggggaaagagagtggtacttcttcgtgccaagggacaaaaagcacggaagcggaggaaggccaaaccgcacaactgaaaaaggttctgg

SEQ ID NO: 251345 - DNA, 416 bp, Glycine max
gaacgagccagagtaagaaaggagtgtcattcatggcgattgagcaatgaagatccaaggctttctcaccgtcgcaatcccaacgaatcagtttcattggaccaattagcagaattgggtgtgttatactggaagctcaatccaactatctatgagaacgatcaagagttgaccaagattagacaagataggggatacaactacatggacctgcttgatttatgcccagaaaaggtggaaaattatgaacagaagttgaagaacttctacactgagcacattcatcaggatgaagagattcgttattgtttggaaggaagtggctactttgacgtgcgggacaaggatgatcgctggattcgcattttgatcaaagctggtgatcttatcattttaccagcagggaattatcatcg

SEQ ID NO: 251346 - DNA, 367 bp, Glycine max
gacagaagaacctttttgttgcctctttcttctttgaccgggctgctgaggctggttttgctgatccaaacttgccagtcgcgatagttcgtcctgcagattttgaggatgcagctaagcaagcatgccaaacaaaacttgagaatgccaaatccacttttcctcgtgttgatgaggggaaccttccctatctttgcatggatcttatataccagtatacactactcgttgatgggtttggtatatatccatggcaagagattacattggtgaagaaagttaaatacgacgatgccctggttgaagcagcatggcccctaggcagcgccattgaagctgtgtcatctgcgtaaaattactgggacta

SEQ ID NO: 251347 - DNA, 400 bp, Glycine max
tagcaaaaaaggtctgggcagaggttttcttctaccttgctgagaacaatgtcctttttgagggtattcttcttaagcctagcatggttacacctggagctgagtccaaggacaaggccagtcctcagacagttgctgattacaccctcaagctccttcacaggagaattccccctgctgtccctggaattatgtttttgtctggtggacagtctgaggttgaagctaccctcaacttgaatgccatgaaccaatctccaaacccgtggcacgtgtcgttctcgtatgccagagccctccaaaacactgccttgaagacatggggaggccgcccagagaatgtgaaggcggcacaagatgcacttcttttccgtgccaagtccaactcgctcgcccagct

SEQ ID NO: 251348 - DNA, 334 bp, Glycine max
gttatttaaggggttaagcagttgaaaatgaatgatgcggctattcaattgactgataatattagtgaagcaaatgctttacttgccttacaatccaagcttaaaaagaatccagggatccaggctgccgctaaatctcatgatattcccatttatgtgacaaagacaagttctttggagcatgtagcaaaagccatacgggcattagtaagtgatcatgaagatggtataaaggattctgaactaacggacaagataaaatcctcagagatgattgatgctttggaagaagcgcgaatggctatagagcatacagtgattctaaagggagaac

SEQ ID NO: 251349 - DNA, 249 bp, Glycine max
atcaaattagttcattctctttgcgcagttccctacctctgctttcaagatgcagatcttcgtcaagaccctcaccggaaagaccatcacccttgaggtggaaagctctgacaccatcgacaacgtcaaggccaagatccaggacaaggaaggaattcccccggatcagcaacgtctcatcttcgccggaaagcagctcgaggacggccgtaccctcgccgactacaacatccagaaggagtcaaccct

SEQ ID NO: 251350 - DNA, 300 bp, Glycine max
  unsure (1)..(300): unsure at all n locations
ccgaatgaacactggctatggtgcccgtactccggaggtgaaatgcgcaagttggaggcttgctgtggaagcacacaacatctttggctttgagaccattcctgaagagtgcgttgaagcaacaaaggaatacatccatggcgaacaatatagatcagactccaaaacagttaaccaacaagcttacttttatgccagagacctcgaagtccatcccaaggacacatttgtgttcagtatagatggcaccgtactctctaatattccatactacanaaaacatggatatggngtggagaa

SEQ ID NO: 251351 - DNA, 531 bp, Glycine max
  unsure (1)..(531): unsure at all n locations
agtttcagagctgtgtcntgtgactgagcactcagncnntcgggagagcacaagcttgcatgcctgcaggtcgactctagaggatcccctcggggaattccaattccacattttcaagaaataaggaggcaaaaatgttgatatatgaattggaattatttgttttcttattaggcctatcctgaagccaaaggaaatgagatcggaattcctcggggaattccaattccacattttcaagaaataaggaggcaaaaatgttcatatatgaattggaattatttgttttcttattaggcctatcctgaagccaaaggaaatgagatcggaattcctcggggaattccaattccacattttcaagaaataaggaggcaaaaatgttcatatatgaattggaattatttgttttcttattaagcctatcctgaagccaaaggaaatgagatcggaattcctcggnggtaccgagctcgaattccctataatgagtcgtattaaattcgtaatcatgtcatagctgtttcctgt

SEQ ID NO: 251352 - DNA, 321 bp, Glycine max
gctgaagcaacaaaacaggccatcaaacgaaaaattgtgcgggctgcatctatcgatttacagtctcggagtctacctgcaaagcttcgtatagaggctgatgatcctgaggatgtgaaagcttcgaaacgcacgaaaatacatgcctttaagtcaaagatgcggatggagcaacttgaagtcacacataataagcggcaaaatgcttggcagcaatttcagtcaaccataggaaaggcatagaagattggtttcttctctggaagaaaacgggagagtatttttaaatctgctgatgatcctcagggtaaggttggtgtg

SEQ ID NO: 251353 - DNA, 416 bp, Glycine max
ccacttctgaatctattgaatcaacaatcatgtcggacgaagagcaccatttcgagtccaaggccgacgccggagcctccaaaacctaccctcagcaagccggtaccatccgcaagaacggctacatcgtcatcaaaggccgcccctgcaaggttgtggaagtttcgacttccaaaactggaaagcacggtcacgctaagtgtcactttgttggaattgatattttcactgccaagaaacttgaggatattgtgccctcttctcacaactgcgatgttcctcatgtgaatcgtactgattaccagctcattgatattgctgaggatggatttttgagtctgcttactgaaaatggtaacactaaggatgacctcaagcttcccactgatgagagtctgctcactcagataaaggat

SEQ ID NO: 251354 - DNA, 325 bp, Glycine max
tccctggcggcttccaccgcagctatgtcagaaatgcttggaaaccccgtgagcctgagaggcgccaccaggtctgctccatcaccgtctacacctgttactttcaagaccgttgcgcttttctccaagaagaaggcagcaccacctcctccaaagaaaaagcctgctgctgtatcccccgccaatgaggaactcgccaagtggtatggtcctgacagaaggatcttcttgcctgagggtctcttggaccgatcagagatccccgagtacttgaccggagaagtgcctggagattatggttatgacccgtttggtcttagcaaga

SEQ ID NO: 251355 - DNA, 295 bp, Glycine max
tggcatctccagactaaaattgagaagcaaaaagcaccggctaaggggaaccccatggattcaaacaataaagctatgcctattcagtgtaaagtgtgcaagcggacatacatatgctcctcatctcaactgaactgtaaggagcatgctgaagccaaacaccccaaatctgatctctatgattgttagcctcatcttaaaaagttaaagagttcatgttgacacatgatatcaatatatggcctgttctacaaactatatccacatagatcttcaattactcttaatataaaat

SEQ ID NO: 251356 - DNA, 367 bp, Glycine max
aaaacaatggttatcttatggtctcgtgcaatggaggactcaaccagatgagagctgcgatatgtgacatggtggctattgctcgatatttaaatgtcacgcttatagttcctgaactggataaaacatccttttgggctgatcccagtgacttccaagacatatttgatgtggatcattttatcacttccttgagagatgaagtgcggatactgaaagagttgcctcccagactcaagctgaaagtggagcgcgggtttctttacaccatgccgcctattagttggtctgatatatcttactataaggatcagattctacccttgatacaaaagtacaaagttgttcatttaaatagaactgatgc

SEQ ID NO: 251357 - DNA, 375 bp, Glycine max
ggcattccaccttcaacgaaccctgcaactcttcttaaggaagcaatccatgttatcagctgtggttacgaagacaagacagaatggggcaaagagattggatggatctatggctctgtgacagaagatatcttgactgggttcaagatgcatgctcgtggttggatttccatctattgcatgccacctcgcccagcatttaagggttctgctcctatcaatctttctgatcgtctcaatcaggtgcttcggtgggccttgggttcaattgagatctttctaaacaagcattgtcccttgtggtatggctacaatgggaagttgaagcctctgatgaggcttgcttatattaacaccattggctacccgtttacc

SEQ ID NO: 251358 - DNA, 378 bp, Glycine max
accaagcttgatattcagattaagttggacaaggaaaagagaattctgtgaattcgagacagaggtatcggtatgacgaatgaggatttgataaagaatttggggacaatagcgaaatctggaacttctgcatttgttgagaagatgcaaacaagtggagatctcaatctgattgggcagtttggagtcggcttctactctgattatcttgtggccgactatgtcgaagttattaacaagaataacgatgatgaacagtatgtatgggaatcaaaagctgatggagcattcgctatttcagaagatacatggaatgaaccacttggacgaggaactgagattagattacacctcatggaagaggcttggggaatactt

SEQ ID NO: 251359 - DNA, 412 bp, Glycine max
ttcaaacctaacgcagcatcgctattctcttcattccatggctttgcccaaccagcaaaccgtggattaccctagtttcaaactcgttatcgtcggcgatggtggcacaggaaagacaacctttgtgaaaaggcatctcaccggagaattcgagaagaaatatgagccaaccatcggtgtggaggttcacccattggattttttcacaaactgtggaaagattcgattttactgctgggatactgctggacaggagaaatttggtggcctcagagatggatactatattcatggacaatgtgctattatcatgtttgatgttactgcccggctaacatacaaaaatgttcccacctggcaccgtgaatctttgcaggtctgtgagaacattccaattggtctttgcagtaac

SEQ ID NO: 251360 - DNA, 395 bp, Glycine max
ctgtccgaagccacttgagagaaaatggcggtgcgctctgctctcaaagaagatcgtgaagaacacggtaaagaagctcaagaggcctcagagtgacaggacaatttccgtcaagactaactggcgcagaccaaagggtatcgattctcgtgttatgagaaagttcaagggatgcactttgatgccaaacattggttatggctcacacaagaagacccgccactatctgcctaatggcttcaagaaatttgttgttcacaatgtgaaggatttggaactgctcatgatgcacaacaggacttactgtgcttagattgcccacaatatattcacaagaaagagaaaagatattgtccagagagccgtgcaacttgatgttgatgtgacaaacaaaa

SEQ ID NO: 251361 - DNA, 312 bp, Glycine max
gagactaagctggcacgcctgcatgagctcggaatacggctcgaggtgataatggagtttcaagggttaccggaaggctgcattgcgagtatactctatcgcactacgccggcggacgtgtgtaggttttccgtcgtatcaaagattttccgttcggccgctgaattggacgctgcgtggaaacgttctctcccttacgattaccattccatcatttcccagtctccttcgactctcaactatccttccaagaaggagctctatctcgctctctcggatcgccctatcatcatcgatcagggtaaaaagagc

SEQ ID NO: 251362 - DNA, 304 bp, Glycine max
ggggacgagaacgagagctgcatgcagttcttgaaggacatggaagtgatccaggtccctacctttctcttcatcagagatggcaacattgaaggcaggtacgtcggttctggcaaaggggagctcattggggaaattctcaggtaccaaggtgttcgtgtcacttattaattttcttactacacatacttatttctacttctattaagttcagctcaacaaacacatgtttactaaactttctgagaaaggaacttgctttgctttatagtcaacccctggatgcgtaatattattttgtggt

SEQ ID NO: 251363 - DNA, 323 bp, Glycine max
tcaaatcccaacaaaaaaccaaagtaatctaacaaagtaagcacaatgagggagatattgcacgtgcaaggtgggcaatgcgggaaccaaatcggttccaagttctgggaagtgatatgcgacgagcatggcatcgaccccaccggaaagtacaccggcgacgaggccttcgatctccaactggagaggatcaacgtctactacaatgaagcctccggcggaaggtacgttccccgggccgtcctcatggatctcgagcccggcaccatggacagcatcagatccggcccatactgcaagatctttcggcccgacaacttcgt

SEQ ID NO: 251364 - DNA, 382 bp, Glycine max
caacagagctcttttgaacctgaatgggtctggacctggggtttcagctcccagttcatccttctttgggagcagcttgaagaaggttattggctcaagggtccccaacacaaagatttcctctggaagcttcaagattgttgctgtagaagagaagaaagagattgaagagacccagcagaccgacaaggacagatggaagggtcttgcctatgatatctcagacgaccaacaagacatcacaagaggaaagggtttggttgactcccttttccaagctccacaggatgctggaactcactatgctgtcatgagctcctacgagtaccttagcactggacttcgccagtacttgtacaacaacatggatggattttacatt

SEQ ID NO: 251365 - DNA, 315 bp, Glycine max
tcggggaattccaattccacattttcaagaaataaggaggcgaaaatggggatatatgaattggaattatttgttttcttattaggcctatcctgaagccaaaggaaatgagatcggaattcctcggggaattccaattccacattttcaagaaataaggaggcaaaaatgttcatatatgaattggaattatttggtttcttattaagcctatcctgaagccaaaggaaatgagatcggaattcttaggggaattccaattccacattttcaagatataaggaagcaaaaatgttcatatatgaattggaatta

SEQ ID NO: 251366 - DNA, 413 bp, Glycine max
tgatgatggtgcccaaaaacgtgagtgcccaaggcataggtgatgacatcgtcacacaagacttcttcaacagcataatcagtcaggctgatgatggttgtgcagggaagaacttctactcacgagatgctttccttaatgctcacaattcctacaatgagtttggtaggcttggtaatcaggatgactccaagcgtgaggttgcagctgctttcgcccatttcacccatgaaacaggacatttttgctacatagaagagattaacggtgcatcatgggactactgtgactagagcaacaccgagtacccatgtgcccctaacaaagcgtactatgggcgtggaccaatccaactatcatggaacttcaactactgaccagcatggcagagcatcggatttgatggattgaac

SEQ ID NO: 251367 - DNA, 400 bp, Glycine max
tgtgcattattcaatggccaccacagcagctcggtccggggccatggtgagcacctgcttcatgaggaagcaacctatgacgaccaagagcctaaagacattccccaacgctctttttggtctgaaaggtggacgaggaggtcgagtaacttgcatggcctcgtacaaggtgaagctcataaccccagaaggagaagtggagtatgaatgcccagatgatgttctcattgctgacaaggctgaggaagaaggcattgaacttacctactcgtgcagggctggttcttgcgtttcatgtgttgggaaaattgtgaaaggtgacttggaccagtcagatggtagcttccttgatgatgaacaaatagaaagtggatgggttcttacctgagttgctctacct

SEQ ID NO: 251368 - DNA, 412 bp, Glycine max
aacgcgcactctctcttttctctcttaacacagagaccctgtcgttcttcgcggtttcgccgattctcgccatgccgaaagccaaatccgacgccaaagccgccgatagccggttgaagcgcaagggcgctggtgctggaaggaagcaatcgaagaaagctgctaaggatcctaacaagccaaagagacctccaagcgctttcttcgttttcatgtccgagttcagagagcagtttaagaaggagcatcctaacaacaaatccgtcgctgttgtcggtaaagctggtggtgacaaatggaaatcgctgtctgatgctgaaaaggcccccttcgttgccacggccgaaaagaagaaacaagagtatgagaaaactattttggcttacaataagaaattggaggggaagaattc

SEQ ID NO: 251369 - DNA, 538 bp, Glycine max
agttagggttgagaggtctgtgactgaactcatgcatacttagtaattaccaggagagactaagcttgcatgcctgcacgtcgactctagaggatcccctcggtgaatctcaattccacattttcaagaaataaggaggcagaaatgtggatatatgaattggaattattagctttcttattaggcctatcctgaagccaaaggaaatgagatcggaattcctcggtgaattccaattccacattttcaagaaataaggaggcaaaaatgtgcatatatgaattggaattatccgtggtcttatcacgcctatcctgaagccaaaggatatgagatcggaattcctcggtgaattccaattccacatgttcaagacataaggaggcacagatgttcatacatgaattggaattatctgtttgcttattaggcctatcctgaaaccaaaggaaatgagatcggaattcctcaggggtaccggactcgaagtccctatagtgagtcgtaataaattcggaatcatgtcacagctggttgc

SEQ ID NO: 251370 - DNA, 531 bp, Glycine max
  unsure (1)..(531): unsure at all n locations
gaagttttaggtgttgatgctactnccatcgagtcatcgtaagacagcttgcatgcctgcaggtcgactctagaggatcccctcggggaattccaattccacattttcaagaaataaggaggcaaaaatggtgcatatatgaattggaattatttgttttcttattaggcctatcctgaagccaaaggaaatgagatcggaattcctcggggaattccaattccacattttcaagaaataaggaggcaaaaatgttcatatatgaattggaattatttgttttcttattaggcctatcctgaagccaaaggaaatgagatcggaattcctcggggaattccaattccacattttcaagaaataaggaggcaaaaatgttcatatatgaattgggattatttgttttcttattaggcctatcctgaagccaaaggaaatgagatcggaattccttcggggtaccgagctcgaattccctatagtgagtcgtattaaaattcgtaatcatgtcatagctgttttctgtgggaa

SEQ ID NO: 251371 - DNA, 397 bp, Glycine max
tcggggaattccaattccacattttcaagaaataaggaggcaaaaatgtgcatatatgaattggaattatttgttttcttattaggcctatcctgaagccaaaggaaatgagatcggaattcctcggggaattccaattccacattttcaagaaataaggaggcaaaaatgttcatatatgaattggaattatttgttttcttattaggcctatcctgaagccaaaggaaatgagatcggaattcctcggggaattccaattccacattttcaagaaataaggaggcaaaaatgttcatatatgaattggaattatttgttttcttattaggcctatcctgaagccaaaggaaatgagatcggaattcctcgggggtaccgagctcgaattccctat

SEQ ID NO: 251372 - DNA, 407 bp, Glycine max
tcggggaattccaattccacattttcaagaaataaggaggcggaaatggtgatatatgaattggaattatttgttttcttattaggcctatcctgaagccaaaggaaatgagatcggaattcctcggggaattccaattccacattttcaagaaataaggaggcaaaaatgttcatatatgaattggaattatttgttttcttattaggcctatcctgaagccaaaggaaatgagatcggaattcctcggggaattccaattccacattttcaagaaataatgaggcaaaaatgttcatatatgaattggaattatttggattcttattaagcctatcctgaagcccaaggaaatgagatcggaattcctcgaggggaccgaactcgaaatccctatagtgagtcgt

SEQ ID NO: 251373 - DNA, 400 bp, Glycine max
ggggatagatagagtgatacgcgtcacgttttcataataataaaaaaatggcagcggcggcggcagtgacggtgctactcccacctaggattccgaccaccaccaacgttacccgctgctctgctttgccttctctccctcctcgcgtctccaacaccaaaaccactttgttctcaccttccctcaacaacttttcagtgtcccgaaaatcttctctgcttcagaccatagcttcttcagaggaatcatcctcagtagatgccaatgaggtgttcacagatttgaaggaaaagtgggatgctcttgaaaacaagtccacagtacttctttatggtggaagggctatagttgctatttggctatcgtcaattcttgtgagcgccatcaactcagttccctt

SEQ ID NO: 251374 - DNA, 207 bp, Glycine max
gagcaacaaagtcaagcctcttatcgctgctgtgcccaacgcgtgcttgtgtggaaactgtggatgataagaagatagcaaattttcttgatcgtgctgtagcaaatgttggcaggaaaccgttaaaggtttctgttcaagtgaatacaagcggagaaacatccaaatttggtgttgaaccagctctgtgtgtggatcttgtaaaac

SEQ ID NO: 251375 - DNA, 411 bp, Glycine max
  unsure (1)..(411): unsure at all n locations
cattcccttcacaagattctcacaaacaactcttgagaaagaaagaatggctgccaacacattgatgagttctgccatctcagccttcccatctctcctttcctcctcaaaatccagatttgccgcagcagttcctctttccagctttgttgtcaccaatgcctcttcttctcgcttttccatgagtgctgactggatgcctggccagcctagacccccctaccttgatggttcagcacctggtgactttggattcgaccctcttcgtcttggtgaagtaccagagaatcttgagaggttcaaagagtcagaactcattcactgcagatgggccatgcttgctgttccagggattttggttccagaggcattgggcttaggcaactgggtaaaggctcangaatgggcttc

SEQ ID NO: 251376 - DNA, 538 bp, Glycine max
  unsure (1)..(538): unsure at all n locations
agtagttnatagaggtctgtcatgaagcataatgaaatcatattcattactcggagagacaagcttgcatgcctgcaggtcgactctagaggatcccctcggggaattccaattccacattttcaagaaataaggaggcaagaaatgttcatatatgaattggaattatttgttttcttattaggcctatcctgaagccaaaggaaatgagatcggaattcctcggggaattccaattccacattttcaagaaataaggaggcaaaaatgttcatatatgaattggaattatttgttttcttattaggcctatcctgaagccaaaggaaatgagatcggaattcctcgggggtaccgagctcgaattccctatagtgagtcgtattaaattcgtaatcatgtcatagctgtttcctgtgtgaaattgttatccgctcacaattccacacaacatacgagccggaagcataaagtgtaaagcctggggtgcctaatgagtgagctaactcacattaattgcgttgcgctcacttgccgt

SEQ ID NO: 251377 - DNA, 209 bp, Glycine max
gtcgtgatcttaaagatgcggaattttacaaactgcaagtcaaggctgtgtttaagaatctctcaagaggacattatgaagcatcaaggatgtcagttgaaactggcccttatgtttttcattatattatagaaggacgggtcttttacttgacaatgtgtgatcgtgcataccctaagaaactagcctttcaatatcttgaagagctc

SEQ ID NO: 251378 - DNA, 536 bp, Glycine max
  unsure (1)..(536): unsure at all n locations
tagaagtttatagtggtctgaccatgatnccctactctcgtaacgtaacaccatagaagagctatgacgtcgcatgcacgcgtacgtaagctcggaattccccggtgactacggatgggacactgctggactatcagctgacccggagaccttcgccaggaaccgggagctggaggtgattcacagcagatgggccatgcttggtgcacttggctgcaccttcccagagatccttgagaagaatggtgtgaaattcggcgaggccgtgtggttcaaggctggttcacagatcttctcggagggaggacttgactacttgggcaacccaaacctgatccatgctcaaagcatccttgccatctgggctgttcaggttgtgctcatgggttttgttgaaggttacagagttggtggaggaccccttggtgaaggacttgaccctatctaccctggtggtgcatttgaccctctggtctggctgatgacgctgatgcattcgctgagttgagggcagggaactcaagaacgggtccttg

SEQ ID NO: 251379 - DNA, 391 bp, Glycine max
tggcgctgctcaaggtacacgcacccacacccagacccacatctgcctctgctcaactgcaatggcgctgcagtgtaagtgtggcacccaccactctggcgtttcccaattcctactccatttctgcggaaagaggaatgaagagaatggaattggagggtgaaatgcagcagcagcagtgcggagattgagaaaggggctgcgagttttgggcccgggagcccagtgagagcaaccaacattctggtggttggagcgactggaaccctgggaaggcatattgtgcgactggcactcgacgaaggctacgacgttaggtgtctggtcatgcccaggcccgctcctgcctacttccttcgcgatgggggagcaacatttgtgaatgctgacc

SEQ ID NO: 251380 - DNA, 422 bp, Glycine max
cgagaaaggagaagaagagaatcataagaaagcaagaaagaaaatgggagtggagaagcagttgttgaggcctggcaccggtcccaagccaattcccggtcagaacgtcaccgttcactgcactggtttcgggaagaacggtgacctttctcagaaattctggagcaccaaggatcctggccaggaccctttcactttcaaaatcggccaaggttctgttatcaaaggatgggatgaaggtgtgcttggcatgcaaattggtgaagttgctcgtctccggtgctctccggattatgcttatggtgctggtggctttccttcttgggggatacagcccaactctgtcttggaatttgaaatcgaagtcttgagtgcacaatgaaaaccttggtagtctgtctctgtcctaagaattaaatcat

SEQ ID NO: 251381 - DNA, 282 bp, Glycine max
atgcacgcatgcacgcgttcgtaatcctgctttagcacacactctttatgtgtttctctctctcacatacaagtgcgtaaaaatgtctagttttgtttcaatggcatcatcaacaccccttttgaaagatatagttcttcatctttatccccactatcattaatctgtattacttggagatagtgtaggccattctttgagccttaccatctcatatttgtgcaagatggtgacccttcaaagaccatcaatgtcccttattgctttgactatgagctctac

SEQ ID NO: 251382 - DNA, 418 bp, Glycine max
  unsure (1)..(418): unsure at all n locations
caacacaacgcgcactctctcttttctctcttaacacaaagaccctatcgttcttcgcggtttcgccgattctcgccatgccgaaagccaaatccgacgccaaagccgccgatagccggttgaagcgcaagggcgctggtgctggaaggaagcaatcgaagaaagctgctaaggatcctaacaagccaaagagacctccaagcgctttcttcgttttcatgtccgagttcagagagcagtttaagaaggagcatcctaacaacaaatccgtcgctgttgtcggtaaagctggtggtgacaaatggaaatcgctgtctgatgctgaaaaggcccccttcgttgccacggccgaaaagaagaaacaagagtatgagaaaactantttggcttaacataagaaattggaagggaagaattc

SEQ ID NO: 251383 - DNA, 405 bp, Glycine max
tgtagtatcacttttgtctcggaatttgttcttttgagttatggcaagcttaaaggttgcatgtgtggttttgatgtgcatggctgtgatgagtgcaccaatgatggtgcaagccgtgtcatgcaatgatgtttctgtgaacctagcaccgtgcctatcttacctgatgcagggtggagatgttccagaatcgtgctgtagcggagtgaggaacattctgggttctgccagcaccacctttgacaaacaaaccgtgtgcaaatgtcttcagcaagctgctaataactatggcatcaacgacgaatacgctcaggcactccccgcccgctgcaatgtcagcgtcccttacaagatcagccgatccaccaactgcgactccatcaagttctaaaggagcgggtagct

SEQ ID NO: 251384 - DNA, 274 bp, Glycine max
aattaagagcaacagtaaatctgcctaagggaaccggaaagcccgttaaagtggctgttcttactcaaggtgaaaaattcgatgaagcaaaaaatgcaggagctgatttggtgggtggagaggatctgatagaacagataaaagcaggattcatggagtttgataaactaattgcttctccagatatgatgcctaaggttgctagcctagggaagatttttggaccaagatgactgatgccaaacctaaaagctggcactgtaacacccaatat

SEQ ID NO: 251385 - DNA, 541 bp, Glycine max
  unsure (1)..(541): unsure at all n locations
agatgtgggagaggtctgatcactgaagcctagtctcgtancgtagaaccatagaagagctatgacgtcgcatgcacgcgtacgtaagctcggaattcggctcgagctcaacgagaacagaaatctcgtgtggaacaaaagggtaaaagctcgtttgattctgatttccagtacgaatacgaaccgtgaaagcgtggcctatcgatcctttagtccttcggaatttgaagctagaggtgtcagaaaagttaccacagggataactggcttgtggcagccaagcgttcatagcgacgttgctttttgatccttcgatgtcggctcttcctatcattgtgaagcagaattcaccaagtgttggattgttcacccaccaatagggaacgtgagctgggtttagaccgtcgtgagacaggttagttttaccctactgatgacagtgtcgcaatagtaattcaacctaatactagaggaaccgttgattcgcacaattggtcatcgcgcttggttgataagccagtggcgcgaagctgccgtgcgt

SEQ ID NO: 251386 - DNA, 414 bp, Glycine max
caatgtatactaggcttcgacatttttttgcaactatttataacaggatgcaggtgaaaccaaataaacaaccagttattgtttctgtgccaatatgccattatgatgatactgaatcagccaaagcatctaggcaacagcttaaagaggcaatttatgcttccttgtttgacatgaatgttcctgctgtttgcgccgtcaaccaggccactctagctctgtatgctgcaaaacgaacttctggaatagttgttaatataggttttcaagtcacgtctatagttccaattttaaacggtaaagtaatgcgcaaggtgggtgtggaagttgtggggctgggagcactgaaacttacaggatttcttaaggagaagatgcaactgaataatttaagttttcaatctttatacactg

SEQ ID NO: 251387 - DNA, 408 bp, Glycine max
tcgagagcagtgctattgttggctatgtgtgtgcttccggccatggttgtggccattcgcccagcaaagaaccctttttgcgtgaagggtcgcgtctactgtgacccttgccgtgctggttttgagacctcagcaaccacctacattgccggtgctgagattatgttgcaatgcaagagcagggttagcaacgaggttgtgtacaccaagaaggggtacactgactcaactggagcatacacaatgtacgtggacgaggatcacgcagatcaaatatgcagtgccaagcttgtaagcagccctcaccctcaatgcaaggaagtcaccccgggccgcgacgaagccgtcgttattctcacccgctacaacggcattgcatccgatgataggttcggcaatgccatgggc

SEQ ID NO: 251388 - DNA, 245 bp, Glycine max
gcagagaccgtggttactctcgtggtggtgatggtggtgatggaggctggagaaactaaggcttgatgtcgtcaattagggtttatgattatgccccgtatttttagttgttgtggtttgagttcgagtttctttatggtttcgtgttaccgtggttcttgtttttgaccaatatatctggttgtttatagttgatttagtgaaatgataatcagtaattggagtaaaaaaaaaaaaaataattt

SEQ ID NO: 251389 - DNA, 379 bp, Glycine max
aaaaaaggacattcattcatctatggctacccttattgctcgccagcaaccactctccccaagaagatgctgaagctctcagaaaggcttttgaaggatggggaactgatgagaacactgtcatagtaattttgggtcatagaactgtgtatcagaggcagcaaatcagaagagtttatgaggaaatttaccaggaggatcttgtgaagcgcctagagtctgagatcaaaggagactttgagaaagccgtgtaccgatggatactggaacctgcagatcgtgatgctgttttggccaatgttgccatcaagagtggcaaaaactacaatgtcattgtggaaattgccactatcctcgtccccgaagaacttttggcggt

SEQ ID NO: 251390 - DNA, 399 bp, Glycine max
ctcgagccgaggcaagcgcttctcctctttgtgttctggctatgcttcttggcaagagttagatcggacgaggattgcgtgtacacggtgtacgttcggacgggttcgatcatcaagggaggcaccgattcagtaattggtctgaagctatacgacaagtccggctacggcatatacatcaccaacctcgaggcatggggcgggttaatggatccgggtcacaactactacgagcggggcaacctcgacatattcagtggtagaggcccttgcttggaagcacccgtttgcgaggccaacctaacttctgacgggtcggggccccatcacggctggtacgttaattacgtcgaggtcaccaccactggggtccacgcgccttgttctcagcagcagttc

SEQ ID NO: 251391 - DNA, 411 bp, Glycine max
tgacacccacctaaaccatggcttcccacttcgtcaaatccctccttctcctctccacctatgccctcaccatctcagcagaatacacaggcttcgtgggaacactagacccaaagtccataggcatacaccacaggaaaaccctaagccacttcaggttctactggcacgaagtcttcagcggagaaaaccccacatcggttagaatcattccctcactccccaaatacaacgcaaccacaaccttcggctccgttggaatctttgacacccctttaaccgtgggacctgaggtgtactccaaggttgtcggaaaagccgagggcttgtttgcctccacgtcacaaacgcagtttgacctgttactgatttacaacttcgcgttgacccaagggaagtacaacggcagca

SEQ ID NO: 251392 - DNA, 379 bp, Glycine max
ctcactacaagctgcagctaccttcatgcaacccaccaaggttggcatagcctctcgcaacctcaaatctacacaatgcatttctaaggcttttggcttggaacctgctgcagctaaactcacttgctcccttcagcctgatctcaaagaatttgctcaaaaatgtgtcgacgctaccaaaattgcaggattcgcccttgccacctctgctctcgttgtttctggagcaagtgcaaaaggtgttccaaaaaggctaaccttcgacgaaatccagagcaagacatacttggaagtgaaaggaactggaactgctaaccagtgcccaaccattgaaagtggagtggactcattcgccttcaaaccaggggaatacaacgcc

SEQ ID NO: 251393 - DNA, 395 bp, Glycine max
gttcactgatgaaaccaaaacataaaccctactccttcctggctctcacccgacactttcgcgcgctacaatcttgtcccctcatggcccaaaccccaacttctctcgatgcagagcaccccgccgccgccgaccagcacgtgggctttccggcccggagcctgagcggagagtcttgggcggagcgggcgtgggcccactgggccaagctgggccggcccaggttcatagtggccccgatggtcgacaactcggagctgccgtttcgcatgctgtgccgcaagtacggtgcccagggcgcgtacacgccaatgctccattcccgcattttcaccgagaccgaaaagtacagaaacgaagaattcaccacttgcaaggaggatcgacccgtattt

SEQ ID NO: 251394 - DNA, 381 bp, Glycine max
ctcaatctcttccttcccaacagttccacacgttgtctttactcctcaagcccttcagtgccatttttttctagaaaaaaactgtttccagttttattcaatccacaactgaaaacagaggactctgtttttgtgctgagaaaacaaaaaaatggcttccctttatgatgtgcttggtatttcagtgggtgcaagctgcatcgaaataaaggctgcttacagaaagctggcaagaacataccatcctgatgttgtggccatgaatcagaaggaaagctcagcgaaccaatttatgatgatccattcagcttactcaactttatctgacccagagaagcgagctcaatatgacagagaaatctatagattcagaagatcagc

SEQ ID NO: 251395 - DNA, 423 bp, Glycine max
tgacactccaaggaggcaagggaaaacaaaccagaaagtctgacctttccctttctccaaaggatcatcaaactaaactaaatcaaatcaaaatcaaactttgtcacggttatattagacccttttataaacctctttcaaggcttttcaatcacaccctttctctaatcacttcttcttgtgctggcataacttcaacaacttattctttgttctcgatctcacgatggctcatttggccctgtctcagatggctgtaactgttcctgttggcagcgatttgtctctcagaagatctgcggttaaggcacctaactttaacttttgggataaatcatgggcaccagtatttactttgtacttgaaggcaaacaactcaagtttaagaagtcgtcatgtggtattcatgtcagtgcaacaagc

SEQ ID NO: 251396 - DNA, 374 bp, Glycine max
cttggcttgtgaatcagcaccacattcacctgagcttttggggaggaggccaaagcatggcttcccttgcagcatccactgctgctgcttcccttggcatgtcagaaatgcttggaaaccccatcaacctcagtggtgccacaaggccagctccatctgcctctagccctgcctccttcaagactgtggctcttttctccaaaaagaaggctgcacctccaaaaaaagctgcagctgctgctcctgccaatgatgagcttgccaagtgggatggtcctgacagaaggatcttcttgcctgatggtctcttggaccgatctgagatcccagagtacttgaccggagaagtccccggagactatgggtatgaccca

SEQ ID NO: 251397 - DNA, 393 bp, Glycine max
caaaacagcaacaaacgacagagattcttcctcaacacaggcgaaaaaaaaaaagcttccgattctaaaaccagaacaacaaaaaagtaaaacacacacgtcattttaaaacatttcatttttttggttatttatttaaagagcgagtgttgtaacaaatggtgaagccgaagagcgtggagaaacccgcagaggaacaacaacaacgaagtgtttcatcgtacagaggagtacggaagaggaagtgggggaagtacgtgtcggaaattaggttacccaacagccgtcaaaggatttggttggggtcctatgacagcgccgagaaggcggcacgcgcgttcgacgctgccatgttctgcttacgtggcagcggcgccaaatttaatttcccga

SEQ ID NO: 251398 - DNA, 428 bp, Glycine max
gcttaggaagctgattaatgcaccagcttacattgaatgcagttcaaaaacacaggagaacgtgaaggcagtctttgatgcagccataagagttgtccttcaaccacctaagcagaagaaaaagaagggtaaagcacaaaaggcatgctcgatattgtgattcactaggtgttaacatttgactgccctttattctacctgtattaccctccccttctttctttttatcatttctttgttattgaagaagttggagtttgtgggtgttcctcatacaaatactctagatctccttgaagcataaggtgggttaatgctttgctttctttgaattattgtcaactctaatagtcaaatttgcatttcatggttcccacctttttttcctataactttcgttatgatttatgtattaatagactggaata

SEQ ID NO: 251399 - DNA, 235 bp, Glycine max
tatgtcagaaatgcttgggaacccggtgagcctgagaggcgccaccaggtctgctccatcaccgtctacacctgttactttcaagaccgttgcgcttttctccaagaagaaggcagcaccacctcctccaaagaaaaagcctgctgctgtatcccccgccaatgatgaactcgccaagtggtctggtcctgacagaaggatcttcttgcctgaaggtctcttggaccgatcagag

SEQ ID NO: 251400 - DNA, 384 bp, Glycine max
gaaacacagtacccgaaaaccttcttctataaagaagaccttcatccaggcaaaacaatgaaagtacaattcagcaagcctccctttcaacaaccatggggtgttggtacatggttaaaggaaattaaagacactactaaagaaggatatagttttgaagagctatgcatcaagaaagaagccattgagggagaagagaagttttgtgcaaaatccttgggaacagtaattggttttgccatttcaaagctgggaaagaacattcaagtactttcaagttcctttgtcaataagcaagaccaatacactgtggaaggagtgcagaatcttggagacaaagcagtgatgtgtcataggctaaatttcagaactgcagtattttac

SEQ ID NO: 251401 - DNA, 391 bp, Glycine max
agccgttgctctgcttcaaccttgcggaagaagaagacgccgcagccatggtgaagtactccagagaacccgacaatcccaccaagtcctgcaaggccagaggcgctgacctcagagtgcatttcaagaacactagggagactgcctttgccatcaggaagttgcccctggttaaagctaaaagatacctggaggatgttttggcccacaaacaggccatccctttccgacgcttctgtggtggtgttgggaggacagcccaggctaagagcagacactccaatggtcaaggacgctggcccgtcaaatcagctaagttcatcctagatttgctgaagaacgccgagagtaatgctgaggtaaaaggtttggatgtcgatgctctgtacat

SEQ ID NO: 251402 - DNA, 406 bp, Glycine max
tatgacctatgacgcacgcgcacgcgtacgtgagctcggaattcagatcgaggttttcatcatctgtgacttcgccaactgaaatgggggatgttttggagattctgtctaccactacagagcttgctcaactgccagtaccacctgtagaggaacaggttgagcgtaagttaattaatcacctgaggttgtcctttgaaaaccccagggttacagatccgaatgctaaagctaatgcttggcttacggcccatttctctaggctattgggtggcgtgaaccttgcatcggaccagattgacgtgctatatttctgcaactagactgcttcaggctatggtagatgctacatcgaacaccggttgtctgagcctgaccttacttgctatggatgacactcaaatgc

SEQ ID NO: 251403 - DNA, 390 bp, Glycine max
caaccttctttctttttctgtgagcctttctttcaggttcttaacttgatcagtgtgcagtgtccaaatcataagggtagttgcaaattgcaatggctaagcatgatgttgagggtggttccttctctgcaaaggactaccatgatcctcctccagcaccgttgattgatgctgaggaactcacacagtggtccttctacagggctttgattgctgagttcattgccacaatgctcttcctttacatcacagtgctcactgtgattggttacaagagccagagtgatgtaaaggctgggggtgatgtgtgtggggagttggcattcttggcattgcttgggcctttggtggcatgatcttcattctggtgtactgcactgctggaatctc

SEQ ID NO: 251404 - DNA, 237 bp, Glycine max
gttttcatcatctgtgacttcaaaaactaaaatgaagggtcttttggagattctgtcttcagcttcagagtatgctcagcttccaatacgacctggagaggaagaagttgttcgtaagttaattaatcaccaaaggttttcctttggaaaccccaagggtacagatccgcatgttaaagctaatgctttgcttcatgcccatttctctaggccaattgttggtgggaaccttgcatt

SEQ ID NO: 251405 - DNA, 338 bp, Glycine max
ttcggggaattccaattccacattttcaagaaataaggaggcaaaaatgtgcatgtatgaattggaattatttgttttcttattaggcctatcctgaagccaaaggaaatgagatcggaattcctcggggaattccaattccacattttcaagaaataaggaggcaaaaatgttcatatatgaattggaattatttgttttcttattaggcctatcctgaagccaaaggaaatgagatcggaattcctcggggaattccaattccacattttcaagaaataaggagggccaaaaatgtcatatatgaattgaattattgtttttattggcctatctga

SEQ ID NO: 251406 - DNA, 419 bp, Glycine max
ccggaacaagacccaggcaggtgtcgcagtacgcggagaaaggacgctatataaatatatttgtccccgatgctctctatttcagccactcgtatattcttcctccgctcaacaactataagattatcttcttcttcttcttctcttcaattcttctccaatcccaaccgcaccctcttccgtccctttcttcacacttccttcaaaccacttccttcgtctttctctttccgaacagatcacactatggccacctcaaacgccaaatcagtccatgatttcaccgttaaagatgccaagggaaatgatattaaccttggtgactacaaaggaaaggtccttatcattgtcaatgttgcctcacaatgtggcttgactaattcaaattacactgagctcagtcagttgtatgagaaata

SEQ ID NO: 251407 - DNA, 408 bp, Glycine max
ctcaaaatccctttcttgtgtcgattagattactttcacaccagagtcgttcgagtacttcaccttctttctctctaagcgcaaaacctcgtactgtttttggcggttaaggatgtcggggaaaggagcgaaggggttgatcacaggcaaaacctccgccgccaacaaagacaaggacaagaagaaacccatctcgcgttcttctcgtgccggccttcagttcccagttggtcgtatccaccggcttttgaagtcaaggacaaccgctaatggtagagttggggccacagctgctgtctactctgctgctatcttggagtatctcactgctgaagtattggagctggcagggaatgctagcaaggatctcaaggtcaaacgtattactccccggcatttacaactagc

SEQ ID NO: 251408 - DNA, 421 bp, Glycine max
cgcttgagctctgcgagatcttgagtcgccgatttgaaaagatgagtaagcttcagagtgatgctttgcgtgaagccatctcaggaatcatggccgattccaaggagaagaatcgcaaatttgtggagaccatcgaactccaaatcggtttgaagaactacgatccacagaaggacaagcgtttcagtggctccgtcaagttgccccacatccctcgccccaagatgaaaatttgcatgcttggtgatgctcagcatgttgaagaggcagagaagataggactggactggatggatgtagaagccttgaaaaagctaaacaaaaataagaagttggtgaagaagctagctaaaaaataccatgcttttttagcatctgaagcagtcattaagcagattcctcgtcttttgggtcctggtct

SEQ ID NO: 251409 - DNA, 403 bp, Glycine max
aactcggctcgagcttacagctcatgtgtttcttgtaaagaactgctttcaccgtagatgggttcaacatcatgaccttgactctatctattcgtacagcttctatctgttcttggcgattaacgatttcacttaatggatcgataggattgatcacacgcaaaacctccgccgccatcaaagacagggactagaagaaacccatttcatgtacacatagtgccgtccttcaattcacagcaggatgaattcaccgccttatgaagtcaatgacagccgctcatgatagattttgggccacatctgctgtctactatgctgctatcttggagtatctcactgctgaagtattgcatctggcccggaatgctagcaaggatctcatcgtaaaacgtattactac

SEQ ID NO: 251410 - DNA, 541 bp, Glycine max
  unsure (1)..(541): unsure at all n locations
nagggagtgggagggncttcgncgtcatcgagtatagtagtctcatagctantactgtgagagacatgctagcatgcctgcacgcctactctagaggatcctctcggtgaattccaattccacattttcaagaaataaggaggcaaaaatgtgcatatatgaattggaattatttgttttcttattaggcctatcctgaagccaaaggaaatgagatcggaattcctcggggaattccaattccacattttcaagaaataaggaggcaaaaatgttcatatatgaattggaattattagttatcttattaggcctatcctgaagccaaaggaaatgagatcggaattcctcggggaattccaattccacattttcaagaaataaggaagcaaaaatgttcatatatgaattggaattatttgatttcttattaggcctatcctgaagccaaaggaaatgagatcggaaattcctcgggggtaccgaacttcgaattccctatagtgagtcgtataaaattcgtaatcatgtcatagctgtt

SEQ ID NO: 251411 - DNA, 345 bp, Glycine max
gctggataggtcaaacatcatcatgtcggacgaagagcggcatttcgagtccaaggcagacgccggtgcctccaaaacctaccctcagcaagccggtaccattcgcaagaacggctacatcgtcatcaaaggacgcccctgcaaggttgtggaagtttcgacttccaaaactggaaagcacggtcacgccaagtgccactttgttggaattgatattttcactgccaagaaacttgaggatattgtgccctcttctcacaactgtgatgttcctcattggtgaatcgtactgattaccactcatgtattgctgggatggatttttgagtctgttctgaaaatggg

SEQ ID NO: 251412 - DNA, 303 bp, Glycine max
cggacaacaaccctaaacttccatgggaattcaccgagggcaatcaagcaaaggttaaggagattttgtctcactatccatccaactataagcaatctgctacaattcctcttttagatcttgcccagcagcagcatggaggttggctacctgtttctgcaatggatgcggtagctaaaattgtagaggttcctcccatacgggtgtatgaaggtggccacattttactccatgttcaatcgagctaagggttggggaagtacccatctgtttggttttgtgggaaaacaacaccttgtatga

SEQ ID NO: 251413 - DNA, 391 bp, Glycine max
gatcgctgacgcagatgctaccattgactatcgtgccggcgccttggtgcatacttcattcactggtctcaaggccatggctggcttccctaccatgaggaccaacaatgacattacctccattgctagcaaccgaggtagagtgcagtgcatgcaggactggccaccatttggcaagaagatgtctgtgactctttcctacctgccagaccttgatgatgcacaattggcaaaggaagtacagtaccttcttatgaacggatggatactctggctaggaattcggagctgagcacggatttaacgtaccgagagcgcaacaggtcaccaggcatctaccatggacgctactggaccatgtgtactctgactatgactggttgcactgatg

SEQ ID NO: 251414 - DNA, 533 bp, Glycine max
taggagtaaaagggtgggattatgatgagggaagttattgtcagtgatacatgctagcatgcatgcacgcgtactctagatgatcctttcgctgaatgccagttccacatgatccagaaatacagtggcatcaatgggcataggtgaattggtattatgtgtctacttatgaggcctatcctgaatccaatggaaatgagatcggaattcctcggtgaattccaattgcacattatcaagaaatgaggaggcaaaactgttcatatatgaattggaatcatccgctgtcttattaggcctattctgaagccaaaggaaatgagatcggcattccttgcagaattgcaatctcacattattaagacataatgacgctaaaatgtgccatatatgaattcgtaataacttagtatatcttattaggcctatactgaagccataggacatgagatcggaaattctcgtgggtaccgaactgcaatttcctatagtgagtcgtattaaattcgcaatcatgtcatagctgagtcctg

SEQ ID NO: 251415 - DNA, 402 bp, Glycine max
gcaaattgtcacaccaaaaaattcttgcttagctgtcacagacaatctttaacaacaatgaagaaagtagtattaaaggtggacttaaataatgatagaatcaagaaaaaagctatgaagacagcatctggcctttcaggggttgaatcgatttctgttgacgttaaggacatgaaactagtcttattgggtgagattgatccagtgagtgcagtgtcaaagctacgaaagtggtgtcacactgaactaatttcatttggaccagcaaaagaggagaaggagaaggaccccgctattcctctctacgaagcctatcccctttattatcacatgacaccaacattgtatggttcaaattactaggttagaggttttgaagagagtcttaaggctgcgtgatca

SEQ ID NO: 251416 - DNA, 536 bp, Glycine max
  unsure (1)..(536): unsure at all n locations
ngagtaggtgaaggtttcnnctaactgaaatagatgcattattgctactactcggagagacaagcttgcatgcctgcaggtcgactctagaggatcccctcggggaattccaattccacattttcaagaaataaggaggcaaaaatgtgcatatatgaattggaattatttgttttcttattaggcctatcctgaagccaaaggaaatgagatcggaattcctcggggaattccaattccacattttcaagaaataaggaggcaaaaatgttcatatatgaattggaattatttgttttcttattaggcctatcctgaagccaaaggaaatgagatcggaattcctcggggaattccaattccacattttcaagaaataaggaggcaaaaatgttcatatatgaattggaattatttgttttcttattaggcctatcctgaagccaaaggaaatgagatcggaattcctcgggggtaccgagctcgaattccctatagtgagtcgtattaaattcgtaatcatgtcatagctgttt

SEQ ID NO: 251417 - DNA, 372 bp, Glycine max
gatctcttccccagctgttaccactgtcaaccgtgccggtgccggcatggttgctccattcactggcctcaagtccatggctggcttccccaccaggaagaccaacaatgacattacctccattgttagcaacggtggaagagtgcaatgcatgcaggtgtggccaccagttggcaagaagaagtttgagactctttcctacctgccagaccttgatgatgcacaattggcaaaggaagtagaataccttcttaggaagggatggattccttgcttggaattcgagttggagcacggtttcgtgtaccgtgagcacaacaggtcaccaggatactacgatggacgctactggaccatgtggaagctgcctat

SEQ ID NO: 251418 - DNA, 395 bp, Glycine max
agcatctcttattaccaaccttttttctaaactttctcttgccaagtatcaacacataaaacaatggcttttcggttacctggtatcagaaaggcttcccttgctgcaatccaaggaaattcaaaagctgtggatgttccaaagggctaccttgcagtctatgttggagataaaatgaagcagttcatgatccctgtaacatacttgaaccaaccttcatttcaagatttgttgagtcaagctgaggaagaattcgggtaagaccatccaatgggtggtctcataattccctgcagagaagatgtgttcctagatatgacatctcgcttgaataagtgctaatcccatgaagatgaaactgacattggcctagactaaactagacacaattttgg

SEQ ID NO: 251419 - DNA, 367 bp, Glycine max
  unsure (1)..(367): unsure at all n locations
tcggggaattccaattccacattttcaagaaataaggaggcagaaatggtcatatatgaattggaattatttgttttcttattaggcctatcctgaagccaaaggaaatgagatcggaattcctcggggaattccaattccacattttcaagaaataaggaggcaaaaatgttcatatatgaattggaattatttgttttcttattaggcctatcctgaagccaaaggaaatgagatcggaattcctcggggaattccaattccacattnttcaagaaaataagggaggggcaaaaatgttcatatatgaattggaattatttgttttcttattaggcctatcctgaagccaaaggaaatgagatcg

SEQ ID NO: 251420 - DNA, 525 bp, Glycine max
ttagttcaggggtctggctatgtatgtatgctatagctgaagacacaagcttgcatgcctgcaggtcgactctagaggatcccctcggggaattccaattccacattttcaagaaataaggaggcaaaaatgtgcatatgtgaattggaattatttgttttcttattaggcctatcctgaagccaaaggaaatgagatcggaattcctcggggaattccaattccacattttcaagaaataaggaggcaaaaatgttcatatatgaattggaattatttgttttcttattaggcctatcctgaagccaaaggaaatgagatcggaattcctcggggaattccaattccacattttcaagaaataaggaggcaaaaatgttcatatatgaattggaattatttgttttcttattaggcctatcctgaagccaaaggaaatgagatcggaattcctcgggggtaccgagctcgaattccctatagtgagtcgtattaaattcgtaatcatgtcatagcttgttcctt

SEQ ID NO: 251421 - DNA, 428 bp, Glycine max
gaaggacacattctacatatctcatggatcaccaactttggccatagatgaatccattctggccaggaagttccttcagtcatggaagaaggacgtgtttgctcaaagaccctcttcaattcttgtcatctctggtcattgggaaaccgcagttcccacgggcaacgtcgttgactgcatcaacgacaccatctacgatgtctatggcttccccaaacaaatgtaccagcttaaatatcctgcacctggagctccacaattggcaaggagggtgaaggaactactcaagaaatctggtttcagccatgttgatgaagatacagagcgaggacttgaccatggtgcttggattcctatctctttgatgtatccagatgctgacatccatgtttgtcagatatctattcaatctcagcaagatggaactt

SEQ ID NO: 251422 - DNA, 383 bp, Glycine max
ctggtattctttcaccaaggctctctgcatagcgtttgtgatgacgtttttttccctgtttgatgttcctgtcttttggcctatattactctgttactggtttgttctctttgtccttacaatgaggcgccaagttgctcacatgatcaaatacaaatatatccccttcaacttggggaagcagaagtatagcggtaataaatcttctgcaaggagcagtagctctcgtgcagactgaaacttgtctctcatgattggaagatctacttagttaggttttctgaacattcaggctagtcaatgccccccttttctatgaaagaatttggattcatggtattatggatgtcagtatgcattatgctgttacggaaaatcttaat

SEQ ID NO: 251423 - DNA, 343 bp, Glycine max
  unsure (1)..(343): unsure at all n locations
attcgttaacacatcaatttctatctctcttatactctcactacgctctttgctctttcttttctccactatggctgcacaagaaaacaacttccaagactacttgcctgtgatggccaacaagcttggtggggatggcctaattgatgaactgtgcaatgggttcgatcttttgaaggattctgataaaggggtcatcacttttgagagcctcaagaggaattcttacttgcttgggcttcagggtctcagntgatgaggatcttcgctccatggtttttttgaaggtgactttgatgggcggtgcactcaacagatgaagtctgtgtctgatgtcagactc

SEQ ID NO: 251424 - DNA, 353 bp, Glycine max
  unsure (1)..(353): unsure at all n locations
caacaaagcaataatgatcagtgatgcaatggaaacgggaacagttcagataaattctgccccagctcgtgggccagatcattttccctttcagggtataaaggacagtggcattggatctcaagggattaccaacagcataaacatgatgaccaaggtcaaaacgactgtgatcaacttacccagcccttcctatactatgggctagtagtgtaatacacacatgcatgggggaacatcattatatagcatgttccataaatcatagtgnaacgtnaacaaccgtgtgagttcagcattgcattgtcttttgcagctgggattacagagatgaataacgagtttgattgata

SEQ ID NO: 251425 - DNA, 389 bp, Glycine max
ctcgagccgcaagcattggtccattaccaacagatagagcaggtttgagcttaaacatgggcaatcatgagcctaaacgttggtcatattttcagaacttggccaaagaggggtttgataatgtatctctaattgatcaggataatcttggtttttcgtctgctgtgagaaaagtacaagagggggatagtaaatctcagccatctgctcctctaccagctgctggtgttttggcaggacacacggaatcccacctcaatgttggtgaagaaagtcagaaaaatgtacctgtggcaactaaaacagaagcaacaatctttcaccaaaaatatgagcattcccaactaaagggcaatgaaaataagaacatggatgccgtaatggaaaca

SEQ ID NO: 251426 - DNA, 530 bp, Glycine max
  unsure (1)..(530): unsure at all n locations
gagtagtntaggtgtctngtctacgtcacgtattgtcatagccagagacacaagcttgcatgcctgcacgtcgactctagaggatccccttcggggaattccattccacaattttcaggatataacgaggcaaanatgttcatatgtgaattggaattatttgttttcttattaggcctatcctgaagccaaaggaaatgagatcggaattcctcggggaattccaattccacattttcaagaaataaggaggcaaaaatgttcatatatgaattggaattatttgttttcttattaggcctatcctgaagccaaaggaaatgagatcggaattcctcggggaattccaattccacattttcaagatataaggaggcaaaaatgttcatatatgaattggaattatttgttttcttattaggcctatcctgaagccaaaggaaatgagatcggaattcctcgggggtaccgagctcgaattccctataatgagtcgtattaaattcgtaatcatgtcatagcttgttcct

SEQ ID NO: 251427 - DNA, 417 bp, Glycine max
gccgaagaacaagggaaagggaggtaagaacaggaagaggggaaagaacgaggcggacgacgagaagcgagagctggtgttcaaggaggacgggcaggagtacgcgcaggtgctccggatgctgggtaacgggcggtgcgaggcgatgtgcatcgacgggacgaagaggctctgccacatccgcgggaagatgcacaagaaggtgtggatcgccgtcggagacatcatcctggttggactcagggactaccaggacgacaaggctgacgtcatcctcaagtacatgcccgacgaggccaggctcctcaaggcctacggcgagctccccgacaccactcgcctcaacgagggcatcggcgccggcttggacgaggaggacgacgccaccgccaacgactacttcgagttcgaggatga

SEQ ID NO: 251428 - DNA, 406 bp, Glycine max
ctctcacatcatttcccactctcgcgtttcctttatcatatttatagtctttggttattcaattcatattacgccatgtcccagttgaacggagcctactacggcccctccatcccgccgccgaaaacttcctaccaccgtcctgggcgcggcggaggcctcggctgctgctgcgggtgcctcttcagcctcatcttcaagctcatcctaaccgtgatcatcatcattggcatcgccgtgttccttttctggctcatagtccgtcccaacgtggtgaaattccacgtcaccgaggccaccctgacgcagttcaactacacccccaacaacacgctccactacgacctcgccctcaacatcacggtccgaaaccccaacaagaggctcggaatctactacgaccgca

SEQ ID NO: 251429 - DNA, 419 bp, Glycine max
attctctctgtgtatgtccctaactgtcccttcaagatgcagatcgtcgtcaagaccctcagcggcaagaccatcacccttgaggtggaaagctatgacaccatcgacaacgtcaaggccaagatccaggacaaggaaggaatccctccggaccagcaacgtctcattttcgccggaaagcaacttgaggacggccgtacccttgctgactacaacattcagaaggagagtactcttcacctcgtcctccgtctccgtggtggcatgcagatcttcgttaagacactcaccggcaagaccataaccctagaggttgaaagctccgacaccatcgataacgtcaaggccaagatgcaggacaaggagggtatccccccggaccagcaacgtctcatcttcgacggaaagcagctcgagga

SEQ ID NO: 251430 - DNA, 428 bp, Glycine max
gaagccattgaggtgggttaccgtcattttgacactgctgcagtgtatggaacagaggaagccataggcctagccgtggccaaagccatagacaaaggccttataaagagtagagatgaagttttcatcacttcaaagccttggaacacagatgcacaccgtgaccttattgtcccagctcttaagaccacattaaagaagctggggacggagtatgtggatctttatctgattcattggccagtgaggctgagacatgatcttgaaaatcctactgtttttaccaaggaagatgtgctgccctttgatatagaagggacatggaaagctatggaagagtgttacaagttgggaatagcaaagtccattggcatatgcaattatggtatcaaaaaactcactaaactcttggaaatagccaccattcc

SEQ ID NO: 251431 - DNA, 317 bp, Glycine max
cttcttcctctgcgcaggaattaggaatattcgacaggtggagggtcttcaatggctcctaaagttgataagaagaatgatccaaaggcccaggccttgaagactgctaaggcagttaagtcaggtgctacctttaagaagaaggtaaagaagatccgaacttctgtcactttccacaggccgaagaccttgaagaaggacaggaaccccaagtaccctcgcattagcgccccgccgaggaacaagcttgatcattatcagatcctgaaataccccctcccaccactgagttgcatgaagagattgagacacaacac

SEQ ID NO: 251432 - DNA, 348 bp, Glycine max
  unsure (1)..(348): unsure at all n locations
gttgaacctggactctaaatttactgagaatgtgagcaaaagcggacttcgaaatggtgtttatggtatgaatgcagtgtatcagaaaaacaatgcaaacttggtgagtaatgtgatcagtaacaagtacaatggcagtattcagcataacaaagagatcaacaacaacactggcaacaacatcaacaccaatgaaagcaacaacacaaattgcaactgacaaaaggtttaaagaccttgccttgcttgcggagacactccccncgcaaatgagggtgctttggagggggaatacatctnttgtctgtaacaatgacacaatgcangaagacttgaaacgtcagctat

SEQ ID NO: 251433 - DNA, 465 bp, Glycine max
  unsure (1)..(465): unsure at all n locations
ggggaggggggagaggtattgngaaaatggagggaagaatgctattctcggagacacaagcttgcatgcctgcaggtcgactctagaggatcccctcggggaattccaattccacattntcaagaaataaggaggcaaaaatggtcatatatgaattggaattatttgttttcttattaggcctatcctgaagccaaaggaaatgagatcggaattcctcgggggtaccgagctcgaattccctatagtgagtcgtattaaattcgtaatcatgtcatagctgtttcctgtgtgaaattgttatccgctcacaattccacacaacatacgagccggaagcataaagtgtaaaagcctggggtgcctttaatgagtgagctaacttcnaacattaattgcgttgcgctcactgcccgctttccagtcgggaaacctgtcgtgccagctgcattaatgaatcggcca

SEQ ID NO: 251434 - DNA, 418 bp, Glycine max
ctcactttgttccgttcagtgcagagaataaaatggctgggatggccggtcaccaattcgcgcaatgcatcacttgccacgcttggagccccgatcaatccatggtggctttatgtccaaacaataatgaagtgcacatctataggttggttgaagacaaatgggaaaaggtgcatgttcttcaaaagcatgaccaggtaatttctgggatagactggagcacaagatcaaatagaatagttactgcatcccatgatcggaattcatatgtctggaaccttgaaggatcagaatgggtgcctactcttgttatccttagactaaaccgtgctgctctatgtgttcaatggagtccaaaagaaaacagatttgcagtgggaagtggagccaaaactgtttgtatatgctactatgagca

SEQ ID NO: 251435 - DNA, 422 bp, Glycine max
aagcaatatagtttgtttaattgttgcttcatttctattgtgtgaatggcatttgggaagttcattatgaatataggggtagtggcaatggttctgggtttatggattcgggttggatttgcacaacaagtaccttgctactttatttttggagactctttggtggataatgggaacaacaaccagcttaactcactggctaaggctaattatctcccttatgggattgacttcgctggtggcccaactggaaggttttccaatggaaaaaccactgttgatgtagtcgctgagcttttgggattcaacggttacattcgtccatatgcaagggctagaggccgagatatacttagtggagtcaattatgcttctgcagctgccggaattagagaagaaactggacagcaactgggaggccg

SEQ ID NO: 251436 - DNA, 399 bp, Glycine max
tttttcaaaacaaacgccacttcgctggcaagactgttttggatgtggggactggaagtggcattcttgctatatggtcggcacaagcgggtgcgaggaaggtgtatgcagtggaagcaaccaagatgtcagaacatgcgcgtgcacttgtcaaagcgaataatctccaggatgtagttgaggtcattgagggatcgatggaggaaattaccttgccagagaaagttgatgtgatcatctctgaatggatgggttattttcttctgcgtgaatctatgtttgattcagttataaatgctcgtgaccgctggctcaaaccaacaggagtgatgtatcctagtcatgctcgcatgtggatggcacctatccggactgggatagtagatcacaaattgggcg

SEQ ID NO: 251437 - DNA, 422 bp, Glycine max
cggctcgagaagaaagaaagtgcaacttcctctgttttgctcccctgtttaagccttatcataagcttagaatggcacacaaggaattttccattgccctagtgactctcattgttctctttgtcaacacgaacctccaaggtgccacggctgactatggtggtggttggcagagtgctcatgccactttctatggtgggggtgatgcttctggcacaatgggtggagcatgtgggtatggaaatttgtatagccagggatatggaactgacactgtggctctaagcactgctttgttcaacaatggcttaagctgtggatcttgctatgaaatgagatgtgatgatgacccaagatggtgcaaacctggctctattaccgtcactgctactaacttctgcccaccaaacccatctttgcct

SEQ ID NO: 251438 - DNA, 317 bp, Glycine max
gaagttttcaagaaggcaggaacgtatgatgagaagagattgttgggtgttaccacccttgatgttgttagggcaaaaactttctatgctgggaaagccaatgttccagttgctggtgttaatgtacctgttgtgggtggccatgcaggcattactattctgccattattttctcaagccacaccaaaagccaatcttgatgatgatgtcattaaggctcttacaaagaggacacatgatggaggaacagaagttgctagaagcttaaggctggaaaacggttttcctgcaactttgtcaatggcctatgctggtgc

SEQ ID NO: 251439 - DNA, 337 bp, Glycine max
atgttggctaggtaagcgtcctgtagtaagaggagtagtgtatgaaccccgtagaccatccgcatgggggtggtgaagggagggccccaattggtagaaaaaaacccgcaactccttggggttttcctgcacttggaagaagaagtagaaaaaggaagaaatatagtgataatttgattcttcgtcgtcgtactaaatagtagagaaaatagaaattgtttcttcgtctttacaagaaaaaggagtaattaactgtgacacgttcactaaaaaaaaatccttttttgtagcgaatattattagaaaataataacttacacaaagcggaaagattaat

SEQ ID NO: 251440 - DNA, 218 bp, Glycine max
attagtttggagaacaagtggttggtatcaataaccccttttgtagcatggtgattcccttttttaatgacgttttgggactttttggaacactggggttttggcctttaaagtgttttcttccagtgcagatgagtatcaaacaaaagaggaccccaaggtggaatgggaaaatggattggtatgcaaatcctaagtggtggttggttcatagtatc

SEQ ID NO: 251441 - DNA, 410 bp, Glycine max
tcaaaacactcataacacaaagcacaaagcaaagctcatccttgagtgtaaaaaatggcagcagcttcttccatggctctctcatccccatccttggctggcaaggccgtgaagctgggcccatcagccccagaagtgggaagggtgagcatgaggaagaccgtcaccaagcaggtctcctcaggaagcccatggtacggcccagaccgagtcaagtacttgggcccattctctggcgagcccccgtcctacctaaccggtgagttcccaggcgactacggctgggacactgctgggctttccgcagacccagaaaccttcgccaagaaccgtgaactcgaagtgatccactccaggtgggccatgctcggagccttgggctgcgtcttcccggagttgctgtcccgcaa

SEQ ID NO: 251442 - DNA, 306 bp, Glycine max
gttgatcaagttgttgggagctcatgttgaagcagtagagggaaggttcacagatgcagcatcagaggcgtttcggtattgggcaggggatttggaaaacaggtaccacttgagtggctcaacggtgggaccacacccgtgtccaaccatggttcgggagtttcagtcagtgatagggaaagaaacgaagatgcaagcattggaaaaatggggtgggaagccaaatgttcttgttgccagcgtaaggacctggtcaaacgctttggggctggttcatgagtttattgcagaccaagattttaaggt

SEQ ID NO: 251443 - DNA, 336 bp, Glycine max
cgaattttcaaattgatccaaaatccttaaagtttatgaagaacaattatggcaagcctgagttggactggcaatatgctgatgattggagcctaccgcatctgcattttaatatctcacacacttcttctttgatagcttgtggagtgactgtgggttcacctattggtattgatgtggaagagaaacaaaggaggttaaagaatgatattttagcctttgcacaacgattcttttctccccatgaaatagaaatgctgactcacattgcaaaccctgaacttcggcttcaggagtttattaaattatggactctgaaggagtcttatgtgaaag

SEQ ID NO: 251444 - DNA, 535 bp, Glycine max
  unsure (1)..(535): unsure at all n locations
aggtttgttagagggacgtatcttcttgaagcatgcnccctcagctactacccggagagacaagcttgcatgcctgcaggtcgactctagaggatcccctcggggaattccaattccacattttcaagaaataaggaggcaaaaatgtgcatatatgaattggaattatttgttttcttattaggcctatcctgaagccaaaggaaatgagatcggaattcctcggggaattccaattccacattttcaagaaataaggaggcaaaaatgttcatatatgaattggaattatttgttttcttattaggcctatcctgaagccaaaggaaatgagatcggaattcctcggggaattccaattccacattttcaagaaataaggaggcaaaaatgttcatatatgaattggaattatttgttttcttattaggcctatcctgaagccaaaggaaatgagatcggaattcctcgggggtaccgagctcgaattccctatagtgagtcgtattaaattcgtaatcatgtcatagctgtn

SEQ ID NO: 251445 - DNA, 337 bp, Glycine max
gcttaatcgaactattcagattctaaaaaatgagttggtggtgggctggagcaatcggtgctgccaagaagaaattcgaggaagaggaaccggcgcgaagcttccagagcgtgggcctggtgatcggcgtgacgggcatagtgggcaacaaccttggcgagatccttcctttcggcgacacccccggcggtccatgggaaggctacggagtcatacgccggccccgtacgtcgtggaacggcgaccattctgtctgggtccatccatggcgacgtttccgatccggccgacgccgaagccaaactttcggccttaaccgacgtaattaacgttttct

SEQ ID NO: 251446 - DNA, 426 bp, Glycine max
ttcctccctttcactctcgtagacatcacaaaccttcccggcattcatcccacgcatggctgccatgaactctagcgtattggcctgtagctatgccatatcaggtgcagcgtgttcggagctcaatgggaaggtcacttccgtggcctatgttgcatgctctggctacaagttgccattgatcaaagctgaggccagagttcctaaagccaaagaatctgaaggaggaaggagaggtgcccttgttctcttggcagctacccttttcacctctgcagcttccaattcttctgccaatgctgggatcattgaagattaccttgagaggagcaaggccaacaaggaattgaatgacatgaagaggttagctactactggagcaaactatgcaagagcatacaccgtggaattcggtagttgcaagtt

SEQ ID NO: 251447 - DNA, 445 bp, Glycine max
acctaggagttatgaggacgcatgcacgcgctcggaatctgggaattaggttaaagcgaatattcaaaatgtccaaaatccttaaagggtatgatgaacaaatatggggtgcctaaaataaactggcagtatactgatcattggagcctaccgcatctgcattttcaatatctcacacacttcttctttgatagctagtggagtgactgtggattcacctattggtatcgatgtggaagagacacaaaagatgttcaagaatgatattttatcctgtgcacaacgaaacttttatcctcatgaaatatacatgctgactcacatttcagaccctgaactttggcttcaggagtttattatattatggactctgaatgagtcttatgtgaaaacaatatcgatgggctttttaaactctccttttaagacttttactatttctatt

SEQ ID NO: 251448 - DNA, 249 bp, Glycine max
tcggggaattccaattccacattttcaagaaataaggaggcaaaaatgttcatatgatgaattggaattatttgttttcttattaggcctatcctgaagccaaaggaaatgagatcggaattcctcggggaattccaattccacattttcaagaaataaggaggcaaaaatgttcatatatgaattggaattatttgttttcttattaggcctatcctggaagccaaaggaaaatgagatcgggatttc

SEQ ID NO: 251449 - DNA, 290 bp, Glycine max
  unsure (1)..(290): unsure at all n locations
gaagcaagtgctggagagttgcgtcttcacanagatataagtgagctgaatctaccaaaatcatgtaccatgcaattccccaatggcaaagatgatctgatgaactttgaagtttcaattcgacctgatgatggatattacttaagtggcacatttttgttttcctttcaagtgtctcccatctatccacacgaagcaccaaaggttaagtgtaagacaaaggtctatcatccaaatattgacttggaaggaaatgtttgtctcaacatcttacgagaagaatggaaacc

SEQ ID NO: 251450 - DNA, 392 bp, Glycine max
agaagtttgagactctttcctacctgccagaccttgatgatgcgcaattggcaaaagaagtagaataccttcttaagaagggatggattccttgcttggaattcgagttggagcacggtttcgtgtaccgtgagcacaacaggtcaccaggatactacgatggacgctactggaccatgtggaagctgcctatgtttggttgcactgatgcttctcaggtgttgaaggagcttcaagaggctaagactgcataccccaacggcttcatccgtatcatcggattcgacaacgttcgccaagtgcagtgcatcagcttcatcgcctacaagcccccaggcttttaagtgtgaaaaaattgcaaagcatttgtaagccgcaccccaatttggttg

SEQ ID NO: 251451 - DNA, 409 bp, Glycine max
aagaaaaattaaatcaacacaataatacatgagcttatggacagagtctaagagtgcattttccacagttgtttgtttaactagaatttacacataaaagcatagctagcatgggcatggagaactgtttacgagtgaccacagtaggcacagccacaccccaatgcctttctccattctttccatcttcaagggataagcttgtcttcccaactcacagaggtttcaagaaatccttgcaaaactcaacactgtcatgcccttctctttactcaaccggtgctgcctatagaaagtcccgttttgtttgcaatgctcgtgaagcagtaaatgaagttaaagtggtgactgactcaagctggaataaccttgtgattgcaagtgagacccctgtgctggtagagttttg

SEQ ID NO: 251452 - DNA, 351 bp, Glycine max
ctccatttcacactcctccactcacaaacccatcaccggggctgtccaccatttccctttctttccttcttcttcccatggagatccaacaacaactggtgaagttcaagtaccacatcggagtggcactcctcgtgtccctctcggtcttctccgggctccacttcgctccgaggttcctcaacatcctcgcctatttctggccactggttctctccactgcgctttttctcgccctcgttctcttcttcgccaagacgcaaacttcgctcaactccgacgctttccttcccaaacccgccgaggagctcctcgacttcgtcgccggccaccaccacgacccttctctcg

SEQ ID NO: 251453 - DNA, 506 bp, Glycine max
  unsure (1)..(506): unsure at all n locations
ggaggtgtatctgattattgacaagatagtaatcctccaacccttnnntatnncnnncgtgcctgcacgtctactctagaggatcctctcggtgaattccaattccacattttcaagaaataacgaggcaggaatggtcatatatgaattggaattatttgttttcttattaggcctatcctgaagccaaaggaaatgagatcggaattcctcggggaattccaattccacattttcaagaaataaggaggcaaaaatgttcatatatgaattggaattatttgttttcttattaggcctatcctgaagccaaaggaaatgagatcggaattcctcggggaattccaattccacattttcaagaaataatgaggcaaaaatgttcatatatgaattggaattattcgatttcttattaggcctatcctgaagccaaaggaaatgagatcggaattcctcgggggtaccgagctcgaattccctatagcgagtcgtattaaattcgg

SEQ ID NO: 251454 - DNA, 505 bp, Glycine max
  unsure (1)..(505): unsure at all n locations
ggagagggcgtgnctgtacgacggcggatatatagcattactcggagagacaagcttgcatgcctgcaggtcgactctagaggatcccctcggggaattccaattccacattttcaagaaataaggaggcaaaaatggtcatatatgaattggaattatttgttttcttattaggcctatcctgaagccaaaggaaatgagatcggaattcctcggggaattccaattccacattttcaagaaataaggaggcaaaaatgttcatatatgaattggaattatttgttttcttattaggcctatcctgaagccaaaggaaatgagatcggaattcctcggggaattccaattccacattttcaagaaataaggaggcaaaaatgttcatatatgaattggaattatttgttttcttattaggcctatcctgaagccaaaggaaatgagatcggaattcctcgggggtaccgagctcgaattccctatagtgagtcgtattaaattc

SEQ ID NO: 251455 - DNA, 406 bp, Glycine max
ctaccatacctgcacgcctactgtagatgatcctctcgctcaataccatattccacattttcaagaaatactgatgcaggaatgttcatatatgaattggaattattccttttcttattaggcctatcctgaagccaaacgaaatgatatcgtaattcctctctgaattccaattccacattttcaagaaataaagaagcaaaaatgttcatatatgaattgtaattatttgttttcttattaagcctatcctgaatccaaaggaaatgagatcggaattcctcggggaattccaattccacattttcaagaaataatgatgcaaaaatgtacatatatgaatcggaattatttgacttcttattatgcctatcctgaaacccaatgaaatgacatccgaattcct

SEQ ID NO: 251456 - DNA, 356 bp, Glycine max
ttactttctacttcccctccccttttttagccaaagtaacacactttcttttatatatattttaagatacgtagatttgataaaaacaagcaaagctctctatgaatttatgccactcctcctccagttgtgccagaggataacagaaaactaaccaaacttgatgaatccgctaatttcattcgcactggtttaagtcccagatggaatgatctagatgtgaatcagcatgttaacaatgtgaagtatgttgggtggattctggagagtgctccacagccacttttggagagccatgagctgtgtgccatgacattggagtacaggagggagtgtggcaggaacagtgtgctgga

SEQ ID NO: 251457 - DNA, 340 bp, Glycine max
  unsure (1)..(340): unsure at all n locations
agaagaacttgttgcccttctgagttagattttgtgcgggcccttagtcgttgtaagaagtggggagctcagggaggaaagagcaatgttttctttgcaaaaaccctggacgatagatttatcatcaaacaggttacaaaaacagagcttgagtcgtttactaagtttgcaccagcttattttaagtatttatctgagtcaatcagtacaggaagtccaacttgtcttgcgaagatcttggggatttatcnaggtaacatcaaaagcaccttcaaaaggggagggaaggaaacaaagatggatgttttggttatggaaaatcttctttacaagcgtaaca

SEQ ID NO: 251458 - DNA, 338 bp, Glycine max
ctatgacgccggatgcacgcatccgtgaactcggctcgagcaacacttgtctgggccattgcgtataagtgtaaggcgggcttacgattttggaggactcttataatcagctaaggatgcgtcctactcaggatctgaaggggcgattaaatgtgcaatttcaaggtgaagagggtattgatgctggtggtctcaccagagaatggtatcagctgttgtcgagggtcatatttgataaaagtgctttacttttcacaacagtgggcaacaatgcaactttccaaccaaaccctaattcagtataccagactgaacatctcttcaatacttcaagttgt

SEQ ID NO: 251459 - DNA, 353 bp, Glycine max
aacaactagtctcagctgaaatggcctcttcagtgatggcatctgtggccctcaaacctgcccctttcactgttgagaagtcctcagtgagaggccttccctctctctcaaggaactcttcttcattcagagttgtggccagtggcaagaagatcaagactgacaaaccttatggaattaatggtggcatggctttgagggatggaactgatgcatctggcaggaaaggaaagggaaagggtgtttaccagtttgtagaccaaatacggtgcctaaaatgtcgatggttacagtcctatctacgacaccaaggactggtctccaaccggtgatgtctacgctggcggtacgac

SEQ ID NO: 251460 - DNA, 374 bp, Glycine max
  unsure (1)..(374): unsure at all n locations
aaaccagtctcagttacttagagacaccgtggacgaaaggaaagggttctaagcgtagcccgacggagcaacaactgcaacacccttcatgcaccgaggaagagtacctcgctctttgtctcatcatgctcgctcgcggcggcgccggcagtgtctccaccgncaaacccgctgtctccgacaacaattctgcgccgctatccgccgccaaactgagctacaaatgttcggtttgcaacaaagccttctcctcttaccaagcactcggaggacacaaggccagccaccggaagctcgccggagaaaaccacccgacctcctccgccgtgacgacgagttcggcgtcgaacggtggtggtaggacccacgagtgc

SEQ ID NO: 251461 - DNA, 385 bp, Glycine max
  unsure (1)..(385): unsure at all n locations
ggcttttcatacagtggtcagaagtgcactgctggtaaggttggcctggtaatggagtccggtggcgatgctttggttgaaaaagtgaaagctaaagtggcaaaactaactgttggaccaccagaggatgactgtgatatcaccccggttgtgtcagaatcatctgccaatttcattgaaggcctggtcttggatgctaaggagaaaggagcaacattctgccaggagtacaaaagagaaggcaatcttatntggcctttgctactggacaatgttaggccagacatgagaatcgcatgggaagagccatttggaccagttntaccagtaattaggatcaattcaatttgaggagggaattcaatcattgcaatgctagcaactt

SEQ ID NO: 251462 - DNA, 401 bp, Glycine max
  unsure (1)..(401): unsure at all n locations
gcccaagccctatacaaccaaaccctaacacacacgcaggtgattcagtttccatggctagcctcaaggttgcatttttggctgcagtgctctgcatggttgtggtgagtgcacccatggcacatgcagctatcacgtgcgggcaggtgacgagtagcctggccaattgcatcggttacctccagaagggaggaacgccgtcgtcgggatgctgcaacggagtgaagagcctcaatgccgccgccaagaccaccgccgaccgccagacggcgtgcaactgcctcaagtcggccgccagccaaatctccggcttcaacgccaacaacgccgnctcgctccccggcaaatgcggagtctccatcccctacaagatcagcaccttcaccaactgcgctaccatc

SEQ ID NO: 251463 - DNA, 392 bp, Glycine max
  unsure (1)..(392): unsure at all n locations
ctgaaagcgaagaagtagagaacaaagaaagagagagagaattgaatgtgaatggggaatcagaagcagaagtggacgcaggacgaagaagatgctctcatcgccggcgttgaaaagcacggccccggaaagtggaagaacattctcaaggatccccaattcgcccctttcctcacttcccgttccaacatcgacctcaaggataaatggcgcaatttgagcgtcagcaacggtgctcagggctccaaagaaaaatctagggttcccaagcttaaagccctccctgctcctcctgctcctaccgncactcctcagaacgccgctcctgctctgcaaaacgcagcatctgatgtcacttccccagatgcttctcagaatgacccagatgccaa

SEQ ID NO: 251464 - DNA, 353 bp, Glycine max
atcactttcaaaattccaacttcactcaaaatcagtctgagccagatgcagaaagtgctggcttttgcctttggccattataaagttgtggctccagggattgcgacttcaggagccaaaacatctggcatcatgaaggcagcagtatctgctgaaaagatttgagctgttgctcacggtgttatagcctcagctgaaaaaaccagtatttcagtcatgagaaacagctttctatgaaataatgaggaagcgaaaggtgcaacctgttgggttccccttgccttgggctacatttgcaggcagtattggaacttgtacaagcttgcttttgtatggtgatgggattgagtgtg

SEQ ID NO: 251465 - DNA, 352 bp, Glycine max
tcggggaattccaattccacattttcaagaaataaggaggcaaaaatgggcatatatgaattggaattatttgttttcttattaggcctatcctgaagccaaaggaaatgagatcggaattcctcggggaattccaattccacattttcaagaaataaggaggcaaaaatgttcatatatgaattggaattatttgttttcttattaggcctatcctgaagccaaaggaaatgagatcggaattcctcggggaattccaattccacattttcaagaaataaggggaggcaaaaatgttatatatgattgaattattgtttttattaggcctatcctgaagccaaaggaaaga

SEQ ID NO: 251466 - DNA, 396 bp, Glycine max
aaaaaccttcccttctcttctcacccccacactcccatcgcacacacccctcgcatccaacaatgtctctcaccattccctccaacctctccaagcccgccgccctccgccccaaactaagcccaaagctaaggtccgccgccacaaccaccatcgtctgcagcaccaccaacaacaacaacaacaacaacgtgtcctccgacctgaaggcgttctccgccgcgctggccctctcctccatcctcctctccgcccctctccccgccggcgccgacatctcggggctcaccccatgcaaggagtcgaagcagttcgcgaagcgtgagaagcagtcgataaagaagctggagtcgtcgctgaagctctacgaggcgggcagcgcccccgcactggcca

SEQ ID NO: 251467 - DNA, 407 bp, Glycine max
  unsure (1)..(407): unsure at all n locations
attggccaattcggccactctcctctgagaaagcctccagccgctcctccaaagtcccctgcggttcgttcggttattcttcgaaccgttgtctgaagtttacaactcaaaacttcaccgaacgcatttcattcaccaattcgtccaagtctcgtatcaatcaatcagcctatccgtcttgcggttggagagatcggaggggagagcagccatggcgcatcgagtagaccacgagtatgactatctgttcaagatcgttttgatcggagactcaggtgtaggcaaatccaacatcctctccaggttcactcgaaacgagttctgtttggagtccaaatccactatcggagttgagttcgccaccagaactcttcangtagagggtaaaactgtgaaagcacagatct

SEQ ID NO: 251468 - DNA, 400 bp, Glycine max
ggtgagttcccaggcgactacggctgggacactgctgggctttccgcagacccagaaaccttcgccaagaaccgtgaactcgaagtgatccactccaggtgggccatgctcggagccttgggctgcgtcttcccggagttgctgtcccgcaacggggtgaagttcggagaagccgtgtggttcaaggccgggtcccagatcttcagcgagggtgggctcgactacttgggcaacccaagcctgatccacgcccagagcatcctcgccatctgggccacacaagttatcctaatgggtgccgttgaaggttaccgtattgctggtggccccctcggtgaggtcactgacccaatctacccaggtggcagcttcgacccattgggccttgctgatgacccag

SEQ ID NO: 251469 - DNA, 505 bp, Glycine max
  unsure (1)..(505): unsure at all n locations
nggagagggcctgtgtctacgacggaggatatattgcattactcggagagacaagcttgcatgcctgcaggtcgactctagaggatcccctcggggaattccaattccacattttcaagaaataaggacgcaaaaatggtcatatatgaattggaattatttgttctcttattaggcctatcctgaagccaaaggaaatgagatcggaattcctcggggaattccaattccacattttcaagaaataaggaggcaaaaatgttcatatatgaattggaattatttgttttcttattaggcctatcctgaagccaaaggaaatgagatcggaattcctcggggaattccaattccacattttcaagaaataaggaggcaaaaatgttcatatatgaattggaattatttgttttcttattaggcctatcctgaagccaaaggaaatgagatcggaattcctcgggggtaccgagctcgaattccctatagtgagtcgtattaaatt

SEQ ID NO: 251470 - DNA, 350 bp, Glycine max
  unsure (1)..(350): unsure at all n locations
cttcacctccttagtttcgaaagcatggcttccgtggcggcttccaccgcggctatgtcagaaatccttggaaaccccgttaacctcagatgcgcaaccaggtctgctccatcaccaactacacctgccaccttcaagaccgtcgcacttttctccaagaagaagccagctccacctccaaagaaaaagcctgccgctgtatcccccgccaatgaggaactcgccaagtggtatggtcctgacagaaggatcttcttgcctgagggtctcttggnnaaccgatctgagatccccgagtacttgaccgagaagtgcctggagatatggttatgatccgttggtcttacaag

SEQ ID NO: 251471 - DNA, 397 bp, Glycine max
gaacagcagagaaaccaagttagaagtaaagaaaatcatgggtgctttagccacccttgcttgtggtcaaaccagttccaaccaatggccttgttgaaagttccttctctggaactaacctctctttaaagccctttcgccacagtgtcaaatccaagaacttcaggagtggtgccgtggtagcaaagtatggtgacaagagtgtgtactttgatttggaggatctgggcaacactacagggcagtgggacttgtatggctcagatgcaccttcaccctacaaccctcttcagagcaagttcttcgagacatttgctgctccattcacaaagaggggattgttactcaagtttctgatattgggaggtggttccacccttgcatacttcagtgcaac

SEQ ID NO: 251472 - DNA, 332 bp, Glycine max
tcggtgaattccaattccacattctcaagaaataaagaagcaaaaatgggcagatatgaatcgcaattattcgttttcttattaggcctatcctgaagccaaaggaaatgagatcggaattcctcggggaattccaattccacattttcaagaaataaggaggcaaaaatgttcatatatgaattggaattatttgttttcttattaggcctatcctgaagccaaaggaaatgagatcggaattcctcggggaattccaattccacattttcaagaaataaggaagcaaaaatgttcatatatgaattggaaataattggtttcttaataag

SEQ ID NO: 251473 - DNA, 403 bp, Glycine max
gaagttctactgggcaccaacaagggatgaccgcattggtgtctgcactggaatttttcgcaccgattcaattcctgaacaggacgttgtcaagattgttgacaccttccctggccaatccattgatttctttggtgcactgagggccagagtatatgatgacgaagtgaggaagtggatttctggtgttggtgttgacggcattgggaagaagcttgtgaactcaaaagatggacctccaacctttgagcagcccaagatgactctggagaagctcttgacgtatggtaacatgcttgtccaagaacaagagaatgtcaagagagtccaattggctgacaagtacttgaacgaggctgcacttggaaatgctaacgaggatgctattaacaggggaactttc

SEQ ID NO: 251474 - DNA, 401 bp, Glycine max
atggaattatcgtatatgccatgatgggattcgattgggccacatcaaagttcttgtggtatcttttcttcatgtacttcactttcttatactacaccttttatggtatgatgaccatggccattacccccaacgcacacgttgctgccatattgtccagtgcattctatgcaatatggagccttttctcaggcttcgttattcccttgtctagaatacctatatggtggaagtggtactattggatctgccctgtggcgtggaccttgaatggattggtggcttcccaatatggagacaacagggacaaacttgagaatggtcaaagggttgaagaatttgtgaagagttattttgggtttgaacatgattttctaggggtagtggcatctgtggtggct

SEQ ID NO: 251475 - DNA, 406 bp, Glycine max
aaagttccaaattttttggtttggggatagatagagtggtacgcgtcacattttcataataataaaaaaatggcagcggcggcggcagtgacggtgctactcccacctaggattccgaccaccaccaacgttacccgctgctctgctttgccttctctccctcctcgcgtctccaacaccaaaaccactttgttctcaccttccctcaacaacttttcagtgtcccgaaaatcttctctgcttcagaccagagcttcttcagaggaatcatcctcagtagatgccaatgaggtgttcacagatttgaaggaaaagtgggatgctcttgaaaacaagtccacagtacttctttatggtggaggggctatagttgctatttggctatcgtcaattcttgtgagcgcca

SEQ ID NO: 251476 - DNA, 358 bp, Glycine max
  unsure (1)..(358): unsure at all n locations
cacaaggcagaaagcaagctcatcctagagttttaaaaatggcagcagcctcctccatggctctctcttccccatccttggctggcaaggccgtgaagctgggcccatcagcccccgaagtcgggagggtcagcatgaggaagaccgtcaccaagcaggcctcctccggaagcccatggtacggcccagaccgcgtcaagtacttgggcccattctctggcgagcccccgtcctacctcactggcgagttcccaggtgaactaccggctgggaccactgctggnggctttcggccgacccagaaaccttcgccagaaaccgtgagctcgaagtgatccactccaggtgggccatgctc

SEQ ID NO: 251477 - DNA, 310 bp, Glycine max
cactgaggtaacgtgttattgttccgtttctctgcatgggtgtgaacaatggctacatacgctgtgatgaatcccacaaagcccgggttggaggagtaccaagaacagatccacatgataaggatcaccctttcctccaagcacgtcaaaaacctctagaaggtttgcgcggatttggttcgcggtgcaacggataagagactcagggcgaagggacctgttaagatgcccactaaggttcttaacatcactatccaagaaatcactcctgtcggtcgttatggtaccaacacatgggacagatatgaac

SEQ ID NO: 251478 - DNA, 405 bp, Glycine max
aacgaaatttcttagacaaaaaacaaggatcagaaccggggaatcaaggtgagggagatggcactagtctctggaggaagatcaacactgaaccctaacgcccctctttacattcctgccgcgtttcgccaagtggaagatttctctccggaatggtggcagctggtgacgacgctgacatggtaccatgactactggctaagccagcagcacgatgagggagccttctacggcgaggacgacgggtttgatggcaatgatgtcgttgatttgcttcctgattcgtttgatcttgatgctggcgaggatctttttgaagagtttataagatcttctgaatcccaagaagaaactggacccaaagtaactgcatgaggcttagagatgaacccatttaaagatcta

SEQ ID NO: 251479 - DNA, 506 bp, Glycine max
  unsure (1)..(506): unsure at all n locations
gtgaaggtgtgtctggttatacgcagtgcatagttatcactctagcagagctatgacgtcgcatgcacgcgtacgtaagctcggaattcagctccagagtgaacacaataccaggccacattcgccttggaattgggtatgctgaaaaacacttccatttccactcctatctcttcctccaaatccaaacccattttctcaactcttgttcgttcatctttcgcctccatttcccccacaaagtgtgttactcccaccactcttttcgtttctgccacccccttcttcaccgcctcacccaagcgcggctttcgtggtgggattgtggccatggccgccgctggctcgctccgcaaatcagaggaagagtggcgcgcagttctctcccctgaacaagttcgtattctcaggcaaaagggcaccgagttccctggaacaagagagtatgacaagttctttgatgagggagtttacaactgtgctggttgtgggacacctntctacag

SEQ ID NO: 251480 - DNA, 404 bp, Glycine max
tccaagagcaatgttgttgacgatatggtcaacagcaaggccatcctctatgagcccggtgaacatccagaccatgtggttgtcattaagtacgtgccttatgtaggggacagcaagagggccatggatgagtacacttctgagatattcatgggtggaaagaacacaattgtgttgcacaacacatgtgaggattcactgttagctgctcctattatcttggacttggtccttcttgctgagctcagcactcgaatcgagtttaaagctgaaaatgagggaaaattccactcattccacccagttgcgaccatccttagttacctgaccaaggcccctctggttccaccgggtacaccagtggtgaatgcgttgtcaaagcagcgagctatgctggaaaacat

SEQ ID NO: 251481 - DNA, 406 bp, Glycine max
aacaagtagttgagaactaagaaggagaagcaaatggcgtcctcaatgatctcttccccagctgttaccactgtcaaccgtgccggtgccggcatggttgctccattcactggcctcaagtccatggctggcttccccaccaggaagaccaacaatgacattacctccattgctagcaacggtggaagagtgcaatgcatgcaggtgtggccaccagttggcaagaagaagtttgagactctttcctacctgccagaccttgatgatgcacaattggcaaaggaagtagaataccttcttaggaagggatggattccttgcttggaattcgagttggagcacggtttcgtgtaccgtgagcacaacaggtcaccaggatactacgatggacgctactggaccatgt

SEQ ID NO: 251482 - DNA, 356 bp, Glycine max
  unsure (1)..(356): unsure at all n locations
aacaaacaaagcggcttccaatggccactctgcgattcgccttcaccgactcaaccacattgttcaggccttctctaccttccacgcgaaccttctctcgaaaccgaagcctcattgtcaaagcctcttcttcttcttctgacgacttctccaaaagcaggcgacgcttcatcgccgaaaccgccgcactctcggtctcgctccctcagttagcggcgcgtgccgaagacgcgctttcggagtgggaagagagtatancctccctaaatcgaccccgggncgtcgtgcttctcgacatcgcttttgtccccgacgatcccaaccacggttttcttctcgggacgaggcaaaccatt

SEQ ID NO: 251483 - DNA, 353 bp, Glycine max
ctgacaagaaatccatcactgactatggttcacctgaggagttcctatctcaggtggattacttgcttggaaaacaagccttctttggccaaactgatgctgagggtggttttgattccaatgctgtggcaactgcaaatatcttggagagttcaacgcctgtcgttgatgggaaacagtactacagtttgactgtgttgacaaggacagctgatggagatgaaggtggcaagcaccagctgattacaagcaacagtgaaagaattggcaaacttatttacatttgcaaggctcaagctggagacaagaggtggtttaagggagcaagaagatttgtggagagcacagcaagt

SEQ ID NO: 251484 - DNA, 364 bp, Glycine max
  unsure (1)..(364): unsure at all n locations
tcggggaattccaattccacattttcaagaaataaggaggcaggaatggtcatatatgaattggaattatttgttttcttattaggcctatcctgaagccaaaggaaatgagatcggaattcctcggggaattccaattccacattttcaagaaataaggaggcaaaaatgttcatatatgaattggaattatttgttttcttattaggcctatcctgaagccaaaggaaatgagatcggaattcctcggggnaattcccaattccacanttttcaagaaaataagggnaaggcaaaaatgttcatatatgaattgggaataattgttttcttattaggcctatcctgaagccaaaggaaatga

SEQ ID NO: 251485 - DNA, 396 bp, Glycine max
tgtgtactttctattctcataagataactaactcacttggtgtgatagagttctcattctcatggctattaccggcgatattttccggcagagcataacggaaatgcttgcggagtccccttccggtgcgccagaacttcacgttctcgccgtcgatgacagcctcgttgatcgcaaggtgatcgaacggttgctgaagatttcttcctgcaaagtgacggttgtggagagtggaacgcgcgctcttcagtatcttgggttggagggagagaacggttctcttgggtttgatagtgttaaggttaatctcataatgacggattattccatgccggggatgacaggatatgaattactcaagaaaatcaaggagtcttctgtggttagagagattcc

SEQ ID NO: 251486 - DNA, 405 bp, Glycine max
ttcagcatggaaatctccttggttcatgaacactgttttgtccagccccaggattgatactgaaattacaattgaggattttgggtatttcatgagccctggtgacagaagctatgatgcaatcgggttgatgaaacagatcagtgaacaaactgcggctcaatatgccagcgctcaagagattctgggaaatgagactcctaaggcattaccaaaagatgcttccagaaacgacagggatgaagatcaggaacatatcgatgctcataatcagcatgggaaccattgtcagttggcttcaagtgctctggtggagcgacgtgtacttgacttcagcgaatgtggaactccggtccgaggtgatagcagcaaatcctcagctaagaacttttcaagcccttcttt

SEQ ID NO: 251487 - DNA, 504 bp, Glycine max
  unsure (1)..(504): unsure at all n locations
agaaaggtnctcnngtgaagtataaagacgtaatcgcactactnggagagacaagcttgcatgcctgcaggtcgactctagaggatcccctcggggaattccaattccacattttcaagaaataaggaggcagaaatgttcatatatgaattggaattatttgttttcttattaggcctatcctgaagccaaaggaaatgagatcggaattcctcggggaattccaattccacattttcaagaaataaggaggcaaaaatgttcatatatgaattggaattatttgttttcttattaggcctatcctgaagccaaaggaaatgagatcggaattcctcggggaattccaattccacattttcaagaaataaggaggcaaaaatgttcatatatgaattggaattatttgttttcttattaggcctatcctgaagccaaaggaaatgagatcggaattcctcgggggtaccgagctcgaattccctatagtgagtcgtattaaat

SEQ ID NO: 251488 - DNA, 379 bp, Glycine max
  unsure (1)..(379): unsure at all n locations
ctcataacacaaagcacaaagcaaagctcatccttgagttaaaaaatggcagcagcttcttccatggctctctcatccccatccttggctggcaaggccgtgaagctgggcccatcagccccagaagtgggaagggtgagcatgaggaagaccgtcaccaagcaggtctcctcaggaagcccatggtacggcccagaccgagtcaagtacttgggcccattctctggcgagcccccgtcctacctaaccggtgagttcccaggcgactacggctgggacactgctgggctttccgcagacccagaaaccttcgccaagaaccgtgaactcgaagtgatccactccaggtgggccatgctncgagccttgggctgcgtct

SEQ ID NO: 251489 - DNA, 348 bp, Glycine max
ctcaagcaaccatggcaatggcaacccaagcctctctctgaacgccaaccctctccggtctcaaagccagcgaccgcgccttcgtgccatggaagcaaaactccagcctctccttctccagcccgaagcccctcaagttctccagaacaatcagagcagcagccgccgacgagaccacagaggcaccagcaaaagtagaggctgcaccggtcgggttcaccccaccagaacttgacccaaacaccccttccccgatcttcgggggcagcaccggcgggctcctgcgcaaggcacaggtggaggagttttatgtcattacgtgggactcacccaaagaacagatctttg

SEQ ID NO: 251490 - DNA, 404 bp, Glycine max
cgaaatttcttagaccaaaaacaagggtcaaaaccgggggattgagttgaggaaagagggcactagtctctggaggaagatcaacactgaaccctaacgcccctctttacattcctgccgcgtttcgccaagtggaggatttctctccggaatggtggcagctggtgacgacgctgacatggtaccatgactactggctaagccagcagcacgatgagggagccttctacggcgaggacgacgggtttgatggcaatgatgtcgttgatttgcttcctgattcgtttgatcttgatgctggcgaggatctttttgaagagtttataagatcttctgaatcccaagaagaaactggacccaaagtaactgcatgaggcttagagatgaacccatttaaagaatct

SEQ ID NO: 251491 - DNA, 382 bp, Glycine max
  unsure (1)..(382): unsure at all n locations
gtgccaaaatgaaagcccatttggtccttttcttgctcatgattcttgtcaccttcactagcaatgttaacactctctcgattaatcccaaatctaactcttcaattcctcaattgacccaacagaaaaggcctgacaatgagaccatatatagggtgtcaaagcagctatgttggggttgcattgcggagtcactagagtttttgttcaggcacaacttggtgagagcagccaagtgggaacttccactgatgtgggacttccagctggagcaatacgcgaggtggtgggctggtgaaaggaaagcagattgcaagctcgaacattctttcccagaagatggtttcaagcttggagagaacatttattgnggtagtggctc

SEQ ID NO: 251492 - DNA, 407 bp, Glycine max
ccgaccttctgcatcttcttcttcttcgccggcgaagaagaagaagcccgcacctgctaagccccaacccaagcccaagcctaagcctaagcccaagcccgctgctaaagccaaggacactaaggcaactaagtcaaaggcaccagctaagcccaaggcagctgctaagcctaaagccaaagctccagccaagcccaagcccgcccctaaaccaaaggctgctgctgctgctgcttccaagcccaagcctgctgccgccaagcccaaagggactaagccagctgccaagcccaagcccaagcccgctgctaaaacaaaggctgctgctgccaagcccgcggcaaagcccaaagcgaagcccgccaaggcttcaaggacgtcgacacggacttcaccagggaagaaag

SEQ ID NO: 251493 - DNA, 353 bp, Glycine max
  unsure (1)..(353): unsure at all n locations
tcactcttgtgttgttgccttcatggccaagccagtgtgcattgaggtatggaacccaagtggcaaatacagagttgttagcaccaaaccaatgcctggaactcgttggatcaatcttctcgttcaaaatgatgttcgccttgaaatatgtaccgagaagaaaacgattctgtcagttgaagacatcattgcttttgattggtgataagtgtgatggagttattggacagnctgactgaagaactggggagaaaaacagttgttcttctactttnntgagcaaaaaggccggaggcaaagctttcagtaacatggctgttggttataacaacgtggatgttgatgctgcaaac

SEQ ID NO: 251494 - DNA, 356 bp, Glycine max
  unsure (1)..(356): unsure at all n locations
catttgatgaggaagaattctccaagaagcccacaattgtgaagaagactgtaacagctcctgcaaatgtgaaatcatattctattgctgaactgcagattgctactggcagcttcagtgtggatcaccttgttggtgaggggtcttttgggcgtgtataccatgctcaatttgatggacaggttcttgctgtgaagaagatagattcatctgtccttcccaatgatttgacagatgattttatagnnaaataatttcaaaccattctccaatttacaattcatccaaatgtgacagagcttgtaggttattgctcagagtatggacaacacctcttggtctatgagtttcataaa

SEQ ID NO: 251495 - DNA, 219 bp, Glycine max
gctcgtgcctctagggttatcatatctccatttccatttgctcgctctcagtttccaagaatcttaagctatgggaaagtcttacccaaccgtgagcgctgattaccagaaagccggtgagaaagcgaagaagaagctcaaaagcttcatcgctgaaaagagatgcgctcctctaatgctccgtttggcatggcactctgctggaacttacgacgtgag

SEQ ID NO: 251496 - DNA, 444 bp, Glycine max
tatgacttcacgcgtaccttaacctcggatttcggttcaaggttggaaggtggctctggatgctgccaaagggctggcgtttgggcacagtgctgaagcaaaagtgatatatagagattttaagacttcaaatgtcttgctggattcaaaatataatgcaaaactttctgattttgggctggcaaaggacggaccaacaggagacaaaagtcatgtctccaccagggtaatgggaacatatggatacgcagcacctgaatatctagccacaggtcatcttactgccaagagcgatgtgtacagttttggagttgtcctgctggaaatgttgtctgggaagagggcagttgacaagaatagaccatctggacaacacaatttggtggaatgggctaaacctttcatggcaaacaagcgtaagatattccgcgtgttggacacccg

SEQ ID NO: 251497 - DNA, 509 bp, Glycine max
  unsure (1)..(509): unsure at all n locations
agaaatgtgcctgnttcgactgtccagcctcagttcgncactaccgtgagagactgactagcatgcctgcacgtctactctagagtgatcctctcggtgaattccaattccacattttcaagaaataaggaggcaggggttgtcatatatgaattggaattatttgttttcttattaggcctatcctgaagccaaaggaaatgagatcggaattcctcggggaattccaattccacattttcaagaaataaggaggcaaaaatgttcatatatgaattgcaattatttgttttcttattaggcctatcctgaagccaaaggaaatgagatcggaattcctcggggaattccaattccacattttcaagaaataaggaggcaaaaatgttcatatatgaattggaattatttgttttcttattaggcctatcctgaagccaaaggaaatgagatcggaattcctcggtggtaccgagctcgaattccctatagtgagtcgtattaaattc

SEQ ID NO: 251498 - DNA, 404 bp, Glycine max
agagaagaagatgacagaagcttgtaaaacactggatgagttcatacatgcacgcatagcatctaagagagaggagctaagcaagtacaacgaaaatgaaatgggtgaagctcatcatgttgacttgttaacagctttgatgagagaaggaaaagcacatgacgataaatttctaagggatgctgtgttcaatctatttgtggctggaagagataccataacttcagctctcacgtggttcttttggcttgttgctacaaacccctcagttgaagccaagattctcgaagagatgaaagagaagcttgggaccaaagaaaagtcgcttggggttttaagcgtggaggaagtgaaaaggctggtttatctgcatggtgctatatgtgaagcgttgcgtctctttc

SEQ ID NO: 251499 - DNA, 390 bp, Glycine max
cgggatagacctgtgccaattcctggctcgggagctgcgctcagtaacatagctcatgttagggacttatcttcaatgcttactcttgctgttgagaatccagaagctgcaaatcagaccattttcaactgtgtgagtgaccgtgcagtgactctaaacggaatagccaaactatgtgctcaagctgcagggcgcccggttaacattgtgcattatgatccaaaagctgttggagttgatgcaaagaaggctttccctttccgcacctatcacttctatgcagaacctagagcagccaaagctaaattgggatggcaatcaaccacaaaccttcctgaagacctaaaagaacggtttgaggagtacgtaaagattgggagagataagaaa

SEQ ID NO: 251500 - DNA, 343 bp, Glycine max
atcctgtgacagaaatgatttcctcaacagatgtgatagaagagcaaattcgtgtagctatgggagaaaaacttcgatacaaacaggaggatattgtcctcagaggacattctattgaatgccgtatcaatgcagaagatgcttttaagggatttagaccagggccaggtagaattacagcatacttgccatctggaggtccatttgttagaatggatagccatgtttatcctgattatgtggttcctccaagctatgactcccttcttggaaagctttgattgatggctccaacagagaaaagcattgaacgcatgaagggccttgagacactatatcacag

SEQ ID NO: 251501 - DNA, 409 bp, Glycine max
cactcataacacaaagcacaaagcaaagctcatccttgaggtagaaaatggcagcagcttcttccatggctctctcatccccatccttggctggcaaggccgtgaagctgggcccatcagccccagaagtgggaagggtgagcatgaggaagaccgtcaccaagcaggtctcctcaggaagcccatggtacggcccagaccgagtcaagtacttgggcccattctctggcgagcccccgtcctacctaaccggtgagttcccaggcgactacggctgggacactgctgggctttccgcagacccagaaaccttcggcaagaaccgtgaactcgaaatgatccactccaggtgggccatgctcggagccttgggctgcgtctttccggattgctgtcccgcaacggggtg

SEQ ID NO: 251502 - DNA, 410 bp, Glycine max
ggcagcagtgcgaagagaaagaaagagaagaagcgcttatgcgaactcggacggaagcactgagttaactcagagcgagtgaaagtgttgctgcgtgatgtctggtggtatcgcccgtggacgcctcaccgaggagcgcaagtcgtggcggaagaaccatccccatggttttgttgcgaagccggagacgctgcccgatggaaccgtgaacttgatggtgtggcattgcactattcccgggaagactgggactgattgggagggtggctacttcccgcttacgctgcactttagtgaagactacccaagcaagccttcaaagtgtaaattcccacaaggtttcttccaccctaatgtttatccttctgggactgtttgcttgtctatacttaatgaggatagtgggtgga

SEQ ID NO: 251503 - DNA, 400 bp, Glycine max
  unsure (1)..(400): unsure at all n locations
caactaaggaataccctttcaaaatggcttcttctgtgtcatccatggtttctaccaccctcctcctaattaccatctgcacactgtcctcacttctgtcagttgcatctgcagcaacagaggagggacgaacaaggccattcaaaagggtctatgcctttggagactctttcacagacactggcaacacccaaaatgcagaaggtccaagtggctttggccatgtttcaaactctccctatggaaccactttctttaaccactccaccaataggtactcagatggtaggcttgtgattgattttgtggctgaagcactttcactgccttacttgcccccctaccgtcatagcaaaggcaatgacancttttgtgttaactttgctgttgctggttccac

SEQ ID NO: 251504 - DNA, 261 bp, Glycine max
ttctggaacaagtagccagtctctctggttgggatatcagaaataagaacacttgttaagctttccaatgaattaggatatcttggttgggaaaagtatccttttgagtgtttgccaccaagttttgagcccgacaaacttgttgagttgattctacctaaaagcaacatcaaacaactttgggaaggcacaaagcctctacctaatttgaggcgtttggatctctctggctccaaaaatctaaattaaatgccatatatt

SEQ ID NO: 251505 - DNA, 401 bp, Glycine max
ttctggaacaagtagccagtctctctggttgggatatcggaaataggaacacttgttaagctttccaatgaattaggatatcttggttgggaaaagtatccttttgagtgtttgccaccaagttttgagcccgacaaacttgttgagttgattctacctaaaagcaacatcaaacaactttgggaaggcacaaagcctctacctaatttgaggcgtttggatctctctggctccaaaaatctaattaaaatgccatatattggagatgccctatatcttgagagtcttgatctcgaaggatgtatacaactcgaagagatcggtctgtccattgttctttcaccaaaacttacttctctgaatttgagaaattgcaaaagtcttatcaagctgccacagtt

SEQ ID NO: 251506 - DNA, 384 bp, Glycine max
  unsure (1)..(384): unsure at all n locations
gtgagatacactaagttatcctcataaatacactctaagtaggtggcaagataagtgtctaaccttagtaacattgccacatattgtgttcattttggaattgtgccactaaaattctattcaattcatctatggctgcctcttcttatgctatgcaatcaatcctggcaaaccctttgatccgcatttccagcgggtctagggtgaaccaatttggcgttcctgctttgcacatgagaaggaatgttggcctgagagttaggtccatggctaaggaagaacaaccaagtgagcctgcaaccccagttacaccgncaccatcagtagaacccaagccacagccagtctctgctccttcaccaaaggtgagcactaagttttctg

SEQ ID NO: 251507 - DNA, 395 bp, Glycine max
gtgagatacactaagttatcctcataaatacactctaatgaggtggcaagataagtgtctaaccttagtaacattgccacatattgtgttcattttggaattgtgccactaaaattctattcaattcatctatggctgcctcttcttatgctatgcaatcaatcctggcaaaccctttgatccgcatttccagcgggtctagggtgaaccaatttggcgttcctgctttgcacatgagaaggaatgttggcctgagagttaggtccatggctaaagaagaacaaccaagtgagcctgcaaccccagttacaccgtcaccatcagtagaacccaagccacagccagtctttgcttcttcaccaaaggtgaacactaaattttctgatgtgttggca

SEQ ID NO: 251508 - DNA, 511 bp, Glycine max
  unsure (1)..(511): unsure at all n locations
ggaggtgtgttnttcctactgtaatagctacaacatacaagagctatgacgtcgcatgcacgcgtacgtaagctcggaattcgctcgagaagttccaaattttttggtttggggatagatagagtgatacgcgtgacattttcataataataaaaaaatggcagcggcggcggcagtgacggtgctactcccacctaggattccgaccaccaccaacgttacccgctgctctgctttgccttctctccctcctcgcgtctccaacaccaaaaccactttgttctcaccttccctcaacaacttttcagtgtcccgaaaatcttctctgcttcagaccagagcttcttcagaggaatcatcctcagtagatgccaatgaggtgttcacagatttgaaggaaaagtgggatgctcttgaaaacaagtccacagtacttctttatggtggaggggctatagtttgctattggctatcgtcaattcttgtgagcgccatcaactcaattcccttg

SEQ ID NO: 251509 - DNA, 517 bp, Glycine max
  unsure (1)..(517): unsure at all n locations
cgatacctctgtttcctttaaaatcgcactnacttcatactccttcttnacatggacggctcgcttacgctggctcttaattctccaaattatgtatagtttaagatttgtatgtattcattattaagacgccttattctattcattttgccatgactggctaactccagataaaggttttgaaagtaatgacaaatttattaattcatccatgttacttgcttgttttgaatctaaattttaattcactttctccatattaagcacattaaatttattactaatattatattaatattattttatataattcaaccattataaataaaacaataagtcaaataactactcatctaaatcatatacctattggaaatgaaatttccacttaatttgtacaaattgtatttaaacccacttataattataatttgcattccacccaaccaaacatcaaatcccatcctaatgtttacttcaatttaatataccatattttttattcaccaaatgtttg

SEQ ID NO: 251510 - DNA, 526 bp, Glycine max
  unsure (1)..(526): unsure at all n locations
nggtatgagggggctgtctgtcncatgcctagctcactanacgtatcactatagaagagctatgacgtcgcatgcacgcgtacgtaagctcggaattctccaaagtttgtatagtgtaggatttgttggtattcgtgataaaaacacctcatcctattcattttgccatgacgggcgaactccagataaaggttttgaaagtaatgagaaattattaattcatccatgttactggcttggtttgaatctaaatcgtaatgcacttgctccagaggaagcagaggagataaatgacgaatatgatattaatattatttcagataattcagccattagaaataaaacaataggtcaaataactactcatctagatcagataccgataggaaatgaaggtgccactgaatttgaacaatggtgtttagacgcactaagaatagtatttgcatcccacctaacagacatcaagtcccatccaaatggtaacgcagttcagagacgagatattataggcaccaaatgtggc

SEQ ID NO: 251511 - DNA, 415 bp, Glycine max
atcaaaagtattgaatgatcgaagcaattgctcatctgatgcatctttattatcctgccatattaaaagactttgttaaacttggtttcattccatatcgtttcaatttttatcctatcttgtcatttctttctattttattttatctttttttttttattttatattttttttataatttttcttttttcttaatattttttaatttttttttttttttttttttttttttttttttttttttttttattttttttcttcttatttttttttatttattttttctttttttgttttttactctttttttttaactttttttttttattattttttttttatttttatttttttttttttattgattttttttttttattatttttttatatttttatttttttttttatttttt

SEQ ID NO: 251512 - DNA, 380 bp, Glycine max
gcagttggtgcaatagcacctgaaattctaggcaaggctggtctgatccctcaggagacagcactcccatggttcagaaccggtgtgttcccacctgcaggaacctacaactactgggcagactcctacacactgttcgtgtttgagatggcactgatgggatttgcagagcacagaagattccaagactgggccaaaccaggctctatgggcaaacaatacttcctaggactagagaagggtcttggaggttctggtgagccagcttacccaggaggacctttcttcaacccacttggctttggtaaggatgagaagtccttgaaggatttgaagctcaaggaagtgaagaatggaaggttggctatgttggcaatctt

SEQ ID NO: 251513 - DNA, 403 bp, Glycine max
tcggggaattccaattccacattttcaagaaataaggaggcaaaaatggtcatatatgaattggaattatttgttttcttattaggcctatcctgaagccaaaggaaatgagatcggaattcctcggggaattccaattccacattttcaagaaataaggaggcaaaaatgttcatatatgaattggaattatttgttttcttattaggcctatcctgaagccaaaggaaatgagatcggaattcctcggggaatcccaattccacattcttatgatgtatcgaggcaaatatgttcatatgtgaattgtaattattgggtgaaatattaagcctatcctgatgccacacgacatgagatccgaattcctcgagggtaccgagctcgaattctatatagtgag

SEQ ID NO: 251514 - DNA, 228 bp, Glycine max
tccagatcttgcaaaaaaaaaaaaaacacaatggcagggagcgctcccactccacgcgaagagttcgtgtacatggcgaagctggcggagcaggccgagcgctacgaggagatggtggagttcatggagaaggactacgcctacgcctagagctaggagctgaccgtggaagagcgcatcctcctctgcgtaaactacttgaacgccttcagggctcgtagcgccttc

SEQ ID NO: 251515 - DNA, 458 bp, Glycine max
  unsure (1)..(458): unsure at all n locations
gatcgcgattttccgcccttttttttcctatntaatncgtntaatttgtaattttttgttgtcttttatttatttttttgttatttttatatatttttttttattttttattatattatattatattttattatatatatattttttttattttttttaattttattttttattatttattttattatttatattttatttttttttatattttattatcttatatttttatttttttttattattttatattttattattttttattttaattttttattttttattttattatttttttattattgtttttttttttttttaattttattattttttttttatttatttttattttttattttttttttattatttttatctaatttttttattattatatttttatttatattattatttttatcttatttatatttttattctattttaatttt

SEQ ID NO: 251516 - DNA, 419 bp, Glycine max
ctgcagtgcacccagaaagagtagctggtatcataactgtaggcattcctttcatgcttccgggtccctctgctgtggagagccaccttcagcttcccaaagggttttatattactagatggcgggagcctgggagggcagaagcagattttggccgctttcctgtgaaatcagtgataaggaacatctacactctcttctctaaaagtgaggttccaatagcagctgatgatcaagaaatcatggacttgtttgacccatctattcccctacctccttggttctccgaggaagaccttgcaacctatgcatctttatatgaaaaatctggattcagatatgcattgcaggttccttacaggagtatcaatgcggatgctggcttaagtgatgtaaaagttactattccatcacttttg

SEQ ID NO: 251517 - DNA, 355 bp, Glycine max
cggctcgagctcgagccgaatcggctcgagttctcattcgctctctactcgttcagaagatgtttctcacaaggactgagtatgaccgaggagtcaacaccttttctcccgaaggccgtttgtttcaggttgagtatgcaatcgaagccatcaagctgggatcaactgcgattgggttgaagaccaaagaaggagttgtccttgcagttgaaaagcgcatcacatcgccgctcctggagcctagtagtgttgagaaaattatggaaattgatgagcacatcggttgtgcaatgagtgggttgattgcagatgctcgaacacttgttgagcatgcacgggtggaaactcagaatca

SEQ ID NO: 251518 - DNA, 415 bp, Glycine max
cactgccagtgtgtcaccaccatggccaccgtcacaaccgagagcctccgccgcgattttccggccatgtgcctcgaaatcgaggtttctgaccggctcttccggtaaactcaaccgggaagtgactatgaggccaatggggtgccctccttctgcctctttcaaggttgaagccaagaagggagagtggttacctggcttggcctccccaacttacctcaatggcactcttcctggtgacaatggatttgaccctctgggactagctgaggacccagagaacttgaggtggtacgttcaagccgagcttgtgaatggacgttgggccatgttgggtgttgcaggaatgctactttctgaggttttcaccaagattggaatcatcaatgcccctcaatggtatgatgcttgggaa

SEQ ID NO: 251519 - DNA, 418 bp, Glycine max
  unsure (1)..(418): unsure at all n locations
tacaaacgcaagagacataacaatactctaattgacaaattgcagatctaagcactgtaacaagacagtgtctgattcaaaggtcaaccttcgctaatggctagggacagaaactcccgaattggaacgactgtggtgttgttgttatgcttcgtcgctcacttttatgtgctgccactggcagaggccgtgtggttaacactccccacttcggggactaagtgtttgtctgaagaaatccattcaaatgtggtcgttttagccgattactatgttgtcactcaagaaggtgggcttcaaacagtttctgtcaaggtaacgtctccttatggaaataaccttcaccacaatgaaaatgccacgccaggtcaatttgcatttacaacagccganagtgggaactatgtggcatgctttt

SEQ ID NO: 251520 - DNA, 407 bp, Glycine max
gaacataccaatctacaataaacgatgattctcattatctccctcattttttctcttctctctttctcccatgcttctgtcctagatttctgtgttgcagattatgcaggtcctattggacctgcaggatattcctgcaagaagccttcaaaggtcacagcagatgattttgcttacagtggccttggcattgctggtaacacctcaaacattatcaaagctgcagtgacccctgcatttgatgctcagtttgctggtctcaacggtcttggcatttccgcagcacgtttggacttagcagcaggtggagttataccacttcacactcatcctggagcttcagaattacttgttgtaattgaagggagcatcctagctggattcatttcttctgccaacattgtcta

SEQ ID NO: 251521 - DNA, 386 bp, Glycine max
caagcataagcacaagcacaagcacaagcacttctctaatgtccgtttcacactctattacagatttcacaagtgcttacacttcaaatggctttggaagctcttcaatcacccaccacagccactccatcgtttagtccctttgaagaaaccagtctcagttacttagagacaccgtggacgaaaggaaagcgttctaagcgtagccgcacggagcaacaactgcaacacccttcatgcaccgaggaagagtacctcgctctttgtctcatcatgctcgctcgcggcggcgccggcagtgtctccaccgccaaacccgctgtctccgacaacaattctgcgccgctatccgccgccaaactgagctacaaatgttcggtttgcaa

SEQ ID NO: 251522 - DNA, 283 bp, Glycine max
tgcatgcacgcgtacgtaagctcttaattcggctctagcgtctccgcatcctcgatcatcggatcataccccgaccgatcatttgatctatctatattctaaatgatatctaccctccaaacaatcctgcccgactctgactgtgctataaatgggcacctttcgtaggtggtactcacattccacctcttgaaagattttcccactatcatctctaataacatttagaagaatcttgatgaatctttttaacccatcgtgatcatctacttgaactctatct

SEQ ID NO: 251523 - DNA, 409 bp, Glycine max
cggcgccgcagcgttgatcatcggatcagaccccgacccagcagtggagcggccgatattcgagatgatatcggccgcccagacaatcctgcccgactctgacggtgctatagatgggcaccttcgggaggtgggactcacgttccacctcttgaaagatgtgcccgggatcatctcgaagaacattgagaagagtcttgttgaagcttttgagcccatcgggatcagcgactggaactctatcttctggatcgcacatcccggtggtcccgcgatcctcgatcaagtcgaggagaagctccggctcaagccggagaaactccagtccacccggcatgtgctgagtgagtacggaaacatgtcaagcgcgtgtgttttgttcattctggatgaaatgagggaagaagtc

SEQ ID NO: 251524 - DNA, 351 bp, Glycine max
caagcataagcacaatcacaagcacaagctcttctctaaggccggctcacactctattacagatttcacaagtgcttacacttcaaatggctttggaagctcttcaatcacccaccacagccactccatcgtttagtccctttgaagaaaccagtctcagttacttatagacaccgtggacgaaatgaaagcgttctaagcgtagccgcacggatcaacaactgcaacacccttcatgcaccgtataatagtacctcgctctttgtctcatcaatgctcgctcgcggcggcgcccacagtgtcttcaccgtcaaaccctctgtctacgacaacaattcttctccgatatcc

SEQ ID NO: 251525 - DNA, 397 bp, Glycine max
  unsure (1)..(397): unsure at all n locations
cacgtggcagcggctattccgcagacccgcgtgggtccgatcgcggttggggttcgcctcgtccagcaagaaggccttgcggccttgttctccggcgtctccgccactgtcctccgccagacgctctactccaccacccgtatgggcctctacgacgtcctcaagaccaagtggaccgactccgtcaccggcaccatgccgctcagccgcaagatcgaagccggtctcatcgccggtggcatcggcgccgccgtggggaaccccggcgacgtggccatggtccgaatgcaagcagactggcgcctnccttcggcacagcggcgcaactacaagtccgtcgtggacgccatcacgcgaatggcgaagcaagaaggcgtcactagcctttggagaggct

SEQ ID NO: 251526 - DNA, 352 bp, Glycine max
cacgtggcttcggctattccgcagacccgcatgggtccgatcgcggttgcggttcgcctcgtccagcaagaaggccttgcggccttgttctccggcatctccgccactgtcctccgccagacgctctactccaccacccgtatgggcctctacgacgtcctcaagaccaagtggaccgactccgtcaccggcaccatgccgctcagccgcaagatcgaggccggtctcatcgccggtggcatcggcgccgccgtggggaaccccgccgacgtggccatggtccgaatgcatgcatactggcgcctccctccggcacagcggcgcatctacaaattcttcgtggacgccatca

SEQ ID NO: 251527 - DNA, 357 bp, Glycine max
ctttcctaaagaaaattggaacctgcctctgttgttaaagtttgtatttttttttgagtgggtggattgagagaactgtgcaagctttggaacttcttcaaagtctggtacttcaatggctactgaagaggttaataaacttcaatcacttcctccttaccctgagatgatagtgaaagcacttgaagccctgaatgaggctgatggatcgagtaaatcagcgatatcaaagtacatagaaaccacctacggtgagttgccagatgaaactgttttggggagtcacctgaacaagatgaaagagagtggagagcttgcgttcaaacagaacaattacatgaaagctgatccaaatgc

SEQ ID NO: 251528 - DNA, 467 bp, Glycine max
gctatgactccatgcacgctacgtaagctcgaattcgctcgagggaatggaaatcggagctgcagattggaatgccaaaactttgaacttgaggcttccgttaagcttccttctagagttccttatgggtttcacggcacttttattcattcaaatgatttgaggaaacaagcttgaattggtgacggtatataagtgagttattcactttctgatgagagttttttctgttttatatttgcatatacgctttctttatctattttttttgtttatactgttttttaatttttttttttttttctttattttattctttttttttttttgagtttttttttttttatttctttttgttttttttttttatttatttttttctttatttatattttttttctctttattttttttttttattttatattcttttctttttattttttattttttttttttttactttt

SEQ ID NO: 251529 - DNA, 278 bp, Glycine max
  unsure (1)..(278): unsure at all n locations
agaaaagttagggttcacaacttttccttttccttttgcttgcnaatctgaatcaaataatcaatcatccattcattattcatcatgtcgtcggcgaagaaaatcacgctgaagagttcggacggcgaggctttcgaggtggaggaggcggtggcgctggagtcgcagactataaagcacatgatcgaggactactgcgccgacagcggcatccctctgccgaacgtgacgagcaagatcctggctaaggttatcgagtactgcaagaagcacgtcta

SEQ ID NO: 251530 - DNA, 322 bp, Glycine max
tatcacgtaccatgcacgcgtgcgtaagctcgcaattctgctcgagctttcctaaagaaaattggaacctgcctctgttgttaaaggttgtatttttttttgagtgggtggattgagagaactgtgcaagctttggaacttcttcaaagtctggtacttcaatggctactgaagaggttaataaacttcaatcacttcctccttaccctgagatgatagtgaaagcacttgaagccctgaatgaggcttatggatcgagtaaatcagcgatatcaaagtacatagaaaccacctacggtgagttgccagatgaaactttttt

SEQ ID NO: 251531 - DNA, 302 bp, Glycine max
tcggggaattccaattccacattttcaagaaataaggaggcaaaaatgtgcatatatgaattggaattatttgttttcttattaggcctatcctgaagccaaaggaaatgagatcggaattcctcggggaattccaattccacattttcaagaaataaggaggcaaaaatgttcatatatgaattggaattatttgttttcttattaggcctatcctgaagccaaaggaaatgagatcggaattccttggggaaattcaattccacaatttcaagaaataaagaagcaaaaatgttcatata

SEQ ID NO: 251532 - DNA, 402 bp, Glycine max
tcggggaattccaattccacattttcaagaaataaggaggcaaaaatgtggatatatgaattggaattatttgttttcttattaggcctatcctgaagccaaaggaaatgagatcggaattcctcggggaattccaattccacattttcaagaaataaggaggcaaaaatgttcatatatgaattggaattatttgttttcttattaggcctatcctgaagccaaaggaaatgagatcggaattcctcggggaattccaattccacattttcaagaaataacgaagcaaaaatgttcatatatgaattggaattatttgctttcttattaagcctatcctgaagccaaaggaaatgagatcggaattcctcgggggtaccgagctcgaaattcctataatga

SEQ ID NO: 251533 - DNA, 516 bp, Glycine max
  unsure (1)..(516): unsure at all n locations
agggaggggacatgggtcttancctcgatctatagtanatcatcggagagacaagcttgcatgcctgcaggtcgactctagaggatcccctcggggaattccaattccacattttcaagaaataaggaggcaaaaatggtcatatatgaattggaattatttgttttcttattaggcctatcctgaagccaaaggaaatgagatcggaattcctcgggggtaccgagctcgaattccctatagtgagtcgtattaaattcgtaatcatgtcatagctgtttcctgtgtgaaattgttatccgctcacaattccacacaacatacgagccggaagcataaagtgtaaagcctggggtgcctaatgagtgagctaactcacattaattgcgttgcgctcactgcccgctttccagtcgggaaacctgtcgtgccagctgcattaatgaatcggccaacgcgcggngagaggccggttgcgtattgggcgctcttccgctttcttgcttaatgactcgt

SEQ ID NO: 251534 - DNA, 422 bp, Glycine max
cattgcaaaaatggcatcattcaccatgacagcttccatgcttggctgcccagccgtcaccaaccggtcggcagcgacgcagaggagatcagtggtagtgaatgcagccagcaaatctgttgaaggggaaaaggtcagttatgacaacaatggtagcaatgcaaggaggaacttgatgttcgccacggcggcggctgctgtttgctcttttgctgcagggatggcattggcagatgagcctaaaccaggaacctcagaagccaagaaaaagtatgccccggtttgtgtcaccaatcctacagctaggatttgtcgcaattgaggaacttttttggttcacttttggaatttggaaatgtacaatgaatttggtgtaaggctttgatgatttcatttcatcctcactgtactagatgttcata

SEQ ID NO: 251535 - DNA, 166 bp, Glycine max
gctgaagaagattcagcaagcaagacccctcatttccgtggttaacaaggctgcctctctatcttcccccgagacagcacccagcgtctgcgttcggcttcggctggacaatctggggccgcaaccgggttcgaggaagagggctatgagaaaggctagaggaata

SEQ ID NO: 251536 - DNA, 369 bp, Glycine max
tcggggaattccaattccacattttcaagaaataaggaggcaaaaatgtgcatatatgaattggaattatttgttttcttattaggcctatcctgaagccaaaggaaatgagatcggaattcctcggggaattccaattccacattttcaagaaataaggaggcaaaaatgttcatatatgaatcggaattatttgttgtcttattaggcctatactgaagccaaaggaaatgagatcggaatttcatggggaatttcaattccacattttcaagaaataatgaagcaaaaatgttcatatatgaattggaattatttgccatcttattaagcctatactgaagccaaaggaaatgagatcggaatttc

SEQ ID NO: 251537 - DNA, 322 bp, Glycine max
catgcacgcgtacgtaagctcgtaatacaactccatgctacaggtttatgttcattatctttcacttcaaaaatggtaaaatgtaaatttaaactgtttgatcaataaatatacctatactgcatcataatcaaacgatatctctattcctctaactacctaacctacattcattatactaagtagatttaaattcatatcatatcatagctattaacattattaaatatttatatactcacaatttaacacatcatacataaccttattcataaacttttatactctatactgcctaatgagttatctaacttacattaat

SEQ ID NO: 251538 - DNA, 405 bp, Glycine max
  unsure (1)..(405): unsure at all n locations
gaatggcatangtaccattcttccacccaacaataagggcacgccattggaggtcggtaaaggaagggtattaaaggagggaagtagggttgctcttgttggttatggaacaatggtccaaagttgtatggaagcagctaaggttcttgaagctcatggcatctcaacaactgtggttgatgcaagattttgtaagcctctagatggagatttgatgaggagactcgctagagagcatgagattcttatcacagttgaagagggatccattggaggatttggttctcatgtttctcattttctaggcttgaatggtcttctagatggtaatctcaagtggcgagccttgacattgcctgacagatatataaaccatgggtctcagacagatcaaattcaaatggc

SEQ ID NO: 251539 - DNA, 419 bp, Glycine max
ctcgagccgcccgtaagtaactgtgcaggaagaagatcctgctgacccaaaccaaatgccgcagcagcagcagcagcagcgcgctgtttggtaccaacgcaaaatctaacccgcattcctctgtgtcatccaaacaacccctccgcctcagatctcgcctcgagaacatggatcagttgtcggcgatcagcgaggacctggccgagatcgacggacacatcgccgacaatttccgcgccctatcaaatggatttcagaagttggagaaaattaaggattccaatagacagaccaggcagttggaagacctcaccgagaaattgcgagaatgtaaacggcttattaaggagttcgataaagaagtcaaaacattggagaatagctttgatagagaaaccaacaaaatgttgaatgagaaa

SEQ ID NO: 251540 - DNA, 341 bp, Glycine max
ttccggatacagagaagctggaaagattgaaattggctgagatgaagcatgccaggattgctatgttggccatgctgattttctactttgaggctggacaagggaagaccccccttggtgctcttggcttgtaaattaaacatttcatgtagataattgaattgagaggctagacagttgcaaatcaacctttgtttgtcccgtctgtgttacttcatgacaaattcaaattctatgatctaaaattggatgcattcactttatgtctgcactctaatgtaaccatcgtatcaatacttgtatttttacttttctctttcaaaccaggagtagttgaagtc

SEQ ID NO: 251541 - DNA, 408 bp, Glycine max
cccatactctctctgtgttcttctgttctctctgtttcttgagattttctccctcctcagcgcctgtgaagtttgattgcttcattctttgaagtgaatttgacaattaagtaaattggttgagaagggttcattcctcttcattggaagaataaaacaaatattgcaggtggattttttctgatggcaactaatgaaaatcttccaccaaatgtaataaagcaactagccaaggaattaaaaaatattgatgaatcacctcctgaggggattaaagttgtggtaaatgatgatgatttttcaataatatatgctgacattgaaggcccagctggaactccttatgataatggagttttccgcatgaagttgttattgtctcgtgatttccctcactctcctcctaaa

SEQ ID NO: 251542 - DNA, 404 bp, Glycine max
gcggtcatgaacgaagtggccgaagaggacccgaagagagtgattgaactccacagctactgcaccagcgtctacgaagagggtgatgctcgctctgctcttattgctatgttgcagtccctaaaccatgcaaagaatggagtggacattgtctctggcacacgcgtcatgtctcactttgccaaacccaattggcgcagtgtctacaagcgcattgcgcttaatcatccagatgcccgagttggggtattttactgtgggccatcagccctcacccatgagcttcgtcagctagcattggatttctctcacaacacatccaccaagtacgacttccataaagaaaatttctgacaagataggggaattatcggagatcatgtgaaggatgatgtggcacgagc

SEQ ID NO: 251543 - DNA, 388 bp, Glycine max
gctgacactaattcatcaacaatgccattagcggattgtggtttccagggttctctatatggttgcatggattcatcggagttgttgcaaagcgcagggcatgttgacccagaaaaccagagtcaaacctttgtcaaggtttacaaatcagggtcagttgggcgctcacttgacatatccaggttcagcagctatcatgaactacgcgaggagttggctcagatgtttggaattgaagggaagttagaagaccctcttagatcaggctggcagcttgtgttcgttgacagggagaatgatgttcttctccttggagatgatccgtgggaatcattcgtcaataatgtttggtatatcaaaatactttcacctgaagacattcagaaaa

SEQ ID NO: 251544 - DNA, 396 bp, Glycine max
tcggggaattccaattccacattttcaagaaataaggaggcaaaaatgttcatatatgaattggaattatttgttttcttattaggcctatcctgaagccaaaggaaatgagatcggaattcctcggggaattccaattccacattttcaagaaataaggaggcaaaaatgttcatatatgaattggaattatttgttttcttattaggcctatcctgaagccaaaggaaatgagatcggaattcctcggggaattccaattccacattttcaagaaataaggaggcaaaaatgttcatatatgaattggaattatttgttttcttattaggcctatcctgaaaccaaaggaaatgagatcggaattcttgggggtaccgaactcgaattccctat

SEQ ID NO: 251545 - DNA, 408 bp, Glycine max
atgagttggaatgactgcaaaaagttaccttggaacctcattttgcttctgggagctggttttgccatagctgatggagtacaatctagtggcctagcagatgttttgtcaagagccttggatttcttggaagatgctccatacttggcaattgttcctgctgttagtctaatatgtagcattatcactgagttcatcacctccaatgatgctactgccacccttcttgtcccacttctgtatcacatagccagaactatgcatgtgcaccctcttcttcttatggtccctggaggaatagcaactgagtttgccttctggcttccaacttcaacaccatcaaatgtagttggctttgccacttgacacatagaaattaaagacatgcttcaagttggtgtgccactc

SEQ ID NO: 251546 - DNA, 422 bp, Glycine max
atgagtgggaatgactgctaaaagttaccttggaacctggttttgcttctgggagctggttttgccatatctgatggagtacaatctagtggcctagcagatgttttgtcaagagccttggatttcttggaagatgctccatacttggcaattgttcctgctgttagtctaatatgtagcattatcactgagttcatcacctccaatgatgctactgccacccttcttgtcccacttctgtatcacatagccagaactatgcatgtgcaccctcttcttcttatggtccctggaggaatagcaactgagtttgccttctggcttccaacttcaacaccatcaaatgtagttggctttgccactggacacatagaaattaaagacatgctcaaagttggtgtgccactcaaggttgctgggat

SEQ ID NO: 251547 - DNA, 373 bp, Glycine max
gaactatccatacatagccactttacactcagtcttgtgttgttgccttcatggccaagccagtgtccattgaggtatggaacccaagtggcaaatacagagttgttagcaccaaaccaatgcctggaactcgttggatcaatcttctcgttcaaaatgatgttcgccttgaaatatgtaccgagaagaaaacgattctgtcagttgaagacatcattgctttgattggtgataagtgtgatggagttattggacagctgactgaagactggggagaacagttgttctctactttgagcaaagccggaggcaaagctttcagtaacatggctgttggttataacaacgtggatgttgatgctgcaaacaagta

SEQ ID NO: 251548 - DNA, 389 bp, Glycine max
gaaataagtgctaaaggtcagccagagccatctggatggttaattggtggtttacagaacctttggtttgaccattttcatcttggagttctgtgcttgatagggaactgcatttgcatggctgcatttctagccattcagggaggctgggatcactgggatcactgactctaaacgttcttgcttattaggaattatccttttcacttaaattcctatgatataaagcttgtgcatcataggaggatcttttatcattaccggtctatatatggtgacttgggcatcttctagagaaagacaagcaactgttggagttactcctcatagctcttgggtctctgaaccacttattcatgacagaagtgcacaccagagaggtctccgtt

SEQ ID NO: 251549 - DNA, 432 bp, Glycine max
ctctccattttggcattggagagattggaacacccccccaaaacaagccccaattatggctctgaatctttgtatctcacctaactgtaaatgggtttcatctcctgcttccttagatagtgcatcttctttgagatcttcacttggttcttgttttggtaacataaacattgctagtgtgagtttaagcactagtagaagtttgagtttgaggaggagtgggagtgttagtgtaagatctagtttggaaactgcggggcccacagttacagtgggacaggtcactgaggttaacaaggataccttctggccgatcgttaaggctgccggggataaaaccgttgtccttgacatgtacacacaatggtctgtgcctaagaggggaaggttctagatgaatctctgccaaggttacaccccgaacaaaacttc

SEQ ID NO: 251550 - DNA, 285 bp, Glycine max
gcacttggttcaatatctcctgaaattctaggcaaggctgatctgagccctcatgagacagcactcccatggttcagaaccggtgtgttcccacctgcaggaacctacaactactgtgcatactcctacacactgttcgtgtttgagatggcactgatgggatttgcagagcacagaatattccaagactggtccaaaccagtctctatgggcaaacaatacttcctaggactagataatggtcttggaggttctggtgagccagcttacccagtatgacctttc

SEQ ID NO: 251551 - DNA, 203 bp, Glycine max
  unsure (1)..(203): unsure at all n locations
tcttggtgaattgcaattccacattttcaagatataaggaggcaaaaatggtcataggtgaattggaattatttgttnacttattaagcctatcctggaaccaaatgaaattggatcggaattcctcggggaattccaattccacattttcaagaattaaggaggcaaaaatgtgcatatatgaattggaattatttggtttc

SEQ ID NO: 251552 - DNA, 424 bp, Glycine max
agcaagcgcaagtatgagcaaatcccaagcagcccaagtggcgttattgatgctgcattttgctctgatggttccaacgattcgtgggcagtggggtcatcattatattcaccaccagagcctctcttcaagaagagcagaacccaaggacaacaaatgaaattgtcaccacttaaccgggtcattgtcggaattgttggcacctctccttaattaaatacccctttcacaaaccaaaaaagaagtcttatattttatttactgtggtaattagtcttccatgcatgttgctgaacttcagagccttcccctctatatgtatctcttcatttccaacaatgtccctcattcatttaacatttcttgaagaggcaaggtggtggtggttcaagaatgagtggtctatctctgagggaagaggagg

SEQ ID NO: 251553 - DNA, 528 bp, Glycine max
  unsure (1)..(528): unsure at all n locations
ggagtagtgtgtctgattccaactttcganngtacngtatttcagcttgacgtcgcatgcacgcgtacgtaagctcggaattcgtctcgagagctagcgcatgtttgagcaaatcccaagcagcccaaggggcgtggttgatgctgcattttgctctgatggttccaacgtttcgtgggcagttgggtcatcattatattcaccaccttagcctctcttcaagaagagcagaacccaaggtcaacaaatgaaatggttatctctgaaccgggtcattggcggaattgttggcacctgttcttaattaagtacccctatcgcaaacgtgataagaagtctgatgtgtatattactgtggtaattagtcttgcatgcgttttgctgaacttgatatcctgtcgcgttatatgtatctcttcatttccaacaatgtccctcattcatgtaacatttttttgataggcaagtggatagtggttcatgattgagtgtgctatcttagagggaagaggaggtcatgtatgtcag

SEQ ID NO: 251554 - DNA, 516 bp, Glycine max
  unsure (1)..(516): unsure at all n locations
agtagggtagaggtcatcccatgatnctaaagcacatattcgtactactcggagagacaagcttgcatgcctgcaggtcgactctagaggatcccctcggggaattccaattccacattttcaagaaataaggaggcaaaaatgttcatatatgaattggaattatttgttttcttattaggcctatcctgaagccaaaggaaatgagatcggaattcctcggggaattccaattccacattttcaagaaataaggaggcaaaaatgttcatatatgaattggaattatttgttttcttattaggcctatcctgaagccaaaggaaatgagatcggaattcctcggggaattccaattccacatttttaagaaataaggaagcaaaaatgttcatatatgaattggaattattttgtttcttattaagcctatcctgaaaccaaaggaaatgagatcggaattcctcgggggtaccgagctcgaattccctatagtgagtcgtattaaattcgtaa

SEQ ID NO: 251555 - DNA, 414 bp, Glycine max
  unsure (1)..(414): unsure at all n locations
gttacgtgcagtttttcagttataaactcccggaatcctcacaagggacgacggataagcgttgctgttccacccaagtttccaaacttccggagggaagcatctctgcaggggaatttggaggctattagagtcccaacttcggtgcctgtgcgtgtagcatacgagcttcttctagctggtcatcgatatttggatgtaaggaccccggaagagttcgatgctggacacgctcctggcgcaattaacattccttatatgttcagagttggatcagggatgacaaagaacagcaactttattagagaagtgtcttcacaagttaaggaagatgatgaaattattggccggtggtaacctggtaaaaagatctatgatggccgcaagtgactngctagctgctgggttcactgg

SEQ ID NO: 251556 - DNA, 408 bp, Glycine max
ttcaccatgacagcttccatccttggctgcccagccgtcaccaaccggtcggcagcgacgcagaggagatcagtggtagtgaatgcagccagcaaatctgttgaaggggaaaaggtcagttatgacaacaatggtagcaatgcaaggaggaacttgatgttcgccacggcggcggctgctgtttgctcttttgctgcagggatggcattggcagatgagcctaaaccaggaacctcagaagccaagaaaaagtatgccccggtttgtgtcaccaatcctacagctaggatttgtcgcaattgaggaacttttttggttcacttttggaatttggaaatgtacaatgaatttgttgtaaggctttgatgatttcatttcatcctcactgtactagatgttcataaaagt

SEQ ID NO: 251557 - DNA, 402 bp, Glycine max
  unsure (1)..(402): unsure at all n locations
cccgtgtgcccatcatcgtcaccggtaacgatttctccacactctatgcgcctctcatccgtgatgggcgtatggagaagttctactgggcaccaacaagggatgaccgcattggtgtctgcactggaatttttcgcaccgattcaattcctgaacaggacgttgtcaagattgttgacaccttccctggccaatccattgatttctttggtgcactganggccagagtatatgatgacgaagtgaggaagtggatntctggtgttggtgttgacggcattgggaagaagcttgtgaactcaaaagatggacctncaacctttgagcagcccaagatgactctggagaagctcttgacgtatggtaacatgcttgtccaagaacaagagaatgtcaagagag

SEQ ID NO: 251558 - DNA, 409 bp, Glycine max
  unsure (1)..(409): unsure at all n locations
cgcttaacctctctcattccccatttcctcggctccttgaaccgctgctaaattctagggttccgaaatggacgctggcggaaagatcaagaagggcgccggaggtagaaagggcggcggcccaaagaagaagccggtttcaaggtccgtcaaagccggtctccaattccccgtcggaagaattggccgttatttgaagaaaggaaggtacgctcagcgtgtcggtaccggtgctcccgtatacttggctgcagttctcgaatacctagctgccgaggtgcttgagttggcttggaatgccgcacgtgacaactagaagaacaggattattccaagacacgtgcttttggcagtgaggaacgatgaanagttggggaaattgcttgctggagtgacaattgcacatggt

SEQ ID NO: 251559 - DNA, 531 bp, Glycine max
tatttttttgtgatgtgtggggttgagtatgtattgatgtatagcgaaagacacaagcttgcatgcctgcaggtcgactctagaggatcccctcggggaattccaattccacattttcaagaaataaggaggcaaaaatgttcatatatgaattggaattatttgttttcttattaggcctatcctgaagccaaaggaaatgagatcggaattcctcggggaattccaattccacattttcaagaaataaggaggcaaaaatgttcatatatgaattggaattatttgttttcttattaggcctatcctgaagccaaaggaaatgagatcggaattcctcggggaattccaattccacattttcaagaaataaggaggcaaaaatgttcatatatgaattggaattatttgttttcttattaagcctatcctgaagccaaaggaaatgagatcggaattcctcgggggtaccgagctcgaattccctatagtgagtcgtattaaattcgtaatcatgtcatagctgtttcg

SEQ ID NO: 251560 - DNA, 335 bp, Glycine max
aaaaaggagagatggcagctgcaacatctagtgctgtgttaaacgggtttggatctcacttcttgtgtggaggaaagaggagccatgcccttcttgctgctagcattggagggaaagttggtgcttctgttagtcctaaaagagttattgtggcagttgctgctgcaccaaagaagtcatggatccccgctgtaaaaggtggtgggagtttcatagacccagaatggcttgatggctcgctaccaggtgactatggttttgacccactaggactaggaaaggacccggcattcctgaaatggtatagagaagctgaactcattcatgggaggtgg

SEQ ID NO: 251561 - DNA, 437 bp, Glycine max
cgatattgagattgttattcatcctcaatctatcatacattccttggttgaaacgcaggattcatctgttattgcacagttggggatacctgacatgcgcttaccgctcctttatacattatcttggccagaaagaatctattgctctgaagtaacttggcctcgtcttgatcttagcaagtatggttctctaacattttatgcaccggatgacaagaagtttccatcggtgaatctttgctatgctgcgggacgtgctggaggcaccatgacaggagttcttagtgcagcaaatgagaaagctatagaaatgtttgttgaagaaaaaattagttatctggatatattcaaggttgtggaactaacttgtcaggaacatcaaaaggaattagtagcatcttcgtcactcgaagaaattattcactatgacccatggg

SEQ ID NO: 251562 - DNA, 379 bp, Glycine max
acatgcacgcggacggaagctcgatgttcgactcgagtgtctctttacctctatatctctatctctctttctcatgggctgggctagttgaagtttgtaagacaaatacaccatggcagatatcctgagtggagaacagattgttgattttaaagaggcctttgacttgtttgtcaaagatgtagatggtgagcaagctttcttatgtagttgaattactctttagattgatgcaattctgtcatctctatcatatatatatatatatttatatgtatgtatgtagatgcatgtatagtggtgtttatgaatatgtagtgcatcttctaagataacattactgtgtaagaacttgccactgtcattcggtcattggatc

SEQ ID NO: 251563 - DNA, 388 bp, Glycine max
cttgagccgaatatgctagaggaagcttccctgtgaaagttgtgagcttaacgggctagactcctgcgatgagagctgtttcgaaccgcccgacgaggccaaggtcttggttgtgaacttgctttacgacgttgatcgcctgaaatcggccatgcttatagaacatgtcgtaactgttgtaatcgcttaagttatttataacacgtaaactgactagagtcgcggtttatgcgcatgtgacgatgagtactgatgaagaagctgaacgtgctctggagcaattcaaccgttatgatatctatggaagactgctcactgatgataaggcttctgcatgcggagctcgacatgaacgctgaccaggtactagttcctttgaatgttgctt

SEQ ID NO: 251564 - DNA, 524 bp, Glycine max
  unsure (1)..(524): unsure at all n locations
agtagttttgagaggtcgtaccatcgatnctaccgatccctacagtaacactatagaagagctatgacgtcgcatgcacgcgtacgtaagctcggaattcttttccgacaccgaggctcgcattcttggtggctaacctgactaccgcccccctattctcactacttaattcgattctgtactttgttacaaacttgatattgcttacatcctaatctgagtactcattactacaacaaaaccaaacgggcggtcgccgactagtgagctcgtcgaccccgcaattaattccggaccgctacctgcaggcgtaccagctttacctatagtgagtcgtattacatctagtcgtaatcatggtcatagctgctaactgtgtgaaattggcattcgttcacaatttcacacaacataccagccggaagcatatagtgtgaaagcctgggtgcctaatgagtgagctaactcacattaattgcgttgcgctcactgcccgctttacaatctggacacctggctggcca

SEQ ID NO: 251565 - DNA, 389 bp, Glycine max
tctctctttccctctctatctctatctctctttctctgtctcttttctggttgaagtttgaaagacaaatacaccatggcagatatcctgagtgaagaacagattgttgattttaaagaggcctttggcttgtttgacaaagatggagatggtgagcaagctttcttattcagttgaattcctctttagattgatgcaattctctcatctctatcatatatatatatatatatatatgtatgtatgtatatgcatgttggtggttgtttatgaatattgtgtgcatcttcttaggttgcattactgtggaagaacttgccactgtcattcggtcattggatcagaaccccactgaagaagagctccaagatatgataagcgaagtcgat

SEQ ID NO: 251566 - DNA, 386 bp, Glycine max
gagtgctattgaattcaattcgattattgcaaagcatcaaaatattaggtctacacttgtagaaaggatgccagttttggatgaggcaacttccattggtaggagggctgggtctctaccaggtgcagcttcaactccaactgcaccttcatttaatcttccaaatggaacagccaaacctgtggctcctcttgtagatctacttgatctaagttcagatgatgctcctgcacctagctcttctagtggaggagatattcttcaggaccttcttggtgttgatctttcaccagcgtcacaacaatctgttgctggccaagcttcaaaaagtggcaacgatgttcttttggatcttttgtctattggatcaccttctgtcgaaagca

SEQ ID NO: 251567 - DNA, 356 bp, Glycine max
tctctctgtttttatctatctctatctctctatttttgggtctggtctggttgaagtttgaaagacaaatacaccatggcagatatcctgagtgaagaacagattgttgattttaaagaggcctttggcttgtttgacaaagatggagatggtgagcaagctttcttattcagttgaattcctctttagattgatgcaattctctcatctctatcatatatatatatatatatatgtgtatgtatgtatatgcatagttgtggttgtttatgaatattgggtgcgtcttcttaggttgcattactggggaagaacttgccactgtcattcggtcattggatcaaaaccccactgaa

SEQ ID NO: 251568 - DNA, 556 bp, Glycine max
  unsure (1)..(556): unsure at all n locations
aggagtggtcagaggtctcgtatgatntncctaatnngcatagcatctatctagtagagctatgacgtcgcatgcacgcgtacgtaagctcggaattcggctcaagattaaaactacacgcacccgcgacgacacacgttatcagcaaacgacaacaacaaccacgcgcgtttcgcacctcacgaactcggagaagcaaacgcagcgtcgtcgattcgtcactcgcaactcgggcacgcgcggcgattgcgtttattcatattattgtttttttttgttttttatttgtcattattttttattttatattttattttttatatttatattattattatttatatttttttttttttatttatatttttattttattattatatatttatttgggtgggtgttttaatttattttaattttattattttatattattatttttatttatttttattatttttttatttttttaattttttttatttaatattaatttattttttttttcttttattttaattattttttttattttttatattcatttttttttttt

SEQ ID NO: 251569 - DNA, 200 bp, Glycine max
tccaaattctccagccatggcagtttcttctgcgtctgcttcctccaaacttatactattcccccatgcttcatcttcttcccttatcttcacacccttccgttcctccaccaacacccacaaactatcccctctctcctgcttcttccttcaccctatcatcgttcttcgccgcaccctctcctccaccactaccacca

SEQ ID NO: 251570 - DNA, 523 bp, Glycine max
agtaggttttggagaggtcgtgcaatgaatgccccatgccccattacgtatcactatagtagagctatgacgtcgcatgcacgcgtacgtaagctcggaattcggctcgagctgaacaggacgttgtcaagattgttgacacgttacctggccaatccatcgatttctttggtgcactgagggccagagtatatgatgaccaactgaggaagcggatgtcggtgttccacgctgttgggaatgtaattcagctccgccatcgacgctttcactttttaccgcgttttcacagaaacgtggctggcctggttcaccacgcgtgaaacggtctgataagagacaccggcatactctgcgacatcgtataacgttactggtttcacattcaccaccctgaattgactctctttcgtgcgctatcatgccataccgtgaaaggttttgcgccattcgatggtgtcaacgtaaattccgcttcgcctttttgcgctaatttgcagcttttctttaatgaattggtcct

SEQ ID NO: 251571 - DNA, 393 bp, Glycine max
accccatcaacttcagtggtgccacaaggccagctccatctgcttctagtcctgcctccttcaagactgtggctcttttctccaaaaagaaggctacaccaacacctccaaaaaaagctgctgctgctgctcctgccaatgatgagcttgccaagtggtatggtcctgacagaaggatcttcttgcctgagggtctcttggaccgatccgaaatcccagagtacttgaccggagaagtccctggagactatggttatgacccatttggtcttagcaagaagccagaagactttgccaaatatcaagcatttgagttgattcatgccagatgggcaatgcttggtgctgctggattcatcattcctgaggcccttaacaaatatggagcaaact

SEQ ID NO: 251572 - DNA, 311 bp, Glycine max
gttgataaggagggaaggcctgtttacatcgagagactcgggaaagtggatccgaacaaacttatgcaggttacgaccatggatagatatgtaaaataccatgtacaggagtttgagaaagcttttaagataaagtttcctgcttgcacgattgccgtcaaaaggcacattgattcaagcaccacgatactagatgttcaaggcgtgggccttaagaactttacaaagtctgcccgggaccttattatgcggttacaaaagattgatggtgataattaccctgagactttctgtcaaatgtttatcataaa

SEQ ID NO: 251573 - DNA, 400 bp, Glycine max
gttgtctctatccttaaggttccgccaccgcaccaagtcggagcacccaaccaggtcttctttcattcatggcggaggaacttatttctcaattaaacaatatgctagaagaaaatggaacaccaagtcatgtagaaagggctgctgatgctgatgctgatgctgatgctgatgctgagctttctccaccatcacaaaaaggagatgacactaaagaagtttcaaagaagaaaaagaagaaatctaaaagcaagaaaaagaaagaactcttgcaacaggctgatccaccatcaatttctggtattgaccttttcccatctggagattttcctgaaggtgaaattcagcagtacaaagacgattacctatggagaactacatcagaggagaagagagaact

SEQ ID NO: 251574 - DNA, 526 bp, Glycine max
  unsure (1)..(526): unsure at all n locations
ngggtaagtaagtggnttcgtgttacgaattagagagttatagcaacactcatagaagagctatgacgtcgcatgcacgcgtacgtaagctcggaattcggctcgagtctttttaaggttgtactgaaaaaaaagtagcttgtctagacattatgtgctggtgtctagctgcgatttagtgtcttcttgctcgggcagaaatgagaagtatgaataaatcggtttcgggaaccggtgttgttaccctgttaggagcattaagcttttttttgatgtctcttctgtgtaggggatggagtttttggattattatatacttgctgatgtactcggctctttgttgattctgattgcagacatttttgccctgcactatagcacaagcatgggcggccctccactaatgggctcgtcgaccccggtattaatatccgaccggtacctgcaggcgtaccagctatacctatagtgagtcgtatcagagctagacgtaatcatggtcatagctggttcctgtgtgaaattn

SEQ ID NO: 251575 - DNA, 407 bp, Glycine max
gttgataaggagggaaggcctgtttacatcgagagactcgggaaagtggatccgaacaaacttatgcaggttacgaccatggatagatatgtaaaataccatgtacaggagtttgagaaagcttttaagataaagtttcctgcttgcacgattgccggcaaaaggcacattgattcaagcaccacgatactagatgttcaaggcgtgggccttaagaactttacaaagtctgcccgggaacctcatatgcggttacagaagattgatggtgataattaacctgagactctatgccaaaatgttatcataaatgcttgaccgggatttatgttgctatggaacactgtcaagtctttccttgatcccaaaacaacttaaaagattcatgttcttcgaaacaagttcca

SEQ ID NO: 251576 - DNA, 388 bp, Glycine max
gttgataaggtagagaagccagtttacatcgagagactcagcaaagtggatccggacaaacttatgcaggttacgaccatggatagatatgtgcaataccatgtacatgactttgagaaagcttttaacataaagtttaatgcttgcacgattgaccacaaaaggcacattgattcaagcaccacgatactagatgttcaaggcctacaccttaataactttacaaagtctgaccgggacctcattatgcggatacaaaagattgatggtgataattaccctgagactctctgccaaatttttatcataaatgctataccagtatttacgttgctatggaacactgtcaaatcttttctagatcccaacacaacttcaaaaattcatg

SEQ ID NO: 251577 - DNA, 409 bp, Glycine max
ttttcttctatagagacacacggagagagtctcagagcagtaaacgcccttcaatggctaccactaaagtttacattgtttactattctacgtacggacatgttgagaagttagctgaagagattaaaaagggagctggttccggtgaaggtgtgcaagcaaagctatggcaggtacctgaaacactttctgaagaggtccttgggaagatgggtgcacctacaaagagtgatgtaccgattattacacccaacgagctacctgaagctgatggcttattggttgatttacccacaagatttggactgatggctgctcaattcagagatttcatggatgcaactggaggcctgtggcgcacacaggcactagctggacagcctgcaagaatattttacagctctggttc

SEQ ID NO: 251578 - DNA, 422 bp, Glycine max
  unsure (1)..(422): unsure at all n locations
ctacaagggaagaaaaacttagctactaaggaaggatcaaagagaatggctcaagcaatggcatcaatggctggcttgcgtggttcctctcaggctgtgttggaaggtagccttcaggtgagtggctccacacgcttgaatgtggggagtggaagcagggtggcctcagtcacacgtgcagggttcacagttagagcacaacaacaacaagtgagtggtgaggtacaaagcagccgtagggcagtgctttcaactggttgctgcttgtttggccactggctcttttgttcaagctgtgcttgctgatgccaaatctatcaaagttggaccaccttccccaccttctggtggattgcctggaacgttgaactcagatgaagcangagaccttcagctgccattgaaagataggttcttccttc

SEQ ID NO: 251579 - DNA, 415 bp, Glycine max
cagcaaccaattccatttccagtttctgattcgtcaaagggacaagggaagtgaaagggtttagggtgtgacctgagatcaacatgttgcggaggcttctctcttctcacctcaaaaccctagccgccaccgcttcttcttccactccccgatctgcttccgccgccgacagattcgccgctctctctcgctcctaccgctacttctcaacccagtccgaggatgctactgccatcaaaaagaaagctgaagatgtaatgccaatcgctactggtcacgagcgcgaggagcttcaggctgagctcgagggaaagaatattcttgaaatagaccatcccgaacgtccattcggcacgaaggaagcacctgctgttgtcaaatcttactatgataaaaggatagtccgatgcccaac

SEQ ID NO: 251580 - DNA, 140 bp, Glycine max
gcaccatatggggtggacatagcaactggtggaattgctgactcatttgctaactttgtctgggagcctgcaggtgtgaagatcaatgctataaatgctgcaacagatgctgcctgccttatcttaagtgtggatgaaac

SEQ ID NO: 251581 - DNA, 415 bp, Glycine max
  unsure (1)..(415): unsure at all n locations
gttctttctttcctaccccaaatttgtttttcgccttgtagctctcaattcctctgtttccttcttccttcatctttgcgtcatggccagaggttcctctcagtctcagtcctccacttcaacagccacgcgaccaggaccagcaggcatggctccccgcggttccgccgccgccaccgctggcatgcgccgccgccgtctcggcggaggaaacagctccgccagcaccggcgtcggaggcggcagcagcaacatgctgaggttctacacggacgatgctccggngctgaagatttcgccgacggtggtgctggtgatgagcctctgcttcatcggcttcgtcaccgcgctccacgtgttcngcanactctaccgctccaaatcttgcggcaccgtttgatcttacgatcctctt

SEQ ID NO: 251582 - DNA, 415 bp, Glycine max
atttcctgaacacctaagtgcttttactcatttgactgcaggtgccatagggggcattgctgcttcattgattcgtgttccaacagaggttatcaagcaacgaatgcaaactgggcagtttgcttcagcttctggtgctgttcgctttattgcttctaaggaaggcttcaaaggattttatgctggatatggatcttttttgttgagggatttaccctttgatgctattcagttttgcatctatgagcagattcgaataggttatatgcttgcggcacaaagaaatctgaatgatccagaaaatgcaattattggtgcttttgcaagtgcactaactggagctataactaccccccttgatgtcatcaagacaaggttaatggttcaaggatctgcaaaccaatataagggaatc

SEQ ID NO: 251583 - DNA, 262 bp, Glycine max
gcacgcctgcggaatctgggaattgggctctaggttcataactatggatttcctgtttacatcgatagactcgggaaaggttatctttacaaacttattcacgttactaccatggatagatatgtaaaataccatgtacaggattttgataaagcttttaatataaattttcctgctttcactatttcctccaaaaggcacattcattcaagcaccactatactagatgttcaaagcattttccttaataactttacaaaat

SEQ ID NO: 251584 - DNA, 403 bp, Glycine max
  unsure (1)..(403): unsure at all n locations
ggtgattcctggtgaatatggtttcgttgcccagcttaatgagggtggtcacctcaagaagagaccaactgagttccgagttgacaaggtccttcaaccctttgatgaaaacaaattcaactttaccaaagttgggcaagaagaggtcctcttccaatttgaagctagcgaggatggacaagtccagttctttccaaatgctccagttgatgttgacaattctcccagctttgttgccatcaatgtcagtcctattgagtatgggcatgttttgctgatttcgggcattttcgagtgtttgccttaaaggattgaccgtgagagctttctncttgcacttcacatggcaatggaagctgataatccatattttcgattgggtacaacagtttgggtgcttttg

SEQ ID NO: 251585 - DNA, 174 bp, Glycine max
tttatgcctacaagatcatcatcaaaacctgtggtactgctaagctgattgcttgcaatcccacccatattgaagttcgctgaaatgctttcccttaatgttaagtctgtgaattacaccaggggaagtttcattttccccagtgctcagccatatccccatcgcatcttttct

SEQ ID NO: 251586 - DNA, 357 bp, Glycine max
ctccgccacttctgaatctattgaatcaacaatcatgtgcggcggagagcaccatttcgagtccaaggccgacgccggagcctccaaaacctaccctcagcaagccggtaccatccgcaagaacggctacatcgtcatcaaaggccgtccctgcaaggctgtggaagtttcgacttccaaaactggaaagcacggtcacgctaagtgtcactttgttggaattgatattttcactgccaagaaacttgaggatattgcgcactcttctcacaactgcgatgttcctcatgtgaatcgtactgattaccagctcattgatattgctgaggatggatttttgagtctgcttactgaaaa

SEQ ID NO: 251587 - DNA, 418 bp, Glycine max
ttctgattgccttcaaatcacacactctcttcaatttctagggttttgctattgctttgcctccgttccccctttctcacaaaaacaacgccttttctcttctccttcgtatctattctttgcgtttggtttttggttgattgaaggcattcacagcgtaattcgttgctgcattttaatcgatttatctaaccaggactgaatgacctaatggagtctaaaggtgggaaaaagaagtctagtagtagtagtagtaaatcaattttttacgaagctcccctcggatacagcattgaagacgttagaccaaacggtggaatcaagaaattcagatctgctgcttactctaactgttctcgcaaaccatcctgatacacatccggattgataagttcgtgcatgcaaccatagttttatt

SEQ ID NO: 251588 - DNA, 425 bp, Glycine max
gcgagcagtttcaaagagaggatttgggattgggaaggcgagggattgcgctgcgtctcttcctcttctctttcgattcatccctcattcataatcttccaatccaacaacctcagcctcacactcacacatacacacatctgaacgcgtatcgtccctcccatggcttcaaagcgcatcctcaaggagctcaaggacttgcagaaagacccaccaacttcttgcagcgctggtccagtagctgaggacatgttccattggcaagcaacgattatgggtcctgctgatagtccttatgctggaagtgtattcctagtcactattcactttcctccggattatcctttcaaaccttccaaggttgcctttaggactaaggtgtttcatccgaacatcaacagcaatggtagcatttgtcttgatat

SEQ ID NO: 251589 - DNA, 416 bp, Glycine max
tcctgattgccttcaaatcacacactctcttcaatttctagggttgtgctattgctctgtctccgttccccctttctcacaaaaacaacgccttttctcttctccttcatatctattctttgcctctcgctttcgctcaattgaacgcattcacagcgtaattcgttgctgcattttaatctatttatctaaccagcactgaatgacctaatggagtctaaaggtgggaaaaagaagtctattagtacttgtagtaaatcaattctttactaatctcccctgggatacagcattaaacacgttataccaaactgtgcaatcaagaaattcatatctgctgcttactctaactgttctcgcaaaccattctgattcacatccggaatgatagctcgatgcatgcaaccataatttta

SEQ ID NO: 251590 - DNA, 367 bp, Glycine max
aacaggtcacctggatactatgatggacgctactggacgatgtggaagctgcctatgtttggctgcactgatgcttctcaggtgttgaaggagcttcaagaggctaagactgcataccccaatggcttcatccgtatcattggatttgacaacgttcgccaagtgcagtgcatcagcttcatcgcctacaagcccccaggcttctaagtcattgaaaaatttgcaaagcatctgtagccaccccactttgtttgttgtacttaaactacattcccatttgtttttgctttatgagatttcatcatcctgtatttttggtttctgttttcggacttcaatggaaattaatggatgagaactaatgaat

SEQ ID NO: 251591 - DNA, 525 bp, Glycine max
  unsure (1)..(525): unsure at all n locations
ggttgtttaagagcgtgggtctgaatgtggtagtgggaggataatcggaagagctaagctagcatgcctgcacgtcgactctagaggatcctctcggtgaattccaattccacattttcaagaaataaggaggcaaaaatgttcatatatgaattggaattatttgttttcttattaggcctatcctgaagccaaaggaaatgagatcggaattcctcggggaattccaattccacattttcaagaaataaggaggcaaaaatgttcatatatgaattggaattatttgttttcttattaggcctatcctgaagccaaaggaaatgagatcggaattcctcggggaattccaattccacattttcaagaaataaggaggcaaaaatgttcatatatgaattggaattatttgttttcttattaggcctatcctgaagccaaaggaaatgagatcggaattcctcggnggtaccgagctcgaattcctatagtgagtcgtattaaattcggtatcatgtcatagct

SEQ ID NO: 251592 - DNA, 417 bp, Glycine max
ccgaaaaacacgttaaagaaagtcccattcccactaccgagagcaaattaagaagatgaagcagcagagagtggagtttatgggcctgggccttttggtggtgatgatggcatgtgggtcggcgagtggtgcggatgatttggcaaccaagtgttcagcggtgattcagaaggtaataccgtgtttggatttcgcgaaggggaaggaagaaacgccgaaaaagcaatgttgcgacgcagcaacgtccataaaggagagcaacccagagtgcctctgctacatcattgaagagacccacaagggtagcccacaggttaaaagcttgggcattcaagaggccaagctgcttcagctcccttctgtttgtaacgtcaaaaacgccagcatcaccaactgtcctaagcttttgggtctatc

SEQ ID NO: 251593 - DNA, 422 bp, Glycine max
gaagcagcagagggaggagcggcattaaaaatgcagatcttcgtgaaaaccctaacggggaagaccataaccctcgaggtcgaaagcagcgacaccattgacaatgtcaaggctaagattcaagacaaggaaggcatccctccggatcagcagcgtttgattttcgccggaaagcaacttgaagatggaaggaccttggccgattacaacatccagaaggaatcaacccttcaccttgtcctcaagcttcgtggtggcatcatcgagccttccctcatggctttggctcgcaaatacaaccaggacaagatgatttgccgcaaatgctatgctcgtctgcaccctagggctgtgaactgccgtaagaagaagtgcggtcatagtaaccagttgaggcctaagaagaagatcaagtaaattct

SEQ ID NO: 251594 - DNA, 529 bp, Glycine max
  unsure (1)..(529): unsure at all n locations
agttntagaagaggcttgntgcctcgaatacagtacagtacagnactaccgtgagagacacgctagcatgcctgcacgcctactctagcagatcccctgggagaattccaattccacatgtgcaagaaataaggaggcaaagcatgtgcatatatgaatcggaattatttgctttcttattacgcctatcctgaagccaaaggaaatgagatcggaattcctcggtgaattccaattccacattttcaagaaataacgaggcaaacatgttcatatatgaatcggaattatgccgatatcttattaggcctatcctgaatccaaaggaaatgagatcggaattcctcggacaatcccaattccacattttcaagaaataaggaggcacaaatgttcatatatcaattggaattatatgctttcttattaggcctatcctgaatccacaggaaatgagatcggaattccttgacggtaccgagctcgaattccctatagtgagtcgcattaaattcgtaaacatgtcata

SEQ ID NO: 251595 - DNA, 331 bp, Glycine max
aataggtgctaacatcgcctggccaaattcagatgtcattgacaagtaatatccattcattgtgggcggtttaatggtccgtttcaacttgattagatttgttatctagtattccttttttaatttcattttcacatttttttgtttatattttttctttcttgtttatatatttttttgttatatttctttttcttattatgtctttttttttattctatttattattttttctttttttctattttatattttattttttttattttatatatttttattttttgggggtgtttttattttcttttatttttatatttttttttttttt

SEQ ID NO: 251596 - DNA, 342 bp, Glycine max
  unsure (1)..(342): unsure at all n locations
agcttacaaggatggttctcttcgtgtcgttcgtaatggaatagggattaatgaacaggcatcggtagaacttcaaggtatcaaaggaatgtggtcactgagatcctcaacagatgatccttttgatacttttctggttgtgagttttataagtgaaacaagaatcttagcaatgaatcttgaggatgagctggaagaaactgagattgagggattctgttctcaagtgcagactttattttgccatgatgcagttcataatcaacttgttcaagttacttcaagctctgtcagactggtcagctncacaactagagatcttcggaataatggcatgcacca

SEQ ID NO: 251597 - DNA, 410 bp, Glycine max
  unsure (1)..(410): unsure at all n locations
gcgatgtcaccaaatcgccggtgacaagtgcgtttgacgttgaatctgtggcagtgcccgagatcgggcacttgctcggattaggccactcgtcggacctaagagccatcatgtatccttctataccacctcgaactaggaaggtgaatctagcgcaagatgatatagacgggattcgaaagctctatggtatcaacccctaattattatagctaggtgttgtttgtactagaactagagttttatttcggtaatttgcattaaaggattttgaaagttatcgaggtgaaattattctaattcaagaacaacaaanatagcatgtaagatattgtatnntagttttctctaaattaagaataaaccagctgatactaagtgatgcatatatgattatgaataaatgtgac

SEQ ID NO: 251598 - DNA, 410 bp, Glycine max
ttggggttgattcaaaagacatagttacactcgagaagtagttgcgtgactacttcactaacatattaaagaaattgaaggatctcaaggcccagtcaaagcagacagatattatcttctgaaagatgttttgaaattaaaaacttgttaacggatgtagatatctagaaatctcattaagatgctcccacgatgtatattgttttcttttttatatatatatatatatatatatatatatatatatataatttattttcgggtatagttgatgtgcctaagaatgatgaggctgcaccaacacatttaaacatattatttatttacttgagtgggagaaaagtctccgatttgtgcatctgggacatatgagtattctatgatattttcaatttctaatgaatgttaag

SEQ ID NO: 251599 - DNA, 419 bp, Glycine max
gatcctaatgcaattgctcctttctcatttggctctctcggaggtacccagttgctcctaatggggtgggttgagagcaagagatgggtggacttcttcaacccagattctcagtcagtggagtgggccactccatggtcaaaaactgctgagaactttggcaactctactggtgaacaaggctaccctggaggaaaattctttgaccctttgggatttgctggagctatcaaggatggcgtttacattccggatgccgacaagctagagagactgaaattggctgagattaagcatgctaggattgctatgttggctatgctgattttctactttgaggctggccagggcaagacaccccttggtgctcttggcttgtaagcaaaataatgtacactagggagacaacttgaatcatt

SEQ ID NO: 251600 - DNA, 378 bp, Glycine max
tactaccttgcctgcacgcccagtctagatgatcccctcgctcaattccaatgccacatttttaagaaataaggatgcaaaaattgtcatatgtgaattggaattatttgctctcttattaggcctatcctgaagccaaaggaaatgagatcggaattcctcagggaattccaattccacattttcaagaaataaggaggcaaaaatgttcatatatgaattggaattatttgttttcttattaagcctatcctgaagccaaaggaaatgatatcggaattcctcggggaattccaattccacattttcaaagaaataatgaggcagaaatgttcatatatgaattgcaattatttgttttctttattaagcctatcc

SEQ ID NO: 251601 - DNA, 374 bp, Glycine max
  unsure (1)..(374): unsure at all n locations
gaagaaaatggcaaccatctctgctgctatcacaaccccagcnatgtcccgcgcaactcttgtgcaaaagcgggtctcatctcccgttcttggtttgccagcaatgggtaaggtgggaagagtgagttgctccatggaggaaaaaccttattctgtgaaggaaagcagctctagcatgttggggatgggggcatctctgatggcagctgccagcgctgcagccatgtcaggcccagccatggccttggtagatgagagactgagcactgaaggaaccggacttccctttggcctcagcaacaatcttcttggttggatccttttcggcgtctttggtcttatctggactctctattttgtctacactttccact

SEQ ID NO: 251602 - DNA, 420 bp, Glycine max
ggagctccactgagcttgaacagctctggagctggagcttcagttcccagttcagccttctttggcaccagcttgaagaaggttattgcctcaagggtccctaacgtcaagatttcttctggaagtttcaaaatcgttgccgcggaaaaagagattgatgagaaacaacagacagacaaggacagatggaaaggtcttgcctatgatgtttcagacgaccagcaagacatcacaagagggaagggtttggttgattccctcttccaagctccacaggatactggaactcactatgcaatcatgagctcttatgagtaccttagcactggacttaaacagtacaacttggataacaacatggacggtttttacattgctcctgcttttatggacaagcttgttgttcacatcagcaagaac

SEQ ID NO: 251603 - DNA, 413 bp, Glycine max
ctcaaagttcttaacccccgaagctctctcaattgcaatggaccatacatcggatcctaaattatcacatagttatattatctcactgcctctcttttacctatcttctatattcttctttcatgtctcaaaattcctaactggatttaagtgattattgctaatcatcatccttacattagacagatataaaggtctttcctatgatgttacatacttccatcattacatcacattactgaatatttttgtattattacctctttcatagcttcttactatggctggttcttactattcattcattgatcttttattagttcctttatctctttactttaacatttcaatttttatatcatcatttttcttttttactattgttacttcttttatttattttctattttttt

SEQ ID NO: 251604 - DNA, 418 bp, Glycine max
ggtcattgatgtttattcggagtttttcccggatatagctgttggttacgaggatccccgagtgcatgttcatatcagcgatggagttgcgtttatcaattctgttcctgagggcacttacgatgtcattatatcggatgcttttccagcaatggggcatagtgctgatgttcttgctgatgaatgcttcttagaatcagtagcaaaggctcttcgacccggaggagtgttctctgctccagcagacagcctgtggcataagaactttgtggttgcagacaccatagcaaattgcaagaagatattcaaaggctccgttaactatgcttggaccacggttcctacatatgcaagtggggtgattggattcatgctttgctctacggagggtccaccagtgaacttcaaacatccaata

SEQ ID NO: 251605 - DNA, 517 bp, Glycine max
  unsure (1)..(517): unsure at all n locations
naggaggtagtctgaaattgtgtgatgtggggaattattgtaaaacacctatgacgtcgcatgcacgcgtacgtaagctcggaattcggttcgaggtcatgggaactaatggttactgtgccccagaatatgcgatgactggacagctgactgtgaagtctgatgtatatagttttggggtagtcttcttggagctgattactggccgtaaagccattgacagcactcgaccccatggagaacaaaaccttgtcacatgggcacgtccactgttcaatgaccgcaggaagtttccaaagttagcagatccacagctgcagggacggtatcccatgcgaggtctttaccaagctctaggctgtgcatcaatgtgcattcaagaacangctgcagcacgtnctctcattggggattgtgtgacagcccttttcgttctagccaaccagcatatgaccatanggngggaggctgtgacgattaaaaggacagagtattgaaaaatggtgaaagtgaggag

SEQ ID NO: 251606 - DNA, 429 bp, Glycine max
tagaagtagagaagaaaatgaaagtcattgttttcttcggtgctagaataattttaggtgcagaatggcaatgcaatgggtcagagcatgagcatgagcatgagcatgagcatggccacagctaccaaattttccctctgcgaatgaaaaccggccccggtggccactacattccggaggtatcgtgcaaaagttggaggcttggtgtggaagcacacaacgtcattgactggagaaccattcctcaagattgcgagggatatataggaaactacatgcttggccaccaatatagatcagactccaaaacagtttgccgtgaagcttatttttatgctaaaaccatcaacatcactgccaaaaccacatgggtgtttgatgtagatgagactacgctctctaaatctccttactttgctgatcatggat

SEQ ID NO: 251607 - DNA, 524 bp, Glycine max
  unsure (1)..(524): unsure at all n locations
agggggagtaggggtttgtcgtcctgatgcatacgctcatagctggagacacaagcttgcatgcctgcaggtcgactctagaggatcccctcggggaattccaattccacattttcaagaaataaggaggcaaaaatgtggatatgtgaattggaattatttgttttcttattaggcctatcctgaagccaaaggaaatgagatcggaattcctcggggaattccaattccacattttcaagaaataaggaggcaaaaatgttcatatatgaattggaattatttgttttcttattaggcctatcctgaagccaaaggaaatgagatcggaattcctcggggaattccaattccacattttcaagaaataaggaggcaaaaatgttcatatatgaattggaattatttgttttcttattaggcctatcctgaagccaaaggaaatgagatcggaattcctcggnggtaccgagctcgaattccctatagtgagtcgtattaaattcgtaatcatgtcatagctg

SEQ ID NO: 251608 - DNA, 424 bp, Glycine max
atttttcttcctcagtagtgtcatttacgcttctcttctcggcaggaactatgcctaaccctaaggtcttcttcgacatgaccatcggcggtcaatctgctggccgcatcgtgatggagctctacgccgacgtcactccccgcaccgccgagaacttccgcgcgctttgcaccggcgagaagggcgtacggcggagcggcaagcccctccactacaagggctcgtccttccaccgcgtgatcccgagtttcatgtgtcatggtggcgacttcaccgccggaaacggaaccggcggcgagtcgatttatggcgccaagttcgccgacgagaacttcgtgaagaagcacaccggtcccggcatcctctccatggcgaacgccggtcccggaaccaacggatctcagttcttcatttgcacggagaa

SEQ ID NO: 251609 - DNA, 381 bp, Glycine max
cataaacttattttttctttctcttttgcacttgtttcgtaaaatggcggaccaagatattttcagttgcattagtgaacctcgtcttgtagccagaaagttcttggccagacctcagcatgagggtgttggagccgttgttagaagaagcatagggagatttgaactcaagtactttgatcctttccttgtcttggatgaattctcagtgactgctcctgctgggtttcctgatcatccacatagaggatttgagacggtcacatacatgttgcagggagctgtaacgcacgaagattttgaaggacataacggaacaattgaagcttgtgacttgcaatggatgactgcagggagagggttagttcactcagaaatgcc

SEQ ID NO: 251610 - DNA, 550 bp, Glycine max
  unsure (1)..(550): unsure at all n locations
taggtagtgagtgtgtcctgtgatggtgccatgcnccctcacttacaccatagaagagtctatgacgtcgcatgcacgcgtacgtaagctctggtaaatgccgcttcgccttcgcgcgcgaattgcaagctctgcattagtgaatcgtccaacgcgcggtgagaggcggtttgcgtattgggcgctcttccgcttcctcgctcactgactcgctgcgctcggtcgttttgcttgtgcttgctggtttcttttcactttttttcatttatacttttatgttttttttttttttttttctaatttttattattttttcttattttcttttatattttcatatttttttatatttgttttttttttttatttttttttttattagttgtttggtgggtggttccttttttatttttttttttttttattttttttatgtttctttttatctttttttctttacttttttcattttttcctttctctttattttgtttattctttattaaattttttgtctaatttatttttatactttattttttattccttt

SEQ ID NO: 251611 - DNA, 524 bp, Glycine max
  unsure (1)..(524): unsure at all n locations
agggtgagggaggggtgtcngatcctggcacctganagcatagctagagacgactgcttgcatgcctgcaggtcgactctagaggatcccctcggggaattccaattccacattttcaagaaataaggaggcaaaaatgtgcatatatgaattggaattatttgttttcttattaggcctatcctgaagccaaaggaaatgagatcggaattcctcggggaattccaattccacattttcaagaaataaggaggcaaaaatgttcatatatgaattggaattatttgttttcttattaggcctatcctgaagccaaaggaaatgagatcggaattcctcggggaattccaattccacattttcaagaaataaggaggcaaaaatgttcatatatgaattggaattatttgttttcttattaggcctatcctgaaaccaaaagaaatgagatcggaattcctcnggggtaccgagctcgaattccctatagtgagtcgtattaaattcgtaatcatgtcatagct

SEQ ID NO: 251612 - DNA, 429 bp, Glycine max
gcagatcaatctctctctctctctcaaccataatagtcatgggtttggaggaggattttgagcagtatgctgagaaagcaaaaactttgccaccgactcaatcaaacgaagacttgcttatcctttatggattgtacaaacaggccaccgttggacctgtcaacaccagccgtcctggaatgttcaacatgagggacagagctaaatgggatgcatggaaggctgttgaagggaaatccaaggacgaagcaatgggtgattacatcattaaagtgaaacagctgctggaagcagctggcttgcctgcttgataacattgtcatgccttgctttctgattctgtgctagaagttcacaacagtttggaaataaacaattgcagtgtttgaagcttttattatcataatcatatttatttctaatgattta

SEQ ID NO: 251613 - DNA, 407 bp, Glycine max
  unsure (1)..(407): unsure at all n locations
cttgagcagacttaacaacagcacaaagcgggttactgtctgttcaagctaccatctctctctctctttcttagtgcctccttgccagaagttaaaatggcccaagaaactttcctattcacatctgaatcagtgaacgaggggcaccctgacaagctctgtgaccagatctccgatgctgtgctcgatgcatgcttggagcaggaccctgacagcaaggttgcctgtgaaacctgcaccaagaccaacatggtgatggttttcggagagatcacaaccaaggccaacgtggactatgagaagattgtgcgtgacacatgcaggaacattggttntgtctctgatgatgttggtcttgatgcctgacaactgcaggtcctcgtcaacattgagcaacagagtcctga

SEQ ID NO: 251614 - DNA, 357 bp, Glycine max
  unsure (1)..(357): unsure at all n locations
cttctcaatctctctctctccaatggccaaagacctcgaaacggagattcaaagtgggttgcctcacaaggactaccacgacccaccccccgccccattctacgaccccgccgagctccgaaagtggtccttcttccgagccctcatcgccgagttcgtcgccaccctcctcttcctctacgtcaccatcctcaccgtcatcggctacaaccaccagacagccaccgccgncgagccctgcagcggcgtcggcgtcctcggcatcgcttgggcctttggaggcatgatttttgtcctcgtctattgcaccgnncgcatatcanggggacacataaaacccgcngtgacgttcgggtg

SEQ ID NO: 251615 - DNA, 394 bp, Glycine max
  unsure (1)..(394): unsure at all n locations
ttgatggctggcttgcgtggttcctctcaggctgtgttggaaggtagccttcaggtgagtggctccacacgcttgaatgtggggagtggaagcagggtggcctcagtcacacgtgcagggttcacagttagagcacaacaacaacaagtgagtggtgaggtacaaagcagccgtagggcagtgctttcacttgttgctgctggtttggccactggctcttttgttcaagctgtgcttgctgatgccaaatctatcaaagttggaccaccttccccaccttctggtggattgcctggaacgttgaactcagatgaagcaagagaccttcagctgccattgaaagataggttcttncttcaaccattgtctcctactgaggctgcacanagggcaa

SEQ ID NO: 251616 - DNA, 419 bp, Glycine max
  unsure (1)..(419): unsure at all n locations
ctcgagccgaaaggactcaccgatgcatcaaagatagccattttgaatgcaaactacatggcaaaacgattggagaattattacccggttcttttccgtggagtcaatggaacagttgctcatgaattcatcattgacttgagaggctttaagaatactgctggaattgagcctgaagatgttgcaaagcgcctcatggactacggttttcatgcaccaacaatgtcatggcctgtgcctggcacactcatgattgagcctactgagagtgaaagcaaggccgagttagacaggttctgtgatgctcttatttccattagacaagaaattgctgagattgagaaaggaaaggtngacattaacaancatgtacttaanggcgcccctcattcaccatcactgctcatggctgatgcatg

SEQ ID NO: 251617 - DNA, 414 bp, Glycine max
tgttgttttgggacaactatccagtggggacttcggttgatgttttgcttcaaaggcataatacacaggagaaatacttgaagaagaaatcagattatgtgcagcaaccaatttccaaaactggccttgaaggtatatggaacaagatgatggagctagaaaaacctgctcttgcattgaatccctatggtgggaaaatgggtgagatttctgaggtggaaacaccgtttccacatagagctggtaacatttataaaattcaatactctgtgacttggaaagaagaaggtgaagatgttgctaacagatatctagatcggattcggaagctctatgaatatatgacaccttatgtgtcaagttcaccctagagttcatatatcaactatagagacgttgatataggtgtcaatg

SEQ ID NO: 251618 - DNA, 413 bp, Glycine max
ggacatcacaagaggaaagggtttggttgactcccttttgcaagctccacaggatgctggaactcactatgctgtcatgagctcctacgagtaccttagcactggacttcgccagtacttggacaacaacatggatggattttacattgctccagcttttatggacaaacttgttgttcacattaccaagaacttcatgaccctgcccaacatcaaggttcctctcattcttggtatctggggaggcaagggacaaggaaaatctttccaatgtgagcttgtctttgccaagatgggaatcaaccccatcatgatgagtgctggagagttggaaagtggaaatgcatgagagccagcaaaactgatcaggcagagataccgtgaagccgcagacttgatcaagaagggaaaga

SEQ ID NO: 251619 - DNA, 307 bp, Glycine max
agctatgacgtcgcctgccctaactcctgaactcggtattagcgacctgtttaccagttgccacactacaccgagattcccgctaaagccgtttgcgttgttgcttgcgaagaaatggcgactcagaggagcgtgcgaacgttgaaggatggtgatttgaaagggaagagggtgttcgtgagggtcgatctgaacgtgcctttggatgacaaccttaacatcaccgatgacactagagtccgtgctgctgatcccaccatcaagtacttaactggtcatggagccaaactgatcctttctagccact

SEQ ID NO: 251620 - DNA, 409 bp, Glycine max
cagcaaccaattccatttccagtttctgattcgtcaaacggacaaaggaagtgaaagggtttagggtgtgacctgagatcaacatgttgcggaggcttctctcttctcacctcaaaaccctagccgccaccgcttcttcttccactccccgatctgcttccgccgccgccagattcgccgctctctctcgctcctcccgctacttctcaacccagtccgaggatgctactgccatcaaaaagaaggttgaggatgtaatgccaatcgctactggtcacgagcgcgaggagcttcaggctgagctcgagggaaggaatattcttgaaatagaccatcccgaaggtccattcggcacgaaggaagcacctgctgttgtcaaatcttactatgataaaaggatagtcggatg

SEQ ID NO: 251621 - DNA, 409 bp, Glycine max
gctttgtttacaagtcctcctttctcacagctaggtggtggtgattagtgtacatatatatatggttgaagtgggtatttatcagatccctacgagcactttcgacccatttgcggaggcaaaagaaacagatgctcccggggcaaaagagtatgtgcatatccgcatacaacagaggaatgggaagaagagtctgaccacagtgcaagggctgaagaaagagttcagctacgagaagatcctcaaagacctcaagaaagagttctgctgcaatggcaatgttgtgcatgacaaggagcttggcaagattatccaactccagggtgatcagcgcaagaacgtttctcacttcctcattcatgctcgccttgttaggaaggaccagatcaagattcatggtttttaaccc

SEQ ID NO: 251622 - DNA, 406 bp, Glycine max
cacaaagagaagcattagcactaggagcagcaacaactagtctcagctgaaatggcctcttcagtgatggcatctgtggccctcaaacctgcccctttcactgttgagaagtcctcagtgagaggccttccctctctctcaaggaactcttcttcattcagagttgtggccagtggcaagaagatcaagactgacaaaccttatggaattaatggtggcatggctttgagggatggaactgatgcatctggcaggaaaggaaagggaaagggtgtttaccagtttgtagacaaatacggtgctaatgtcgatggttacagtcctatctacgacaccaaggactggtctccaaccggtgatgtctacgctggcggtacgactggcttggctatctgggctgtgactc

SEQ ID NO: 251623 - DNA, 393 bp, Glycine max
cacaaagagaagcattagcactaggagcagcaagaactggtctcagctgaaatggcctcttcagtgatggcatctgtggccctcaaacctgcccctttcactgttgagaagtcctcagtgagaggccttccctctctctcaaggaactcttcttcattcatagttgtggccagtggcaagaagatcaagactgacaaaccttatggaattaatggtggcatggctttgagggatggaactgatgcatctggcaggaaaggaaagggaaagggtgtatactcagttgtagacaaatactgtgctaatgtcgatggttacagtcctatctactacaccatagactggtctccaaccggtgatgtctactctggctgtacgactggcttggctatc

SEQ ID NO: 251624 - DNA, 404 bp, Glycine max
aatggctgccaacacattgatgagttctgccatctcagccgtcccatctctcctttcctcctcaaaatccagatttgccgcagcagttcctctttccagctttgttgtcaccaatgcctcttcttctcgcttttccatgagtgctgactggatgcctggccagcctagacccccctaccttgatggttcagcacctggtgactttggattcgaccctcttcgtcttggtgaagtaccagagaatcttgagaggttcaaagagtcagaactcattcactgcagatgggccatgcttgctgttccagggattttggttccagaggcattgggcttaggcaactgggtaaaggctcaggaatgggctgcagttcctggtggccaagcaacctacctaggcaacccag

SEQ ID NO: 251625 - DNA, 327 bp, Glycine max
tgcaattgaagttaaaagccttagccttccctacaacggcaaacacaaagacatcatcatccatggctgcctccgtctccactgtcggagctgtcaacagagctcttttgaacctgaatggttctggagctggagcttcagctcccagttcagccttctttgggaccagcttgaagaaggttattgcctcaagggtccccaacagcaaggtttccggtggaagcttcaagattgttgctgtagaagagaagaaagagattgaagagacccagcagaccgacaaggacagatggaagggtcttgcctatgatatctcagacgaccaac

SEQ ID NO: 251626 - DNA, 386 bp, Glycine max
  unsure (1)..(386): unsure at all n locations
ggtttaaagagaggttgaagaattggcagaggcttccttacgccaagccttacgagaggaaagaggttgttcgggtgaggacgtgtggaggaatcgaacggtacgagaagagggctgtggctgttcttcatgagctgttgagtttgactgtggagaagatggtcgaggttgatcagctggctcattttcggagggactttggtgtcgaagttaatgtgcgtgaattgctgctgaggcaccctggtatattttacttatctactaaagggaagactctaactgtttttcttagggaagcttataggaaaggggggttggttgagccaaatcccgtgtatgagacgcgtangaatatgttggatcttgtgttgttagggtgtaggaaa

SEQ ID NO: 251627 - DNA, 396 bp, Glycine max
  unsure (1)..(396): unsure at all n locations
gaacatttaagtccaattctctcaaacactacaatcaaacaatggcgaaggtttaccctcagatcatacccacatctncagatcagactcagtgtctcacctccaaaagagaaacatacactctatggttgaaatcacttgtcttccactccaatggatgcactgtctatgactctaatggtgacatcgtttaccgagttgacaactatgacagaaagggtagaagagaagttaatctcatggatctacgaggcaaagttctctgcaccataaagaagaggttactagctcttggatgctgggaaggccacaggtgcatgagttccgattttggtacacaggaacaaccatggtttcaagttaaaagatgtaatcaaatgatcaaagggaaagtag

SEQ ID NO: 251628 - DNA, 404 bp, Glycine max
  unsure (1)..(404): unsure at all n locations
ggaaactcacctccgttcacctcttctccggcaaggccatgaatggatttagacacttgcgtcaggaagaggtagctagattgacatgcaacttggcaagttcagacacaaaagcagtgaatttgggacaattattgaatgtatgcaccaccaacgcattagcgagggcaatgattggacgaagagtgtttaacgatggcaatggagggtgtgatcctagggctgatgagtttaaggctatggtgatggaggtgatggtgttggctggagttttcaacattggtgactttattccttccttggagtggctagaccttcaaggggtgcaagctaagatgaaaaaattacacanaagatttgatgcatttttaaccagcattattgaagagcacaataacagttct

SEQ ID NO: 251629 - DNA, 413 bp, Glycine max
  unsure (1)..(413): unsure at all n locations
agcgaatatcccaatcccacaccaatggcatgctcagccagctctgcttccctcttctccgcaaacccaacacccctcttctctcccaaaccctctctctccctccaccttaaccctctccccacgcgcccttctccctccctcacgcgcccttctctctccctcacgcgcccttctcactctcgccgctccttcgttgtcaaagcctcctccagcgagcttccgctggttggtaacaccgcaccggatttcgaagcagaggctgtgtttgaccaggagtntatcaacgtgaaactatctgattacattgggaagaaatatgttgtgctcttcttctacccgttggacttcacctttgtctgccccacagaaatcactgctttcagtgaccgacatgcatagttcgaggcact

SEQ ID NO: 251630 - DNA, 278 bp, Glycine max
cttttgagttattagaccattctctatatagtgatcctcgaacttaaagtttttttgttgatcattttgtcttgaagaaatggcatctagctcaatgtcatccactggttcatggagtgccaaggacaacaaggcctttgaaagggctctagctgtgtatgacaaggacacgccggaccgttggtacaatgttgctaaggctgttggtggtgggaagactccagaggaagtcaagaggcactatgaactccttcttagggatgttagtcacattgaat

SEQ ID NO: 251631 - DNA, 513 bp, Glycine max
  unsure (1)..(513): unsure at all n locations
agttagtctgagtgggtatgccgactgatcccagcncactccgtactactggagagacaagcttgcatgcctgcaggtcgactctagaggatcccctcggggaattccaattccacattttcaagaaataaggaggcaagaaatgtgcatatatgaattggaattatttgttttcttattaggcctatcctgaagccaaaggaaatgagatcggaattcctcggggaattccaattccacattttcaagaaataaggaggcaaaaatgttcatatatgaattggaattatttgttttcttattaggcctatcctgaagccaaaggaaatgagatcggaattcctcggggaattccaattccacattttcaagaaataaggaggcaaaaatgttcatatatgaattggaattatntgttttcttattaggcctatcctgaagccaaaagaaatgagatcggaattcctcgggggtaccgagctcgaattccctatagtgagtcgtattaaattc

SEQ ID NO: 251632 - DNA, 365 bp, Glycine max
ttgaggacggccgtacccttgctgactacaacattcagaaggagagtactcttcacctcgtcctccgtctccgtggtggcatgcagatcttcgttaagacactcaccggcaagaccataaccctagaggttgaaagctccgacaccatcgataacgtcaaggccaagatccaggacaaggagggtatccccccggaccagcaacgtctcatcttcgccggaaagcagctcgaggacggccgcaccctcgccgactacaacatccagaaggaatcaacccttcacctcgtcctccgtctccgtggtggcatgcagatcttcgttaagaccctcaccggcaagactattaccctagaagtcgaaagc

SEQ ID NO: 251633 - DNA, 376 bp, Glycine max
gtcgttcgagatggcccgtacgaagcaaactgctcgtaagtccacaggaggaaaggctcctaggaagcagcttgcaaccaaggctgcacgtaagtctgcaccaactactggtggtgtgaagaagccacatcgttaccgtcctggtaccgttgctcttcgtgagattaggaaataccagaagagtaccgagcttttgatcaggaagctccccttccagaggctggttcgtgaaattgctcaggacttcaagactgatctgcgtttccagagccacgccgtgcttgcattgcaagaagctgctgaggcataccttgttgggctctttgaggacactaacctgtgtgccattcacgctaagcgggtaaccattatgccc

SEQ ID NO: 251634 - DNA, 322 bp, Glycine max
aaacaaaagccatagattgttacttctcttcgccttttgctttgcaattgtcaccaaacaattcttgcttagctctcacaagcaagcattatcaacaatgaagaaaattgtgttaaaggtggacttacatgatgacaggatcaagcgaaaagctatgaagacagcatctggcctttcgggggttcaatcagtttctgttgacattaatgacaagaaaatgaccttattgggggatgttgatccagtgagtgcagtgtcaaagctacgaaagtggtgtcacactgaaatagtctcagttggacccgcaaaagaggaaaaagag

SEQ ID NO: 251635 - DNA, 409 bp, Glycine max
ctcgagccgctcgagccggtgaaatcactgtcaagctcagtgtgttggtactgttggggagatatcaacatggccaagtgccagtaatgtcattccaggccaggttacatataccgtggatatacgagcgatagatgaccttggacgtgaagctgttatctatgatttatcgaaacaaatttaccaaatatgtgacaagcgttcagtttcctgcattattgagcacaagcatgatgcaggtgctgtgatttgtgattcggatctaagttcacagctcaagtcagcagcttattctgcactcaagaagatggagggtgacattcaggatgaagtgccaacattaatgagcggagcaaggcatgatgcaatggcaatatctcacttaacaaaggtgggaatgctgtttgtg

SEQ ID NO: 251636 - DNA, 510 bp, Glycine max
  unsure (1)..(510): unsure at all n locations
naggaaggggagtgtgtctcgagcctagccctacgncagtgcgaagacacaagcttgcatgcctgcaggtcgactctagaggatcccctcggggaattccaattccacattttcaagaaataaggaggcaaaaatgtgcatatatgaattggaattatttgttttcttattaggcctatcctgaagccaaaggaaatgagatcggaattcctcggggaattccaattccacattttcaagaaataaggaggcaaaaatgttcatatatgaattggaattatttgttttcttattaggcctatcctgaagccaaaggaaatgagatcggaattcctcggggaattccaattccacattttcaagaaataaggaggcaaaaatgttcatatatgaattggaattatttgttttcttattaagcctatcctgaagccaaaggaaatgagatcggaattcctcgggggtaccgagctcgaattccctatagtgagtcgtattaaattcgtaatc

SEQ ID NO: 251637 - DNA, 410 bp, Glycine max
gaagcattagcaaaagcaagaagaactagtctaagcagaagtggcctcttcagtgatggcatctgtggccctcaaacctgcccctttcactgttgagaagtcctcagttagaggccttccctccctctcaaggaactcctcttcattcagagttgtggccagtggtggcaagaagatcaagactgacaagccttatggaattaatggtggcatggctttgagggaaggagttgatgcatctggcaggaaaggaaagggaaagggcgtttaccagtttgtagacaaatacggtgctaatgtcgatggttacagtcctatctacgacaccaaggactggtctccaaccggtgatgtctacgctggcggtacgactggcttggctatctgggctgtgactctacttggtcttc

SEQ ID NO: 251638 - DNA, 404 bp, Glycine max
ctggaattcagtttataaacataatccgaatcagcaggcgattacagtactttgagcagtatcaacaaagggtgagtgcactaattggaccagagcagactcaacgactggtcaaccaagcactagtactcataaccttaggtggcaatgattttgtcaacaactattacttggtgccattctctgcaagatcacgccaatttgcacttccaaactatgttgtataccttatttccgagtatcgcaaaattcttgtgaggctttatgagttgggagcaaggcgagttttggtgactggaacgggacctttaggttgcgtgcctgcagaactggcgcagcgtagcagaaatggggagtgtgcagcagagctgcaagaagcttctgctttgttcaatccacaactc

SEQ ID NO: 251639 - DNA, 404 bp, Glycine max
aacaaaaatattattaagatgatcaacattattggagcacttgttctactctttgcatttctcttcctcagttgtgtgtatgcacaagacacaacaacccttgtgcctgcaatcataacttttggtgattctgctgtggatgtagggaacaatgactatcttcccacccttttcaaggctgattaccctccttatgggagggactttgttaaccaccaacctactgggaggttttgcaatggcaaattagctactgatttcactgctgacacattgggtttcaagacctatgctccagcatatcttagcccacatgcatcagggaaaaacctccttattggagcaaactttgcttcagctgcatctggttatgatgaaaatgctgctactttgaatcacgcgat

SEQ ID NO: 251640 - DNA, 406 bp, Glycine max
  unsure (1)..(406): unsure at all n locations
caaattgctaactatggaggattggagactatgtctatggtaattgctggtcatttcccttctttcagttcatcgtcatcctttgctcaaataaaggaaaatggtgcaggaacgacaaaagatcatcaatccgataggcatctgactgatcatgagttagatttccttgttgctattctgggcctgcttgtaaacctggtcgagaaggatggtcataacagatcacgacttgcagcagccagtgttctgctaccttcctcagtaagcttgcaccaggaggttcggaaggatgttattcaattattatgctccattttcttggctaacctgngtgaaagtgaaggagctggggaagataaacatttgcaactgaatgatgaggcagctgttctacaaggtgaaaaag

SEQ ID NO: 251641 - DNA, 367 bp, Glycine max
tagcatgcctgcacgcctactttagctgatcctttcgctcaagatcaattccacattttcaagatataaagctgggacaatgttcatatatgaatcaggaattatttgtcttattattagtgcattatcctgtagcctaacgcacatagatccatatccctcgaactatcctaattccacaacacctacacatattcatgcattactgttcacatattgctatgcattaatctgcttttaacatcaggccaatcttgaactcatagcatatcactacttcttcaactcagacttctgcttcctcattgactaagcttccactagcatgtttggtaatatactatatatttcttatcctccatttact

SEQ ID NO: 251642 - DNA, 400 bp, Glycine max
aaaaaacgtcgtagtcgcaaaccctaatcagaagaagcgcagcgtcaagcgagtgacagccaccagccatgggtcgtatgcacagccgcggtaagggtatatcctcttctgctttgccctacaaaaggacacctcctagctggctcaagatctcttcgcaagatgtcgaagaaaatatctgcaagtttgcgaagaaaggtttgaccccgtctcagattggtgtcattctcagagattctcacggtattgctcaggtcaatagcgtcactggcagcaaaatccttcgcatcctcaaagctcacggacttgcgcctgaaattccagaggacctgtaccatttgattaagaaggcagtttcaattaggaagcatcttgagaggaacaggaaggacaaggactc

SEQ ID NO: 251643 - DNA, 412 bp, Glycine max
  unsure (1)..(412): unsure at all n locations
ggccacccacgcggttctagcttctacaaggatccccactaacaccaagttcccatccaaggcttcacactctttcccaacccaatgcgcctcaaagagacttgaggtgacagaattctctgggctaagatccacttcatgtgtgacatatgctaacgatgctagagaatcttccttttttgatcttgtagcttcccaactcactcccaagaccaatggatcatcaactcctgtgaggggagagacagtggccaagttgaaggtggcaatcaatggtttcggacgcattggtagaaacttccttcgctgctggcacggccgaaaagactcaccccttgaggtcgttgttgtcaacgacagtngtggtgtcaagaatgcttcgcacctgcttaaatatgattccatgctggga

SEQ ID NO: 251644 - DNA, 512 bp, Glycine max
aggtaaggggagtggtgtgaactatgccatagaaagctattcgtcaagacacaagcttgcatgcctgcaggtcgactctagaggatcccctcggggaattccaattccacattttcaagaaataaggaggcaaaaatgtgcatatgatgaattggaattatttgttttcttattaggcctatcctgaagccaaaggaaatgagatcggaattcctcggggaattccaattccacattttcaagaaataaggaggcaaaaatgttcatatatgaattggaattatttgttttcttattaggcctatcctgaagccaaaggaaatgagatcggaattcctcgggggtaccgagctcgaattccctatagtgagtcgtattaaattcgtaatcatgtcatagctgtttcctgtgtgaaattgttatccgctcacaattccacacaacatacgagccggaagcataaagtgtaaagccttgggtgcctaatgagtgagctaactcacattaattgg

SEQ ID NO: 251645 - DNA, 515 bp, Glycine max
aggtggttaagaggtttgatcatcgagattacgaaatgattgctactactcggagagacaagcttgcatgcctgcaggtcgactctagaggatcccctcggggaattccaattccacattttcaagaaataaggaggcaaaaatgtgcatatatgaattggaattatttgttttcttattaggcctatcctgaagccaaaggaaatgagatcggaattcctcggggaattccaattccacattttcaagaaataaggaggcaaaaatgttcatatatgaattggaattatttgttttcttattaggcctatcctgaagccaaaggaaatgagatcggaattcctcggggaattccaattccacattttcaagaaataaggaggcaaaaatgttcatatatgaattggaattatttgttttcttattaggcctatcctgaagccaaaggaaatgagatcggaattcctcgggggtaccgagctcgaattccctatagtgagtcgtattaaattcgg

SEQ ID NO: 251646 - DNA, 399 bp, Glycine max
gaaaacgcagttctcaccatttccctctcgattgtgagacttgttgttgttaactgaacttttctgagcaagaatgtctgggcgtggaaagggaggcaagggtttgggaaagggaggagcgaaacgacaccgtaaggtgctgcgcgataacattcagggaatcaccaagcccgcgattcggcgtttggctcgtaggggtggcgtgaagcgtatcagtggtctcatctacgaagagacacgtggcgtgctcaagatctttttggagaacgtgattcgtgacgccgttacctacactgagcatgctaggagaaagaccgttacggcaatggacgtggtttatgctctcaagagacagggaaggaccctctacggatttgggggctaggtttttttatttta

SEQ ID NO: 251647 - DNA, 377 bp, Glycine max
ctcttcttgtatgatggagaagatccagcacagtgaggtggaagtgaagggactgaagcttcacgtggcagagattggaagtggctccaaaattgtggtattcttgcatggattcccagagatctggtacacatggaggcaccaaatgatttctgtggcaaacgctggttatagggctattgcctttgatttcagaggctatggactttctcagcaaccagcagagcctgaaaaggaaaccatgtttgatctggttcatgaaattgtaggccttttggatgctttgaacatctccaaggccttccttgttggaaaggattttggtgccattccaggacatcttactactgcagtgcacccagaaagagtaactggta

SEQ ID NO: 251648 - DNA, 417 bp, Glycine max
  unsure (1)..(417): unsure at all n locations
ctgtttcgtgttgtagctagctcctcgaaaatgctggcacgcctcgccgcgagtcgcttcaacgagatccgtcagattttccgtcagccttctagggctttctcaaccgctctgaactaccaccttgacacaccggacaacaaccctaaacttccatgggaattcaccgaggccaatcaagcaaaggttaaggagattttgtctcactatccatccaactataagcaatctgctacaattcctcttttagatcttgcccagcagcagcatggaggttggctacctgtttctgcaatggatgcggtagctaagattgtagaggttcctcccatacgggtgtatgaggttgccacattntactccatgttcaatcgagctaagggtgggaagtaccatctgntggtttgtggaacaaca

SEQ ID NO: 251649 - DNA, 403 bp, Glycine max
gacacccacctaaaccatggcttcccacttcctcaaatcgctcctgctcctctgcacctatgccctcaccatctcagcagaatacacaggcttcgtgggaacactagacccaaagtccataggcatacaccacaagaaaaccctaagccacttcaggttctactggcacgaagtcttcagcggagaaaaccccacatcggttagaatcattccctcactccccaaatacaacgcaaccacaaccttcggctccgttggaatctttgacacccctttaaccgtgggacctgaggtgtactccaaggttgttggaaaaacctatggcttgtttgccttcacgttatcaacccaatttgacctgttacttgattacaacttcgcgtttaccccaaggaagtacaac

SEQ ID NO: 251650 - DNA, 510 bp, Glycine max
  unsure (1)..(510): unsure at all n locations
tgttagtatagtggtgtgatcacgtagtaagaagctctactgaagagccaagcttgcatgcctgcaggtcgactctagaggatcccctcggggaattccaattccacattttcaagaaataaggaggcaaaaatgttcatatgtgaattggaattatttgttttcttattaggcctatcctgaagccaaaggaaatgagatcggaattcctcggggaattccaattccacattttcaagaaataaggaggcaaaaatgttcatatatgaattggaattatttgttttcttattaggcctatcctgaagccaaaggaaatgagatcggaattcctcggggaattccaattccacattttcaagaaataaggaggcaaaaatgttcatatatgaattggaattatttgttttcttattaagcctatcctgaagccaaaggaaatgagatcggaattcctcgggggtaccgagctcgaattccctatagtgagtcgtattaaattcgtaatcn

SEQ ID NO: 251651 - DNA, 406 bp, Glycine max
  unsure (1)..(406): unsure at all n locations
cgaaaattagggtttgtagtgtagcaggaagaagcagcaatggcgccgaagataacacgtaaggttagcagaaaccctgaattgataaggggaatcggaaagtactcgaggtcgcagatgtaccacaagaggggcatttgggctatcaaggccaaaaacggtggcgttttacctcgccacgaccctaaacccaagcctgaagctcctgctgaaaaaccacccaaattttaccctgctgatgatatcaagaagccccttgtcaacaagcacaaaccgaaaccagctaagctcagggctagcattactcccgggacagtgttgattcttcttgccggtagatttaagggaaagagggtagtctntttgaagcagcttccttctgggttgcttcttgtgactggtcctt

SEQ ID NO: 251652 - DNA, 281 bp, Glycine max
gtgagagctgaggacatcacagcaatccaaacagaatgaggtgtcagaatcaagacagcagtagggagaggagggtatgtgaaggacatatatgtgaagagaatgaccttgcatactatgaaatgggcatttaagatgactggtgattataactcacatgctgatggccactatgaccctaatgccttgcctgagatcaaaaacatcaactatagagatgttgtggctgaaaatgtgaccatagctgctaggtttcaaggaatctccaatgatccctttac

SEQ ID NO: 251653 - DNA, 412 bp, Glycine max
ctccaatatgctatgcgcacttggctgctactcagttggggcagttcatgaaatttgaggacaaatctgaaacatcttcaagccatggtggattgagcggtgcaggtgctgttcccgtccctcagttgcctcccttgcaggagaatgtccgcaacacaatgttcttttgttgaggccttaatgctctgccctgtctcctcaagtggtgaaaatgctgtacataaaactatgtttctaatcttgcaagttatgcggacgaagtttatattgtggtagacttggtcttcttagccatatttagtctttctagcacaagccttttcaaatgttcggggaccttaccttactttttgtagcaagactctctttagcgcaacgtctttttgtagcaaggcttgatcttcagcacgtc

SEQ ID NO: 251654 - DNA, 391 bp, Glycine max
gagaaagggagaaagggtgtgagaatggagagcaaagaggaagatgtaagggttggagcaactaagttctcagaaaggcaaccaattggtacagcagctcagggtgacaaggactacaaagaaccacccccagcacctttgtttgagcctggtgagctaaagtcatggtccttctacagagctggaattgctgagtttgtggccactttcttgttcctctacattaccatcttaactgtcatgggtgtcaacaggtcaccctccaagtgtgcctctgttggcattcaaggcattgcttgggcctttggtggcatgatctttgcccttgtctactgcactgctggaatttcagggggacacatcaacccagctgtgacctttggtctctttt

SEQ ID NO: 251655 - DNA, 516 bp, Glycine max
  unsure (1)..(516): unsure at all n locations
agtntagtntagtggggtgtgatgattgagtgatggaggagtaatctctagaacagctatgacgtcgcatgcacccttacgtaacctcggatttcggttcgggcgcggaataacgctctctggatctgatgttcgagtcgggaatctcattggaaaccgaggacgcgctcacgaggttctcaaactgtatcgccctcttgaaggaacgggcaaagccactcttgaggttccgcctcaaagtgtagctggttatgccacagttgctactacagaggatggcgccgaaaggaaggaacgaaacagtggattgagtaaggcaacgaagacaaagagagagcagctcctaaaagctactgcagttgcctctcttcttctaatatacccgaacacttattcattgctcttcgcaaatttctttgtgttctggcacttatatgcagggatcggagagattttggcagactatgttcaccatgaaatgaccagagaatttgtcatgatttctctcaggtngtt

SEQ ID NO: 251656 - DNA, 406 bp, Glycine max
  unsure (1)..(406): unsure at all n locations
gctcgactacttgggcaacccaagcctgatccacgcccagagcatcctcgccatctgggccacacaagttatcctaatgggtgccgttgaaggttaccgtattgctggtggccccctcggtgaggtcactgacccaatctacccaggtggcagcttcgacccattgggccttgctgatgacccagaggcttttgctgagcttaaggtgaaggaactcaagaacggacgattggccatgttctctatgtttggcttctttgttcaggccattgtcaccggaaagggtccattggagaacctcgccgatcaccttgctgaccctgtcaacaacaacgcctgggcctatgccaccaacttcgtccncggaaagtgagcgtcaaagaacgaaatgactnttgagagtttt

SEQ ID NO: 251657 - DNA, 510 bp, Glycine max
  unsure (1)..(510): unsure at all n locations
agtaagggagtgttctnccgactgagttaagacactacgtactactggagagacaagcttgcatgcctgcaggtcgactctagaggatcccctcggggaattccaattccacattttcaagaaataaggaggcaaaaatgggcatatatgaattggaattatttgttttcttattaggcctatcctgaagccaaaggaaatgagatcggaattcctcggggaattccaattccacattttcaagaaataaggaggcaaaaatgttcatatatgaattggaattatttgttttcttattaggcctatcctgaagccaaaggaaatgagatcggaattcctcggggaattccaattccacattttcaagaaataaggaggcaaaaatgttcatatatgaattggaattatttgttttcttaatatgcctatcctgaagccaaaggaaatgagatcggaattcctcgggggtaccgagctcgaattccctatagtgagtcgtattaaattcgt

SEQ ID NO: 251658 - DNA, 408 bp, Glycine max
  unsure (1)..(408): unsure at all n locations
atttggggaacccaaaccttgtccatgcacaaagcatcctggcagtgctgggcttccaagttatcctaatgggccttgttgaagggtaccgcatcaatgggcttgatggggtgggagagggcaatgacctctaccctgggggccagtactttgacccactgggccttgctgatgacccagtcacttttgctgagctcaaagtcaaggagatcaagaatggaaggctggccatgttctctatgtttggattctttgttcaagctattgtcactggaaaaggcccattggagaacctcttggaccaccttgacaaccctgtggctaacaatgctngggtctatgccactaagtttgccccaggatcttaaatgtatatgacttcttcttccctaatccctatgatcatat

SEQ ID NO: 251659 - DNA, 364 bp, Glycine max
gaacaagtagttgagaactaagaaggagaagcaaatgggttcctcaatgatctcttccccagctgttaccactgtcaaccgtgccggtgccggcatggttgctccattcactggcctcaagtccatggctggcttccccaccagaaagaccaacaatgacattacctccattgctagcaacggtggaagagtgcaatgcatgcaggtgtggccaccagttggcaagaagaagtttgagactctttcctacctgccagaccttgatgatgcacaattggcaaaagaagtagaataccttcttaggaagggatggattcctttgcttggaattcgagttggagcacggtttcgtgtaccgtgagca

SEQ ID NO: 251660 - DNA, 315 bp, Glycine max
ctcgagcgattcggctcgagaatcagtctctaatattggtctcactgtcttgtctctccagagaactgtatagagagagatggcagctgcaacatctggtgctgcgttaaatgggttgggatcttccttcttgagtggaggaaacaggagccaaacccttatggccactgctattggaggcaaagttggtgctgctgctggtactgctagtcctagaagactcattgtggatgctactgctgcaccaaagaagtcatggctccctggtgtcagatgtggtcgcaacctagtcgacccagaatggctggatggatc

SEQ ID NO: 251661 - DNA, 415 bp, Glycine max
aaatcaaagccatggccacctccaacttctctattgttctctccgtctccctagccttctttttggtgctacttaccaaggcacactcgaccgataccgtttctttcaccttcaacaagttcaacccagtccaaccaaacattatgctccaaaaagatgctagtatttcatcctctggggtgttacaactcaccaaagttggcagcaacggcgtgcccacctcgggatctctcggtcgtgccctttacgctgccccaatccagatttgggacagcgaaaccggcaaggtagccagctgggctacatcctttaaattcaacattttcgcacccaacaaatcaaactcagctgacgggcttgccttcttcttggcacccgtcgggtctcagccccaatccgacgatggatttcttgg

SEQ ID NO: 251662 - DNA, 516 bp, Glycine max
  unsure (1)..(516): unsure at all n locations
aggtnaatgggagtgtgtctgaaaattagtatatgatagctaatctctagaacagctatgacgtcgcatgcacgcgtacgtaagctcggaattcgcaatcccccaacccaaacattctcgtgggggccattgttggtggaccagatcggcatgataggttcccagatcaacggtcagattatgagcaatcggagccagctacatacattaactcaccccttgtaggagcactggcctatcttgcacactcatttggtcaactctaggaaccccaattatttcgtgtatcccatgttttatttcactagtctcgctagttacttgtgtctcctagaattattatgcacacactcatttgagaccagtaccacaccactaaaccttataaacttatcacaagctgcttaacttaatactattatgtgtaactcttatgatttcggaaagtggtatatatgtatgtcacgtgatggtgtgtgttcaacttctcanaaaanaannnnnnnnnnaaaaaaa

SEQ ID NO: 251663 - DNA, 416 bp, Glycine max
ccttccttaacttgggatttcggttgaggcttaacctaatttttccttcctcttttgcactggtttaataaaaggccggaccaagatattttcagttgcattagtgaacctcgtcttgtagccagaaagttcttggccagacctcagcatgagggtgttggagccgttgttagaagaagcatagggagatttgaactcaagtactttgatcctttccttgtcttggatgaattctcagtgactgctcctgctgggtttcctgatcatccacatagaggatttgagacggtcacatacatgttgcagggagctgtaacgcacgaagattttgaaggacataagggaacaattgaagctggtgacttgcaatggatgactgcagggagagggttagttcactcagaaatgcctgcagc

SEQ ID NO: 251664 - DNA, 204 bp, Glycine max
aagactttgtaattgaggtgctgcaatggcttcaagtcaggaagaggtgactcttttgggagtaattggaagcccatttgcttgcagggtgaagattgcccttaagttgaagggagttgaatacaaatatgtggaagaaaatttggccaacaagagtgatttgcttctcaaatccaacccagttcacaagttagttccagtttt

SEQ ID NO: 251665 - DNA, 388 bp, Glycine max
ctcttccatccctgtgatcttttcgcctctctgttcaggggtcaaatataacaaaacattaagtgaaaatgacgcagaatgcaatagtgtccaagacaaaatccgggatcaagggggacatagccgtggcacagaagccactggcggcgccggggtacattcccattccgaggaggagggttttgaagaacctcgaaatcaatggaggacaaagaattaatgcatgggtcgattccatgagagcctcttctccaaccaattccaaatccacctcttctgtcgcagaagaacacagctcttggattcttggccacccttcagcattagacatgtttgagcaaattatggatgcatccagaggaaagcaaattgtcatgttccttgacta

SEQ ID NO: 251666 - DNA, 363 bp, Glycine max
gtagaaagagtaagaaggatttggaattgagaatttccgtggcggcggcgacgaacttgttagcaacactgggggatctggagagggactccttcgtggctcttctttcgaagctgatcgctgaatcgaagtacgtccagaacaacccgccggagctcattccccaagaggacagagtggtgaagcacgtcttggacgttctgttaccgttcagcaccaccaccggcggtggacccttgctcgtaaaccacgtcacctaccacgccggcagagggaacctcatcgtggagtaccccggcaccgttcccggcaaaatcctctcgttcgtcggatgccacatggacgttgtgaccggcaatccca

SEQ ID NO: 251667 - DNA, 401 bp, Glycine max
  unsure (1)..(401): unsure at all n locations
ctccaatctccatttggcttctcaagaaaagcctcctgtcttgttaaggcagctgctactccccctgtcaagcaaggatcagacagacctttgtggtttgcatcaaagcaaagtctttcctacttggatggcagccttccgggtgactatggatttgaccctctgggactttcggaccctgaaggaacaggagggttcattgagccgaaatggctagcatatggtgagataatcaatggtcgttatgcaatgttgggtgcagttggtgcaatagcacctgaaattctaggcaaggctggtctgatccctcaggagacagcactcccatggttcagaaccggtgtgttcccacctgcangaacctacaactacttggcagactcctacacactngttcgtgt

SEQ ID NO: 251668 - DNA, 384 bp, Glycine max
  unsure (1)..(384): unsure at all n locations
tgcagatcatgcacatgcagttaaagttctcaacagattgggtttggaagattgttttgagggcatcatatgctttgaaacgcttaatcctcccaaacaaatcaattgcatggatgtaccaaatgataatcatgtgctcacagatttaacagaaaatggatgtttcaattcccacccacaaatcctctgtaaaccatctgtggaagcctttgaagctgctattcggattgctaatgtggatccaaagaaaacaattttctttgatgacagtgttagaaatgttgaaagtgcaaaaataactggacttaacactgttttagtgggccattcagatttggtccctggagctgatcatgcnctgaacagcattcataatatcaaaga

SEQ ID NO: 251669 - DNA, 352 bp, Glycine max
accagctatagcttcaacgaatgcaattatatcggctgcatgtgcactagaaacattaaagattgcaacagagtgcagcaaaattttgtcgaactatttaacgtataatggatcagaaggcctccatactgaagtggcaagatttgaaagggacaaggactgtcttgtgtgtggtcctggtatacgtattgaattggatacttcaatcacattgcaaaagttcatggatcttctggaagaacatcctaagttgcgattatcaaaagctagtattacgcatcaaggaaagaatctgtacatgcaagctccccctgtattggaagaaatgactcgatcaaacctgagtctctct

SEQ ID NO: 251670 - DNA, 391 bp, Glycine max
gccatatccaacattccacctagctccccaatcacatcttgaccacaccataaaccttcttaatttctctcttcattttctcctctattgtcataatcatggggaccttccctcgcttcgacccaatcaccacccaagaccggtccaaccagaccgtggcctccgaccttgacggcaccctcctcgtctcccggagcgccttcccctactacctcctcgttgccctcgaagccggcagcgtcctccgcgccctcctcctcctaacctccgccccctttgtctactttacctacctcgtcctctccgaaaccctcgccatcaagacgttaatcttcataaccttcgcaggtctcaaactaaaagacgtcgagctcgtgtcccgctcggtgct

SEQ ID NO: 251671 - DNA, 410 bp, Glycine max
ccctattacatatttgccgttcattcattcactcatctgcgagcatggccgataagcaaccccacctgaacggtgcttattacggtcccgccattcctccggcggagcaaccacgctaccgccctcaccgcgaaagaagctgctgctgctgcctgttctgaatcttgtggaagattatggttgcactcattgtcctcgttggcctcacagtactcatattctggctggcggttcaaccccgctacttcaagttctacgtcacggaagccgacctaacacaatttgattactatagcaacaacaacacccttcactacaacatggtcctcaacttcactgcacgcaaccccaacaagaagctcagcatatactacgacaaggctgaggcattagcattctacgaggatgtc

SEQ ID NO: 251672 - DNA, 408 bp, Glycine max
  unsure (1)..(408): unsure at all n locations
ggagactatggttatgacccatttggtcttagcaagaagccagaagactttgccaaatatcaggcatttgagttgattcatgccagatgggcaatgcttggtgctgctggattcatcattcctgaggccttcaacaaatatggagcaaactgtggtccagaagctgtttggttcaagactggagctctgcttcttgatgggggtacgctgaactactttgggaaacccatccccatcaatcttattgtggctgtcattgctgagattgttcttgtgggaggtgcagagtactacagaattattaatggcctgaacttcgaagacaaacttcatccaggtggtccatttgacccattgnggcttgcaaatgatccagaccaagctgcactgctaaaggtgaaggaaata

SEQ ID NO: 251673 - DNA, 349 bp, Glycine max
  unsure (1)..(349): unsure at all n locations
cgtgaatgcgtataaaaggaaaataaagaaattagcggcaaaatgttgggtgtgttcagcagctccatagtgtcgccgccggacgagctcgtggccgncggcagccgtactccgtcgccgaagatgacggcggcggcgctgcggaagcggttcgaggagaagaacccctccggcgtgtcggtggaagtcggagagcatgtccagctcgcttatacccaccacaacgagtcgtcgtttcagcccagatcctttgctgtcaaggatgaagtgttctgcttgtttgagggagcccttgacaatttgggaaacttgagacaacaatatggactgtccaagtcagtcaatgaag

SEQ ID NO: 251674 - DNA, 452 bp, Glycine max
cgctatgatcgccgtgtcactattaagaatatgacgtcgcctgcacgcgtacgtaagctcggaattcggctcagaaggagtatgtcagcctcctcaaatccaatgaccctgttggattcaacattgttgatgtcttggcttggggctccattggccatgttgttgcttactacatcttggccaccactagcaatggctatgaccctgcattctttggctgatttaatttcatcatcatgttgttccaactgtgtttcttgcttactttttagtatgtaatgtaatcaatgtcatgatgtataggttctctctaaagatccaacaagttcagcatatgctaatttgatcactattttcggctgcaaaaaaaaaaaaaaaaaaaagggcggccgccgactagtgagctcgtcgacccgggaattaattccggaccggtacctgcaggcgtacca

SEQ ID NO: 251675 - DNA, 407 bp, Glycine max
  unsure (1)..(407): unsure at all n locations
cgtacgtaagctcaggattcggctccaagttgagaactaagaaggagaagcaaatggcttcctcaatgatctcctccccaactgttaccactgtcaaccgtgccggtgccggcatggttgctccaatcactggcctcaagtccatggctggcttccccaacaagaagaccaacaatgacattacctccattgctaacaacggtggaagagtgcaatgcatgcaggtgtggccaccagttggcaagaagaagtttgagactctttcctacctgccagaccttgatgatgcacaattggcaaaggaagtagaataccttcttaggaanggatggattccttgcttggaattcgagttggagcacggtttcgtgtaccgtgagcacaacaggtcaccaggatactacgat

SEQ ID NO: 251676 - DNA, 377 bp, Glycine max
  unsure (1)..(377): unsure at all n locations
gtcgaggagaagctccggctcaagccggagaaactccagtccacccggcatgtgctgagtgagtacggaaacatgtcaagcgcgtgtgttttgttcattctggatgaaatgaggaagaagtctaaggaggaagggaagagtaccactggagaagggttagagtggggggtgctattcggattcgggccgggtctaaccgttgagaccgttgttcttcacagtgttcccttggagggataaatcttgctgatgcggtgactagtgatttaagagtgatcaataaggaaccctcggaaataccagggaaagtttgttattattactagtttcacttgtggatttatcgtancataatgttgtacaagaataatttaata

SEQ ID NO: 251677 - DNA, 394 bp, Glycine max
gattccgctccaaggaaaaagcaagctcaacctaaaattttaaaaatgggaacaacctcctccaagggtctctcctccccaaccttggctggcaaaggccttaaactgggcccaacaacccccgaaattcggaaggttaacattaaggaaaacgttaacaaacaaggctcctccggaaacccaatgtacggcccagaccgcgtcaagtacttgggcccattctctggcgagcccccgtcctacctcactggcgagttcccaggtgactacggctgggacactgctgggctttcggccgacccagaaaccttcgccagaaaccgtgagctcgaagtgatccactccaggtgggccatgctcggggccttgggctgcgtctttcccgaactattgt

SEQ ID NO: 251678 - DNA, 323 bp, Glycine max
  unsure (1)..(323): unsure at all n locations
tcggggaattccaattccacattttcaagaaataaggaggcaaaaatgttcatatatgaattggaattatttgttttcttattaggcctatcctgaagccaaaggaaatgagatcggaattcctcggggaattccaattccacattttcaagaaataaggaggcaaaaatgttcatatatgaattggaattatttgttttcatagtaggcctagcctgaagccaaaggaaatgagatcggaatgcctcggggaattccatgtccacatttagaggaagtaangaggcagaaatgttcatatcgggattggaattatttggttt

SEQ ID NO: 251679 - DNA, 364 bp, Glycine max
agagacacgacatcggataaacgcgtaggtaagctcggtattcagctcgaggaaatggctctccaggctgcttctcttgttcctgcttctttctcggttcttaaagagggaaagagtggtgtgtctctcaaggactccaccttgttcggtctttcattttcagaacctatcaaagctaacttcagctcttctgcattgaggtgcaagagggaattcgaacaaaagctctgtgctgtgagggccgaaacagtggctacagcctctccagcagttaccaagtctacaccagaaggcaagaaaacattgaggaagggcagtgttgtgataactggggcttcatctggacgaggcctggccactgcta

SEQ ID NO: 251680 - DNA, 361 bp, Glycine max
gtcaagttctgtaagtggtggtcagggccttatttttggaaacaagaatatgaataagttgttggagaaagaaaatgatcaaagtggcagttttcttaaaaagccccaccatgagaagtatgctccattgaagttaattatcatgtctgctagtcttgatgcacgtgctttctctgagtactttggtggtgccaaagctgttcacatccaagggagacagtttcctgtagatatattttatacccgtgatggagagacagagtatgtagatgcttccttgataacaatattccagattcagttagaggagggccctggtgatatactagtatttctgacgggtcaagaagagattgaatct

SEQ ID NO: 251681 - DNA, 277 bp, Glycine max
tgtctgcgttctatggtcctcccaagcctgaccccgatatgattgctctcatccaccacgctgttcagactggtgtcacttttcttgacacttctgacgtctatggtcctcacaccaacgaactccttctaggaaaggctctgaatggaggggtgagagatgaggttgaattggctacaaagtttggaatcaacgttgctgaaaggaatagacagatccgtggtgatccggcatatgtgatggctgcttgtgagggaagcttaaagagacttgggat

SEQ ID NO: 251682 - DNA, 382 bp, Glycine max
caagcttgttgacaccttccctggccaatctattgatttctttggtgcactcagggctagagtatatgacgatgaagtgaggaactggatttctggtgttggggttgacttgattgggaagaaccttgtgaactccaatgaatgacctccaaccattgaccaaccgacgatgactttgagcaagctcttggagtatggtaacatgcgtgtccaataacaagagaatgtgaagagagtataactggcagacacgtacttgaacgaggctgctcttggtgatgctaatcaggatgccatcaaaagaggaactttctatggcaaagcagccgagcacgtaaaaattcccgttcctgaaggttgtactgatccaaatgcctcaaac

SEQ ID NO: 251683 - DNA, 355 bp, Glycine max
caagcttgttgacaccttccctggccaatctattgatttctttggtgcactcagggctagagtatatgacgatgaagtgaggaagtggatttctggtgttggtgttgacttgattgggaagaagcttgtgaactccaaggaatgacctccaacctttgaccaaccgaagatgactttgagcaagctcttggagtatggtaacatgcttgtccaagaacaagagaatgtgaagagagtataactggcagacaagtacttgaacgaggctgctcttggtgatgctaatcatgatgccatcaaaagatgaactttctatggcaaagcagcccagcacgtaaaaattcccgttcctgaa

SEQ ID NO: 251684 - DNA, 374 bp, Glycine max
caacgctgtgagcttcaatgcagatggtgacattctggtctctggttccgatgattgtgggattattctctgggactgggaaactggccgcattagactctccttccattctggtcattctaacaatgttttccaggccaagatcatgcctcactctgatgatcgaaccattgtcacctgtgctgccgatggacaggtgagacatgctcaacttcttgaaaatggacgagtcgaaactaagtgtctggccaagcatcaaggaagggctcataagttggctattgagcctggtagccctcatattttgtatacctgtggtgaagatggattagtgcagcgttttgatctgagaactggggctgcaacagaacttt

SEQ ID NO: 251685 - DNA, 314 bp, Glycine max
agtgaagccccaaaacaggatccttctccacttccatacttgactgagaaagaacccaaaatctatgatatttccctagaggctcacataaaacctgctgggcatgaagattcgggtgtggtgtcacggactaatctaaagcacttagagtggacattgacccaacaacttgctcacgatacaatcaacggttgcaaccttaggccaggcgatctccgtggaactgggacagttagtggtcctgagcgagagtcccgtgcaggcgggcgagaattaacatggaatggacaaagcagagtcgcagtgaatgagtt

SEQ ID NO: 251686 - DNA, 294 bp, Glycine max
  unsure (1)..(294): unsure at all n locations
gcanatcacanaccttcccccggtaaccaaactccgaccagcgttctcccggacgtctccggcgagtggtccgaagtcgccgccgccgccgttgacgtgcggtgggacctcgcgcaagccttgcgcctcatcgaccgcgacaacgacggcgtcgtcacgcgacaggacctcgagtcgcttctcacgcgccttggcgcgtcgccgagccccggcgacgtggcgctcatgctcggcgaggtcgacggcgacggcatcacggttgagtcgctcatgagctacgtcgggtcgggtctc

SEQ ID NO: 251687 - DNA, 379 bp, Glycine max
gaaaattgttagaagagttttcacgtcttttgagaaatgggtgcctcgctatcggtctcggaaaaatccatccatgaattcatggtcaaggatgctaagggcagagacgtgaacctcagcatctacaaagggaaggttcttcttgtagtaaatgtcgcttcaaaatgtggatttacgaataccaattacacccagttaactgagctttacagcaaatacaaagacagaggccttgagatactggcatttccatgcaaccagtttctgaagcaggagcctgggagtagccaggacgtagaggaatttgcctgcacaagatacaaggccgcgtatcccatttttggaaaggtacgtgtcaatggacctgatacagcacctg

SEQ ID NO: 251688 - DNA, 388 bp, Glycine max
catcaacagcaatggcagtatatgtccttgacattctcaaggagcaatggagcccacccctaaccatttccaaggtccttttgtcaatttgctcattgttgacggatcccaaccctgatgatccactcgtaccagagattgcacacatgtacaagactgacagggccaagtatgaggctacggcccgcagctggacccagaagtatgccatgggatgaccatatagagctgtttttcaatgaagcagcaaaatcataatttatgtaaaagaacaaaagatattttgaatgaatttgaatgctttattttatattagtggaactccacagtggtaagaagagacctggtttgccaatttgtgaatattttctttgctatacactggtga

SEQ ID NO: 251689 - DNA, 370 bp, Glycine max
cagaagagcactgagctcctaatcaggaagcttcctttccataggttggttcgtgaaattgcccagtatttcaagactgatctgcgtttccagagccatgctgtgcttgcattgcaagaggctgctgaggcataccgtgttgggctctttgaggacactaacttgtgtgccaatcacgccaagcgtgtgactattatgcccaaggatattcagctggcaagaaagattcgtggtgagcgtgcttgagttggtgcgttctgtgtttgtgaagatggattgttggtggctgcggatggtgttttgttactaagttatctttatgttgaagcctatatgttattacggaaaaatacgtgtttacttggtagtc

SEQ ID NO: 251690 - DNA, 409 bp, Glycine max
acccgtacgtatgctcgggattcggctcgatcacctatggtttcagacctacgaagttggacatcatggcagcaagattgatcgcagccgtaagtactggcactcataatgcgtctccttgcttaggccagtgcaatggtgccactgcaaatgcacttagggaagttgtttccaagagatctgggaattacaccatgggcaatgatgtgtgggatggactaggcatagtgaaatatgtgggacccttttcagctcagactccttcacacttgagcagagaattcccactggatgttggatgagacacggcaggcttacctgcataccctgaatcatttgagatgaacatggctcttgacgttatccatgggagatgggctacgcttggtgcactaggttccatcacccc

SEQ ID NO: 251691 - DNA, 589 bp, Glycine max
  unsure (1)..(589): unsure at all n locations
ggagagggaggcggagccgcgcggcggctgcgtggcgtncctcacttcctgccgacgcctctgcgagtgcgtcggaggggtcggggcggaatgaattacgggccatatgaagatatatgacgtcgcatacacgcgtacgtaagctcggaaattcagctcaagcagaaaaaacaagtatttgaaaactaagaatgagaagcaaatggcttcctcaatgatctcttccccagctgttaccactgtcaaccgtgccggtgccagcatggttgctccattcactggactcaagtccatggctgggttccccaccagaaagaccaacaatgacattacctccattgctagcaacggtggaagagtgcaatgcatgcaggtgtggccatcagttggcaagaagagatttgagactctttccgacctgccaggccttgatgatgcacaactggcagaagaagtagagtaccgtcttaggaacggatgcgatccgtgcttgaaattccacttgggacacggtttcctgttaccgttaacacatcacggtcgcaacatgctaccaagggacgctactggacaagttgaaagcgcctan

SEQ ID NO: 251692 - DNA, 461 bp, Glycine max
ggtgttgcgaatgaataacgtgtcacagctaaacagatgacgtcgcacggacgcgtacgtaagctcagaatcgcttcacgaccacgctgatgagctttaccgcagctgcctcgcgcgtttcggtgatgacggtgaaaacctctgacacatgcagctcccggagacggtcacagcttgtctgtaagcggatgccgggagcagacaagcccgtcagggcgcgtcagcgggtgttggcgggtgtcggggcgcagccatgacccagtcacgtagcgatagcggagtgtatactggcttaactatgcggcatcagagcagattgtactgagagtgcaccatatgcggtgtgaaataccgcacagatgcgtaaggagaaaataccgcatcaggcgctcttccgcttcctcgctcactgactcgctgcgctcggtcgttcggctgcggcgagcggtatcagctcactc

SEQ ID NO: 251693 - DNA, 385 bp, Glycine max
caaaaacgaagtactactacaagggaagaacaacttagctactagtgaaggatcaaagagaatggctcaagcaatggcatcaatggctggcttgcgtggttcctctcatgctgtgttggaaggtacccttcaagtgagtggctccacacgcttggatgtggggagtggtaccagggtggcctcagtcatacgtacaaggttcacagttagagcacagcaacaacagatgagtggtgaggtacaaagcatccgtacggcactgctttcacttgtatgctgctggtttggccactggctcttttgttcaaactgtgcttgctgatgccaaatctatcaaagttggaccagctcccccagcttctagtggattgcctggaacgttgaa

SEQ ID NO: 251694 - DNA, 387 bp, Glycine max
ttacactctctctgtgtatttcactagctctcccttcaagatgcagatcttcgtcaagatcctcaccggcaagatcatcacccttgacgtggaaagctctgacaccatcgacaacgtcaaggccaagattcaggacaaggaaggaatccccccggaccagcaacgtctcattttcgccggaaagcaacttgaggacggccgtacccttgctgactacaacattcagaaggagagtactcttcacctcgtcctccgtctccgtggtggcatgcagatcttcgttaagacactcaccggcaagaccataaccctacaggttgaaagctccgacaccatcgataacgtcaaggccaagatccaggacaaggagggtatccccccggacca

SEQ ID NO: 251695 - DNA, 353 bp, Glycine max
tcagggaattccaattccacattttcaagaaataaggaggcaaaaatgttcatatatgaattggaattatttgttttcttattaggcctatcctgaagccaaaggaaatgagatcggaattcctcggggaattccaattccacattttcaagaaataaggaggcaaaaatgttcatatatgaattggaattatttgttttcttattaggcctatcctgaagccaaaggaaatgagatcggaagtcctcggggaattccagttccacatcggcaggagataaggaggcaaaaatgttcatatatgaattggaattatttgttttcgtattaggcctagcctgaagccaaaggaa

SEQ ID NO: 251696 - DNA, 378 bp, Glycine max
gaacatggcacagtgcctatcctacctgatgcagggaggaacaccttcaacactttgctgcagcggagtcaagaacattcttggctctgctgtcaccaccgttgacaaacagactgtgtgcaactgtctcaaggcggatgctgcaaggtacaacatcaatgaccagtatgctcaggcactccctggtttctgcaaggtcaatgtcccttacacgatcagccgctccactaactgtgcaagcatcaggttctgaacaagccatggacagatttgctcatttctgcagcgggatactgaggcagctgtgacccatttactatcagaataagagaactctagtgtgactgtacggcttcacttatgcgacccttttattgt

SEQ ID NO: 251697 - DNA, 388 bp, Glycine max
ttgagaactaagaaggagaagcaaatggcttcctcaatgatctcttccccagctgttaccactgtcaaccgtgccggtgccggcatggttgctccattcactggcctcaagtccatggctggcttccccaccaggaagaccaacaatgacattacctccattgctagcaacggtggaagagtgcactgcatgcaggtgtggccaccagttggcaagaagaagtttgagactctttcctacctgccagaccttgatgatgcacaattggcaaaggaagtagaataccttcttaggaagggatggattccttgcttggaattcgagttggagcacggtttcgtgtaccgtgagcacaacaggtcaccaggatactacgatggacgctact

SEQ ID NO: 251698 - DNA, 375 bp, Glycine max
tggcaacagatggattctccagatcaaatcttcttggtcaaggtggttatggctatgtccataaaggagttctcccaaatgggaaaattgtcgcagtcaagcagttgaaatctgagagtacacaaggggagcgtgagttccatgcagaagttgatgtcattagccgtgtgcatcagagacaccttgtttccctaattggatactgcgtcacagacagccaaaagatgcttgtcgacgagtatgtgggaaatgatacactacaatttcacttgcatggaaacgacagactacctatggattggtcaacaaggatgaagattgctataggatctgcaaaaggattggcatatttgcatgaatactgtaatcccaaaa

SEQ ID NO: 251699 - DNA, 332 bp, Glycine max
ccaccgtaattgacaagatcatcaataaggaaattccttctactgtggtctatgaagatgataaggtccctgcctttagggacatagatccataggctcctacccatattctaatcattcctaaagttatggatgggttaactggtctgtccaaggctgaggagaggcactgtgagattctaggtcgacttttgtgcactgctaagctggttgcaaagcaagaatgtcttgatgatggcttcaggattgtaattaatgatggacgagacgggggccaatcagttttacacattcatgtgcaccccattgggggacaacaaatgggctggccc

SEQ ID NO: 251700 - DNA, 286 bp, Glycine max
ctttgcgagtggagctgctcatattggtgccatgtttactgcatttttgtctgtggccactgctctggggactccgccattctttggagccatagtgctgtccttcctctccagccttatgggtggccttactcattatggaattggatcagctcctgtgtttttcggtgccaacgatgttccccttgctaaatggtggggcgatggattcctcagtagtagtgttaacattgtgatctggctagggcgacgaggagtggggcggggaattcattgggttgtggta

SEQ ID NO: 251701 - DNA, 387 bp, Glycine max
cgtacactggcagactacaacatccaaaaggagtccacccttcaccttgtccttcgtctcaggggaggtatgcagatctttgtgaagactttgacaggcaagactattaccttggaagttgaaagctcagacacaatcgataatgtcaaagcaaaaatccaggacaaggagggtatcccaccagaccagcagaggttgatatttgctgggaagcaattggaggatggaaggactcttgctgactacaacattcagaaagagtctactcttcaccttgtgttgcgtcttcgtggtgggttttaaaagtctgagaatgttctgtaggtgtcttgaagtctaagcatgtgggagttccgaagatccttgggttttttttttttaaaggtc

SEQ ID NO: 251702 - DNA, 396 bp, Glycine max
gtcgacctagagatccctcggggaattcgaattcgacattttcaagaaataaggaggcaaaaatgttcatatatgaattggaattatttgttttcttattaggcctatcctgaagccaaaggaaatgagatcggaattcctcggggaattccaattccacattttcaagaaataaggaggcaaaaatgttcatatatgaattggaattatttgttttcttattaggcctatcctgaagccaaaggaaatgagatcggaattcctcggggaattccaattccacatttgcacgatataaggaggcagaaatgttcatatatgaattcgaattatttgttttcttagtaggcctatcctgaagccaaaggaaatgagatcggaattcctcggggaaat

SEQ ID NO: 251703 - DNA, 214 bp, Glycine max
attcggctccaattgcgaccgattggttccccaccttcaaacctcctggaccaaggtgtttttggctatgtccattaatggatttctcccaattgggaaaattgtctcagtcatgcatttcaattctgaaattacacatggggatcgtgagttccatccatattttgatgtcattacccgtgtgcatcacagacaccttgtttcccaagttgga

SEQ ID NO: 251704 - DNA, 270 bp, Glycine max
atcggcgttcctcggggaattccccttccacattttcaagaaatacggaggcaacactgttcatatcctccactggaattatttgttttcttagtaggcctatcctgacgccactcgaaatgggatcggccttcctcgggggtaccgagcgcgaagtcgcttctcctgagtcggtccggcttacgccttgggttatccagggtcacagctgttcccggggtgactttgttacccgcccaaaattccacacaccttacgacccggaaccat

SEQ ID NO: 251705 - DNA, 299 bp, Glycine max
cgactcaagaggatcccctcggggaattccaattccacattttcaagaaataatgaggcagaaatgttcatatatgaattggaatagttgtttctagaggccatctgaagcaaaggaaatgagatcggaattcctcggggaattccaattccacattttcaagaaataaggaggcaaaaatgttcatatatgaattggaattatttgttttcttattaggcctatcctgaagccaaaggaaatgagatcggaattcctcgggggtaccgaactcgaattccctataatgagtcgtatta

SEQ ID NO: 251706 - DNA, 304 bp, Glycine max
cacgcgagaggatccctcggggaattccaattccacattttcaagaaataatgaggcagaaatgttcatatatgaattggaattatttggtttcctattaggcctatcctgaagccaaaggaaatgaaatcggtattccttggggaattccacttccacatttttaagaaataatgatgcaaaaatgttcatagatgaattggcactatttggtttcttagtaggcctatcctgaagccaaatgaaatgagatcagtattcctcgggggttacgagctcgaattcgctataatgagtcgtatta

SEQ ID NO: 251707 - DNA, 359 bp, Glycine max
tcactctagagatccctcagagaattcgaattcgacattttcaagaaataacgaggcaaaaatgttcatatatgaattggaattatttgttttcttattaggcctatcctgaagccaaaggaaatgagatcggaattcctcggggaattccaattccacattttcaagaaataaggaggcaaaaatgttcatatatgaattggaattatttgttttcttagtaggcctatcctgaagccaaaggaaatgagatcggaattcctcggggaattccaagtccacatttgcacgatataaggaggcaaaaatgttcatatatggattcgaattatttgttttccgagtaggcctagcctgaa

SEQ ID NO: 251708 - DNA, 376 bp, Glycine max
ttccttttcatcattctcatatcctcaatcaccccccctcgcactcgctcttcccttcctctggtggcgacaatgtcgactcctgctaggaagaggctgatgagagacttcaagaggctgcaacaagacccgcctgcagggatcagtggtgccccccaggataacaacataatgctgtggaatgctgtcatatttggtcctgatgatactccatgggatggaggcacgttcaagttgacactccaatttactgaggactatccaaataaaccaccgactgtacgatttgtgtctcgcatgtttcatccaaatatttatgctgatggaagtatttgtttggatatattacaaaatcagtggagtcctatttatgatg

SEQ ID NO: 251709 - DNA, 384 bp, Glycine max
acccaaccctagattgagagaaaaatccccaaaaacaaaacacacatctctttcattctctccctcaccaaaccctagattgaaagaaaccctaacacaccatgggaacacccgagacatcgcgcgaaccctgccccgatcgcatcctcgacgacataggcggcgccttcggcatgggagcggtgggtggctccgccttccattttctcaagggtctctacaattcccccaagggcgatcgcttcgtcggcgccacccaggccgtgcgcctcaacgccccccgcgtcggcggcagcttcgccgtctggggcggcctcttctccgccttcgactgcaccatggtctacgcgcgccagaaggaggacccctggaactccatcgtcg

SEQ ID NO: 251710 - DNA, 287 bp, Glycine max
ggtcaagcctaaaggttcccctaggggaattccaattccaaattttcaagaaataaggaggcaaaaatgttcatatatgaattggaattatttgttttcttattaggcctatcctgaagccaaaggaaatgagatcggaattcctcggggaattccaattccacattttcaagaaataaggaggcaaaaatgttcatatatgaattggaattatttgttttcttattaggcctatcctgaagccaagggaaatgagatcggaagtcctcggggaatgcgagttccac

SEQ ID NO: 251711 - DNA, 419 bp, Glycine max
  unsure (1)..(419): unsure at all n locations
gactcaagaggatcccctcggggaattccaattccacattttcaagaaataaggaggcaaaaatgttcatatatgaattggaattatttgttttcttattaggcctatcctgaagccaaaggaaatgagatcggaattcctcggggaattccaattccacattttcaagaaataaggaggcaaaaatgttcatatatgaattggaattatttgttttcttattaggcctatcctgaagccaaaggaaatgagatcggaattcctcggggaattccaattccacattttcaagaaataaggaggcaaaaatgttcatatatgaattggaattatttgttttcttattaagcctatcctgaagccaaaggaaatgagatcggaattcctcgggnggtacgagctcgaattccctatagtga

SEQ ID NO: 251712 - DNA, 314 bp, Glycine max
caggtcaactcaagaggatcccctcggggaattccaattccacattttcaagaaataaggaggcaaaaatgttcatatatgaattggaattatttgttttcttattaggcctatcctgaagccaaaggaaatgagatcggcattcctcggggaattctacatccatattgtcaggatatattgagacccttgagatcagacatgtctacctgcagcatccatgttacgcctgagcaactctgctacatcccctgcaacttctgcaacaatgttcttgcggtgaggtgttcaacgcagtaccctgtgtgacattg

SEQ ID NO: 251713 - DNA, 358 bp, Glycine max
tcagggaattcgaattcgacattttcaagaaataaggaggcaaaaatgttcatatatgaattggaattatttgttttcttattaggcctatcctgaagccaaaggaaatgagatcggaattcctcggggaattccaattccacattttcaagaaataaggaggcaaaaatgttcatatatgaattggaattatttgttttcttattaggcctatcctgaagccaaacgaaatgagatcggaattcctcggggaattcgaggtccacatttgtgcaggaaataacgaggcaaaaatgttcatataggaattgggattatttgttttcttagtagggctatcctgaagccaaaggaaatg

SEQ ID NO: 251714 - DNA, 303 bp, Glycine max
aactcttcatcatattcttcttcttcgtcttgttcttgttctatctgtgacgagcatcatggcgtcgagagcagtgctattgttggctatgtgtgtgcttccggccatggttgtggccattcgcccagcaaagaaccctttttgcgtgaagggtcgcgtctactgtgacccttgccgtgctggttttgagacctcagcaaccacctacattgccggtgctgagattatgttgcaatgcgggagcagggtgagcagcgaggttgtgtagaccaagaaggggtagactgacgcaactggagcata

SEQ ID NO: 251715 - DNA, 382 bp, Glycine max
  unsure (1)..(382): unsure at all n locations
gcaagctcatcctagagttttaaaaatggcagcagcctcctgcatggctctctcttccccatccttggctggcaaggccgtgaagctgggcccatcagcccccgaagtcgggagggtcagcatgaggaagaccgtcaccaagcaggcctcctccggaagcccatggtacggcccagaccgcgtcaagtacttgggcccattctctggcgagcccccgtcctacctcactggcgagttcccaggtgactacggctgggacactgctgggctttcggccgacccagaaaccttcgccagaaaccgtgagctcgaagtgatccactccaggtgggccatgctcggngccttgggctgcgtcttccccgaactattgtcccgcaac

SEQ ID NO: 251716 - DNA, 263 bp, Glycine max
gaagcgggaaaacattcaaccagtttggcaatcacgggggccgttgaatgtcggacctggttctggaaaaacatcctaggaatttgaggcatagatatctttactcacataggatctgaggatggcgacacactgctttcttctgtaactacaaaatatcaggcgtacttgaggactgctgatgtcactggatatgttgagttgaccgtaaatgttaaaatgatacatgcctggatacaatgttactgccatgtttgaattga

SEQ ID NO: 251717 - DNA, 517 bp, Glycine max
  unsure (1)..(517): unsure at all n locations
gggtagtagtgttcnngttacgaacaagcacttattgcactacctggagagacaagcttgcatgcctgcaggtcgactctagaggatcccctcggggaattccaattccacattttcaagaaataaggaggcaaaaatgtgcatatatgaattggaattatttgttttcttattaggcctatcctgaagccaaaggaaatgagatcggaattcctcggggaattccaattccacattttcaagaaataaggaggcaaaaatgttcatatatgaattggaattatttgttttcttattaggcctatcctgaagccaaaggaaatgagatcggaattcctcggggaattccaattccacattttcaagaaataaggaggcaaaaatgttcatatatgaattggaattatttgttttcttattaggcctatcctgaagccaaaggaaatgagatcggaattcctcggnggtaccgagctcgaattccctatagtgagtcgtattaaattcgtaatcatgt

SEQ ID NO: 251718 - DNA, 383 bp, Glycine max
atcagcgagtgagagtgagtgagtggttctcttgcagggagatggtttagtgacaccaaacagactggaaatgggtcgtggggtcagtgctggtggtggacagagttccttggattatctctttggcagtggggtacctgccagcagtgcaaatggtgctcgcactcaaaatgcaagtgctccttcaccaccggttgataagcaaagtccagcaccagcagcagcagcagcacctgcacctgcagcagcagcagcaccagcacctgcaccagcaccagcaccagcaccagctgataagcaaattccagctggaattcctggaagtctcaaaaacaattaccatcgcgctgatgggcaaaactgtggcaactttctcactgatc

SEQ ID NO: 251719 - DNA, 492 bp, Glycine max
  unsure (1)..(492): unsure at all n locations
naggtagctgtgttgagatgaaacctaagcatactgagacacctcttgcatgcctgcatgtcgactctagaggatcccctcggggaattccaattccacattttcaagaaataaggaggcaaaaatggtcatatatgagttggaattatttgttttcttattaggcctatcctgaagccaaaggaaatgagatcggaattcctcggggaattccaattccacattttcaagaaataaggaggcaaaaatgttcatatatgaattggaattatttgttttcttattaggcctatcctgaagccaaaggaaatgagatcggaattcctcggggaattccaattccacattttcaagaaataaggaggcaaaaatgttcatatatgaattggaattataagttgaattattaggcctatcctgaagccataggaaatgagatcggaattcctcgggggtaccgatctcgaattccctatagtgagtcgtattaaa

SEQ ID NO: 251720 - DNA, 505 bp, Glycine max
  unsure (1)..(505): unsure at all n locations
atatgagctgagagctgtgtctgatgttttcatngtctacntacngctattgcgacttactttcatgcctccgagtcgactgtataagatccccgtcaggaattccaattccacattttcaagaaataaggatgcaaaaatgttggtatgttaattggaatgatttggtatcttattaagcctatcctgaagccaaaggaaatgagatcgaaattcctcgctgaattccaattccacattttcaagaaataacgaggcaaaaatgttcatatatgaattgaaattattcgttttcttattacgcctatcctgaagccaaaggaaatgagatcggaattcctcggggaattccaattccacattttcaagaaataacgaagcaaaaatgttcatatatgaattggaattatttgttttcttattatgcctatcctgaaaccaaaggaaatgagatctgaattcctctgaggtaccgagctcgaattccctataatgagtcgtatta

SEQ ID NO: 251721 - DNA, 262 bp, Glycine max
tttattatatctatactgaagccaaattaaatgatatcgaaatttctcttctaattccaattccacattttcaataaatatctattcaaaaatgttcatatatgaattttaatttttattttttttaatatttctatcctaatatccaattaatttttacattttaattcctcttttaattccaattccacattttcaataaataatgatacaaaaatgttcatatattaattataattattagttttcttattattcctat

SEQ ID NO: 251722 - DNA, 415 bp, Glycine max
atagcatgctacactcgcgggcctttcctgcctagtgtttgttccaagcactctccaccctccatctctccatcttttggcttgaggagtctgaaatcgagctctttatttggagaatctctaagagtggcatccaaatcaacactaaaggtttcaaagacaaagaatacttcactcgtgaccagatgtgaaattggtgacagtctggaagaattcctcacaaaagcaacaccagataaggggttgatcaggttgttggtgtccatgggagaagcattaagaacaatttccttcaaagtgaagacggcttcttgtggtggaacacaatgtgttaatacttttggggacgagcagcttgcagtggatttgctagctaatcagcttctttttgaggccttaaattactctcatttct

SEQ ID NO: 251723 - DNA, 417 bp, Glycine max
ctttctcacacaatctgggaacaacacacacaaaccattcgcttttctcgctccggcaatgaccacccaagcttccaccttcgccgtcgccgttccctccgtcacaacccccttccgcagccaccggaatcccttcgttgttcgagcccaagcggaaccttcagataaatccgttgaaattatgaggaaattctcagagcaatatgctcgtaaatcatgaacatacttttgtgttgacaaaggagtcacttctgttgttatcaaggggttggctgaccataaagatacgttgggtgcaccactgtgcccttgccggcattatgatgataaagctgctgaagttgcacaaggattttggaattgcccttgtgttcccatgagagagaggaaggaatgccactgcatgctaattcttac

SEQ ID NO: 251724 - DNA, 406 bp, Glycine max
ccgagcagccacacctcccgcagcagccatggttctcaaagctgagctatgccgattcagtggtgccaagatctacccaggaaagggcatcagatttgttcgtggtgattctcaggttttcctgtttgcaaactcaaaatgtaagaggtatttccacaatcgcctgaagccttcaaagctcacctggactgcaatgtacagaaagcaacacaaaaaggacattgctcaagaagctgtgaggaagaggagacgtgctgccaaaaagccttactctaggtccattgttggtgcgaccttggaagtaatccagaaaaagagagctgagaagccagaagttcgagatgcagctagggaagctgctcttcgtgaaattaaggagaggatcaagaaaacaaaggatgagaag

SEQ ID NO: 251725 - DNA, 412 bp, Glycine max
gttaatcgccaccgccagcaccaagggtacgctgattcggagtttcgacacagatcacggcacgcttcttcaggaagtgagaaggggtgcgaatactgctgagatttgtagtttggcattctcttctactgctcagtggctagcggtctcaagtgataagggtactgtccatgtattcagccttaagaaacattctaacatccccgagctggaaaagacacaaagttcatccaattcagaggctgccgttaccctatctaactcatctcgctccttcattaaattgaaaggagtgttgcccaagtacttcaattctgagtggtcagttgctcagtttcacttacaagagggctctcattacacagttgcatttggtctccaaaagaatacagtcattattcttggcatggat

SEQ ID NO: 251726 - DNA, 521 bp, Glycine max
  unsure (1)..(521): unsure at all n locations
ggtaaaggcttntgtctactgacaagacatgtattgtcactactcggagagacaagcttgcatgcctgcacgtcgactctagaggatcccctcggggaattccaattccacattttcaagaaataaggacgcaaaaatgtggatatatgaattggaattatttgctttcttattaggcctatcctgaagccaaaggaaatgagatcggaattcctcggggaattccaattccacattttcaagaaataaggaggcaaaaatgttcatatatgaattggaattatttgatttcttattaggcctatcctgaagccaaaggaaatgagatcggaattcctcggggaattccaattccacattttcaagaaataaggaggcaaaaatgttcatatatgaattggaattatttgttttcttattaggcctatcctgaagccaaaggaaatgagatcggaattcctcgagggtaccgagctcgaattccctatagtgagtcgtattaaattcgtaatcatgtcata

SEQ ID NO: 251727 - DNA, 310 bp, Glycine max
tcggggaattccaattccacattttcaagaaataaggaggcaaaaatgttgataggtgaattggaattatttgttttcttattaggcctatcctgaagccaaaggaaatgagatcggaattcctcggggaattccaattccacattttcaagaaataaggaggcaaaaatgttcatatatgaattggaattatttgttttcttattaggcctatcctgaagccaaaggaaatgagatcggaattcctcggggaattccaattccacattttcaagaaataaagaggcctaaatgtgcatatcttaattga

SEQ ID NO: 251728 - DNA, 401 bp, Glycine max
gccaagtgtttctttacacctataggacccatgccagggccacctgctccacttggtaccatcgctgccgcaccatggggctcagcactcatattgccaatctcttacacttacatagccatgatgggttctaaaggactcaccgatgcatcaaagatagccattttgaatgcaaactacatggcaaaacgattggagaattattatcccgttcttttccgtggagtcaatggaacagttgctcatgaattcatcattgacctgagaggctttaagaatactgctggaattgagcctgaagatgttgcaaagcgcctcatggactacggttttcatgcaccaacaatgtcatggcctgtgcctggcacactcatgattgagccaactgagagtgaaagcaa

SEQ ID NO: 251729 - DNA, 502 bp, Glycine max
  unsure (1)..(502): unsure at all n locations
gggtaggagtgtgtgntgttacaaagacacgcacagttatactatagacgagctatgacgtcgcatgcacgccttccttagcttggaattccgcttgaggccaaattcctgttttgcaatggattggcaattcgaaacgagacttgggttccaagatcatggtataatttcggacctatatgaatcttaatcttaattggaacgaaatctttcaaaattggatttctaattcttaatgatattctcgtgcattcgatcttttctttttcttagattataattcgaaaaccaaagagttaagtgaattaaaaacccaagggaggttcatggccaaacgtaaagatatgcgagtaattgtgatcttggaatgtaccggattgcgataaaagagtgtccataaggaatcaacgggtatttctagatctataactaacatgaatcgacagaatacgcctatgcgattggaattgagataattgtgtccacgttgatgcaaacatac

SEQ ID NO: 251730 - DNA, 405 bp, Glycine max
gattggaaaaggtttcagtcccttccctctgcgaattgaagaattggcaaaaattgtctcttcgtatgtgtaatacaaggcaggcttttgaaaactgttctatccaaatctcaaatgcaatgccatgtcttgaggaaatgagcattgactattgcaatgatttgattacattacctgatggactgtgtgagattagcccattgaagaaacttagtatcactaactgccacaaactttctgcactgccacaaggtattggaaaactggagaatctggaagtgctaaggctatgttcctgctctgatttgctagagatgccaaattcttttgaagggcttaacaagctaagctgtcttgacatctcagactgtgtaagtcttaccaaattaccagatgatattggtg

SEQ ID NO: 251731 - DNA, 520 bp, Glycine max
agttaaaggcctgagtgtcgtccagcccagtacagtagcaccatacaatatctatgacttcgcatgcacgcgtacgtaagcttggatcctctagagcggtcgacgactagtgagctcgtcgacacccgaattccggacgtgtccctgcacgcgttccaccttcacttactctctgtcctattacagcttgctgtaatcatcgtcataacttcactctgagtcaaatatacatctattcacaaaatcacacaatatcccagccaagaacatataatctaaaggccagcatacctactgaaaccgctaactggccttaattctgtcgttcttacatacgcttcgcccacctgacgaccatcacaaaccatctacgctcaattcataggtcaccacacccgacaagactataaacataccaggcgtttgcctctggaagctccctagtacgctctcctgcaccgaccctaccgcttaccgcatacctgtcccgctattatccttcgagagcgtcacgcttttt

SEQ ID NO: 251732 - DNA, 514 bp, Glycine max
  unsure (1)..(514): unsure at all n locations
agggtaagtgtgtcntgttacaccgcacagaacgtcactgctcgagcgacatgctagcatgcctgcgacgctctacgtctagcatgnatcccnccttggtggaaatctccaaatcccccatatttccaagaaaataaggaggctaaaatgtggatatgttaattggaatgataagttctcttattaagcctatcctgaagccataggaaatgagatcggaattcctacgggaattccaatttcacattttcaagacataaggaggcaaaaatgttcatatatgaatcggaattattcggtgtcttattaagcctatcctgaagccaaaggaaatgagatcggaattcctcgaggaattccaatttcacattttcaagaaataaggaggctaaaatgttcatatatgaattggaattatacgttttcttattaagcctatcctgaagccaaaggaaatgagatcggaattcctcggnggtacctagctcgaattccctatagtgagtcgtattaa

SEQ ID NO: 251733 - DNA, 438 bp, Glycine max
tatcatgcctgcgcggggactctagcagatccccgtcgtgaattccaattccacattttcaagaaataatgaggcaaaaatgttggtatgttaattggaatcgtttgttttcttattaagcctatcctgaagccaaatgaaatgagatcagaattcctacgcgaattccaatttcacattttcaagaaataacgaggcaaaaatgttcatatatgaattggaattattcgttttcttattaagcctatcctgaagccaaaggaaatgagatctgaattcctcgatgaattccaattccacattttcaagaaataaggaggcaaaaatgttcatatatgaattggaattatatgttttcttattaggcctatcctgaagccaaaggaaatgagatcggaattcctcgggggtacctagctcgaattccctataatgagt

SEQ ID NO: 251734 - DNA, 398 bp, Glycine max
gcgatctctctctattctttgaaaccaaagttcaaactctggctggcctgggttctatttcgaaatcaacgacgatgagttccacagaggcagcagccacagagaagaaaggtggaagagggaaaccgaagacttcaaagtccgtttcccgttcctccaaagctggccttcagtttcccgtcggccgtgtcgctcgctacctcaaggccggtcgctacgcccagcgcgttggctccggttcccctgtttatctctccgcggttctcgaatacctcgctgccgaggttttggagcttgcggggaacgctgcgagggacaacaagaagacgaggatcgttccgaggcacattcaactggcggttaggaacgacgaggagttgagcaagctgatgggatct

SEQ ID NO: 251735 - DNA, 323 bp, Glycine max
  unsure (1)..(323): unsure at all n locations
tcggggaattccaattccacattttcaagaaataaggaggcaaaaatgtgcatatatgaattggaattatttgttntcttattaggcctatcctgaagccaaaggaaatgaaatcggaattcctcgggaattcccatttcacattttcaagaaattagggagccaaaatggtcatatatgaattggaattatttggtttcttattaagcctatcctgaaaccaaaggaaatgagataccgaatttcttggggaaatccaaattccacattttaaagatatagggacgcaaatgtgcacatatgaaaatggaatatatgggttc

SEQ ID NO: 251736 - DNA, 395 bp, Glycine max
ctgtcttccttctctagggtttttagctcccccaatttctgcgctcaacatggttcttcaaaatgatattgatttgctaaatcctccggttgagcttgagaagaggaaacacaagctcaagcgtcttgttcagtcaccaaactctttcttcatggatgttaagtgccagggttgcttcaacataaccactgtctttagccactctcagactgttgttgtatgcggaaactgccagactgtcttgtgtcaaccaaccggtggccgggcaaggctaaccgagggatgctcctttaggaagaagggagactgagtggattgccatctttttttgtttgtgattggagagtttcagtaatgccttcttttgttttgggtatgatgaatatgtaattttg

SEQ ID NO: 251737 - DNA, 377 bp, Glycine max
  unsure (1)..(377): unsure at all n locations
tgaagtgaatgattgcagcgatcataccagcttctttgtgagggtgtacatggaaggcattccgattggtagaaaactcaacttgttagctcatgatggttatcacgagttagtaaagactcttgaacagatgtttgacactaccattctgtgggggactgaaatggatggagtgcaaccagagagatgtcatgttctaacttatgaagatggagaaggagatttgattatggttggggatgtcccttgggagatgttcttatcagctgtaaagaggttgaagatcacaagggtggaggcattcgggtgataaatgcatacatatgaagaagctntgcctctcctgtgacttcaaatttagtcctatagagtgagag

SEQ ID NO: 251738 - DNA, 288 bp, Glycine max
  unsure (1)..(288): unsure at all n locations
ttccttaacctcggatttcggttcaaggaaccgacctattgctaattttacctggcaccgaattcaggatggggttgctgtggaggccgattccctttggtttttcaacagatactggcacccagttgatgattccactgctcatgtttcacattaacacagattcacttgtcttatgagaagaataccaaatgtcatgtcaataaattcatgagtcgacaattgattgtatgtcaatactaccaacattgattagcagtatctntatatctctgtcacatttgataa

SEQ ID NO: 251739 - DNA, 263 bp, Glycine max
gaaccgaactcatgctcactatagctggcaccaaaatcaagggtcagtttctatggacggcgattccctttggtttttcaacacatactgtcacccaattgatgattccactgctcatgtttcacattaacacaaattcacttgtcttatgagaagaataccaaatgtcatgtcaataaattcatgagtctacaattgattgtatgtcaatactaccaacattgattaccagtatctttatatctctgtcacatttgataaat

SEQ ID NO: 251740 - DNA, 420 bp, Glycine max
gaggttgagattgaagtagcaaccaagtttgctgcactgccgtggagatttggccgtcaaagtgttctcaatgcccttaaagattccctttgtcgactaggactgacttcagtggatctttatcagctacattggcctggagtttggggaaatgaagggtatattgatggtctgggagatgctgttgagaagggacttgtgaaggccgttggagtttcaaactatagtgagaagcgactccgtgaggcttatgagaagcttaagaagagaggtattccattagctacaaaccaagtaaactacagcctcatctaccgggcccctgaagaaaatggtgtaaaggctgcctgtgatgaacttgggataacaataattgcatattcaccaattgctcaaggtgctctcactggaaagtatact

SEQ ID NO: 251741 - DNA, 367 bp, Glycine max
ctgagtctcactctctctcccatggcgaaagacatcgaaactgaggtccaaagtgggctgccacacaaggactaccacgacccacccgccgccgcattctacgaccccgccgagctccgcaagtggtccttctaccgcgccctcatcgccgagtttgtcgccactctcctcttcctctacgtcaccatcctcaccgtcatcggctacaatcaccagaccgccaccggcagccccgacctctgcaatggcgtcggcgtcctcggcatcgcttgggccttcggaggcatgatatttgtccttgtctattgcactgctgggatatcaaggggacacataaacccggcggtgacgtttgggttggttctgg

SEQ ID NO: 251742 - DNA, 365 bp, Glycine max
ctgagtctcactctctctcccatggcgaaagacatccaaacggaggtccaaagtgggctgccacacatggactaccacgacccacccgtcgccgcattctacgaccccgccgagctccgcaagtggtccttctaccgcgccctcatcgccgagtttgtcgccactctcctcttcctctacgtcaccatcctcaccgtcatcggctacaatcaccagaccgccacctgcagccccgacctctgcaatggcgtcagcatcctcggcatcgcttagggccttcagaggcatgatatttgtccttgtctattgcactgctgcgatatcagggggacacataaacccggcggtgacgttaggattgtttc

SEQ ID NO: 251743 - DNA, 374 bp, Glycine max
acccgtacctaatctcggaattctactcgaactaactctcactctctctcccatcacaaaatacatccaaagttagatccaaaaccatcttccacacctccactaactttaaacaccccactccacattctaccacccctcctatctcctcaatccttccttctaccactccctcatctccaaatttatcaccactctcctcttcctctacttcaccatcctcaccatcatcaactacaatcaccacaccaacaccatcatcccctacctctccaatatccttcatcatactcaacataccctttcacctatcatacacatgatatcctctccttatctattccactcctaccatatcatacatacacataaac

SEQ ID NO: 251744 - DNA, 409 bp, Glycine max
gagagagaacttcaactgagggtgagagtgacacaagtctggggagcactactctaaaagttctattagattcttcaaaacatgaccatgcatcgcgagtcttgggcttttgtcttcggcgttatgggcaacatcatctcctttggagtgttccttgctccattgccaaccttttaccaaatctacaagaagaaatccactgaagggttccagtcacttccttatgttgttgcactgttcagtgcaatgctttggatttactatgctttcgtcaaaagggaagctgccctccttctcattaccattaacacatttggaattgttgtggagtcaatttaccttgcaatcttcctactttatgccccaaggaagcctaggcttacaaccatcaagcttcttctcttactga

SEQ ID NO: 251745 - DNA, 448 bp, Glycine max
ctatgacgtcgcattgcccgcctccttagcctgggattccggttgagcttcaacccgttcaacccgaaccacagttttccattcacatttaacggttagcacttagcagactctgctgcagtgaggtgaggggaggtttgttggttgtttcgtttttcctttcctttccgccagaatccgttgagaatggcgttgccggtagtcgtcgatgcaaagtacctcaaggaggtcgacaaggctcgccgcgatctccgcgcactcatcgctaacaggaactgcgctcctctcatgctccgattagcctggcacgatgccggaacttacgatgctaagaccaagaccggtggacctaacggttcgatccggaacgaggaagagtattctcacggagccaataatggcttgaagaaagctattgatttctgccaggaagtgaaggcaaaatatc

SEQ ID NO: 251746 - DNA, 282 bp, Glycine max
ctcgagccgctcgagccgcaacacagttatccattcacattgcacagttagcacttagcgagactctgctgcagtgaggtgaggggaggtttgtttgttgtttcgtttttcctttcctttccgccagaatccgttgagaatggcgttgccggtagtcgtcgatgcagagtacctcaaggaggtcgacaaggctcgccgcgatctccgcgcactcatcgctaacaggaactgcgctcctctcatgctccgattagcctggcacgatgccggaacttacgatgc

SEQ ID NO: 251747 - DNA, 322 bp, Glycine max
gtttgttttttttttttttttttttttttttttttttttttttttttttttttttttttttttttttttttttttttttttatattttttttttttttttttttttttttttttttttatattttaaaaagtttttttttttaaaaaaattgggaatttttaaaaaaatttttaaaatctgtaacacttaaatatcctaaaaatgcaaaataagtttttatcattcaaaaaacttattttcttcagatgttcaccaattgaaaataaaaaaaaaggggggtattcattatttgacatatggttcaacgcatttaaattttga

SEQ ID NO: 251748 - DNA, 383 bp, Glycine max
ctgagtggaaactctacatccaaacattggatcccgaaaacgaagacaggcttgactttgacccccttgatgttactaagacctggcccgaggacgttttgcccctccagcctgttggccgcatggtcttgaataagaacattgataacttctttgccgagaatgaacaacttgcattttgccctgccattattgtacctggtgtatactactccgatgataaattgcttcaaactcgcgtattctcctatgctgatacccagagacacagacttggaccaaattatctgcagcttcctgctaatgcccctaagtgtgcccatcacaacaatcaccatgatggtttcatgaatttcatgcacagggatgaagaggtcaattac

SEQ ID NO: 251749 - DNA, 395 bp, Glycine max
tttttcaaaacaaacgccacttcgctggcaagactggttggatgttgggactggaagtggcattcttgctatatggtcggcacaagcgggtgcgaggaaggtgtatgcagtggaagcaaccaagatgtcagaacatgcgcgtgcacttgtcaaagcgaataatctccaggatgtagttgaggtcattgagggatcgatggaggaaattaccttgccagagaaagttgatgtgatcatctctgaatggatgggttattttcttctgcgtgaatctatgtttgattcaggtataaatgctcgtgaccgctggctcaaaccaacaggagtgatgtatcctagtcatgctcgcatgtggatggcacctatccagactgggatagtagatcacaaattgg

SEQ ID NO: 251750 - DNA, 282 bp, Glycine max
tgcttctgttgatttgaagcttaatctttcttcttggattgactactctgcctcggagtcaccctcatctatgtctacagagaagcccaaagagaacaagactaccactgctgaaccttctccagctaatgatccagcaaaaccacctgcaaaggcacaagtggtgggttggccaccaattaggtcatttagaaagaacatagttcaaaggaacagcaatgaagaagaggcagagaagagcacgaagaatgctttcgtgaaggttagcatggattgtgcacc

SEQ ID NO: 251751 - DNA, 523 bp, Glycine max
  unsure (1)..(523): unsure at all n locations
ggttgagagggcgtgntgtttactgacgcgggagataacagtattactcggagagacaagcttgcatgcctgcaggtcgactctagaggatcccctcggggaattccaattccacattttcaagaaataaggaggcaaaaatgttgatatatgaattggaattatttgttttcttattaggcctatcctgaagccaaaggaaatgagatcggaattcctcggggaattccaattccacattttcaagaaataaggaggcaaaaatgttcatatatgaattggaattatttgttttcttattaggcctatcctgaagccaaaggaaatgagatcggaattcctcggggaattccaattccacattttcaagaaataaggaggcaaaaatgttcatatatgaattggaattatttgttttcttattaggcctatcctgaagccaaaggaaatgagatcggaattcctcgggggtaccgagctcgaattccctatagtgagtcgtattaaattcgtaatcatgtca

SEQ ID NO: 251752 - DNA, 529 bp, Glycine max
  unsure (1)..(529): unsure at all n locations
agtgaaagacgtgtattttatgtagcagtaccgctacatgcatcancatagaagagtctatgacgtcgcatgcacgcgtacgtaagctcggaattcggctcgaggaacaagtaatatgagaactaagatagagaagcaaagggcggatatatgaatctggtaatgatagctgttactaattacaactatgctgaagccaaacgaaatgatatcggaattgctcggagaattacaattgcacattttaaagaaataacgaagcaaaactgttcatatatgaattgcaattatttgttatcttattacgcctatcctgaagccaaaggaaatgagatcggaattcctaggggaattccaattccacattttcaagaaataaggaggcaaaaatgttcatatatgaattggaattatttgttttcttattaggcctatcctgaagccaaaggaaatgagatcggaattcctcgggggtaccgagctcgaaattcctatagtgagtcgtattaaattcgtaatcatgtcatag

SEQ ID NO: 251753 - DNA, 286 bp, Glycine max
agaatataggaaatcctgatttaccaatggcaatgggcatgggaccagatcaaaaaggtgtgcgtattaaaagaattggacccactggttcaaaatcttatggtctgaaaccatttgatggaattcttaactttgattgggtcaatatttcgaatggatgaaccagggttattcctttccttaccaccacctttgatctggttcatttaaggcttggggagcccatgggttcaagtaacctggcttttcaaaagtccactggggataaagctctattaaaggtttt

SEQ ID NO: 251754 - DNA, 520 bp, Glycine max
  unsure (1)..(520): unsure at all n locations
tagtttaggctgtgtctgtttttcttagccctagctangccactactgagttagataaacttgcaggccgggaaggcaactttggaagatcccgtgggggaattccaattccacattttcaagaaataaggacgcaaaagtgggcatatatgaattggaattatttgttttcttattaggcctatcctgaagccaaaggaaatgagatcggaattcctcggggaattccaattccacattttcaagaaataaggaggcaaaaatgttcatatatgaattggaattatttgttttcttattaggcctatcctgaagccaaaggaaatgagatcggaattcctcggggaattccaattccacattttcaagaaataaggaggcaaaaatgttcatatatgaattggaattatttgttttcttattaggcctatcctgaaaccaaaggaaatgagatcggaattcctcgggggtaccgagctcgaattccctatagtgagtcgtattaaattcgtaatcatgt

SEQ ID NO: 251755 - DNA, 400 bp, Glycine max
  unsure (1)..(400): unsure at all n locations
tgagtattctgatcgctccctgagagagctcgtcgcggcggttgcagaagaagattgcaagatgaagttcaacatcgcgaatcccaccactggatgccagaagaagctcgagatcgacgacgatctgaaactgcgagcattttgggacaagaggatctcacaggaggtcatcggagatgcactcggtgaggaatttaagggctatgtcttcaaaattaccggaggttgtgacaaacaaggatttccaatgaagcagggagtgctgactcctggtcgtgttagacttttgcttcacaggggaactccttgcttccgtggatatggaaagcgtaatggagagcgtaggagaaagtctgttcgtgggtgcattgtcagcccagacctntctgttttgaacttg

SEQ ID NO: 251756 - DNA, 515 bp, Glycine max
  unsure (1)..(515): unsure at all n locations
ngtgaggggctgnttctacgacaagaacatattgcactactcggagagacaagcttgcatgcctgcaggtcgactctagaggatcccctcggggaattccaattccacattttcaagaaataaggaggcaaaaagggtgatatatgaattggaattatttgttttcttattaggcctatcctgaagccaaaggaaatgagatcggaattcctcggggaattccaattccacattttcaagaaataaggaggcaaaaatgttcatatatgaattggaattatttgttttcttattaggcctatcctgaagccaaaggaaatgagatcggaattcctcggggaattccaattccacattttcaagaaataaggaggcaaaaatgttcatatatgaattggaattatttgttttcttattaggcctatcctgaagccaaaggaaatgagatcggaattcctcggnggtaccgagctcgaattccctatagtgagtcgtattaaattcgtaatcatgtc

SEQ ID NO: 251757 - DNA, 333 bp, Glycine max
  unsure (1)..(333): unsure at all n locations
ggggaaggcctgaaatcctaaaggttcatgctagcaccaaaaggtttgatgctgatgtttctcttgaagtgattgcaatgagaacacctggctttagtggagctgatcttgcgaatctgttgaatgaagctgctatattagctggtcgccgtggaaagacagctatttcatctaaagaaattgatgattctattgataggattgtggctggaatggaaggaacagtgatgacagatgggaagagcaaaagtttagtggcatatcatgaagttggtcatgctatttgtggaaacttgactnctggtcatgatgctgtgcaaaaggtaacactag

SEQ ID NO: 251758 - DNA, 497 bp, Glycine max
  unsure (1)..(497): unsure at all n locations
aagtttagagtgtttgtgatctagccctgatgcatcacttagacgagctatgacgtcgcatgcacgcgtacttaacctggaatttcgcttcaaggtcctttggttcaccagtggcaacttcttgttccaaattgggggtgctcgactgaaatcctaaacgttcatgctaccaacagacagttacacgctgatgaagctcttgaagtgatagccatgacaacacctgactatagtggagctgatctcgcaaatctgtagaatgaaactgctatattagctagtcgccagctatagacaactattctatataaagaaattgatgattatatcgatacgaatgtcgctagaatggaacgaacaacgatgacagatcaggaagagcagaagtttactggcatatcatgaattacatcatgctatatgtgaaactatgactgctgatcatgatgctgtgcacaacgtaacactagttactcgcgctcaaactcgtggacttn

SEQ ID NO: 251759 - DNA, 548 bp, Glycine max
  unsure (1)..(548): unsure at all n locations
agtaggactgatttatgactgaacgatagcatgctattcgcagtacgatgataccttcatagcaagggtactctagcggatcctctcggggaataccaattccacattttcaagaaataaggacgcaaggatgggcatatatgaattggacttacatgctgtcttattaggcctatcctgaagccaaaggaaatgagatcggaattcctcggggatttccaattccacattttcaagaaataaggaggcaaaattgttcatatatgactgggactaatttggttccttataaggcctatcttgaaaccaaaggaattggaaacggaattcctcggggaattcaaattcacaatttccagaaataaaggggccaaaatgttcatatatgaaatggaattatttgtgttcttatttagactttactgaaaaccaaagaaatgagatctggatttctctggggtacccatctctaatttcctatagtgagtcgtattaaattacgaatcatgtgataactgtttcctgtgtgaaaatgttatccgctcacn

SEQ ID NO: 251760 - DNA, 559 bp, Glycine max
  unsure (1)..(559): unsure at all n locations
gaggtagtnnagtggtnntttccttgtacgaagctcatcgtcactaatnggagagacaagcttgcatgcctgcaggtcgactctagaggatcccctcggggaattccaattccacattttcaagaaataaggaggcaaaaatgtgcatatatgaattggaattatttgttttcttattaggcctatcctgaagccaaaggaaatgagatcggaattcctcggggaattccaattccacattttcaagaaataaggaggcaaaaatgttcatatatgaattggaattatttgttttcttattaggcctatcctgaagccaaaggaaatgagatcggaattcctcggggaattccaattccacattttcaagaaataaggaggcaaaaatgttcatatatgaattggaattatttgttttcttattaggcctatcctgaagccaaaggaaatgagatcggaattcctcgggggtaccgagctcgaattccctataatgagtcgtattaaattcgtaatcatgtcatatctgtttcctgtgtgaaaatgttatccgctcaca

SEQ ID NO: 251761 - DNA, 183 bp, Glycine max
  unsure (1)..(183): unsure at all n locations
tcggngaattccaattccacattttcaagaaataaggaggcaaaaatgttcatatatgaattggaattatttgttttcttattaggcctatcctgaagccaaaggaaatgagatcggaattcctcggggaattccaattccacattttcaagaaataaggaggcaaaaatgttcatatatgaa

SEQ ID NO: 251762 - DNA, 385 bp, Glycine max
tcggggaattccaattccacattttcaagaaataaggaggcaaaaatgtgcatatatgaattggaattatttgttctcttattaggcctatcctgaagccaaaggaaatgagatcggaattcctcggggaattccaattccacattttcaagaaataaggaggcaaaaatgttcatatatgaattggaattatttgttttcttattaagcctatcctgaagccaaaggaaatgagatcggaattcctcggggaattccaattccacattttcaagaaataaggaggcaaaaatgttcatatatgaattggaattatttgttttcttattaggcctatcctgaagccaaaagaaatgagatcggaatttctcgggggtaccgagct

SEQ ID NO: 251763 - DNA, 400 bp, Glycine max
tcggggaattccaattccacattttcaagaataagagcaaaaatgtgatatatgaattggaattatttgttttcttattaggcctatcctgaagccaaaggaaatgagatcggaattcctcggggaattccaattccacattttcaagaaataaggaggcaaaaatgttcatatatgaattggaattatttgttttcttattaggcctatcctgaagccaaaggaaatgagatcggaattcctcggggaattccaattccacattttcaagaaataaggaggcaaaaatgttcatatatgaattggaattatttgttttcttattaggcctatcctgaagccaaaggaaatgagatcgggattcctcgggggtaccgaactcgaattccctataatgagt

SEQ ID NO: 251764 - DNA, 500 bp, Glycine max
  unsure (1)..(500): unsure at all n locations
gagtttagagtgattctcaagcttaaatcgtagncatngcnactaccttcatatagcttgcatgcctggaggtcgactctgagagatcccctcggtgaattccaattccacattttcaagaaataacgtagcaaaagtgtggatatatgaattggaatgtatttgttttcttattaggcctatcctgaagccaaaggaaatgagatcggaattcctcggggaattccaattccacattttcaagaaataaggaggcaaaaatgttcatatatgaattggaattatttgttttcttattaggcctatcctgaagccaaaggaaatgagatcggaattcctcggggaattccaattccacattttcaagaaataaggaggcaaaaatgttcatatatgaattggaattatttgttttcttattatgcctatcctgaagccaaacgaaatgagatcggaattcctcgggggtaccgagctcgaattccctatagtgagtcgca

SEQ ID NO: 251765 - DNA, 196 bp, Glycine max
tctcaacctactctgacaaccagcccggtgtgttgattcaggtctatgaaggtgaacgaacgaggactcgtgacaacaatttgcttggcaaatttgagttatctggaattcctcctgctcccagaggtgttcctcagatcactgtttgcttcgacattgatgccaacggtttattgaacgtgtctgcggaggacaa

SEQ ID NO: 251766 - DNA, 327 bp, Glycine max
tataatggctcgggaacttatgaatgagattaggtgccctggtgatcaatcatgaacgacagttcacgcttggatcactgagatggcatcttacctgaaatccatagatggaaaccacttgctggaagctggtctggagggtttctactgccagtcaaagcctcagtctaacccaaacttcaatgtaggaaccgatttcattggcaacaaccaaatcccaggcattgatttcgcaacagtgcactcctacccggaccaatggctatcaagttctagttatgaggaccaaatctcatttttaggccgttgggtggattaacacattcc

SEQ ID NO: 251767 - DNA, 342 bp, Glycine max
gcattcagagagagtgccgacaatgagctcaagggaatccgatatgagtgtgatgagccacttgtgtgcattgactataggtgcactgctgtgtgctaaaccgttgactactagttgacgcatggccatgggagatgacatggagaacgtgattgcttggtatgacaatgaatggagctactaccaaagggttgctgaattcgctgacattggtgtcaacaaatggaactgagatccaaacaaattgtcattggtaattaaaatatcatgtatgtaccatgacattgaaaatacggatgcttactactactaacactacgacactagtggcttaaactttat

SEQ ID NO: 251768 - DNA, 501 bp, Glycine max
  unsure (1)..(501): unsure at all n locations
ngggggagagagggttgnattactgaacgggagttactgtaatactcggagagacaagcttgcatgcctgcaggtcgactctagaggatcccctcggggaattccaattccacattttcaagaaataaggaggcaaaaatgtggatatatgaattggaattatttgttttcttattaggcctatcctgaagccaaaggaaatgagatcggaattcctcggggaattccaattccacattttcaagaaataaggaggcaaaaatgttcatatatgaattggaattatttgttttcttattaggcctatcctgaagccaaaggaaatgagatcggaattcctcggggaattccaattccacattttcaagaaataaggaggcaaaaatgttcatatatgaattggaattatttgttttcttattaggcctatcctgaagccaaaggaaatgagatcggaattcctcgggggtaccgagctcgaattccctatagtgagtcgta

SEQ ID NO: 251769 - DNA, 398 bp, Glycine max
gggaaagaaaagccacttcaaatttcagccccataccataggcattaaagtccacacacacagagcaacactgcactgtgtggaaacgaaacatggcaagagtggtggcactccaacagaaccaactatctttctctaccttagcttcctctctttctgacttcagtggaaccagacttcaaactcaacttcagttcaagagaaagcaatgccatccaaaagggtctttctacgtctccgcatcgagcaccaagaaaatcctaataatgggaggcaccaggtttattggtgtgtttttgtctaggctccttgtcaaagagggtcaccaggtgactttattcacaagaggtaaagcgcctgtcactcaacagttgccaggtgaatcagacagtgattat

SEQ ID NO: 251770 - DNA, 398 bp, Glycine max
gggaaagaaaagccacttcaaatttcagccccataggataggcattaaagtccacacacacagagcaacactgcactgtgtggaaacgaaacatggcaagagtggtggcactccaacagaaccaactatctttctctaccttagcttcctctctttctgacttcagtggaaccagacttcaaactcaacttcagttcaagagaaagcaatgccatccaaaagggtctttctacgtctccgcatcgagcaccaagaaaatcctaataatgggaggcaccaggtttattggtgtgtttttgtctaagctccttgtcaaagagggtcaccaggtgactttattcacaagaggtaaagcgcctgtcactcaacagttgccaggtgaatcatacagtgattat

SEQ ID NO: 251771 - DNA, 371 bp, Glycine max
tcactttaaagttacatagtttttcattgttttacttaatgtacaatggctgcttcaacaatgactctctcttcatcatcattggctggccaagctatcaagcttgccccctccacccctgagcttggtgttggaagggttagcatgaggaaaacagcctccaagactgtttcctcaggaagcccatggtacggcccagaccgtgtcaagtacttgggcccattctctggtgagcccccatcctacctcactggtgaattcccaggtgactatggttgggacactgctgggctttctgctgacccagagacttttgccaaaaaccgtgaactcgaagtcatccactccagatgggccatgttaggagccct

SEQ ID NO: 251772 - DNA, 552 bp, Glycine max
agttaggtaagtgagtgcagttcagcccgtacagcactactaggagagacaagcttgcatgcctgcaggtcgactctagaggatcccctcggggaattccaattccacattttcaagaaataaggaggcaaagatgtgcatatatgaattggaattatttgttttcttattaggcctatcctgaagccaaaggaaatgagatcggaattcctcggggaattccaattccacattttcaagaaataaggaggcaaaaatgttcatatatgaattggaattatttgttttcttattaggcctatcctgaagccaaaggaaatgagatcggaattcctcggggaattccaattccacattttcaagaaataaggaggcaaaaatgttcatatatgaattggaattatttgttttcttattaagcctatcctgaagccaaaagaaatgagatcggaattcctcgggggtaccgagctcgaattccctatagtgaggcgcattaaatatttaatcatgttataactgttgtccgtgtgaaaaatgttataccccccc

SEQ ID NO: 251773 - DNA, 376 bp, Glycine max
  unsure (1)..(376): unsure at all n locations
tcggggaattccaattncacattttcaagaattaaggaggcaaaatgtgcatagatgaattggaataatttgttttcttattaggcctatcctgaagccaaaggaaatgagatcggaattcctcggggaattccaattccacattttcaagaaataaggaggcaaaaatgttcatatatgaattggaattatttgttttcttattaggcctatcctgaagccaaaggaaatgagatcggaattcctcggggaattccaattccacattttcaagaaataaggaggcaaaaatgttcatatatgaattggaattatttgttttcttattaggcctatcctgaagccaaaggaaatgagatcggaattcctcgggggt

SEQ ID NO: 251774 - DNA, 500 bp, Glycine max
  unsure (1)..(500): unsure at all n locations
gagggggagggctgnagtaccgacaggggatgtattgcattactcggagagacatgctagcatgcctgcacgcctactctagatgatccagtcgtggaattccaattccacatcatcaagacatacagatgccaaagtgtggatatatgaatcgtaattatgagatttcttattaagcctattctgaagccaaacgaaatgagatcggaattcctctgggaatgccaattccacattttcaagaaatatggacgccaacatgctcatatatgaattgtaattattagatttattattaggcctatcctgaagccaaacgaactgagatcggcattcctcggcgaattccaattccacattctgaagacataacgaggcaaaaatgttcatatatgaattgtaattattcgccgtcttattaggcctatcctgaagccaaaggatatgagatcggaatttctcctgggtaccgagctcgaattccgtatagtgagtcacat

SEQ ID NO: 251775 - DNA, 327 bp, Glycine max
tcggtgaattccaattccacattttcaagaaataaggaggcaaaagatgggcatatatgaattggaattatttgttctcttattaggcctatcctgaagccaaaggaaatgagatcggaattcctcggggaattccaattccacattttcaagaaataaggaggcaaaaatgttcatatatgaattggaattatttgttttcttattaggcctatcctgaagccaaaggaaatgagatcggaattcctcggggaattccaattccacattttcaagaaataaggaggcaaaaatgttcatatatgaattggaattatttgatttctt

SEQ ID NO: 251776 - DNA, 501 bp, Glycine max
  unsure (1)..(501): unsure at all n locations
agggaagagaggctcgncgttacggaacgcggggtataatgtaatactcggagagacaagcttgcatgcctgcaggtcgactctagaggatcccctcggggaattccaattccacattttcaagaaataaggaggcaaaaatgttgatatatgaattggaattatttgttttcttattaggcctatcctgaagccaaaggaaatgagatcggaattcctcggggaattccaattccacattttcaagaaataaggaggcaaaaatgttcatatatgaattggaattatttgttttcttattaggcctatcctgaagccaaaggaaatgagatcggaattcctcggggaattccaattccacattttcaagaaataaggaggcaaaaatgttcatatatgaattggaattatttgttttcttattaggcctatcctgaagccaaaggaaatgagatcggaattcctcggnggtaccgagctcgaattccctatagtgagtcg

SEQ ID NO: 251777 - DNA, 511 bp, Glycine max
  unsure (1)..(511): unsure at all n locations
ngaggggaagaggggcntnnnctctactgaacccgacatctctactgtcattactcggagagacaagcttgcatgcctgcaggtcgactctagaggatcccctcggggaattccaattccacattttcaagaaataaggaggcaaaaatgttcatatatgaattggaattatttgttttcttattaggcctatcctgaagccaaaggaaatgagatcggaattcctcggggaattccaattccacattttcaagaaataaggaggcaaaaatgttcatatatgaattggaattatttgttttcttattaggcctatcctgaagccaaaggaaatgagatcggaattcctcggggaattccaattccacattttcaagaaataaggaggcaaaaatgttcatatatgaattggaattatttgttttcttattaggcctatcctgaagccaaaggaaatgagatcggaattcctcgggggtaccgagctcgaattccctatagtgagtcgtat

SEQ ID NO: 251778 - DNA, 297 bp, Glycine max
caagagcagtgttattgttggctatgtgtgtgcttccggcgatggttgtggccattcgcccagcaaagaaccctttttgcgtgaagggtcgtgtctactgtgacccttgccgtgctggttttgagacctcagctaccacctacattgctggtgctgagattatgttgcaatgcaagagcagggttagcaacgaggttgtgtacacgaagaaggggtacaccgactcaaccggagcatacacaatgtacgtggatgaggatcacgcagatcagatctgcagtgccaagcttgtaagca

SEQ ID NO: 251779 - DNA, 556 bp, Glycine max
  unsure (1)..(556): unsure at all n locations
tagtagtcgaaaggtgnagttataggtaacgttagtttagcacttcatataagatctatgacgtcgcatgcacgcgtacgtaagctgctaattcgtctcgagtgaagtgactgattgcagcgatcataccagcttctttatggatgtgtacattgaaggcattccgtatgattaataactcaactcgatagctcatgatagttatcacgaattagtaaagactattgcacatatgtttgacactaccattctgatgtggacttaaatggattgaattcaacccgtaaaatgtcatgttctaacttattaagattgaaaaggaaatttgaatattgatggtgatttacctttgaaaaatttattataaactgttaataagtttaaaatctcaaatgtggatgcattcatgtgataaattcattcaccttaaaaaacttttactcttatgtgacctcaaattttttctcttcaccgctaaactatatttttatgactcctcatgaaattctcatcatctctatataattttttaagtttatatcactttttcaaaaat

SEQ ID NO: 251780 - DNA, 557 bp, Glycine max
  unsure (1)..(557): unsure at all n locations
gttagtnttagaggtgtagtttctgatcgcgtacctcattagcattatcatactgcttgcatgcctgcaggtcgactctagaggatcccctcggngaattccaattccacattttcaagaaataangatgcataaatgtgcatagatgaattggaattatttgttttcttattaggcctatcctgaagccaaaggaaatgagatcggaattcctcggngaattccaatttcacattttcaagaaataaggaagcaaaaatgttcatatatgaattggaattatttgctttcttattaagcctattctgaagccaaaagaaatgagatcggaattcctcggggaatttcaatttcacattttcaagaaataaggaggcaaaaatgttcatatatgaattggaattatttgttttcttattaggcctattctgaagccaaaagaaatgagatcggaattcctcgggggtaccgagctcgaatttcctatagtgagtcgtattaaattcgtaatcatgtcatatctgtttcctgtgtgaaattgttatccgctcacaatt

SEQ ID NO: 251781 - DNA, 547 bp, Glycine max
  unsure (1)..(547): unsure at all n locations
ngggtagtttaagtgttttacgataagaatgtaatgcataacgagctatgacgtcgcatgcacgcgtacgtaagctcggaaattcgctcgagctggaagtctcgttgactttgttgaataattgtgtgaggattgaagcttgatgcatacgtatgggtagttgaattttttttccctgtcatttgatgtctacctttgaagcgaaccaatatatgattcttgagggaattagggctcaaaatgttcagagttaaccaatctattatctaactaggtaaaaatctctcccagatgtcaaatgttgcgaactcgacaaatattatgtggcatgactgtccaattcagaaacaagatagacagcagctgcttcagcaaaaaggctgtgttatatggctaactggcctcagtggttcaggaaaaagcactattgcatgtgctttgagtcgaagcttgcactccaaaggaaaactggcttacatccttgatggtgacaataattcggatgggcttaaccaaaaattttttttttttaacagaagaaatatct

SEQ ID NO: 251782 - DNA, 393 bp, Glycine max
agacgaatgagctggtggcggttaagaagatagcgaacgcggtcgacaatcacatggacgctaagcgtacgcttcgtgagattaagcttcttaggcatttggatcatgaaaatgtaattggtttgagagatgtaattcctccacccttgcgtagagagtttaatgatgtctacatagccactgaactcatggatactgatcttcaccatatcattcgctccaatcaaaatctgtcagaggagcactctcaatacttcttgtaccagattcttcgtgggcttaagtatatacattctgcaaacgtaatccatagagatttaaaaccaagcaacctgctgctaaactcaaattgtgacttgaagattattgattttggtcttgcgagaccaactt

SEQ ID NO: 251783 - DNA, 353 bp, Glycine max
  unsure (1)..(353): unsure at all n locations
tcggngaattccaattccacattttcaagaaataaggaggcaaaaatgttgatatgtgaattggaattatttgttttcttattaggcctatcctgaagccaaaggaaatgagatcggaattcctcggggaattccaattccacattttcaagaaataaggaggcaaaaatgttcatatatgaattggaattatttgttttcttattaagcctatcctgaagccaaaggaaatgagatcggaattcctcggggaattccaattccacattttcaagaaattaagaagcaaaaatggtcatatatgaattggaattatttggtttcttattaaggccattcctgaacccaaagga

SEQ ID NO: 251784 - DNA, 391 bp, Glycine max
cacgatcaccaccgcaaagcgatccaaaatccgtgtgcgagcttgttgtcaaggatgctaacggagatgatgtagatctctacttttacaagggagaagtccttctgattgtcaatgttgcttctcaatgcggcttgaccaactccaattatacggagctgaatcaattgtatgacaagtataaagaccaatgcctggagattctggcattttcatgtgatcaatttggtaagcaagaaccagaaagccctgattaaaatgtggattttgtctgcaatcgcttcaaatctgaattccccatctttgataagattgaagtgaatggggacaattctggtcctttgtacaaattcttgaagatgtggaaatggggaatttttggtgatgatat

SEQ ID NO: 251785 - DNA, 397 bp, Glycine max
  unsure (1)..(397): unsure at all n locations
tacttgcatgcacgcgtacgttagctggtactgcngctcaaggctgaagcataccattaccaccatagatccaaaatccgtagactagtttaatggcaaggatgctaagggagatgatgtatatctctacttctacaatggaaaagtccttctgattgtcaatgttgcttctcaatgcggcttgaccaactccaattatacacatctgaatcaatcgtatgacaagtataaagaccaatgcctgtatattctggcatttccatgtaatcaatttgttaagcatgaaccataaagcactgattaaattgtggattttgtctgcagtcgcttcaaatctgaattccccatctttgataagattgaagtgaatgcggacaattctgctcctttgtacaaa

SEQ ID NO: 251786 - DNA, 342 bp, Glycine max
cacgatcaccacaactaagaaggagaagctattggtggtcgcttagatctctgggccagatcttaccacagtcaaccgtgccagagccgtcatggtagcttcaatcactggcattatgtccatcgctggcttctccactagaacgacctacaataacctaacctgcattgctagatacatttgtagagtgcaatgcatgcacgtgtcaactccatatagccagaaaaacactcagactctgaaatacctaccagaccttactgatgcacaatcgacataggaagaatgagataccatgtttacgaaggagatgtaatgccgtagcttgatagatccacagtt

SEQ ID NO: 251787 - DNA, 359 bp, Glycine max
cgaaaaatactgacagcattgtgttgtgcggttacagaagatgagtgaagacgaggagatgaaagatcaggctacgccttcacacttgctttcttcagttcctccatctacattgcaccatttgaagggaatagcatcaattattgaaaccggttcgtactcaaaggaagttcgtcgaattgctcgtgccctgcgccttacatttgcatttaggcgtgaattgacaacaccagttctctcatcttttcttgattatgttcttactcccgcttctgaacctcacactaagttatcctcttatctgcctaatcctaaggaaggtgatcgagagatggaagtggacagtgcaacatctacta

SEQ ID NO: 251788 - DNA, 277 bp, Glycine max
cacgatcaccaccgcaaagcaatgggcgctatactttctgccttaactggcggtgccgcaacggcggcgacgtcttcgccggagagttctgcttctagggtccagtctttccactcttcggcgcgctggcagctccacttcaacgagctcaaagaaaccaataagctcgttgtgatagatttctcggcgtcgtggtgcggcccttgcaaattcatagagccagcgattcacgccatgttcgaaaagttcaccgacgttgacttcgtcaagatcgacg

SEQ ID NO: 251789 - DNA, 346 bp, Glycine max
caagtagttgagaactaagaaggagaagctaatggctttggcaatgatctcttccccagctgttaccactgtcaaccgtgccggtgccggcatggttgctccattcactggccttaagtccatggctggcttccccaccaggaagaccaacaatgacattacctgcattgctagcaacggtggaagagtgcaatgcatgcacgtgtggccaccatttggcaagaagaagtttgagactctttcctacctgccagaccttgatgatgcacaattggcataggaagtagaataccttcttacgaagggatggattccttgcttggaattccagttggagcacggttta

SEQ ID NO: 251790 - DNA, 344 bp, Glycine max
  unsure (1)..(344): unsure at all n locations
cacaatcaatcacatttcanaggcatgtttttttcaacagagttcgttctacccacgagtcgattcaacaaacccagacgctaattctcccttctctatccccgcaccatcttcttcttcttcttccatttatccctcagtggaaacaacagagaatctcatttgggaagagccaaacacgactacagaagaagccatggaaaacgttctggtcacggtcccgggtgcgattctgcatctgatagaaaaggattccagcgtgcaccttgcttcgggcgacctcaccatatcgaccctcggagaaggcgacaaagtggtggcggttctggcatgcgtcggcgatc

SEQ ID NO: 251791 - DNA, 503 bp, Glycine max
  unsure (1)..(503): unsure at all n locations
agggngggagtgcgtgnngttaagcgacgcgggagttaactgctaacactctagaagagctatgacgtcgcatgcacgcgtacgtaagctcggaattcatggggcgagagctggggagagaatggatattacaagatctgcagaggtcgaaatgtgtgtggagtagattccatggtctcaactgtagctgctatatatccatccagccattaaatacaaagatatgcctgattgtggttgtgatgtgatactggactaaggggagtttgtataaatatttatgttgcgaactttatcatttggtactggtaaaattatctccgtataggatcaggaaactgctaagaccatgttgcttatgtagtatgtaatttctgtatgtatgcttgacatatacaagtgggaaatccaaggaaatgtgtggtcctaaaaatggtgcaagataagcaactctctatggagattggcagggtaaggctgtccaaactgcaacaggggaatac

SEQ ID NO: 251792 - DNA, 396 bp, Glycine max
taagaaggagaagcaaatggcttcctcaatgatctgttccgcagctgttaccactgtcaaccgtgccggtgccggcatggttgctccattcactggcctcaagtccatggctggcttccccaccagaaagaccaacaatgacattacctccattgctagcaacggtggaagagtgcaatgcatgcaggtgtggccaccagttggcaagaagaagtttgagactctttcctacctgccagaccttgatgatgcacaattggcaaaggaagtagaataccttcttaggaagggatggattccttgcttggaattcgagttggagcacggtttcgtgtaccgtgagcacaacaggtcaccaggatactacgatggacgctactggaccatgtggaagct

SEQ ID NO: 251793 - DNA, 366 bp, Glycine max
tcagaaccctcgatcactcccacgcgctcctatatcctctgcttcaccgtcgctctctccaacgatcacaacaacatcgtcatcccatggcaaacgccgcatctggtatggcagtccatgatgactgcaagttaaggtttttggagctgaagacaaagaggacacaccgtttcatagtttttaagattgaggagcagcagaagcaggtcattgtggagaagcttggtgagccagcccaaggctatgaagatttcactgccagccttcctgctgatgagtgccgatatgctgtttatgattttgagtatctgactgaagggaatgtccctaaaagcccaatttttttcattgcatggtcccctgaca

SEQ ID NO: 251794 - DNA, 385 bp, Glycine max
ggtttttgcaattaaagctcaaaatcatggcatcagtgcgattggaaaattgcaacaaggaataaatcctccatcatggaatatgttgctctttcatggaagtcacctaggcctagttatgaaaacagggcttatcaccgggattttgtccctcactgaaggtattgcagtaggaaggacatttgcagctctcaaaaactacaaagtggatggaaataaggaaatgatggcaattgggtttatgaatgtggttggctccttcacttcctgctatgttacaacaggtgctttctctcgatcagctgttaacaattacgcaggagccaaaacagctgtgtcgaatgtagtgatgtctgtgacagtcatggtaacactcctttttctc

SEQ ID NO: 251795 - DNA, 354 bp, Glycine max
attgtttgttgttgtaactcgttcttcttcttttgttgttgtgtggttgtgtttgttttttctctcacctgaaaatgtcttgctgcggtggtaactgtggttgcggaagctcctgcaagtgcggcaacggctgcggaggctgcaagatgtacccagacttgagctacactgagtcaaccaccaccgagaccttggtcatgggagtggcacctgttaaggctcaatttgagggtgctgaaatgggtgtgcccgctgagaacgatggctgcaaatgtggaccaaactgctcctgcaacccctgcacttgcaagtgacgtgttgggagagcaagcttcaagcagagatagcccttaa

SEQ ID NO: 251796 - DNA, 497 bp, Glycine max
  unsure (1)..(497): unsure at all n locations
tagtcagagggcgtgagctccgtttagtntacttagtcattcatgagagactgactagcatgcctgcacgtctactctagcagatcccctcggtgaattccaattccacattttcaagaaataacgacgcaaaagtgtgatatatgaattggaattatttgttttcttattaggcctatcctgaagccaaaggaaatgagatcggaattcctcggggaattccaattccacattttcaagaaataaggaggcaaaaatgttcatatatgaattggaattatttgctttcttattaggcctatcctgaagccaaaggaaatgagatcggaattcctcggggaattccaattccacattttcaagaaataaggaggcaaaaatgttcatatatgaattggaattatttgttttcttattaggcctatcctgaagccaaaggaaatgagatcggaattcctcgggggtaccgagctcgaattccctatagtgagtcgtat

SEQ ID NO: 251797 - DNA, 359 bp, Glycine max
gccatggatccttacaagctccggccatccagcgccttcaattctcccttctggactacaaattctggtgctcctgtttggaacaacaactcctctttaaccgttggagctagaggtccaattctgcttgaggattatcatcttgtggagaagcttgcaaactttgacagggaacgtatcccagaacgtgttgtccatgccaggggagctagtgcaaagggtttctttgaggtcacacatgacatttctcacctgacatgtgcagatttccttcgagcccctggagttcagacgcctgtaattgttcgtttctcaactgtcattcatgagcgtggtagccctgaaaccttgagggaccc

SEQ ID NO: 251798 - DNA, 365 bp, Glycine max
aaaaaggagcatgttgattatatagaaagtaaagggcaagaatcatttttgtttaccatgggtaaggacaccatcgctgacataataacctatataagaaatgctgacatgaataaaaaaggaatggttcaaataccatttactaacataacagaaaacattgtaaaaatacttttacgcgagggttttgttgaaaacgtcagaaaacatagagaaaacgacaaatattttttagttttaactctacggtatagaagaaatagaaaaggatcatataaaagttttttaaatttaaaacggatcagtacacccggtctacgaatatattctaattatcaacgaatccctcgaattttaaggggcat

SEQ ID NO: 251799 - DNA, 319 bp, Glycine max
tgattgatgttcatcccacgatgtgtcaatatcgggaaggatgcatgaagaacgggatgggcaaatgctgccctctgtattcgcatcctgaaagagagtatggatggagaattaactctaactctgaagccgtaataacataactgaagatgcctacaacatctgccgcgcgacctggtatgacgactgaaaaagtctcacactgagatgcacttactacttcgaataaaagaatgattcatgcaatatggacttattgactgcaactaagattgtgcatgatagttcacagtggcttttacaacctgcaattaatgtc

SEQ ID NO: 251800 - DNA, 404 bp, Glycine max
  unsure (1)..(404): unsure at all n locations
tgattaaggaacatcccaagttatgtcaatctcatgatgaatgcatgaagaaagggagtggcaaattttgcgctcgttatccgaatcctgagagtgagtatggatggtgtattgactctgattctgaagccctaaaaggcttcttgaagatgcctacaacatttgccgagtaacatggtatgcccaatgaaaaagttgcacacaaagatgcgtctactacttcgaataaatgtgtgctccatgcaataagtagtttttgtttccaactcaatttntaaatgatggttcatgtttgtttttgagcctacaagtaatttttcttttggatcttgatatccaagtattctttggatatatgaattattaattatagcctaatgtcagtgtatattggtctcttgtgt

SEQ ID NO: 251801 - DNA, 332 bp, Glycine max
tgattaatttcatcccaagttatgtcaatctcatgatgggtgcatgaagaaagggagtggcaaattctgcgctcgttatccgaatcctgaaagtgagtatggatggtgtattgactctgattctgaagccctaataggcttcttgaagatgcctacaacatttgccgagtaacatggtatgcccaatgaaaaagtcgcacacaaagatgctcttactacttcgaataaatgtgtgctccatgcaataagtactttttgattgcaactcaattggtaatgatggttcatgtttgtttttcagcctacaagtaatttttcttttggatctttat

SEQ ID NO: 251802 - DNA, 388 bp, Glycine max
gtggcttctttggtgttactaatacttcttctgaacaattgtgtagtgctttttccctcaaaatgtcgtgtcccaaatcagtaccccaatcttctttgtaaatgcagcctatgactcatggcaggtcagattattctctttctcaagaaacattctatttttggaatggtgttcatttggaattttggtcctacttaaaactgataatatgtttatattcattgatcaattgattggcttgtttataaggttaagcaacgttggttatatatgaggatttatacagaacaacataatatataatagactttagattttaactttgaattcccagtgaaaaatactatgattgcttaattatctcaatattgaaaattctgcttacata

SEQ ID NO: 251803 - DNA, 505 bp, Glycine max
  unsure (1)..(505): unsure at all n locations
nagttttgagagttattcacgaagagcactcattgtcatatcgactagcttgcttgcctgcaggtcgactctagaggatcccctcggggaattccaattccacattttcaagaaataaggaggcaaaaatggtcatatatgaattggaattagttgttttcttattaggcctatcctgaagccaaaggaaatgagatcggaattcctcggggaattccaattccacattttcaagaaataaggaggcaaaaatgttcatatatgaattggaattatttgttttcttattaggcctatcctgaagccaaaggaaatgagatcggaattcctcggggaattccaattccacattttcaagaaataaggaggcaaaaatgttcatatatgaattggaattatttgttttcttattaggcctatcctgaagccaaaggaaatgagatcggaattcctcggnggtaccgagctcgaattccctatagtgagtcgtattaaattcgtaatc

SEQ ID NO: 251804 - DNA, 398 bp, Glycine max
  unsure (1)..(398): unsure at all n locations
gcagagagtgcggtaggctcttccgagacccgaagcaggcatggggatcgatctcaaggccggaggtaagagcaaaaagaccaaaagaacagcacccaagtccaatgatatctatctcaagctcttggtcaagctttatcgcttccttgttcggagaactggcagcaacttcaatgctgttatacttaagagattgttcatgagcaaggttaacaaacccccattgtctttgtcaaggttgattaagtatacgaaggggaaggaagataagattgcagtggtggtggggtctataaccgatgatattcgtgtttatgaagttccaccattgaaagttacagcactcangtttacagagactggccgtgcaagaattgagaaaggcaggcggtgaatgc

SEQ ID NO: 251805 - DNA, 396 bp, Glycine max
tcggggaattccaattccacattttcaagaaataaggaggcaaaaatgttcatatatgaattggaattatttgttttcttattaggcctatcctgaagccaaaggaaatgagatcggaattcctcggggaattccaattccacattttcaagaaataaggaggcaaaaatgttcatatatgaattggaattatttgttttcttattaggcctatcctgaagccaaaggaaatgagatcggaattcctcggggaattccaattccacattttcaagaaataaggaggcaaaaatgttcatatatgaattggaattatttgttttcttattaggcctatcctgaagccaaaggaaatgagatcggaattcctcgggggtaccgagctcgaattcccta

SEQ ID NO: 251806 - DNA, 376 bp, Glycine max
tcgggaattccaattccacattttcaagaaataaggaggcaaaaatggtcatatatgaattggaagtatgtgttttcttattaggcctatcctgaagccaaaggaaatgagatcggaattcctcggggaattccaattccacattttcaagaaataaggaggcaaaaatgttcatatatgaattggaattatttgttttcttattaggcctatcctgaagccaaaggaaatgagatcggaattcctcggggaattccaattccacattttcaagaaataaggaggcaaaaatgttcatatatgaattggaattatttgttttcttattaggcctatcctgaagccaaaggaaatgagatcggaattcctcgggggt

SEQ ID NO: 251807 - DNA, 365 bp, Glycine max
  unsure (1)..(365): unsure at all n locations
cgactaacgttcattccaagatatgtcaatctcatgatggatgcgttaanacagggagtggcaaattttgcagctcgttatccgaatcctgagagtgagtatggatggtgtattgactctgattctgaagccctaaaaggcttcttgaagatgcctacaacatttgccgagtaacatggtatgcccaatgaaaaagttgcacacatagatgcgtctactacttcgaataaatgtgtgctccatgcaatacgtagtcacagtttccaactcaattggtaatgatggttcatgattgtatttgagcctacaagtaatttttcttttggaactcgatatccaagtgttctttggatatatgaattatt

SEQ ID NO: 251808 - DNA, 390 bp, Glycine max
tgattaaggaacatcccaagttatgtcaatctcatgatgaatgcatgaagaaagggagtggcaaattttgcgctcgttatccgaatcctgagagtgagtatggatggtgtattgactctgattctgaagccctaaaaggcttcttgaagatgcctacaacatttgccgagtaacatggtatgcccaatgaaaaagttgcacacaaagatgcgtctactacttcgaataaatgtgtgctccatgcaataagtagtttttgtttccaactcagttggtaatgatggttcatgtttgtttttgagcctacaagtaatttttcttttggatcttgatatccaagtattctttggatatatgaattattaattatagcctaatgtcagtgtatat

SEQ ID NO: 251809 - DNA, 384 bp, Glycine max
tcggtgaattccaattacacattttcaagaaataaggaggctaaaatgggcatgtatgaattggaatcagttgttttcttattaagcctatcctgaagccaaaggaaatgagatcggaattcctcggggaattccaattccacattttcaagaaataaggaggcataaatgttcatatatgaattggaattatctgttatcttattaggcctatcctgaagccaaaggaaatgagatcggaattcctcggggaattccaattccacattttcaagaaataaggaggcaaaaatgttcatatatgaattggaattattcgttttcttattaggcctatcctgaagccaaaggaaatgagatcggaattcctcgggggtaccgagc

SEQ ID NO: 251810 - DNA, 340 bp, Glycine max
tctatgacgtccattgcacccttccttaacctggaatttcggctcgaggatcaacttgctcttaaagctccacttggccaaaacacggttggtcttagaggtcccaagaatgcgcgtgaggctgtcaagcactttgtaccagctcctggtgtgccccatatccacaccaagccctatgtccgtgcaaagggaaggaaatttgtgcgggccatatgaagaaggaatagctgaggctttagagtttgagtcctggagctcaaacatgtacgacttttccttgtaacctatgatcattatgtattgttttcttgcaactcggatcaatctgataattcaagtt

SEQ ID NO: 251811 - DNA, 392 bp, Glycine max
  unsure (1)..(392): unsure at all n locations
ctttctctctcttctttttactctctctctgtctctctgtacgctttctcgttcgagatccctcaagggatccactaactgaaggagaaatggggttgacattcaccaagcttttcagccggcttttcgccaagaaggaaatgcgaattctgatggtgggtctcgatgcagctggtaagaccaccatcctgtacaagctcaaacttggagagatcgttaccacaattcccaccattgggttcaatgtggagactgtggaatacaagaacattagtttcactgtctgngatgttggtggccaggacaagattcgtcccttgtggaggcactacttccaaacacacagggtctcaattttgtggttgaccagcacgacagggacagagttgttg

SEQ ID NO: 251812 - DNA, 366 bp, Glycine max
tcggggaattccaattccacattttcaagaaataaggaggcaaaaatgttcatatatgaattggaattatttgttttcttattaggcctatcctgaagccaaaggaaatgagatcggaattcctcggggaattccaattccacattttcaagaaataaggaggcaaaaatgttcatatatgaattggaattatttgttttcttattaggcctatcctgaagccaaaggaaatgagatcggaattcctcggggaattccaattccacattttcaagaaataaggaggcaaaaatgttcatatatgaattggaattatttgttttcttattaggcctatcctgaagccaaaggaaatgagatcggaat

SEQ ID NO: 251813 - DNA, 393 bp, Glycine max
tcggggaattccaattccacattttcaagaaataaggaggcagaaatggtcatatatgaattggaattatttgttttcttattaggcctatcctgaagccaaaggaaatgagatcggaattcctcggggaattccaattccacattttcaagaaataaggaggcaaaaatgttcatatatgaattggaattatttgttttcttattaggcctatcctgaagccaaaggaaatgagatcggaattcctcggggaattccaattccacattttcaagaaataaggaggcaaaaatgttcatatatgaattggaattatttgttttcttattaggcctatcctgaaaccaaaggaaatgagatcggaattcctcgggggtaccgagctcgatttcc

SEQ ID NO: 251814 - DNA, 372 bp, Glycine max
atcccgtcggtgaattccaattgctcattttcaagaaataaggaggcaaaaatagtcatgtatgaattggaagtaggtgttttcttattaagcctatcctgaagccaaaggaaatgagatcggaattcctcggggaattccaattccacattttcaagaaataaggaggcaaaaatgttcatatatgaattggaattatttgttttcttattaggcctatcctgaagccaaaggaaatgagatcggaattcctcggggaattccaattccacattttcaagaaataaggaggcaaaaatgttcatatatgaattggaattatttgttttcttattaggcctatcctgaagccaaaagaaatgagatcggaat

SEQ ID NO: 251815 - DNA, 351 bp, Glycine max
gaagaagattaagattaaagtgtgatttgatgattatgagttgaagtgtgagaggtgaagagatgaacgttagccatgcttcggttcacccagttgaagaagcatcagctactgaaggtggtggtgacttacacgtttacgctacttagggaaggatgaatgatgatatatgaattgctatcatttgctgtcttattaggcctatcctgaagccaaatgaaatgagatctgaattcctcggggaattccaattccacatcttcaagaaataaggaggcaaaaatgttcatatatgaattggaattatttgttatcttattaggcctatcctgaatgcctaggaaatgagat

SEQ ID NO: 251816 - DNA, 275 bp, Glycine max
tcggtgaattccattgcctcattttcaagaaataaggagtcaagaatggtcatatatgaatgggggttatttgttttcttattaggcctatcctgaacccaaaggaaatgagatcggaattcctcggcgaattccaattccacattttcaagaaataaggaggcaaaaatgttcatatatgaattgtaattatatgctttcttattaggcctatcctgaatccaatggaaatgagatcggaattccttctgaaattccaattccacattttcaag

SEQ ID NO: 251817 - DNA, 414 bp, Glycine max
ccccttccttagcctgggattccggttcagggaacccattgccggcctttccaggaaggaaaaccaaaggggaggttccgtctttccatcatgaacgctcttcccattctcctcttcttcctcttcgtttctgcattagtttctgcgaagaaaactggtgatgtgacggagctgcaaattggcgtgaagcataaaccagtatcatgtgaagttcaggcacacaaaggtgacagagtcaaagtacactatcggggaaaactcactgatggaactgttttcgattctagctttgaaagaaataatccaattgaatttgagcttggtactggtcaagtgatcaaaggttgggaccagggattattgggaatgtgtcttggtgagaagcggaagctgaaaataccatcaaaacttggc

SEQ ID NO: 251818 - DNA, 359 bp, Glycine max
tgaccgcagtatgtgctgtgggactcctccagattgtgagtggaaggcacaagcaggtaacatatgtgttgcatcctttgactggagctgtagtggaatctgcaagtcggtagagaagatcaaatatgtgcactcaaagtgtggtgaaggggatggagctgtttggagtgccttagtttaggtttgatgggttcaacagaaagccaactaactaattcacgtgttggtatgcatacctcccagctttttgtttttgggtgtgggaggatatgatgatatatttttggttcaactatagtctatacttggtattatgtgacatagacctctcttgttacatgtatctctttatatttttg

SEQ ID NO: 251819 - DNA, 420 bp, Glycine max
gtaacctgggatttcggttcgaggtgaggaagtggatttctggtgttggtgttgacagtggggggaagaagcttgtgaactcaaaagatggacctccaacctttgagcagcccaagatgactctggagaagctcttgctgtatggtaacatgcttgtccaagaacaagagaatgtcaagagagtccaattggctgacaagtacttgaacgaggctgctcttggaaatgctaacgaggatgctattcagaggggaactttcttccagtcttgaattggaggcaaagcaaacttggcaagtaaatatttctgttcgtgaaggttgttgtactaatccaagtgctagaagttgtgatggaacttgcgtgtaacattcttagcattctcaatgtcttaagtgcaaagagaagatgctaagtttg

SEQ ID NO: 251820 - DNA, 367 bp, Glycine max
gtgaggaataggatttctggtgttggtgttgacagtgggggggataagcttgtgagctgaaaagatggacctccaacctttgagcagcccaagatgactctggagaagctcttgctgtatggtaacatgcttgtccaagaacaagagaatgtcaagagagtccaattggctgacaagtacttgaacgaggctgctcttggaaatgctaacgaggatgctattcagaggggaactttcttccagtcttgaattggaggcaaagcaaacttggcaagtaaatatttctgttcgtgaaggttgttgtactaatccaagtgctagaagttgtgatggaacttgcgtgtaacattcttagcattctcaatgt

SEQ ID NO: 251821 - DNA, 510 bp, Glycine max
  unsure (1)..(510): unsure at all n locations
agtttgtagagtttgtgttttcagtntctcctacagcattgcgtcatgcttgcatgcctgcatgtcgactctagagggatcccctcggggaaattccaaatccacattttcaagaaataaggaggcaaaaatgtgcatgtatgaattggaattatgtgtgttcttattaggcctatcctgaagccaaaggaaatgagatcggaattcctcggggaattccaattccacattttcaagaaataaggaggcaaaaatgttcatatatgaattggaattatttgttttcttattaggcctatcctgaagccaaaggaaatgagatcggaattcctcggggaattccaattccacattttcaagaaataaggaggcaaaaatgttcatatatgaattggaattatttgttttcttattaggcctatcctgaagccaaaggaaatgagatcggaattcctcgggggtaccgagctcgaattccctatagtgagtcgtattaaattcgtaatcatg

SEQ ID NO: 251822 - DNA, 310 bp, Glycine max
tcggggaattccaattcctcattttcaagaaataaggaggcaggaatggtcatatatgaattggaattatctgttttcttattaggcctatcctgaagccaaaggaaatgagatcggaattcctcggggaattccaattccacattttcaagaaataaggaggcaaaaatgttcatatatgaattggaattatttgctttcttattaggcctatcctgaagccaaaggacatgagatcggaattcctcggggaattccaattccacattttcaagatataaggaggcacatatgttcatatatgatttgc

SEQ ID NO: 251823 - DNA, 373 bp, Glycine max
gcctctactatactgcttcaccttctgctctagaaaatgcagtgctgaaacatggcttcggctactctctctgtagccaaaccagcccttcaggcaaatgggaaaggcttctctgaattctctggcctccgaagctcatcaggcttccttcccttttctagaaaatcttcagaggatttccattctgtcattgccttccagacctatgcagttggaagcagtggaggatacaagaagggtgtgacagaagcaaaactgaaggttgccataaacgggtttggaaggattggaaggaacttcttgaggtgctggcacggtcgcaaagactcccctcttgatgtcattgccatcaacgacaccggcggcgtgaaac

SEQ ID NO: 251824 - DNA, 372 bp, Glycine max
agcttgctttcatcatcaagaaatattgacgcaggggtgggcatatatgaatgggggttatttgttttcttattacgcctatcctgaagccaaaggaaatgagatcggaattcctcggggaattccaattccacattttcaagaaataaggaggcaaaaatgttcatatatgaattggaattatttgttttcttattaggcctatcctgaagccaaaggaaatgagatcggaattcctcggggaattccaattccacattttcaagaaataaggaggcaaaaatgttcatatatgaattggaattatttgttttcttattaggcctatcctgaagccaaaggaaatgagatcggaattcctcgggggtaccg

SEQ ID NO: 251825 - DNA, 376 bp, Glycine max
tgctcgtccactctcaagacctctctccctctctgctcgccttctctcacaggcccatttctagaaccaccttctctctctatcctctccttttgaagccctccaaatggctccacatagagcccaaatccaggacttgccatgccctcgtcgccgctttgtctgcagaggtccaagtgcccgaaactttcgacgacacggatgaggacgactgtgctgatggctccaccgccaccaacaccgtccccaccaccaagcctaagaaaggcaaggccgcattgcctctcaagagggacaggacgagatctaagaggttcttggaaattcaacaattgagggagcgtaagaaagagtatgacttgaagacagcaatatc

SEQ ID NO: 251826 - DNA, 496 bp, Glycine max
  unsure (1)..(496): unsure at all n locations
aggaggtgttctgataaacgacgcggacagtactcgtcgagcgactagcttgcatgcctgcaggtcgactctagaggatcccctcggggaattccaattccacattttcaagaaataaggaggcaaaaatgttcatatatgaattggaatgatttgttttcttattaggcctatcctgaagccaaaggaaatgagatcggaattcctcggggaattccaattccacattttcaagaaataaggaggcaaaaatgttcatatatgaattggaattatttgttttcttattaggcctatcctgaagccaaaggaaatgagatcggaattcctcggggaattccaattccacattttcaagaaataaggaggcaaaaatgttcatatatgaattggaattatttgttttcttattaggcctatcctgaagccaaaggaaatgagatcggaattcctcggnggtaccgagctcgaattccctatagtgagtcgtattaan

SEQ ID NO: 251827 - DNA, 370 bp, Glycine max
tcggggaattccaattccacattttcaagaaataaggaggcaaaaatgttcatatatgaattggaattatttgttttcttattaggcctatcctgaagccaaaggaaatgagatcggaattcctcggggaattccaattccacattttcaagaaataaggaggcaaaaatgttcatatatgaattggaattatttgttttcttattaggcctatcctgaagccaaaggaaatgagatcggaattcctcggggaattccaattccacattttcaagaaataaggaggcaaaaatgttcatatatgaattggaattatttgttttcttattaggcctatcctgaagccaaaggaaatgagatcggaattcct

SEQ ID NO: 251828 - DNA, 307 bp, Glycine max
aaacactcttatcacaaagcacacagcaaagctcattcgggagcggaaaaatggcagcagcgttttacatggcatctgttattcgcatcactggctggcaaggctcgaaagctagtcccatcagccttagtaggagaaagaggttagcatgagataagaccgtgatcaaacacgtctacaaatgacgccgatgcattagtgcatacagagttacacagctgtggcatactgtttatccagccggatagtctaatcgatcaggccagtgaccagtcgagcgagactattgcacatcctcgctttacag

SEQ ID NO: 251829 - DNA, 398 bp, Glycine max
tcggggaattccaattccacattttcaagaaataaggaggcaaaaatgtgtcatatatgaattggaattatttgttttcttattaggcctatcctgaagccaaaggaaatgagatcggaattcctcggggaattccaattccacattttcaagaaataaggaggcaaaaatgttcatatatgaattggaattatttgttttcttattaggcctatcctgaagccaaaggaaatgagatcggaattcctcggggaattccaattccacattttcaagaaataaggaggcaaaaatgttcatatatgaattggaattatttgttttcttattaggcctatcctgaagccaaaggaaatgagatcggaattcctcgggggtaccgagctcgaattccctat

SEQ ID NO: 251830 - DNA, 388 bp, Glycine max
  unsure (1)..(388): unsure at all n locations
tcggggaattccaattccacattttcaaganataaggaggcaaaaatgttcatatatgaattggaattatttgttttcttattaggcctatcctgaagccaaaggaaatgagatcggaattcctcggggaattccaattccacattttcaagaaataaggaggcaaaaatgttcatatatgaattggaattatttgttttcttattaggcctatcctgaagccaaaggaaatgagatcggaattcctcggggaattccaattccacattttcaagaaataaggaggcaaaaatgttcatatatgaattggaattatttgttttcttattaggcctatcctgaagccaaaggaaatgagatcggaattcctcgggggtaccgagctcga

SEQ ID NO: 251831 - DNA, 232 bp, Glycine max
  unsure (1)..(232): unsure at all n locations
aaaaagaatggttcaatccatttactaacatacagaaaacattgtaaaatacttttacgcgaggttttgttgaaaactcgaaaacattagaaaacgacaaatattnttagttttaactctacggtatagaagaaatagaaaaggatcatataaaagttttaaatttaaaacggatcgtacacccggttacgaattattctaattataacgaatccctcgaattttaggggca

SEQ ID NO: 251832 - DNA, 336 bp, Glycine max
aaggaaacatggacagtcctgctaatgaaaatgaagaaaaggagcctgaggacaaggagatgacactggaagagtatgagaaggtgctggaagagaaaaggaaggccctgcaggctcaaaaaactgaagcaagaaaggtggacatcaaggaatttgcatccatgcagccactgtcaaacaagaaagaaaatgatgagatctttattaaattgggatctgacaaggataagcgcaaagatgctttggagaaggaggagaaatccaagaagtctgtcaacatcactgagtttctgaagccagctgaaggggaaaggtactaccctggtgggcgtggtc

SEQ ID NO: 251833 - DNA, 405 bp, Glycine max
cttgttttttgcaaattcgcaacccacacagcaagggaaggtgcgagtgagtgagtatggcgtctccattatcagctcaattggttcaatgtcagaactcacttccacctcttcagggtaattttagccaagatgtgtctaaggttcaaaggtcgcgtgtggtatgttacggtaccagatcaccgcttggttattatggtaaagcattgacatcaagatcacataacgccctgaggttttctgtcacgcgacaatctgaagcacggtcaattggatataggagaatgacatgtgtcaatgctgcagacaatgttgtagagcttcaagccaaggtgacaaccaagtgtttctttgatgtaaaaattgggggtgaacctgtgggccggattgttttggccctatttg

SEQ ID NO: 251834 - DNA, 304 bp, Glycine max
cttaaagttttcgaataggcaacgcacacactagatgggggggctattgattatgagggtgctatggcttctaaactcacaattgctaataacgtaactgattaacacctagatatgatacttaaatccagtacctttaatgagttcaaagctcacaatgaggattggacgaaaccctatgatgctttctgtatcatgctgaactatttacatacatatcatctcactcaatgaggtcatctggctcactactcacaagatcaccgtcaaaaacttgtatccaaatacagtctgcattatcaga

SEQ ID NO: 251835 - DNA, 403 bp, Glycine max
  unsure (1)..(403): unsure at all n locations
cagaaagagattgaaaaggcaaagcagcaactagatgggaaggatgttgattatgaggctacaatggctactaaactctcaattgctaagaaagtttttgctcaagagaaagatttgatacttaattcaagttcctttaaggagttcttttctgagaatgagggttggttgaaaccctatgctgctttctgtttcctgcgggacttctttgaaacatcagatcgcactcaatggggtcattttgctcattactcagaagataagctagagaaacttgtatccaaggacagcctgcattatgagataatttgcttccactactatgttcaataccatttacatttacaattatcagaagctgcagaatatgcaagaaagaanggagtgatactaaagggagatc

SEQ ID NO: 251836 - DNA, 292 bp, Glycine max
gaatcggctcgagccagtccacgaaaaggcttccaaaacccacggagaggaaaatcaagcgacattggtcccttgaaacttcgagatcggaaaacctctcggtaggggcaaattcggtagagattacgtcgccagagaagataagagcatatttgttgaggcgttgaaggttatatttaaggaacaaattgataagttcagagttcatcaccaactgatgagagagatgggagatcagaccagtctacggcacgcaaacatcctgcgtctttacggttggttgcatgatgct

SEQ ID NO: 251837 - DNA, 361 bp, Glycine max
cgcatttccacgaaaatggcttcccaaaacccagcggaggaagaaaattcaaagcgacattggtcccttgaagacttcgagatcggaaaacctctcggtaggggcaaattcggtagagtttacgtcgccagagaagttaagagcaaatttgttgtggcgttgaaggttatatttaaggaacaaattgataagtacagagttcatcaccaactgaggagagagatggagatacagaccagtctccggcacgcaaacatcctgcgtctttacggttggtttcatgatgctgaccgtgttttcttgattcttgagtatgctcataagggagagctttacaaggagctgagaaaaaagggtcatc

SEQ ID NO: 251838 - DNA, 516 bp, Glycine max
  unsure (1)..(516): unsure at all n locations
ggggagagnctntncgtcncatgatagaagcnatacagtaactactcggagagacaagcttgcatgcctgcaggtcgactctagaggatcccctcggggaattccaattccacattttcaagaaataaggaggcaaaaatgttcatatatgaattggaattatttgttttcttattaggcctatcctgaagccaaaggaaatgagatcggaattcctcggggaattccaattccacattttcaagaaataaggaggcaaaaatgttcatatatgaattggaattatttgttttcttattaggcctatcctgaagccaaaggaaatgagatcggaattcctcggggaattccaattccacattttcaagaaataaggaggcaaaaatgttcatatatgaattggaattatttgttttcttattaagcctatcctgaagccaaaagaaatgagatcggaattcctcggnggtaccgagctcgaattccctatagtgagtcgtattaaattcgtaatca

SEQ ID NO: 251839 - DNA, 348 bp, Glycine max
cgcatttccatttaaatggcttcccaaaacccagcggagggggaaaattcaaagcgacattggtcccttgaagacttcgagatcggaaaacctctcggtaggggcaaattcggtagagtttacgtcgccagagaagttaagagcaaatttgttgtggcgttgaaggttatatttaaggaacaaattgataagtacagagttcatcaccaactgaggagagagatggagatacagaccagtctccggcacgcaaacatcctgcgtctttacggttggtttcatgatgctgaccgtgttttcttgattcttgagtatgctcataaaggagagcttttacaaggagcttag

SEQ ID NO: 251840 - DNA, 408 bp, Glycine max
cagctggagtaactggcagacccaatgtcgattggtgtgaatctcataagacggaaaccattcgcaccaacgttgctgggactttaacattggctgatgtcagcagagagcatggactcttgatgataaattatgctactgggtgcatatttgagtatgatgcagctcatccagagggttctggcattggctttaaggaggaagacagacccaacttctttggttctttctattccaaaactaaggctatggttgaggagctcttaaaagaatatgacaatgtgtgcaccctcagggttcgcatgccaatttcatctgacttgagcaatccacgcaatttcatcaccaagatttctcgttataacaaagtggtcaacattccaaacagcatgacccatttggatgaac

SEQ ID NO: 251841 - DNA, 406 bp, Glycine max
cgcatttactttcagacccaatgtcgattgctgtgagacgggtaaaaccgaagccacattgacccacgttgctcttactttaacattggctgatgtcagcagacagcatggactcttgatgataaattatgctactgggagcataatttgattgtgctgcaaatgatatatatagtgatcgcattgacttttacgaggaagacagacccaacttctttggttctttctattccaaaactaaggctatggttgaggagctcttaaaagaatatgacaatgtgtgcaccctcagggttcgcatgccaatttcatctgacttgatcaattcacgcaatttcatcaccaagatttctcgttataacatagtggtcaacattccatacagcatgaccattgttgatgaact

SEQ ID NO: 251842 - DNA, 498 bp, Glycine max
  unsure (1)..(498): unsure at all n locations
naggggttagtgttctgataaagaaagggacgtacacagtactactcttagagacaagcttgcatgcctgcaggtcgactctagaggatcccctcggggaattccaattccacattttcaagaaataaggaggcaaaaatgttcatatatgaattggaattatttgttttcttattaggcctatcctgaagccaaaggaaatgagatcggaattcctcggggaattccaattccacattttcaagaaataaggaggcaaaaatgttcatatatgaattggaattatttgttttcttattaggcctatcctgaagccaaaggaaatgagatcggaattcctcggggaattccaattccacattttcaagaaataaggaggcaaaaatgttcatatatgaattggaattatttgttttcttattaggcctatcctgaagccaaaggaaatgagatcggaattcctcggnggtaccgagctcgaattccctatagtgagtc

SEQ ID NO: 251843 - DNA, 394 bp, Glycine max
atactacacaattcacaatcccaacacccattgtggagaatcagaatctaactagccaatagccatgaagagacagagagagaacgaagtaacaacgttggaaagctgggacatgcaaatttgttcaacttcaatcacacccgacacaagtgtttccagttccaccatatctccggaagatgtatttgagtgcaaaacgtgcaaccgcaagttcaactcttttcaagcgctgggtggccatagggcttgtcacaacaagagggtgaagatggaaggtgaagaacaacaactcaaaacaagggcaaaatatctgggtttgggaaaacacagtgagcccaaaatgcataattgctccatttgtggtcaaggtttctctctgggccaggccttggga

SEQ ID NO: 251844 - DNA, 396 bp, Glycine max
ctgaacaccccttcatggtacactgctggagagttggagtacttcacagacaccaccacactcttcatagttgagctctttttcatcggttgggccgagggtagaaggtgggctgacatcatcaagccaggctgtgtcaacactgaccccatctttcccaacaacaagctcacaggaactgatgttgggtacccaggtgggctttggtttgacccacttggctggggaagtggttctcctgagaagatcaaggagttgagaacaaaggagatcaagaatgggaggttggccatgttggctgtgatgggggcatggttccagcacatttacactggcactggtcctattgacaacctctttgctcaccttgcagatcctggccatgctactattttt

SEQ ID NO: 251845 - DNA, 513 bp, Glycine max
  unsure (1)..(513): unsure at all n locations
cgggaagtgccttgtgtangcaaacgttannacnacgnacggactatacatgcttgcatgcctgcacggcgactctagaggatcccctcggtgaattccaattccactattttcaagaaataaggaggcaaaaatggtgatgtatgaattggaattatttgttttcttattaggcctatcctgaagccaaaggaaatgagatcggaattcctcggggaattccaattccacattttcaagaaataaggaggcaaaaatgttcatatatgaattggaattatttgttttcttattaggcctatcctgaagccaaaggaaatgagatcggaattcctcggggaattccaattccacattttcaagaaataacgaggcaaaaatgttcatatatgaattggaattatttgtcttcttattaggcctatcctgaagccaaaggaaatgagatcggaattcctcgggggtaccgagctcgaattccctatagtgagtcgtattaaattcgcaatcatt

SEQ ID NO: 251846 - DNA, 364 bp, Glycine max
tcggggaattccaattccacattttcaagaaataaggaggcaaaaatgttcatatatgaattggaattatttgttttcttattaggcctatcctgaagccaaaggaaatgagatcggaattcctcggggaattccaattccacattttcaagaaataaggaggcaaaaatgttcatatatgaattggaattatttgttttcttattaggcctatcctgaagccaaaggaaatgagatcggaattcctcggggaattccaattccacattttcaagagataacgacgcaaatatgttcatatatgaattggaattatctgttatcttattaggcctatcctgaagccaaaggaaatgagatcgga

SEQ ID NO: 251847 - DNA, 328 bp, Glycine max
tcggggaattccaattccacattttcaagaattaaggaggcaaaaatgtgcagttttgattgggaataattggtttcctaattaggctattcttgaacccaagggaatgggatcgggatttcttggggaattccaatttcacatatttaaaaaataaggaggcgaaaatgttcatatatgaattgggattatttgtgttcttattatgcctatactgaaacccaaggaaatgagatcggaatttctcggggaattccaattccacattttcaagaaataaagaggcgaaaatgtgcatatatgaattgggattatttgggttcttatt

SEQ ID NO: 251848 - DNA, 371 bp, Glycine max
atggatttgaccctctgggactttcggaccctgaaggaacaggagggttcattgagccgaaatggctagcatatggtgagataatcaatggtcgttatgcaatgttgggtgcagttggtgcaatagcacctgaaattctaggcaaggctggtctgatccctcaggagacagcactcccatggttcagaaccggtgtgttcccacctgcaggaacctacaactactgggcagactcctacacactgttcgtgtttgagatggcactgatgggatttgcagagcacagaagattccaagactgggccaaaccaggctctatgggcaaacaatacttcctaggactagagaagggtcttggaggttctggtgag

SEQ ID NO: 251849 - DNA, 410 bp, Glycine max
gtgaattagctatgaacaatgatgagctacatgtggttatgttcccattccttgcatttggccacattagtccatttgttcagctctccaacaagttgttctctcatggtgttcatgtcactttcttgtcagctgcatccaacattcccagaatcagatcaactcttaatctcaatccagccatcaatgttatctcactaaagttcccaaatggtataaccaacactgctgaattgccacctcacttagctggaaatctcatacacgcccttgacctcactcaagatcaggtgaagtcccttttgttggaactcaaaccccactatgttttctttgactttgcacaacattggctcccaaaattagcttctgaagttggcatcaagtctgttcatttctcagtctactct

SEQ ID NO: 251850 - DNA, 402 bp, Glycine max
ggtgcactgatggccagagtatatgatgatgaagtgaggaagtggatttctggtgttggtgttgacagtgttgggaagaagcttgtgaactcaaaagatggacctccaacctttgagcagcccaagatgactctggagaagctcttgctgtatggtaacatgcttgtccaagaacaagagaatgtcaagagagtccaattggctgacaagtacttgaacgaggctgctcttggaaatgctaacgaggatgctattcagaggggaactttcttccagtcttgaattggaggcaaagcaaacttggcaagtaaatatttctgttcgtgaaggttgttgtactaatccaagtgctagaagttgtgatggaacttgcgtgtaacattcttagcattctcaatgtct

SEQ ID NO: 251851 - DNA, 512 bp, Glycine max
  unsure (1)..(512): unsure at all n locations
ngggtgctgctctctgtcgcacgtaccgaaatgctcgtcatccactagacaagctcgcatgcctgcaggtcgactctagaggatcccctcggggaattccaattccacattttcaagaaataaggaggcaaaaatgttcatatatgaattggaattatttgttttcttattaggcctatcctgaagccaaaggaaatgagatcggaattcctcggggaattccaattccacattttcaagaaataaggaggcaaaaatgttcatatatgaattggaattatttgttttcttattaggcctatcctgaagccaaaggaaatgagatcggaattcctcggggaattccaattccacattttcaagaaataaggaggcaaaaatgttcatatatgaattggaattatttgttttcttattaggcctatcctgaagccaaaggaaatgagatcggaattcctcgggggtaccgagctcgaattccctatagtgagtcgtattaaattcgtaatcat

SEQ ID NO: 251852 - DNA, 380 bp, Glycine max
gggtactggtatctaaaaaatgggttctaaaactaatgctgtcgggccatagagcacgaaggccgctgtcaatatttgctgtgcttggtctttgctgtttcttttatcttttgtgagcatggcaaataagtggatctgtgtagggtgattaccttgcattgaaagttaataacctgatgactgactgcactgttttacccaatttgagttttgaatctcatcacaatgatgtagaaattgtcgaacctgctgagccaaaagctaaagagttcaagccgtgtgatgtgaaatatactgattatacaccttgccaagagcaagaccgagcaatgacatttcccagagagaatatgatctatagagaaaggcattgtcccgct

SEQ ID NO: 251853 - DNA, 387 bp, Glycine max
gtcccaaagagctaacaagagattcaagaccggcatggctaatgaagaggaacagaaaaaccacctcttcggcatcaaagatctcggtcacaagactctccttcagagtgatgcactctatcagtatatacttgaaaccagtgtctatccaagagagcacgagtgcttgaaagagatacgcaagatgactgcaaaacacccactgaacatcatggcaacaccagcagacgaaggacaacttctgagcatgcttgttaagctcacgaattcaaagaacgccttggaaattggtgtattcactggttactctctgctctccactgccctggctcttccccctgatggaaagatcttggctttggatgtgaatcgcgaatactatgagtt

SEQ ID NO: 251854 - DNA, 404 bp, Glycine max
tttctgagcagccaaacactctctctctgtctctcgaaaatgctcagtgagcagagagagcctgaatgatgtccaggtaagcgtgtgtcaactaacggcttgtgagagacatcgaaggtaaccacctcactcacgctgctatcatcggccaagacggcagcgtttgggctcagagtaccgacttccctcagttcaaacctgaggagataactgccatcatgaatgactttaatgagcctggatcacttgctccaactggattgtatctcggtggcaccaaatatatggtcatccagggtgaacccggtgctgtcattcgagggaagaagggtcctggtggtgttactgtgaagaagaccggggcgggcctgaacaattgcatttatgatgaaccaatgactcca

SEQ ID NO: 251855 - DNA, 409 bp, Glycine max
gttggcgtatgttgaagaagaagaagagagagagagagagagagagagagagagagagagagagagagagagagagaagggtaaggtaaccctagagtggtgaatcgaattcgaaacgatggaaagtgtttctcgaagaagaggtggaggcattttcgaaagcctctacaaggtcgttatgcgtcgcaactctgtctatgttacctttgtcatcgctggcgccttccttggagaacgggctgttgattatggagtccacaagctctgggaggcaaataatgttgggaaacgatatgaagacattcctgtgctagggcaaaggccgtcagattagtgaccagcttgttagccattttgaagttttattattttcataaagatttgaagtgattaagagctggaagcagtt

SEQ ID NO: 251856 - DNA, 503 bp, Glycine max
  unsure (1)..(503): unsure at all n locations
ngaggagagggagtgntgtcactgatcacgacattatcagcattactctgagagacaagctagcatgcctgcacgtctactctagaggatcctctcggtgaattccaattccacattttcaagaaataaggaggcaaaaatgttcatatatgaattggaattatttgttttcttattaggcctatcctgaagccaaaggaaatgagatcggaattcctcggggaattccaattccacattttcaagaaataaggaggcaaaaatgttcatatatgaattggaattatttgttttcttattaggcctatcctgaagccaaaggaaatgagatcggaattcctcggggaattccaattccacattttcaagaaataaggaggcaaaaatgttcatatatgaattggaattatttgttttcttattaggcctatcctgaagccaaaggaaatgagatcggaattcctcgggggtaccgagctcgaattccctatagtgagtcgtat

SEQ ID NO: 251857 - DNA, 375 bp, Glycine max
tggtgacaatggatttgaccctctgggactagctgaggacccagagaacttgaggtggtacgttcaagccgagcttgtgaatggacgttgggccatgttgggtgttgcaggaatgctacttcctgaggttttcaccaagattggaatcatcaatgcccctcaatggtatgatgctgggaaatcggagtactttgcttcatcgtcgaccctctttgtgatcgagttcatcttgttccactacgtctagatccggagatggcaggacatcaagaaccctggctctgtcaaccaagaccccatcttcaagcaatacagcttgccccatcatgagtgtggataccctggtagtgtgtttaaccccttgaactttgcacc

SEQ ID NO: 251858 - DNA, 298 bp, Glycine max
gtacatcatagaaggtagcacagtcagcgtaatgggagttgttcaaagaaacgacaatgtgcttatgattgtccctcctcctgagcctttgactaccggatgccaatgggctaaatgtatatttccagctagccttgagggtattattttgagatgtgaggatacatcaaagattgatgtcattccagtgtagttgcactctccagacacctcttaggtattcttctttaaagaagtattttcttacctcatttaaaaaaatggtggttgatgtttgtatattgtaagtgttattggt

SEQ ID NO: 251859 - DNA, 410 bp, Glycine max
tgaatctctcagcccctcaaaccttccgctctaaggaaatctccaagagcaatgttgttgacgatatggtcaacagcaacgccatcctctatgagcccggtgaacatccagaccatgtggttgtcattaagtacgtgccttatgtaggggacagcaagagggccatggatgagtacacttctgagatattcatgggtggaaagaacacaattgtgttgcacaacacatgtgaggattcactgttagctgctcctattatcttggacttggtccttcttgctgagctcagcactcgaatcgagtttaaagctgaaaatgagggaaaattccactcattccacccagttgcgaccatccttagttacctgaccaaggcccctctggttccaccgggtacaccagtggtgaat

SEQ ID NO: 251860 - DNA, 397 bp, Glycine max
gggcgacgcaccggcattgccagagactcttaaaaattacaacaagctgttgtctcttggcttcaagattgtattcttgtcaggaagatatcttgacaaaatggccgtaacagaagcaaacctaaagaaggctggcttccacacatgggagcagttaattctcaaggatccacatcttatcactccaaatgcactttcatacaaatcagcaatgagagagaatctgttgaggcagggatacagaattgttggaatcattggagaccaatggagcgatctgcttggagaccacagaggcgaaagcaggacctttaagcttcctaatcccatgtactacattgagtagtaccttcacctctctcaacaatctagctagaagttgctcctatctatatgt

SEQ ID NO: 251861 - DNA, 512 bp, Glycine max
  unsure (1)..(512): unsure at all n locations
gggagggcctttgtcttatagagggaggtgaaaagtatctactcggagagacaagcttgcatgcctgcaggtcgactctagaggatcccctcggggaattccaattccacattttcaagaaataaggaggcaaaaatgttcatatatgaattggaattatttgttttcttattaggcctatcctgaagccaaaggaaatgagatcggaattcctcggggaattccaattccacattttcaagaaataaggaggcaaaaatgttcatatatgaattggaattatttgttttcttattaggcctatcctgaagccaaaggaaatgagatcggaattcctcggggaattccaattccacattttcaagaaataaggaggcaaaaatgttcatatatgaattggaattatttgttttcttattaggcctatcctgaagccaaaggaaatgagatcggaattcctcgggggtaccgagctcgaattccctatagtgagtcgtattaaattcgtaatn

SEQ ID NO: 251862 - DNA, 520 bp, Glycine max
  unsure (1)..(520): unsure at all n locations
agtttnntttagatggtctttagactcgatatgatgatcgtcacactcatagaagagctatgacgtcgcatgcacgcgtacgtaagctcggaattcgctcgagaaagatctcagttgggaaagaaattcgagagaaattttctggtgcagttgaagtgttctcctggaggaaccctgcaaatgctagtcctcgtggtgatcacaccaaacatagaagttttgaggatgcaccagtgcaaaaggatttgcactatgcgcaacacaattccactcgatatggcagcagttcaagaagagccatgatctcatcgaacaggccaatatcctcaggtgaccatactggcaggcaaaccataactgggagccgtccatctggtgctcacagagttcaaccagtgtatgacaccaaacaagcaacttatacgcatggtggctctataagaggccgtgatgatcctctgcggaactttgagctcctcaatatcaagaagtaattaagtaaaggttgtggtcttttgtt

SEQ ID NO: 251863 - DNA, 510 bp, Glycine max
  unsure (1)..(510): unsure at all n locations
nggtaggtgtgttntacataagaatagacgtaatgactcgtgcgagacaagcttgcatgcctgcaggtcgactctagaggatcccctcggggaattccaattccacattttcaagaaataagaggcaaaaatgttcatatatgaattggaattatttgttttcttattaggcctatcctgaagccaaaggaaatgagatcggaattcctcggggaattccaattccacattttcaagaaataaggaggcaaaaatgttcatatatgaattggaattatttgttttcttattaggcctatcctgaagccaaaggaaatgagatcggaattcctcggggaattccaattccacattttcaagaaataaggaggcaaaaatgttcatatatgaattggaattatttgttttcttattaggcctatcctgaagccaaaggaaatgagatcggaattcctcggnggtaccgagctcgaattccctatagtgagtcgtattaaattcgtaatcatg

SEQ ID NO: 251864 - DNA, 395 bp, Glycine max
cggctcgagctattataaccaaacactcttcttcatatgcttcttcttcttcttgttcttgttctatctgtgacgagcatcatggcctcgagagcagtgctattgttggctatgtgtgtgcttccggccatggttgtggccattcgcccagcaaagaaccctttttgcgtgaagggtcgcgtctactgtgacccttgccgtgctggttttgagacctcagcaaccacctacattgccggtgctgagattatgttgcaatgcaagagcagggttagcaacgaggttgtgtacaccaagaaggggtacactgactcaactggagcatacacaatgtacgtggacgaggatcacgcagatcaaatatgcagtgccaagcttgtaagcagccctcaccc

SEQ ID NO: 251865 - DNA, 379 bp, Glycine max
cattctccttcttgagatccaggacactctagagtctcctccaccagaaaatcaaacaatgaaaaaggcttccatggttgcaatcttcattacaacattcttctacctgtgctgtggatgctttggatatgcagcttttggaaatgatacaccaggaaacctcttgacagggtttggattttttgagcctttctggctcattgaccttgctaatgcttgcatcattcttcacttggtgggaggatatcagatttacagtcaaccaatatacagtactgttgacagatgggcttcaagaaaattccccaacagtggctttgtgaataatttctacagagtgaaacttcctttgcttcctggttttcagctaaatcttttc

SEQ ID NO: 251866 - DNA, 395 bp, Glycine max
gaagcacatagagaagcattagcactaggagcagcaacaactagtctcagctgaaatggcctcttcagtgatggcatctgtggccctcaaacctgcccctttcactgttgagaagtcctcagtgagaggccttccctctctctcaaggaactcttcttcattcagagttgtggccagtggcaagaagatcaagactgacaaaccttatggaattaatggtggcatggctttgagggatggaactgatgcatctggcaggaaaggaaagggaaagggtgtttaccagtttgtagacaaatacggtgctaatgtcgatggttacagtcctatctacgacaccaaagactggtctccataccgtgatgtctacgctggcggtacgactggcttggcta

SEQ ID NO: 251867 - DNA, 406 bp, Glycine max
  unsure (1)..(406): unsure at all n locations
cttggaaaacccacaggcacgctgagcatggaacacagaaccctagaactcaacctggcttcagcaaaggatctcaaagacttgaatatattctcaaagatggatgtatatgctgtgctttcactctccggcgatcaaaagaccaagactcccgtccacagaaacggcggcaccaacccaacatggaattttccggtcaagttcacttttgatgaatcggtggcgcggcagaaccgtttggccctcgaaatcaagatccgctccgagcgcgccctcgccaccgataaggacatcggccaggtccacgttcctctcatggaactcctcaagcaacctggcgacgataaatccttccagcacgttagttaccaggtcagaaaaccctncggcaaacccaagggagccc

SEQ ID NO: 251868 - DNA, 298 bp, Glycine max
cgctgagttgaaggtcaaggaactcaagaacggtcgcttggctatgttctccatgtttggtttctttgttcaggccattgtcactggcaagggccctattcagaacctttacgaccatgttgctgatcctgttgccaacaatgcttgggcttatgccactaactttgtccctggacaatgagcattgcaattcaatgcaatcttctgctcccattttctctaatgtaactacacctgtgtaccagaagaatctgtatgagaaccattatattatatatattagaaatttctgtcccta

SEQ ID NO: 251869 - DNA, 518 bp, Glycine max
  unsure (1)..(518): unsure at all n locations
tgtggatggtgtgtctgtaaatatagtactattattgntagtactcggcgagacaagcttgcatgcctgcaggtcgactctagaggatcccctcggggaattccaattccacattttcaagaaataaggaggcaaaaatgttcatatatgaattggaattatttgttttcttattaggcctatcctgaagccaaaggaaatgagatcggaattcctcggggaattccaattccacattttcaagaaataaggaggcaaaaatgttcatatatgaattggaattatttgttttcttattaggcctatcctgaagccaaaggaaatgagatcggaattcctcggggaattccaattccacattttcaagaaataaggaggcaaaaatgttcatatatgaattggaattatttgttttcttattaggcctatcctgaagccaaaggaaatgagatcggaattcctcggnggtaccgagctcgaattccctatagtgagtcgtattaaattcgtaatcatgt

SEQ ID NO: 251870 - DNA, 401 bp, Glycine max
cttctaaaaaaataaaattaagaaattttcatggtaaccattcgtgcagatgaaattagtaaaattatccgtgaacgcattgagcaatataatacggaagtaaaaattgtaaatacgggtaccgtacttcaagtaggcgacggtattgctcgtatttatggtcttgatgaagtaatggcgggtgaattagtggaatttgaagagggtactataggcattgctttgaatttggaatccaaaaatgttggtgttgtattaatgggtgatggtttgatgatacaagagggaagttcagtaaaagcaacaggaagaattgctcagatacctgtaagtgaggcttatttgagtcgtgttataaatgccctggctaaaccaattgatggtcgaggagaaatttcagc

SEQ ID NO: 251871 - DNA, 244 bp, Glycine max
attgaaatggggcacaaaaatattagctctatcctgaagccaaaagacatgacatcactattcctacaccaactgcaattccacatttccaagatatacagctgcacaaatgtacatatatgaatagcaattacctgttttctatattatgcctatcctgaacccaaactaaatgatatctgaatctctcggtgaattacaattccacatttccaagaaataaagtggcatatatgttcatata

SEQ ID NO: 251872 - DNA, 302 bp, Glycine max
ctcactcaatggcttggcactcgttcctcttattagcgacggccattctcgccgttgtgtgctccgccgtgagcggttgctcgccatcggatagggcggcgctgctggccttccggaaggcgctgagcgagccctaccttggcctgttcaactcgtggacgggcttcaactgctgcctcgactggtacggcatcagctgcgactccacctcctgtcgtgtcaccgacatcaaccttcgcggagagtcctaatacccgatttccgtgaatgcctgtcgttccgattacatgacaggaaaactc

SEQ ID NO: 251873 - DNA, 428 bp, Glycine max
tacgatgcctgcacgcctactctagcatgatcctctggctgaagcccaattccacatcttcaagaaataaggacgcgcgatgcgttcatatagtcgaattggagcttattcagttacacttattaagcctatcctgaatccaaaggaaatgagatcggaattcctcggggaattccaattccacattgtcaagaaataaggtggcatatatgttcatatctgaatcggaattattcgttatcttattaggcctatcctgaagccaaaggaaatgatatcggaattcctcggtgaattccaattccacattttcaagaaataaggaggcaaaaatgttcatatatgaatcggaattattcgattacttactacgccgatccatgagccaaaggacatgagatcggaattcctgggcggtaccaagctcg

SEQ ID NO: 251874 - DNA, 413 bp, Glycine max
gtttttctccgtttgcagcacaacgaatttcgaaatcccgtggagaacgtaacgtgctctggtttctggactcgaagatgaaggccacaaaggaattgagcgagcaagtggaggaaaacgaggtcaaggttttggttgaggaggacgacgaagaatacgagtccgtggatgaagtagtagacgacgcagaagatgatgaagacgaagaagaggacgatgacgacgacgaaggagacgacaatgacgacgaggaagatgatgctcctgacggcggtgacgacgacgacgacgaagatgatgaagaagaaggtgatgtccagcgtggtggtgagcctgacgatgacgataacgactcagacgacgactcagacgacgacgaagatgaagacgaggaggacgaggaggagcaaggg

SEQ ID NO: 251875 - DNA, 414 bp, Glycine max
ggaaaaggcacgtacacgaccaccgtttagctgtgtttgaagttcgaacgttgaaattaattgagctgcgcctgcgcgtgtcactgtttgagagcacacaaacaatgtcctccgaatcacacgccgttgattgtaacttgaaggagacggagctcaccttaggccttcccggcaccaaaactactgccacaaaacgtggcttctctgatacccttcctccttctcaaaataaaatcttgcgccccacctccaaattcccaacacccaacagggaacaactggtggggtggccgccggtgagggcaagcaggaagaatgctatgaagagctgttgcaagttggtgaaagtggcggtggatggagctccttatctaagaaaagtggatcttgacatgtacgatagttatgagcatt

SEQ ID NO: 251876 - DNA, 439 bp, Glycine max
tcggggaattccaattccttattttcaagaaataaggaggcaaaaatgtgcatgtatgaattggaattatttgttttcttattaggcctatcctgaagccaaaggaaatgagatcggaattcctcggggaatcccaattccacattttcaagatataatgaggcatatatgttcatatattatttggaattatttgtcttctatattatgcctatcttttatctaattgcttttttacctttatttctttgctcttcttttttttttttttttttttttttttttctctctttttgttttttatatttatttattattttacttttttttatttttttttattctttttttttcttttttaattttatttttcttttttttttcttctttttctatttcatttttattatcttctatttctttcttttttttttttttt

SEQ ID NO: 251877 - DNA, 364 bp, Glycine max
tcggggaattccaattccacattttcaagaaataaggaggcaaaaatgtgcatatatgaattggaattatttgttttcttattaggcctatcctgaagccaaaggaaatgagatcggaattcctcggggaattccaattccacattttcaagaaataaggaggcaaaaatgttcatatatgaattggaattatttgttttcttattaggcctatcctgaagccaaaggaaatgagatcggaattcctcggggaattccaattccacattttcaagaaataaggaggcaaaaatgttcatatatgaattggaattatttggtttcttattaggcctatcctgaagccaaaggaaatgagatcgga

SEQ ID NO: 251878 - DNA, 391 bp, Glycine max
cgacggtggcacaggaaagacaaccttcgtgaagaggcatctcactggtgaattcgagaagaaatatgaaccgaccattggtgtggaggttcatccgttggattttttcacgaactgtggaaagattcgcttctattgttgggatactgctgggcaagagaagtttggtggcctcagagatggatattatatccatgggcaatgtgcgattatcatgtttgatgttactgcccgtctaacatacaaaaatgtccctacctggcaccgtgatctttgccgggtctgtgaaaacatcccaattgttctttgcggtaacaaggttgatgtcaagaataggcaagtgaaagcaaaggcagttacttttcacaggaagaagaattgcagtactatg

SEQ ID NO: 251879 - DNA, 428 bp, Glycine max
agctaccactgttcagaagtgctacattgagcttgccaagcaagtcaaggaaaagctttccaaggtagatccttactttgacaagttggcagatgccatggtcacttggattgaagcttgggatgagcttaaccctgcgggagcatcagtggccaatggcaaagcgtgaatcggtttttggttaactgcataacagccacaaaacttggaagtggaactatttatatactgtattttttttccttagtatttatcttcaacttagctgttattctcggcttaaaatttgcagcattgttagctgtaattctgtttaataacttcatcatttgagcttagaaacaataagtacacccatagggcgttactttctttttattattggttgatgggtaaagatcacatggcagcatttcggtacatgtgaa

SEQ ID NO: 251880 - DNA, 371 bp, Glycine max
gcaagctagctaggttgaaaatagtttggttttgtagtaagtgaggtgaggtgccaaaatggtgaagataactcttggtactttcgatgactcttttggtgttgcctctcttaaggcttatttggcagagttccatgcaactctgattttcgtgttcgctggtgttggttcagccatcgcttacaacgagcttacaaaagatgcagccttggatccaacggggctggtggcagtagctgtggcccatgcatttgcactgtttgtaggtgtctccgtcgcagccaacatctcgggtggccatttgaacccagctgttacttttggattggccattggaggcaacatcaccctcattactggtttcttatact

SEQ ID NO: 251881 - DNA, 377 bp, Glycine max
tcggggaattccaattccacattttcaagaaataaggaggcaaaaatgttcatatatgaattggaattatttgttttcttattaggcctatcctgaagccaaaggaaatgagatcggaattcctcggggaattccaattccacattttcaagaaataaggaggcaaaaatgttcatatatgaattggaattatttgttttcttattaggcctatcctgaagccaaaggaaatgagatcggaattcctcggggaattccaattccacattttcaagaaataaggaggcaaaaatgttcatatatgaattggaattatttgttttcttattaagcctatcctgaagccaaaagaaatgagatcggaattcctcgggggt

SEQ ID NO: 251882 - DNA, 291 bp, Glycine max
gcataaatgctacattgagctatccaagctagggacggaaaacctgtgcatggtagatccttaatgtgacaagttagcagacgccattgcctctcgaattgaaccttgtcattagcttaaccctgcgggagcatcataggacaatgactgacatgaatatgcacttaattaactgcataacagtcacaaaactagtaaatgcaactatatatatactgcatgtaatttgcttagtccagatcttcaacttatccgctaatcatggctaaaaattccgagcattataagact

SEQ ID NO: 251883 - DNA, 402 bp, Glycine max
ctcgatcgatcgatctcgaacatgagcactggggagcttgtcaacatcgaacctctcgaactcaagttcccctttgagctgaagaagcagatctcatgttctcttcaattgtccaataagaccgatagctatgtggccttcaaggtgaaaacaaccaatccgaagaagtattgtgttcgtccgaacactggtattgtcacgccacgatctacgtgtgatgttatcgttaccatgcaagcgcaaaaagaggctcctgctgatatgcaatgcaaggataagtttcttcttcagagcgtaaaaactgttgatggtaccagtccgaatgatatcactgcagacatgttcaacaaggaggcagggcatgtgtgtgaggagcgcatattgatagtgctttatgttttt

SEQ ID NO: 251884 - DNA, 252 bp, Glycine max
tcggggaattccaattcttcattttcaagaaataaggaggcaaaaatgtgcatatatgaattggaattatttgttttcttattaggcctatcctgaagccaaaggaaatgagatcggaattcctcgtggaattccaattccacattttcaagaaataaggaggcaaaaatgttcatatatgaattggaattatttgtttccttattaggcctatcctgaatcccaatgacatgcgatctgaattcctcgggg

SEQ ID NO: 251885 - DNA, 421 bp, Glycine max
gtctaagcagaaatggcctcttcagtgatggcatctgtggccctcaaacctgcccctttcactgttgagaagtcctcagttagaggccttccctccctctcaaggaactcctcttcattcagagttgtggccagtggtggcaagaagatcaagactgacaagccttatggaattaatggtggcatggctttgagggaaggagttgatgcatctggcaggaaaggaaagggaaagggcgtttaccagtttgtagacaaatacggtgctaatgtcgatggttacagtcctatctacgacaccaaggactggtctccaaccggtgatgtctacgctggcggtacgactggcttggctatctgggctgtgactctacttggtcttcttgctggtggtgcacttcttgtctacaacacaagtgctt

SEQ ID NO: 251886 - DNA, 404 bp, Glycine max
gcagagaagtgagatacactaagttatcctcataaatacactctaattaggtggcaagataagtgtctaaccttagtaacattgccacatattgtgttcattttggaattgtgccactaaaattctattcaattcatctatggctgcctcttcttatgctatgcaatcaatcctggcaaaccctttgatccgcatttccagcgggtctagggtgaaccaatttggcgttcctgctttgcacatgagaaggaatgttggcctgagagttaggtccatggctaaggaagaacaaccaagtgagcctgcaaccccagttacaccgtcaccatcagtagaacccaagccacagccagtctctgctccttcaccaaaagtgagcactaagttttctgatgtgttggcat

SEQ ID NO: 251887 - DNA, 530 bp, Glycine max
  unsure (1)..(530): unsure at all n locations
tagtgaggagcggtgtctgaggccctaaccgctcgnctcagcnacgaccagctatgacgtcgcatgcacgcgtacgtaagctcggaatgcagctctaggataattcttattcctcattttcaagaaataatgaggcgaggatgtgcatatatgaatcggaattatgtgttttcttattaggcctatcctgaagccaaaggaaatgagatcggaattcctcggggaattccaattccacattttcaagaaataaggaggcaaaaatgttcatatatgaattggaattatttgttttcttattaggcctatcctgaagccaaaggaaatgagatcggaattcctcggggaattccaattccacattttcaagaaataaggaggcaaaaatgttcatatatgaattggaattatttgttttcttattaggcctatcctgaagccaaaggaaatgaaatcggaattcctcgggggtaccgagctcgaatttcctatagtgagttcgattaaaattccttatcatgtcaatactg

SEQ ID NO: 251888 - DNA, 528 bp, Glycine max
  unsure (1)..(528): unsure at all n locations
nggttaagaggctctnatcatgcatcagaagccgtcagnactactggagagacaagcttgcatgcctgcaggtcgactctagaggatcccctcggggaattccaattccacattttcaagaaataaggaggcaaaaatgtgcatatatgaattggaattatttgttttcttattaggcctatcctgaagccaaaggaaatgagatcggaattcctcggggaattccaattccacattttcaagaaataaggaggcaaaaatgttcatatatgaattggaattatttgttttcttattaggcctatcctgaagccaaaggaaatgagatcggaattcctcggggaattccaattccacattttcaagaaataaggaggcaaaaatgttcatatatgaattggaattatttgttttcttattaagcctatcctgaagccaaaagaaatgagatcggaattcctcgggggtaccgagctcgaattccctatagtgagtcgtattaaattcgtaatcatgtcatagctgttt

SEQ ID NO: 251889 - DNA, 522 bp, Glycine max
gttgaggggctgagtatcgacaagcatcatattgctactactcggagagacaagcttgcatgcctgcaggtcgactctagaggatcccctcggggaattccaattccacattttcaagaaataaggaggcaaaaatgttcatatatgaattggaattatttgttttcttattaggcctatcctgaagccaaaggaaatgagatcggaattcctcggggaattccaattccacattttcaagaaataaggaggcaaaaatgttcatatatgaattggaattatttgttttcttattaggcctatcctgaagccaaaggaaatgagatcggaattcctcggggaattccaattccacattttcaagaaataaggaggcaaaaatgttcatatatgaattggaattatttgttttcttattaagcctatcctgaagccaaaggaaatgagatcggaattcctcgggggtaccgagctcgaattccctatagtgagtcgtattaaattcgtaatcatgtcatagct

SEQ ID NO: 251890 - DNA, 526 bp, Glycine max
ggttagggagtgatctgtcatgagcacacgaatatattgaacagctctatgacgtcgcatgcacgcgtacgtaagctcggaattcggctcgagggttttgacccactaggactaggaaaggacccggcattcctgaaatggtatagagaagctgaactcattcatgggaggtgggcaatggctgcagttgtaggcatcttcattgggcaggcatggagtggagttccatggtttgaggctggagcagatcctaatgcaattgctcctttctcatttggctctctcttaggtacccagttgatcggcgcgagatttaatcgccgcgacaatttgcgacggcgcgtgcagggccagactggaggtggcaaccgccattcagcaacgactgtttgcccgccagttgttgtgccacgcggttgggaatgtaattcagctccgccatcgccgcttccactttttcccgcgttttcgcagaaacgtggctggccttggtcaccacgcgggaaaacggtctgataagagacac

SEQ ID NO: 251891 - DNA, 528 bp, Glycine max
agggaggggctgtttttgtatgggggtatggggatatatgggagagctaagcttgcatgcctgcaggtcgactctagaggatcccctcggggaattccaattccacattttcaagaaataaggaggcaaaaatgttcatatatgaattggaattatttgttttcttattaggcctatcctgaagccaaaggaaatgagatcggaattcctcggggaattccaattccacattttcaagaaataaggaggcaaaaatgttcatatatgaattggaattatttgttttcttattaggcctatcctgaagccaaaggaaatgagatcggaattcctcggggaattccaattccacattttcaagaaataaggaggcaaaaatgttcatatatgaattggaattatttgttttcttattaggcctatcctgaagccaaaggaaatgagatcggaattcctcgggggtaccgagctcgaattccctatagtgagtcgtattaaattcgtaatcatgtcataagctgttcctgt

SEQ ID NO: 251892 - DNA, 397 bp, Glycine max
gtctcaacttctgctcttccaactcctacaacgcttttctctgcactcatgggcaaggtcaagatcggaatcaacggatttggaagaattggccgtttggttgccagagtcgctctgcaaagagacgatgttgaactcgttgccgttaacgaccctttcattaccaccgattacatgacatacatgtttaaatacgacagtgttcacggacactggaagcatcacgatgtcaccgttaaggacgagaagacccttctcttcggtgacaaggcagtcactgtttttggacacagaaaccctgaagagatcccatgggggtcaactggagctgacatcattgttgagtccaccggagttttcaccgataaggacaaggctgccgcacatttgaagggtg

SEQ ID NO: 251893 - DNA, 328 bp, Glycine max
gaagagttttactgtttaagtgggacggttatcatcaacagaatgcgtatcttttggagtggagtctgctgttgccgtatttggcctatcatgaagacaagggacatgtgatcggtgttactcggggaattccaatttcacattttgaagaaatacaggaggcaaaaatgttcatatattaattggaattatttgttttcttattaggcctatcctgaagccaaaggaaatgagatcggaattcctcggggaattccaatttcacatttttaagatataaggaggcaaaaatgttcatatatgaattggaattatttgttttcttatt

SEQ ID NO: 251894 - DNA, 405 bp, Glycine max
gtccctcaatacagccttcatggaatggctgaggcctttatgtcaattggacacttggagtttttctatgaccaggcccctgagagtatgaggagcactgccatggcattattttggactgctatcgctgctgggaactatgtgagtaccattatggttactttggtccacaagttcagtgctgggtctaatgggtcaaattggctccctgacaacaacctcaacaaagggaagttggagtacttttactggcttatcaccatattgcagtttctcaatcttatttactacttggtttgtgccaaattgtacacctacaagccaattcaggtccatgacaaaggggatagcaattcagaagggaaccaaattgagctctctaccacggtttaagtgtggtgttgt

SEQ ID NO: 251895 - DNA, 203 bp, Glycine max
cccctcggggaatttctatagctcattatcaagaaataaagaagcggaaaagtgcatatatcaatagggattatgtgacttcttattatgcctatcctgaaaccacaagaaatgagatcggaattccttcggggtaccgagcttcaaattccctataatgaggtctattaaaatcctaaacattttataaatgatttcttggg

SEQ ID NO: 251896 - DNA, 393 bp, Glycine max
gtccctcaatacagtttttcatggaatggctgaagcctttgtgtcggttgtacacttggagtctatctatgaccagtcccctgatagtatgaggagcactgccatggcattatttttgactgctatcgctgctgggaactatgtgagtaccattatggttactttggtccacaagttcattgctgtgtctaattggtcaaatttgctccctgacaacaacctcaacaaatgtaatgttgagtacttttactggcttattaccatattgcactttgtcaatcttatttactacttgtgttgtgcctaattttacaccttctatccaattcatgttcatgactatagttattgcatttcataaagtaacccaattagatctttttaccatgttta

SEQ ID NO: 251897 - DNA, 528 bp, Glycine max
  unsure (1)..(528): unsure at all n locations
gagtttagggtgtgtctgatcaaggtacnagatagtcatactcatagaacagctatgacgtcgcatgcacgcgtacgtaagctcggaattctccaaagtttgtatagtgtaggatttgttggtattcgtgataaaaacacctcatcctattcattttgccatgacgggcgaactccagataaaggttttgaaagtaatgagaaattattaattcatccatgttactggcttggtttgaatctaaatcgtaatgcacttgctccagaggaagcagaggagataaatgacgaatatgatattaatattatttcagataattcagccattagaaataaaacaataggtcaaataactactcatctagatcagataccgataggaaatgaaggtgccactgaatttgaacaatggtgtttagacgcactaagaatagtatttgcatcccacctaacagacatcaagtcccatccaaatggtaacgcagttcagagacgagatattatatgcaccaatggtggcaaatctgat

SEQ ID NO: 251898 - DNA, 325 bp, Glycine max
attttatctttccctaaatatgatgtacagtatcgtactgttcccttaaaaaaaaaaaaaaaaaaaaaaaaaaaaaaaaaaaaaaaaaaaaaaaaaaaaaaaaaaaaaaaaaaaaaaaaaaaaaaaaaaaaaaaaaaaaaaaaaaaaaaaaaaaaaaaaaaaaaaaaaaaaaaaaaaaaaaaaaaaaaaaaaaaaggatagctcctccaaattaaacattttaaccccttaaataatttctaaacctaatccatacgtaaaaaaaaattacaaaatttaggatattttaaaaatttacctaaataagtctaaaatctattccctc

SEQ ID NO: 251899 - DNA, 436 bp, Glycine max
ctatgacgcacacgcacgcatacttaaactgggactccaggttgatacttttatttatttatggaagtggaatgcaagaggtttagtttcatacgttgatggaactattacaaagtctgatgttttggggcaattcatgcctttagttggcaaagattggacacaatctgtagtggcaaggcttttctgtgctattaatgaaaatggataccaactactttttctgagtgcccgtgcaattgtccagtcatatctaaccataaacttcttgcttaacctgaaacatgattgaaaaaccttaccaaattgacctgttgttatatcacctgatggattattttcctcgctttaccgtaaatttattaataataacacctttattaattcaaaaatgcttgattaaatgatttattataaactttttcccaatttactt

SEQ ID NO: 251900 - DNA, 442 bp, Glycine max
  unsure (1)..(442): unsure at all n locations
agctatgacggcacacgcacgcgtactcgagctgggaatccaggttgatgcttatatttatttatggaagtggaatgcaagaagttntgggttcagacgttgatggaactattacaaagtctgatgttttggggcaattcatgcctttagttggcaaagattggacacaatctggagtggcaaggcttttctgtgctattaaggaaaatggataccaactactttttctgagtgcccgtgcaattgtccaggcatatctaaccagaaacttcttgcttaacctgaaacaggatggaaaaaccttaccaaatggacctgatgttatatcacctgatggattatttccctcgctttaccgagaagtgattagaagagcaccctacgagttcaagattgcttgtttagaggatatcaatagacttttcccatctgactattaatc

SEQ ID NO: 251901 - DNA, 385 bp, Glycine max
  unsure (1)..(385): unsure at all n locations
atccctcactaggagctcttctccattggttcttcatctgcatgcacacacttgcatagttttggaaaccaagaatttttgaagggtagcatcaacaagaagttctgaaaatggagatcaccaatgtcagcgagtatgaagctattgcaaagcagaagttgccaaagatggtgtttgactactacgcatctggtgcagaggaccagtggactctgcaggagaacagaaatgccttttccagaattttgtttcggccacgtattcttattgatgtgagcaagatagacatcacaactactgtnctgggctttaaaaaatccatgccaatcatgcttgccccaacagccatgcagaaaatggctcatcctgagggagaatatgcaac

SEQ ID NO: 251902 - DNA, 421 bp, Glycine max
gttgatgctcatatttatttatggaagtggaatgcaagaattgtaatttcagacgttgatggaactattacaaagtctgatgttttggggcaattcatgcctttagttggcaaagattggacacaatctggagtggcaaggcttttctgtgctattaaggaaaatggataccaactactttttctgagtgcccgtgcaattgtccaggcatatctaaccagaaacttcttgcttaacctgaaacaggatggaaaaaccttaccaaatggacctgttgttatatcacctgatggattatttccctcgctttaccgagaagtgataagaagagcacctcacgagttcaagattgcttgtttagaggatatcaaaagacttttcccatctgactataatccattctatgctggatttggcaata

SEQ ID NO: 251903 - DNA, 253 bp, Glycine max
aaccttaaccgttcatcggttaattttcaaccagaactatgattaaactctctaaactaaaggcaaaacatataaaactggcataaaatgcgaattttggaccacccattaagaagcaaagtgccggcaagattcgtcttctcaaaaatataagcgagctgaatctaccaaaatcatgtaccatacaattccccaatggcaaagatgacccgatgaacttccaagcttcaattccctctaatgatggatatta

SEQ ID NO: 251904 - DNA, 298 bp, Glycine max
atttattagttctcatccattaatttccattgaagtccgagtacagaaaccaaaaatacaggatgatgaaatctcaaaaagcaaaaacaaatgggaatgtagtttaagtacaaacaaacaaagtggtgtggcggctacaaatgctttgcaaaatatttacacttataatcttgtttgtttttatgcttttaatctatattatttatattttttttatttttttttttttttttatttatattattttttttttattttattttttaattttttattattttttatttttattttattt

SEQ ID NO: 251905 - DNA, 357 bp, Glycine max
gttttctctttcttcctctctatcacactcacctatggctcccatctcaaaactcattcctttcctattcttaacaacccttttagtgtctctccaagttaatgccagagacagccaattcttcagcaaagtcacccctctcaacatcaacattaaagagactgaggttcccaaatatgaaggccaagtaaacaagccagaacaacaaccagttttcaccccagaaacagaaaacagctatggtctatatggtcatgagactggtctgcaccctgccaccactacattaacttatgctgctccctacaccaccgtcaccatctacaagccattcaaaactaccacagctgaagagga

SEQ ID NO: 251906 - DNA, 419 bp, Glycine max
gaaaacccctaaccccaacctcaaccttaacctctcctcactttcttttcaaccagaactatgattaagctttttaaagtaaaggaaaaacagagagaactggcagaaaatgcgagtggtggaccacccgttaagaagcaaagtgccggcgagttgcgtcttcacaaagatataagcgagctgaatctaccaaaatcatgtaccatgcaattccccaatggcaaagatgacctgatgaactttgaagtttcaattcgacctgatgatggatattacttaggtggcacatttttgttttcctttcaagtgtctcccatctatccacatgaagcaccaaaggttaaatgcaagacaaaggtctatcatccaaatattgacttggaaggaaatgtttgtctcaacatcttacgagaagattg

SEQ ID NO: 251907 - DNA, 206 bp, Glycine max
gccacttgcttatgtagttgcactgtttcagtgcaatgctatggatttactatgctttcgtcaaaagggaagctgcccttcttctcattaccattaacacatttggaattgttgtggagtcaatttaccttgcaatcttcctactttatgccccaaggaagcctaggcttaacaccataaagctgtttctcttactgaatgtgttt

SEQ ID NO: 251908 - DNA, 400 bp, Glycine max
catgcacgctggtaagctgggaattcggctcggctgtgatgtctcttacgtcagaaattgttgcggcacttggtgcaacccttcccttggagatcaagggagaaattgaggagtttctcaaagtggttttcactctgtttcaagacctggattttactttcttagagatgaatcctttcacattggttgatggaaagccttatcctttggatatgagaggcgagctagatgacactgctgctttcaagaacttcaagaaatggggagacattgaatttccactgccatttggaagggttatgagtgccaccgagtctttcattcatggattagatgaaaagacaagtgcatccttaaaattcacagtgttgaacccaaagggccgaatttggacaatggt

SEQ ID NO: 251909 - DNA, 338 bp, Glycine max
tcggggaattccaattccacattttcaagaaataaggaggcaaaaatgtgcatatatgaattggaattatttgttttcttattaggcctatcctgaagccaaaggaaatgagatcggaattcctcggggaattccaattccacattttcaagaaataaggaggcaaaaatgttcatatatgaattggaattatttgttttcttattaggcctatcctgaagccaaaggaaatgagatcggaattcctcggggaattccaattccacattttcaagaaataaggaggcaaaaatgttcatatatgaattggaattatttgtattcttattaggcctatc

SEQ ID NO: 251910 - DNA, 526 bp, Glycine max
agtagggtcggtgttgagcccagcctatccgctacctccgctaagacttatgacgtcgcatgcacgcgtacgtaagctcgggtgagcaaaaggccagcaaaagtccaggatccgtaaaaaggccgcgttgctggcgtttttccataggctccgcccccctgacgagcatcacaaaaatcgacgctcaagtcagaggtggcctaacccgacaggactataaagataccaggcatatatcactgcaagctcattggtgcgctgtactgcttctactctgcatattaccggctacctagatgacactgttgctttcaagagcttcaagatatgtggagacattgcatttcgactgccatttggaaaggttatgagtgccaccgagtctttcattcatggattaaatgaaaagacaagtgcatccttaaaattcacagtgttgaacccaaagggtcgaatttggacaatggtagctggggtaggtgctagtgtcatttatgctgatacggtaggagaacttgcttttcct

SEQ ID NO: 251911 - DNA, 347 bp, Glycine max
gatcccctcgcgaatgctatactttattttcaagaaataaagaggcgagaatggggatatatgaattggaattatttgttttcttattaggcctatcctgaagccaaaggaaatgagatcggaattcctcggggaattccaattccacattttcaagaaataaggaggcaaaaatgttcatatatgaattggaattatttgttttcttattaggcctatcctgaagccaaaggaaatgagatcggaattcctcggggaattccaattccacattttcaagaaataaggaggcaaaaatgttcatatatgaattggaattatttgttatcttattaggcctatcctga

SEQ ID NO: 251912 - DNA, 522 bp, Glycine max
  unsure (1)..(522): unsure at all n locations
tgttaaggggctctnattatgagatagtatgttatactcagagacacaagcttgcatgcctgcaggtcgactctagaggatcccctcggggaattccaattccacattttcaagaaataaggaggcaaaaatgttcatatatgaattggaattatttgttttcttattaggcctatcctgaagccaaaggaaatgagatcggaattcctcggggaattccaattccacattttcaagaaataaggaggcaaaaatgttcatatatgaattggaattatttgttttcttattaggcctatcctgaagccaaaggaaatgagatcggaattcctcgggggtaccgagctcgaattccctatagtgagtcgtattaaattcgtaatcatgtcatagctgtttcctgtgtgaaattgttatccgctcacaattccacacaacatacgagccggaagcataaagtgtaaagccctgggtgcctaatgagtgagctaactcacattaattgcgttgcgctcacttgcc

SEQ ID NO: 251913 - DNA, 342 bp, Glycine max
tcgctgtagagatcccctcgggaatgtctatcctctattgtcaagaaataaggaggcaagaatgggcatatatgaattggaattatttgttttcttattaggcctatcctgaagccaaaggaaatgagatcggaattcctcggggaattccaattccacattttcaagaaataaggaagcaaaaatgttcatatatgaattggaattatttggtttcttattaggcctattctgaaaccaaaagaaatgagatcggaattccttggggaattccaatttcacattttcaagaaataaggaagcaaaaatgttcatatatgaattggaattatttgttttctt

SEQ ID NO: 251914 - DNA, 527 bp, Glycine max
tggttggagagggctcgtttatgaataagaacttattgtactactcggagagacaagcttgcatgcctgcaggtcgactctagaggatcccctcggggaattccaattccacattttcaagaaataaggaggcaaaaatgttcatatatgaattggaattatttgttttcttattaggcctatcctgaagccaaaggaaatgagatcggaattcctcggggaattccaattccacattttcaagaaataaggaggcaaaaatgttcatatatgaattggaattatttgttttcttattaggcctatcctgaagccaaaggaaatgagatcggaattcctcggggaattccaattccacattttcaagaaataaggaggcaaaaatgttcatatatgaattggaattatttgttttcttattaggcctatcctgaagccaaaggaaatgagatcggaattcctcgggggtaccgagctcgaattccctatagtgagtcgtattaaattcgtaatcatgtcatagctgg

SEQ ID NO: 251915 - DNA, 299 bp, Glycine max
atatatgaatcggagctatgcagatctcttattacgctctatcctgaagccaaaggaaatgacatcggaattcctcggtgaattccaattccacattttcaataaataaggaggcaaaaatgttcatatatgaattggaattatctgttttcttattatgcctatcctgaaaccaaaagaaatgagatcgtaattcctcggggaatatcaattccacattatcaagaaataatgaggcaaaaatgttcatatattgaattggaattatttgttttcttattaagcctatccttgaacca

SEQ ID NO: 251916 - DNA, 275 bp, Glycine max
ctgatctgctgaaacacgccacactcttcttaccatgggcgtcctcgatcacttgtgggatgacaccgtcgccggtcctcgcccggagaacggccttggcaagctccgaaagcaccacaccttcgctttccgatctgcctccggcaaggaatcagacagcggaagcgtgaaatcgtacggtgaagatttgccggaggatgcggtgagagtgacgcgaagtatcatgatcgtgaaaccacctggtggtaaccagagtccgagcggatccgatccgg

SEQ ID NO: 251917 - DNA, 387 bp, Glycine max
gcagaaaaacaagtagttgagaactaagaagaaggaaatggcttcctcaatgatctcctccccagctgttaccaccgtcaaccgtgccggtgccggcatggttgctccattcaccggcctcaaatccatggctggcttccccacgaggaagaccaacaatgacattacctccattgctagcaacggtggaagagtacaatgcatgcaggtgtggccaccaattggcaagaagaagttcgagactctttcctacttgccagacctcgatgatgcccaattggcaaaggaagtcgaataccttctaaggaaaggatggattccttgcttggaattcgagttggagcacggtttcgtgtaccgtgagcacaacaggtcacctggatacta

SEQ ID NO: 251918 - DNA, 271 bp, Glycine max
gtgcttcactatgagcttctgcaaatgggctgatatcattgtcatctgtgcattttcagcagacacccttggcaagattgctggagggttgtgtgacaatctactgacatgcatcgttcgagcctgtgactactgcaagccattctttgttgcaccagtcattaacacttttatgtggatcaattctattacagatcttcatcttcattttctttgtttatctttgctttttttttcaatttagttttttacatttattttattttttttt

SEQ ID NO: 251919 - DNA, 376 bp, Glycine max
  unsure (1)..(376): unsure at all n locations
gattcaaaaggaagcccctcctgaatatcagagctatcttgtccaagtgacaaaataccaagctgcacaaaactgtaagacctggatcgttggtaagtggatcacgccaagagagcaatactgggcaccacgtggaacccattttcatcaatttgttgtcccgccaattttaccatttagaaaagattgcacttatggtgacctggcagcgatgagattaccagaagacgtggaaggactagggtgttgtgagtacacgatggataggggagtggttcacgcgtgccatgcangatgagtggtacatagccttgaaaggtggccttatcacgaaagtggggccatagatgttaacagattcgatcttgtgtgggaa

SEQ ID NO: 251920 - DNA, 232 bp, Glycine max
atgcacgcgtacgtattcttgaaatgggactctaggattcaaatttaagcttcctcctgaatatcaaatctatctggtccagtttacataataccaagctgcacaaaactgttatacctggatcgttggtaagtggatcacgccaagagagcaatactgtgcaccacgtgtaacccattttcatcaatttgttgacccgtcaattttaccatttataaaagattgcacttat

SEQ ID NO: 251921 - DNA, 368 bp, Glycine max
ctgaagagaataagtgaaggatctcttttttggggagtttgtcttggaaattcatcaacatcgctctattgatttgggaaattgaaagtatccgaagccttttgtacagttagcttactattgttgttattacgaattactattattattatcatgtgctatgttacttaattaactctatcgtgtctgttattttcacttacttgctaatctcatctcattgatgtacaaatgtataaatatgtaggatccaagaggaatcttgttattcaaaaaaaaaaaaaaaaaaaaaaaaaaaaaaaaaaaaaaaaaaaaaaaaaaaaaaaaaaaaaaaaaaaaaaaaaaaaaaaaaaaaaaaaaggggcggc

SEQ ID NO: 251922 - DNA, 371 bp, Glycine max
tcggggaattccaattcctcattttcaagaaataaggaggcaaaaatgtgcatatatgaattggaattatttgttttcttattaggcctatcctgaagccaaaggaaatgagatcggaattcctcggggaattccaattccacattttcaagaaataaggtggcaaaaatgttcatatatgaataggaattatttgttttcttattaggcctatcctgaagccaaaggaaatgagatcggaattcctcggtgaattccaattccacattttcaaggtataaggaggcaaaaatgatcatatatgaactggaattatttgccgactgattaggcctatcctgaatcctttggatatgagatcggaatttcta

SEQ ID NO: 251923 - DNA, 355 bp, Glycine max
  unsure (1)..(355): unsure at all n locations
aaataaaggaagcgggaaatgtgtcatatattgaaattggaattatgttgttttcttattaaggcctaatcctgaaagccaaagggaaatgaagatcgtgaatatcctccggggaattctcaattctcacaattttcacagaaataagtgaggcaanaaatggttcatatattgaattggaattattatgttttcttattaaggcctatcctcgaagcccaaaggaaatgagatcggaattctctcggggaaattccaattccacattttcaagaaataaggaggcaaaaatgttcatatatgaattggaattatttgttttcttattatgcctatcctgaaaccaaaggaaatg

SEQ ID NO: 251924 - DNA, 354 bp, Glycine max
tcggggaatttttattcttcattttcaagaaataaggagggggaaatgttcatatatgaattggaattatttgttttcttattaggcctatcctgaagccaaaggaaatgagatcggaattcctcggggaattccaattccacattttcaagaaataaggaggcaaaaatgttcatatatgaattggaattatttgttttcttattaggcctatcctgaagccaaaggaaatgagatcggaattcctcggggaattccaattccacattttcaagaaataaggaggcaaaaatgttcatatatgaattggaattatttgttttcttattaagcctatcctgaagccaaaagaaa

SEQ ID NO: 251925 - DNA, 389 bp, Glycine max
atgcttaatttagttgtgaacaacagcaacgacataaatgaagccgatgcatgagggttttggattcatttcattaagatgatctggttatctgtcttcttatttttaaaatttaaagtctttgtgtgatgtctgtaaggcattctaagtatgattattatgagcagcttgattcgcgtcatgggccaatgatatcctctgcttataagctttaataagcccaacttatgtgtgatgtacggttgtgattagaggattgaatgtgcagactctagcattgcagcaaagtcatatatatgcatcatttaatttactgtaaggctattatggcagtctacggctaatgagcttgatgaccctgtaattaattgctgaccgttacctgcaag

SEQ ID NO: 251926 - DNA, 419 bp, Glycine max
acacttcacatacataacataaaatcttcctccgttcaatcttcatctctctctctctattcatctccgttaagcaaaaatcatgggtccgatggtgctgagccaactcgccaccggtcttagcgttctagccggagcggttctggtgaaatcggttatggaccagaagcccatggcaggcccattcactcgctgccccacgtgcaacggaaccggtcgagtcacgtgcctctgctcgcgttggtccgacggcgacgtcggatgctccacgtgctccgggtcgggtcgcatggcctgcagcagttgcggcggctccggtaccggtcgacccttgccggcgaaaatcgcgattcgcccgccgaaaccgccaattaattagttcaccaattcgttgggctcgctcgctcgcttgctactac

SEQ ID NO: 251927 - DNA, 422 bp, Glycine max
ttgaattcttcagagagaagaagaaacttaatcgatcatcacttcacttcactaatacatcatggcagacgagacccagaacaagtatgagagctctgaggttgaggtccaggatcgtggtgtttttgactttctcggtaagaaaaaggatgaagaagacaagcctcatcctcaggaggaggtcatcgccaccgagtttcaaaaagtcactgtctcagaccaaggagagaacaagcacagcctcttagaaaagcttcaccgatctgacagcagctctagctcttcaagtgaagaagaaggagaagatggagagaaaaggaagaagaagaagaaggaaaagaaagggctgaaagagaagatcgaggagaaaatagagggtgatcatcatcatcacaaggatgaggacacaagtgtccctgttg

SEQ ID NO: 251928 - DNA, 395 bp, Glycine max
ccgtgaactcgaagtgatccactccaggtgggccatgctcggagccttgggctgcgtcttcccggagttgctgtcccgcaacggggtgaagttcggagaagccgtgtggttcaaggccgggtcccagatcttcagcgagggtgggctcgactacttgggcaacccaagcctgatccacgcccagagcatcctcgccatctgggccacacaagttatcctaatgggtgccgttgaaggttaccgtattgctggtggccccctcggtgaggtcactgacccaatctacccaggtggcagcttcgacccattgggccttgctgatgacccagaggcttttgctgagcttaaggtgaaggaactcaagaacggacgattggccatgttctctatgtttg

SEQ ID NO: 251929 - DNA, 312 bp, Glycine max
atgcttaatcaagttgggaacaacaacaacaacaaaaatcaagccaatgtttgtgggttttggtttcatttcattaagatgatctgtttatctcttttcttctttttaaaatttaaagtctttgtattttgtatgtaaagatgtaaaattatgattattaggtggtgcatgtgtcgcgtcatgggccaatgttatcctctgcttttaagttggaagaggcccaactcatgtgtgatgtacggctgtgattgtgtaatttaatttgcaaaatcaaaaataacaccagagtcatatatatgcatctctttattt

SEQ ID NO: 251930 - DNA, 357 bp, Glycine max
gaaagttaatgttctcttgcttggtggaggaatgatctttaccttttacaaggctcagggttattcagttgggtcatctcttgtggaggaagacaagcttagccttgcaactacacttcttgaaaaggccaaggctaaaggggtttctttgttgcttccaactgatgttgtcatagcagacaagtttgctgctgatgctaacagcaagactgtgccggcatcaagcatcccagatgggtggatggggttggatattggtcctgattccatcaagacatttggtgaagcattggatacgactcagaccattatttggaatggaccaatgggtgtttttgagtttgataagtttgccac

SEQ ID NO: 251931 - DNA, 378 bp, Glycine max
ggcatcagcattatcttctctctcctccacctcttcttcactgttacagcacagtttcaccggaaactcgaaggctcctcccactactcaattccccaacagaaatgtacgcttttcggtcttcgctcaaaagaaggcatggaaacttcgaaagattattttgaaggaagatgtggcttatgtaggaaagcaatggcaacttcttgatgtgaaggctggctttttcataaattacctgcttcctatgggaaaagcacaacttgttactccacagcttctcgaggaaatgaagattgaagaagaaagatttgaggctgagaaaaaacgggtaaaagaagaggcacagcaacttgctctaatttgtgaaactgttggggc

SEQ ID NO: 251932 - DNA, 536 bp, Glycine max
  unsure (1)..(536): unsure at all n locations
ggggaggggagtgnattctnactatgatactattgganctcactggtactactcggagagacaagcttgcatgcctgcaggtcgactctagaggatcccctcggggaattccaattccacattttcaagaaataaggaggcaaaaatgttcatatatgaattggaattatttgttttcttattaggcctatcctgaagccaaaggaaatgagatcggaattcctcgggggtaccgagctcgaattccctatagtgagtcgtattaaattcgtaatcatgtcataagctgttcctgtgtgaaattgttatccgctcacaattccacacaacatacgagccggaagcataaagtgtaaaacctggggtgcctaatgagtgagctaactcacattaattgcgttgcgctcactgcccgctttccagtcgggaaacctgtcgtgccagctgcattaatgaatcggccaacgcgccgggaaaaggcggtttgcgtattgggcgcttttcggcttctcgcttaatgactcgttgggctcggc

SEQ ID NO: 251933 - DNA, 315 bp, Glycine max
  unsure (1)..(315): unsure at all n locations
tcggggaattccaattccacattttcaagaaataaggaggcaaaaatgttcatatatgaattggaattatttgttttcttattaggcctatcctgaagccaaaggaaatgagatcggaattcctcggngaattccaattccacattttcaagaaataaggaggcaaaaatgttcatatatgaatgggaataattggtttcctaataaggccattcttgaacccaaaggaatgaaaaccggatttcttcgggaattccaatttcacattttcaagaaataaagaggcaaaaatgttcatatattgaattggaatta

SEQ ID NO: 251934 - DNA, 155 bp, Glycine max
cttgcaaaattaaaaataacacaatggcagcgagcgctcgcactccacgcgaagagttcgtgtacatggcgaagctggcggagcaggccgagcgctacgaggagatggtggagttcatggagaaggtctccgcctgcgtcgagagcgtggagctg

SEQ ID NO: 251935 - DNA, 415 bp, Glycine max
tgggcatacggcatgaatgtttttgatttggtccagtggaagaggcaaaacatcaccgatgtgtaccacaactggcaaaagatgaatcatgatagacaactatggaagttaggaacactgccgcctggtcttataacattctggaaacgcactttccaactgcaccgatcttggcatgtgttgggtcttggctataaccccaatatcaaccaaaaagaaattgaacgggctgctgttatacactacaatggaaacatgaaaccgtggctggagataagtattcccaagttccgaggttattgtacaaagtatgttgactacaatcttgtgtatttacgagaatgcaacatcaatccataaaaagatctggtggcatgtgtagagcatgaaatttatttaaagcttttatgattat

SEQ ID NO: 251936 - DNA, 99 bp, Glycine max
tcggggaattcctattccttattttcaagaaataaggaggcaaaaatgttcatatatgaattggaatgattagatgtcttattaggcctatcctgaagc

SEQ ID NO: 251937 - DNA, 389 bp, Glycine max
ctcactcactgcagatctcaattgcatcgctgtccatggctaccatcgttagcatcaaggcccgccagatcttcgacagtcgtggcaatccaactgtcgaggtggatttgacttgctccgatggtacttttgccagagctgctgttccaagtggtgcatccactgggatttatgaggcccttgaattgagagatggaggatctgactaccttggaaagggtgtatcaaaggctgttgacaatgtgaacaccgtcattggccctgctttgattggcaaggacccaactgagcagactgctattgacaacttaatggttcaacagcttgatggaactgttaacgaatggggttggtgcaagcaaaagctaagagcaaatgccatattggca

SEQ ID NO: 251938 - DNA, 420 bp, Glycine max
  unsure (1)..(420): unsure at all n locations
actgaaggtgtgcaattcagtggagaagtatgcaaataagtgcaagagaatggttttcgagtatggacccttgatttttgaccatgcagagaaaatcctagagacgacagatatatgcaatataatacatgcctgcaaatcttcagatgtagctggacagcaagcctttctttcggtctcttaattatagaaacaaagctctaccagatttatgcttcacttgttggctgaaagattgccatatattcaaatataataagggggaggggagtacaaattcgatccgtattcagcgcaaaatttttaatactatctaaatttctaattatgtgtcagcacatcatcaaaaaagttgaaacttaagttgaaacttcctgtgtagtagtggctgtgatactcatgcttngttaattattttac

SEQ ID NO: 251939 - DNA, 267 bp, Glycine max
tcggggaattccaattctacattttcaagaaataaggaggcaaaaatgttcatatatgaattggaattatttgttttcttattaggcctatcctgaagccaaaggaaatgagatcggaattcctcggggaattccaattccacattttcaagaaataaggaggcaaaaatgttcatatatgaattggaattatttgttttcttattaggcctatcctgaagccaaaggatatgagatcggaattcctcggtgatttcgaattttaca

SEQ ID NO: 251940 - DNA, 308 bp, Glycine max
tggtcatcgttgggatctccatacgccggatctgctaaaatacgcttgatccatatgggcctcctcgaccacttgtgggacgacaccgtcgccggcccaaggccggaaaacggtctcggcaagctccgaaaacaccacaccttcactttccgacctagctccggcaaggaaacggagggcgggagcgtgagatcgtacggagacgaatcgtcggaggaagcgacgagagtgacgcgtagtatcatgatcgtgaaaccgcccgggtaccagagtgggatcgctccggtttcttccggcgggtctactac

SEQ ID NO: 251941 - DNA, 270 bp, Glycine max
ctgaactctacatcttcaagtggacatccttgttgatccctcccttgaccctactaatcttaaacatcattggagtcattgttggtgtctcagatgccataaacaatggctatgattcatggggtcctttgtttgggaggctattttttgccctttgggtcattgtccacctttaccctttcctcaagggtgtcatgggaaaacaagaaggtgttcctaccatcattttggtttgggctattcttctggcttccatattgacactacttt

SEQ ID NO: 251942 - DNA, 364 bp, Glycine max
cctgaacattgtaaagaagccagtgctaggatttgttagtgaagcaatggctcaaaccatgttgctcatgtctagtgtctctagcagttattccgtggatttgaagaaagaccttttcctccaattgcagagtcaaagtttaaggcctaagttctctcagctctcattcaacccacttccatcatcaacttcttccttttcttcaccccgtacattcacaactctggccctcttcaaatctaagaccaaagccgctcctgctaagactaaggttacaaagccaaagcagaaggttgaagatggtatctttggcacttctggaggatttggttttactaagcagaacgagctctttgtgggtcgt

SEQ ID NO: 251943 - DNA, 252 bp, Glycine max
tgcgtcatcgttgggatttacatacgccggatctgctaaaagacgctggatccatatgggcctactaggaccacttgtgggacgacaccgtcgccggtccaaggccggaggacggtctcggcaagctccgaaaacaccacacgttaactttccgacctagctacggcaagggaaacgtacggcggaagcgtgagatcgtacagggacgaatcgtcggaggaagcgacgagagtgacacgtgagtatatgatc

SEQ ID NO: 251944 - DNA, 308 bp, Glycine max
tcggggaattccaattccacattttcaagaaataaggaggcaaaaatgttcatatatgaattggaattatttgttttcttattaggcctatcctgaagccaaaggaaatgagatcggaattcctcggggaattccaattccacattttcaagaaataaggaggcaaaaatgttcatatatgaattggaattatttgttttcttaataagcctatcctgaagccaaaggaaatgagatcggaatttctcggggaatttcaattccacattttcaagaaataaggaggcaaaaatgttcatatatgaatt

SEQ ID NO: 251945 - DNA, 419 bp, Glycine max
caatgtgcaggcctccgcttctagagagcagatgggttacacttttgatgccttgaaaacctatgttcctgaaatggtcgagctacttgttgattgtgtcaggaaccctgttttccttgattgggaggttaacgagcagcttctgaaagtgaaggctgagattggtgaagcttccaaaaatccccaagacttgcttttggaagcaattcattctgctggtttttctggtgccttggcaaatcctcttttagcttcagaatcagctctaaatagactaaatggtacaattctggaggagtttgttgctgagaactatacagcacctcggatagtacttgcagcatctggtgttgaacatgaggaattgttatctgttgcagaacctctcttgtctgatctacccagtgtcccacgtctag

SEQ ID NO: 251946 - DNA, 528 bp, Glycine max
  unsure (1)..(528): unsure at all n locations
ggggnagaggagtctcaccatgatntacagcatctattgtactactcggagagacaagcttgcatgcctgcaggtcgactctagaggatcccctcggggaattccaattccacattttcaagaaataaggaggcaaaaatgttcatatatgaattggaattatttgttttcttattaggcctatcctgaagccaaaggaaatgagatcggaattcctcgggggtaccgaactcgaattccctatagtgagtcgtattaaattcgtaatcatgtcatacttgtttcctgtgtgaaattgttatccgttcacaattccacacaccatacgagccggaagcataaaatgtaaagcctggggtgcctaatgagtgaactaactcacattaattgcgttgcgctcactgcccgttttccaatcgggaaacctgtcctgccacctgcattaatgaatcggccaccccccggggaaaggcggtttgcgaattggccgctcttccgcttcctcgctaactgactcgctgcgctcgg

SEQ ID NO: 251947 - DNA, 396 bp, Glycine max
gccaaagttgcaaaatttattgaggataaatcaaagctgtctgaagacaagattgcagccgtaactgacatagttcgtgatgaagataaagcgaaggagattgtggaagctgccaaggcctccatgggacaatatttgtccccagtggacttgattaatgtccaacaatttgcacagagagtaatggacctatccaagtacaggcggaagttgtatgattacctggttgctaaaatgaatgacatcgcactaaatttggcctctttaattggtgaagttgttggtgcacgattaatttcccatgcaggtagcctcacaaatttagctaaatgcccttcttcaactcttcaaattcttggtacagagaaagctctgttcaggttcctgcttcacaca

SEQ ID NO: 251948 - DNA, 528 bp, Glycine max
  unsure (1)..(528): unsure at all n locations
aggaggtaggttttgtcatagaaataagaatatattgtactactcggagagacaagcttgcatgcctgcaggtcgactctagaggatcccctcggggaattccaattccacattttcaagaaataaggaggcaaaaatgttcatatatgaattggaattatttgttttcttattaggcctatcctgaagccaaaggaaatgagatcggaattcctcggggaattccaattccacattttcaagaaataaggaggcaaaaatgttcatatatgaattggaattatttgttttcttattaggcctatcctgaagccaaaggaaatgagatcggaattcctcggggaattccaattccacattttcaagaaataaggaggcaaaaatgttcatatatgaattggaattatttgttttcttattaggcctatcctgaagccaaaggaaatgagatcggaattcctcgggggtaccgagctcgaattccctatagtgagtcgtattaaattcgtaatcatgtcatagctgttn

SEQ ID NO: 251949 - DNA, 423 bp, Glycine max
  unsure (1)..(423): unsure at all n locations
gagagaacttcaactgagggtgagagtgacacaaatctagggagcactactctaaaagttctattagattcttcaaaacatgaccatgcatcgcgagtcttgggcttttgtcttcggcgttatgggcaacatcatctcctttggagtgttccttgctccattgccaaccttttaccaaatctacaagaagaaatccactgaagggttccagtcacttccttatgttgttgcactgttcagtgcaatgctttggatttactatgctttcgtcaaaagggaagctgccctccttctcattaccattaacacatttggaattgttgtggagtcaatttaccttgcaatcttcctactttatgccccaaggaagcctangcttacaaccatcaagcttcttctcttactgaatgtgtttgggtttgg

SEQ ID NO: 251950 - DNA, 304 bp, Glycine max
ctgaagcgtctcttacggcagaaattggtgcggcactttgtgcaaccctaaccttggagatcaagggagaaattgaggagtttctcaaagtggttttcactctgtttcaagacctggattttactttcttagagatgaatcctttcacattggttgatggaaagccttattctttggatattataggcgagctaaatgacactgctgctttcaagaacttcaagaaatggggagacattgaatttccactgccattttgaagggttattagtgccaccgagtctttcattcatggattagatta

SEQ ID NO: 251951 - DNA, 533 bp, Glycine max
tagaaggagcgtgtgttgatctcgtagtataagattacatacgaagagacaagcttgcatgcctgcaggtcgactctagaggatcccctcggggaattccaattccacattttcaagaaataaggaggcaaaaatgttcatatatgaattggaattatttgttttcttattaggcctatcctgaagccaaaggaaatgagatcggaattcctcggggaattccaattccacattttcaagaaataaggaggcaaaaatgttcatatatgaattggaattatttgttttcttattaggcctatcctgaagccaaaggaaatgagatcggaattcctcggggaattccaattccacattttcaagaaataaggagggcaaaaatgttcatatatgaattggaattatttggtttcttaataagcctatcctgaagccaaaggaaatgaaatcggaattcctcgggggtaccgagctcgaattccctatagtgagacagaattagaatcgtaatcatgtcatagctggttcctgtg

SEQ ID NO: 251952 - DNA, 378 bp, Glycine max
ttcgaatcatctacccagttccactattgaacttagtggccatcctattaccagacaattgggaaaaatgtgaaatcaaagttggatttgtcaattattttcatgccgcgccaggaggttctctgtgctgtttgtgatgctcatcttggacatgtgtttgacgatggtccttcacccacgggaaaacgtttctgtatcaatagtgctgcccttaagctcaaaccaaagcagtagacagtgaaatacctacctatcactcggaagcagatggtataatattctaaatatgtgatatactttgtggctgtttttctatttatggagaacaacaatgaatattgtcttgaactggtgatgtataaaacacaaattttatag

SEQ ID NO: 251953 - DNA, 535 bp, Glycine max
gagttagtgagtggtttctgacgtatgtagtacagccacagatcagtatcactctagaagagctatgacgtcgcatgcacgcgtacgtaagctcggaatcgcttcacgaccacgctgatgagctttaccgcagctgcctcgcgcgtttcggtgatgacggtgaaaacctctgacacatgcagctcccggagacggtcacagcttgtctgtaagcggatgccgggagcagacaagcccgtcagggcgcgtcagcgggtgttggcgggtgtcggggcgcagccatgacccagtcacgtagcgatagcggagtgtatactggcttaactatgcggcatcagagcagattgtactgagagtgcaccatatgcggtgtgaaataccgcacagatgcgttaggagaaaataccgcatcaggcgctcttccgcttcctcgctcactgactcgctgcgctcggtcgttcggctgcggcgagcggtatcagctcacttaaaagcggtaattcagttatccacagaatcaggggataacgcagga

SEQ ID NO: 251954 - DNA, 370 bp, Glycine max
tcggggaattccaattccacattttcaagaaataaggaggcaaaaatgttcatatatgaattggaattatttgttttcttattaggcctatcctgaagccaaaggaaatgagatcggaattcctcggggaattccaattccacattttcaagaaataaggaggcataaatgttcatatatgaattggaattatttgtattcttattatgcctatcctgaagccaaaggaaatgagatcggaattcctaggggaatttccaatttcacattttcaagaaatagtgaggcgaaaatttttatatatgaattgtaattattggtattaatattaagcctatcctgaagccaaaggaaatgagatccgaattcc

SEQ ID NO: 251955 - DNA, 371 bp, Glycine max
agagttctgagtttcataggagaaaaaaaatgacagaagaacaaaccaaaacggttgagtcagaatcagtaacaccaccacctgctgctgctgctccttcacaggttcctcctgctgctgaggctgaacatgttcctgaggctccaaaggatgtgactgaggagaaatctgtaattccagtgccttcttctgatgacaagcctgatgaatccaaggctcttgtcttggttgagaagactcaagaagttgctgaagtgaaaccaactgaaggctctatcaaccgagatgcggtgcttgcaagagttgcaactgagaagaggttgtcattaatcaaagcatgggaagaaagtgaaaaatcaaaagctgaaaac

SEQ ID NO: 251956 - DNA, 399 bp, Glycine max
gcaacaacaagttctggtactcttaaagcaactcctttccttggccaaggcaagggtgccaatgccaatgctcttagggatgttgtctccatgggaactgggaagtacaccatgggcaatgatttgtggtatggaccagacagagtgaaatacttgggacccttctcagctcagaccccttcatacttgaaaggagaattccctggggattatggatgggacactgctggcttatctgctgacccagaagcatttgccaagaacagggctcttgaggtgatccatgggcgatgggccatgcttggagcactaggatgcatcaccccagaggtgctagagaagtggttgagagtggacttcaaggagccagtgtggttcaaagctggagcccaaatattc

SEQ ID NO: 251957 - DNA, 547 bp, Glycine max
  unsure (1)..(547): unsure at all n locations
acgtcntnaggggaggagtgttntcgctccatcgaatnctataagaatcactaccgtaactaaccggagagacaagcttgcatgcctgcaggtcgactctagaggatcccctcggggaattccaattccacattttcaagaaataaggaggcaaaaatgttcatatatgaattggaattatttgttttcttattaggcctatcctgaagccaaaggaaatgagatcggaattcctcggggaattccaattccacattttcaagaaataaggaggcaaaaatgttcatatatgaattggaattatttgttttcttattaggcctatcctgaagccaaaggaaatgagatcggaattcctcggggaattccaattccacattttcaagaaataaggaggcaaaaatgttcatatatgaattggaattatttgttttcttattaggcctatcctgaagccaaaggaaatgagatcggaattcctcgggggtaccgagctcgaattccctatagtgagtcgtattaaattcgtaatcatgtcatagctggt

SEQ ID NO: 251958 - DNA, 402 bp, Glycine max
caggagtgtctcttacgtcagaaattgttgccccacttgttgcaacccttcccttggagatcaagggagaaattgaggagtttctcaaagtggttttcactctgtttcaagacctggattttactttcttagagatgaatcctttcacattggttgatggaaagccttatcctttggatatgagaggcgagctagatgacactgctgctttcaagaacttcaagaaatggggagacattgaatttccactgccatttggaagggttatgagtgccaccgagtctttcattcatggattagatgaaaagacaagtgcatccttaaaattcacagtgttgaacccaaagggccgaatttggacaatggtagcttggggaggtgctagtgtcatttatgctgata

SEQ ID NO: 251959 - DNA, 310 bp, Glycine max
tcggggaattccaattccacattttcaagaaataaggaggcaaaaatgttcatatatgaattggaattatttgttttcttattaggcctatcctgaagccaaaggaaatgagatcggaattcctcggggaattccaattccacattttcaagaaataaggaggcaaaaatgttcatatatgaattggaattatttgttttcttattaggcctatcctgaagccaaaggaaatgagatcggaattcctcggggaattccaattccacattttcaagaaataaaggtgcaaaaatggtcatatatgaattgg

SEQ ID NO: 251960 - DNA, 352 bp, Glycine max
aagaagcagaaagagaagcattagcaaaagcaagaagaactagtctaagcagaaatggcctcttcagtgatggcatctgtggccctcaaacctgcccctttcactgttgagaagtcctcagttagaggccttccctccctctcaaggaactcctcttcattcagagttgtggccagtggtggcaagaagatcaagactgacaagccttatggaattaatggtggcatggctttgagggaaggagttgatgcatctggcaggaaaggaaagggaaaggggcgttaccaggttgtagacaaatacggtgctaatgtcgatgggtacagtcctatctacgacaccaaggactggt

SEQ ID NO: 251961 - DNA, 538 bp, Glycine max
  unsure (1)..(538): unsure at all n locations
taggagggtggtggtntnanccatgaantatagcgacacttagctactactcggagagacaagcttgcatgcctgcaggtcgactctagaggatcccctcggggaattccaattccacattttcaagaaataaggaggcaaaaatgttcatatatgaattggaattatttgttttcttattaggcctatcctgaagccaaaggaaatgagatcggaattcctcggggaattccaattccacattttcaagaaataaggaggcaaaaatgttcatatatgaattggaattatttgttttcttattaggcctatcctgaagccaaaggaaatgagatcggaattcctcggggaattccaattccacattttcaagaaataaggaggcaaaaatgttcatatatgaattggaattatttgttttcttattaagcctatcctgaagccaaaggaaatgagatcggaattcctcggaggtaccgagctcgaattccctaatatgagtcgtattaaattcgtaatcatgtcatagctggttcct

SEQ ID NO: 251962 - DNA, 330 bp, Glycine max
tgggaagtggtccacgctgcggtcttggggagctcattcttcctgaaaacgaaccaggaagcagtattatgcctgggaaggttaacccgacccagtgtgaggctttgacgatggtgtgtgcacaggtcatgggaaaccatgttgcaatcacagtgggtggatcaaatggtcattttgagctcaatgtgttcaagccaatgattgccaattgtctcctgcattcgctgagactgcttggagattcgtctgcttcctttgaaaagaattgtttgagaggtattcaagctaatagggaaagaatttcaaaattactgcatgagtcacttatgc

SEQ ID NO: 251963 - DNA, 344 bp, Glycine max
ctttaaaaaaatcattttcctttaaacttcaattttagagttctctctctgattcatccccagcaatggcttgtgcattgcaagcaaccttagcagccaacgcctatgtcttttcttccaggagattctccttgaagctccaaaagaacagtaagagaaggttttctttgttcactgttagagttgattctgatgaatctgattgcaatgaggaagaatgtgccccggataaggaaatagggaagggcagtgtggaatggttagctggggagaagacgaaagtagtgggtacattcccacctcgtcgtaagccgggttggactggctatgttgagaaggacact

SEQ ID NO: 251964 - DNA, 420 bp, Glycine max
  unsure (1)..(420): unsure at all n locations
ctttctattataatggacagagggttaataggaatgtatcatgattggtgtgagtcctttaacacctatcctcgcacatacgatcttcttcatgctagctttcttttcaaatatcttgagcaaagatgtgacatcgtagatgtggctgtggagattgatcgcatattgagaccaaatggatatctcgtggttcaagattctgtggaaatacttaacaagctcaatccaatcttgcgttcacttaactggtctgtaacgttgcatcaaaatcagtttcttgtaggtagaaaaggtttctggcgtcctacgagctcttgagactgaatgtatattaggttaataaaaatgacgtattcttcaatcacccgtgtatcagtatattctggataaaaattaggtgcaaaaagaatgaattntaag

SEQ ID NO: 251965 - DNA, 534 bp, Glycine max
  unsure (1)..(534): unsure at all n locations
agttgaggcagtgtgtcntgcctatgcacatcagcacataattgtactactcggagagacaagcttgcatgcctgcaggtcgactctagaggatcccctcggggaattccaattccacattttcaagaaataaggaggcaaaaatgttcatatatgaattggaattatttgttttcttattaggcctatcctgaagccaaaggaaatgagatcggaattcctcggggaattccaattccacattttcaagaaataaggaggcaaaaatgttcatatatgaattggaattatttgttttcttattaggcctatcctgaagccaaaggaaatgagatcggaattcctcggggaattccaattccacattttcaagaaataaggaggcaaaaatgttcatatatgaattggaattatttgttttcttattaggcctatcctgaagccaaaggaaatgagatcggaattcctcgggggtaccgagctcgaattccctatagtgagtcgtattaaattcgtaatcatgtcatagctgtt

SEQ ID NO: 251966 - DNA, 414 bp, Glycine max
cctcactttacttctcttcttcggcgcttcgcggcctcggtcctcctctgcccttctcaattcaattgcgacgctcgcgggggcgccctgcaattcgatgtgcttcctcttcctcagactcagatgcttccaacaaagtctcgtctcgtctgtcgcaagttcagcatcttcttcagcaggccgaacaccgcgctctctccgccgaccagggcccacctgctaaaatcaccttagatcatgttaccgtgagctttgccagaagtggaggacctggaggtcagaatgtcgatatagtgaacaccaatgtggacatgcgcttcaatgttaaaaatgcatattggttgagtgacaggatcagagaccagattttgcaaactgagaaaaactcgtataacaaggatggggagcttgtga

SEQ ID NO: 251967 - DNA, 273 bp, Glycine max
ccttattcttcgggaacaactggtcttcccaagggagtgatgctgagccacaaggggctggtgaccagcattgctcagcaggttgacggtgataatcccaacctctattaccactgccacgacaccatcctctgcgttctttccctatttcacatttactttctcaacttcgttcttctctgtggcttgcgtgccaaggctaccattctccttatgcccaagttcgatattaacttcttgcttgctctcattcacaagcacaaagtcactatt

SEQ ID NO: 251968 - DNA, 268 bp, Glycine max
gttgaagatgagaagttaagaagcctcaagcaggaatggggggatgagatatattcagctgatgttacagccctaaaagaaataaatgaatacaatgcaagtggtgggtatactggtaaagagctatggaacttcaaggaaaaaggaaaggctacattgaaagaagttatgaattatattatgaatcatatcaagccgcttaagcgcaagagagcttaggcaaaagtctttgcatgtgataaatgcctgatagctcaaacagtagatg

SEQ ID NO: 251969 - DNA, 355 bp, Glycine max
  unsure (1)..(355): unsure at all n locations
gaacaaaacaattcccgagcacctagattccaacaaaacaaagggcagaaaaccggttgaccgttcctcatgtggttcccacacggcctctagcagcgatgtggaaactgatgcactagagaagggtgagaaagggaaggaagagcctgaaacacctgatgctaaccaattagccattgactntagtaatcgtcgtagaagtgttagcaatcttactgattcttggaaagaggtctctgaagaggggagactggcctttcaggctctattctccaaagaggtgttgcctcaaagcttttcacctgctcatgctttgaagaataagaatcagcanatggacaacgccaataataac

SEQ ID NO: 251970 - DNA, 397 bp, Glycine max
atttggttctcactggttgccaatatgtctatcacggggatgaactttagcctcatgctcaactccgttggattctaccaaatatcaaaactgagcatgattccagtggtttgtgtgatggaatggatacttcacaacaagcactactcaagggaagtgaaaatgtcagtggtggttgtggttattggtgtcggtgtttgcactgtaactgatgtaaaagttaacctcaaaggtttgatgtgtgcctgtatagcagttttgtcaacatctttacagcaaatttcaataggttctcttcaaaagaaatattcaattggatcttttgaattgctgagtaaaactgctcccattcaagcgctttttcttgttattcttggtccattggtggattactacc

SEQ ID NO: 251971 - DNA, 531 bp, Glycine max
  unsure (1)..(531): unsure at all n locations
agggagggagtgtttttgcctccgaattacagcacatattgtactactcggagagacaagcttgcatgcctgcaggtcgactctagaggatcccctcggggaattccaattccacattttcaagaaataaggaggcaaaaatgttcatatatgaattggaattatttgttttcttattaggcctatcctgaagccaaaggaaatgagatcggaattcctcggggaattccaattccacattttcaagaaataaggaggcaaaaatgttcatatatgaattggaattatttgttttcttattaggcctatcctgaagccaaaggaaatgagatcggaattcctcggggaattccaattccacattttcaagaaataaggaggcaaaaatgttcatatatgaattggaattatttgttttcttattaggcctatcctgaagccaaaggaaatgagatcggaattcctcgggggtaccgagctcgnattccctatagtgagtcgtataaaattcgtaatcatgtcatagctggt

SEQ ID NO: 251972 - DNA, 530 bp, Glycine max
aggagggacgtggtctacttatgatcataagccaatatagaattactcggagagacaagcttgcatgcctgcaggtcgactctagaggatcccctcggggaattccaattccacattttcaagaaataaggaggcaaaaatgttcatatatgaattggaattatttgttttcttattaggcctatcctgaagccaaaggaaatgagatcggaattcctcggggaattccaattccacattttcaagaaataaggaggcaaaaatgttcatatatgaattggaattatttgttttcttattaggcctatcctgaagccaaaggaaatgagatcggaattcctcggggaattccaattccacattttcaagaaataaggaggcaaaaatgttcatatatgaattggaattatttgttttcttattaggcctatcctgaagccaaaggaaatgagatcggaattcctcgggggtaccgaacctcaattccctataatgagtcgtattaaattcgtaatcatgtcatagctgtt

SEQ ID NO: 251973 - DNA, 421 bp, Glycine max
  unsure (1)..(421): unsure at all n locations
ccacacttcacttctcttcttcggcgcttcgcggcctctctcctcctctgcccttctcaattcaattgcgacgctcgcgggggcgccctgcaattcgatgtgcttcctcttcctcagactcagatgcttccaacaaagtctcgtctcgtctgtcgcaggttcagcatcttcttcagcaggccgaacaccgcgctctctccgccgaccagggcccacctcctaaaatcaccttagatcatgttacggtgagctttgccagaagtggaggacctgggggtcagaatgtcaataaagtgaacaccaaggtggacatgcgcttcaatgttaaaaatgcatattggttgagtgacaggatcagagacaagattttgcaaacggagaaaaaccgtattaacaaggatggngagcttgtgatttcttc

SEQ ID NO: 251974 - DNA, 238 bp, Glycine max
tgatctgcatgaggctctggctgccttggagaatcaaaaggaagaaaccatcaagtcccttgattcccagatcgcagcccttagccaggaaattgttaataaggttcttgccactgtttaatatgtctgtgtaattttgattttaatgccctcaccatacgattcatagtttctacttttgaatggctctattctgtattctcgatacttctgaatgtataataccgtattcaaggta

SEQ ID NO: 251975 - DNA, 412 bp, Glycine max
aaagattcgaaacgaagaaagaaagcgttgtgaagaatggcggaagagggacaagtgatcggtgtccacagcgtagaggagtggaaggaacatctcaagaagggagaagagtccaagaaattgattgtggtggattttactgcttcttggtgcggtccatgccgtttcattgccccaattcttgcagagtttgctaaaaagttgccgaatgtcaccttcctcaaggtggatgtggatgaattggagactgtttccaaggagtggggaattgaggctatgccaaccttcctgttcttgaaagaaagcaagctggtggacaaggttgtgggtgccaagaaagaggagctgcaattgacaatagccaaacatgccgcaattgctgctgctttgagtgccatatgaatatgttaag

SEQ ID NO: 251976 - DNA, 363 bp, Glycine max
ctcgactcatccacccaattcatatggggggtgctccagcaaaacgctggtgctgatagaaaagatgtgcaaaaagttaactaggtcgtggatgacatggatggcgttgcatataccagtaacgattagatacatttgagtgcaagatatttcaatgactatagtggtgacctgaaaacacagatcacaggtgtgttgtaccatgaaatggtccacgtttgacaatggaatgacaatggccaaactcctagtgtattagttgaaggtattgtagactatgtgaagcttatagccaattatgcacctagtcactgggtgaaagcagggcaaggacatatatgggaccagggatatgaagttact

SEQ ID NO: 251977 - DNA, 449 bp, Glycine max
  unsure (1)..(449): unsure at all n locations
agtagtggttgtgcagtacagcatacattcatataaataacgcgccacagtctggtctaacctctggatgctttccacttctgcacttatagaggaagggataatgatggggctggatgcttattagctatctgaacccaagaaatagaccgaatcctcgggaattccaattcccattttcaagaaataaggatcaaaaatgttcatatatgaatggaatatttgtttcttatttgcctatctgataccaaggaaagagatcggaatcctcggggaattccaattccacattttcaagaaataaggaggcaaaaaatgtcatatatgaattggaattatttgttttcttattaggcctatcctgaagccaaaggaaatgagatcggaattcctcggnggtaccgagctcgaattccctatagtgagtcgtattaaattcggaatcatgt

SEQ ID NO: 251978 - DNA, 417 bp, Glycine max
  unsure (1)..(417): unsure at all n locations
gttttctccactatggctgcacaacgaaacttccaagactacttgcctgtgatggccaacaagcttggtggggatggcctaattgatgaactgtgcaatgggttcaatctgttgaaggattctgataaaggggtcatcacctttgagagcctcaagaggaactctgccttgtttggccttcagggtcttagtgatgaagatcttcggtccatggttttggaaggtgactttgatggtgatggtgcactcaatcagttggagttctgtgttttgatgttcagactcagccctgaattgatggagggctcaaagatgtggcttgaacaagtccttcaacaagagcttaaggattatttctaactntcctttnttttttttctcccttacccttttcattcatttgtcattttgggctat

SEQ ID NO: 251979 - DNA, 345 bp, Glycine max
tcgtgtgcgtgcacgtctaacatgttcacgatcgtgaattccaattccacattttcaagacataaggacgcaaaaatgtgcatgtatgaattggaattatttgttgtcttattaggcctatcctgaagccaaaggaaatgagatcggaattcctcggggaattccaattccacattttcaagaaataacgaggcaaaaatgttcatatatgaattggaattatttgttatcttattaagcctatcctgaagccaaaggaaatgagatcggaattcctcggggaattccaattccacattttcaagaaataaggatgcacaaatgttcatatatgaattgggatta

SEQ ID NO: 251980 - DNA, 385 bp, Glycine max
ttggggaattccaattccacattttcaagaaataaggaggcaaaaatgttcatatatgaattggaattatttgttgtcttattaggcctatcctgaagccaaaggaaatgagatcggaattcctcggggaattccaattccacattttcaagaaataaggaggcaaaaatgttcatatatgaattggaattatttgttttcttattaggcctatcctgaagccaaaggaaatgagatcggaattcctcggggaattccaattccacattttcaagaaataaggaggcaaaaatgttcatatatgaattggaaataattggtttcttattaggcctatcctgaagccaaaggaatgggaacggaattcttcgggggtaccgagctc

SEQ ID NO: 251981 - DNA, 507 bp, Glycine max
  unsure (1)..(507): unsure at all n locations
aggaaaggggtcnatctagagccgtacgcatgctanncnctnnnnnnnnnnngnngnngngggngactctagaggatcccctcggggaattccaattccacattttcaagaaataaggaggcaaaaatgttcatatatgaattggaattatttgttttcttattaggcctatcctgaagccaaaggaaatgagatcggaattcctcggggaattccaattccacattttcaagaaataaggaggcaaaaatgttcatatatgaattggaattatttgttttcttattaggcctatcctgaagccaaaggaaatgagatcggaattcctcggggaattccaattccacattttcaagaaataaggaggcaaaaatgttcatatatgaattggaattatttgttttcttattaggcctatcctgaagccaaaggaaatgagatcggaattcctcgggggtaccgagctcgaattccctatagtgagtcgtattaaattcgtaatcatgt

SEQ ID NO: 251982 - DNA, 362 bp, Glycine max
gtagacccagctttcatccaagacctagaacacagaccagggctctccataatccaagctgaaggaattcccataattgacctctctccaatatccaaccacacagtttcagatccatcttccattgaaaacttagtgaagcagatagggagtgcatgcaaggaatggggtttcttccaagtaaccaaccatggggtgcccctcactctaaggcaaaacattgagaaagcctcaagattgttctttgcacagaatttggaggagaaaagaaaggttagcagagatgagagttctccaaatggttactatgacacagaacacaccaagaacattaaggactggaaaagaagtctttgattttc

SEQ ID NO: 251983 - DNA, 409 bp, Glycine max
gtatacccatctttcatccaagacctagaacacagaccagagctctccataatccaagctgaaggaattcccataattgacctctctccaatatccaaccacacagtttcagatccatcttccattgaaaacttagtgaagcagatagggagtgcatgcaaggaatggggtttcttccaagtaaccaaccatggggtgcccctcactctaaggcaaaacattgagaaagcctcaagattgttctttgcacagaatttggaggagaaaagaaaggttagcagagatgagagttctccaaatggttactatgacacagaacacaccaagaacattaaggactggaaagaagtctttgattttcaagccaaagaccccactttcatccctgtcacttttgatgaacatgatg

SEQ ID NO: 251984 - DNA, 408 bp, Glycine max
agcgagcattctacaatggctactataccagttaatcccgggcctttcttgaacaatttgactgggaagcctgtaattgtgaaactgaagtggggaatggagtacaagggctatctcgtttccgttgattcctatatgaacttgcagctggccaacaccgaggagtacattgagggacaatttactggaaatttgggagagattttaatcagatgtaacaatgttctctaccttcgaggagtaccggaggatgaggaaatcgaagatgctgctgaagactagagagtgatagaagctgctaatggctatgacataaacagaactcgaatttctactgtgtatgtatcttcacataaatgtaggttttttgtagtcaatgtgtacagatttgaatcaatgatgcactcg

SEQ ID NO: 251985 - DNA, 354 bp, Glycine max
  unsure (1)..(354): unsure at all n locations
ccctcgggaattccaatgctattntcaagaaataaggaggcaaaaatgtgcatatatgaattggaattatgtgttttcttattaggcctatcctgaagccaaaggaaatgagatcggaattcctcggggaattccaattccacattttcaagaaataaggaggcaaaaatgttcatatatgaattggaattatttgttttcttattaggcctatcctgaagccaaaggaaatgagatcggaattcctcggggaattccaattccacattttcaagaaataaagaagcaaaaatgttcatatatgaattggaattatttggtttcttaataagcctaatcttgaacccaaagaaa

SEQ ID NO: 251986 - DNA, 407 bp, Glycine max
cgcaaacactctgttcctacaatcattccaaatgtgcccttccggtcgcaccctcctcccttcctccgtctccgatttccgaccggcattcgacgtcctcgatgccgaccgcgacggcaaaatcagccgcgacgacctccgcgccttctacgccggagtcggcggcggaggagatgacgtgatcggggcaatgatgacagtggctgacaccaataaggacgggttcgtggagtacgaggagttcgagcgcgtggtctcggcggagagaaagcccgtggggtactgtggggccatggaggacgtgttcagggtcatggacaaggacggcgacggcaagctcagccaccatgatctgaagacttacatggcctgcgctggttttccggccaccgacaacgacatcaacg

SEQ ID NO: 251987 - DNA, 410 bp, Glycine max
  unsure (1)..(410): unsure at all n locations
cgcaaacactttgggcttacaatcattccaaatgtgccctgccnntggcaccctcctcccggcctccgtctccgatttccgaccggcattcgacgtcctcgatgccgaccgcgacggcaaaatcagccgcgacgacctccgcgccttctacgccggagtcggcggcggaggagatgacgtgatcggggcaatgatgacagtggctgacaccaataaggacgggttcgtggagtacgaggagttcgagcgcgtggtctcggcggagagaaagcccgtggggtactgtggggccatggaggacgtgttcagggtcatggacaaggacggcgacggcaagctcagccaccatgatctgaagacttacatggcctgcgctggttttccggccaccgacaacgacatcaacgcca

SEQ ID NO: 251988 - DNA, 358 bp, Glycine max
ttgagctcaacaaaacttgatgagaaaccactgttccctgtgcttgctacaaaggatggaatctgctcattgtctcaaaaaactgtggtctcgggcaacaaaagaggttttgctgacacaatggaccctgagtttcctggcaatgcagggataaacatgatgctatcacctaaaccttctggagttcagcctaccacagtgaaagaaataccaagcaaggtgttacaagaacttccttcagcggcaaatggaactggtcataaccatacatcaggagcttctatcagtggcagtgcaccggctgctaaggcacaggttgttggttggcctcctataagatcatttaggaaaaactcat

SEQ ID NO: 251989 - DNA, 402 bp, Glycine max
aaagaaatatatcaaattgatcgcttgtgtgttacccttcgaaccaaagaacttaacatgtaaaatgatctatttttcttatctatatagatagatctatctgtattctatcatttacagttgaatatatacaaatatcagtatataacaacatatattaaaaaaataacaacatatattaaaaaagtcagaataaaaaaacaaatcctttatagtatttcttgtaataaatgtgatttttggaatagggataaataaaccatggaaaaatctaagcgactctttatgaaatccaagcgatcttttcgtaggcgtttgcccccgatccaatcgggggaccgaattgattataaaaacatgggtttaattagtcgatttattagtgaacaaggaaaaatatta

SEQ ID NO: 251990 - DNA, 496 bp, Glycine max
gaggagatgtttgaatgtggaagaagggggtgatttcgagagcctagcttgcatgcctgcaggtcgactctagaggatcccctcggggaattccaattccacattttcaagaaataaggaggcaaaaatgttcatatatgaattggaattatttgttttcttattaggcctatcctgaagccaaaggaaatgagatcggaattcctcggggaattccaattccacattttcaagaaataaggaggcaaaaatgttcatatatgaattggaattatttgttttcttattaggcctatcctgaagccaaaggaaatgagatcggaattcctcggggaattccaattccacattttcaagaaataaggaggcaaaaatgttcatatatgaattggaattatttgttttcttattaggcctatcctgaagccaaaggaaatgagatcggaattcctcgggggtaccgagctcgaattccctatagtgagtcgtattaaat

SEQ ID NO: 251991 - DNA, 283 bp, Glycine max
taaactataaagatctaactatgattgagttaacaagaactgtactattgccatatcatattacaaatcaatcacaattcttattcatttaaaccaatcaccttactcaaatgacatttctatataatacatatcaaccttacaaatttcttcctatatacctatccactgtaattcttcatcatgacccattctaagtactttaccaaaaatgtattcgtcaactaatcaacattatcacatacaattttcatacttctacaccaaacttgaatgttataat

SEQ ID NO: 251992 - DNA, 514 bp, Glycine max
agttaggagtgttctgatctcgtcgaagtatagtaactgtcatagctacaagcttgcatgcctgcaggtcgactctagaggatcccctcggggaattccaattccacattttcaagaaataaggaggcaaaaatgtgcatatatgaattggaattatttgttttcttattaggcctatcctgaagccaaaggaaatgagatcggaattcctcggggaattccaattccacattttcaagaaataaggaggcaaaaatgttcatatatgaattggaattatttgttttcttattaggcctatcctgaagccaaaggaaatgagatcggaattcctcggggaattccaattccacattttcaagaaataaggaggcaaaaatgttcatatatgaattggaattatttgttttcttattaggcctatcctgaagccaaaggaaatgagatcggaattcctcggggtaccgagctcgaattcctatagtgagtcgtattaaattctaatcatgtccta

SEQ ID NO: 251993 - DNA, 377 bp, Glycine max
tgggttcttctttaagctataaggttggaactatgattgaagttccaagggctgcactagttgcagatgagattgcaaaggaagcagaattcttttcgtttggaaccaatgaccttactcaaatgacatttggatatagtagagatgatgttggcaaatttcttcctatatacctatccagtgggattctgcagcatgatccattcgaggtacttgaccaaaaaggtgtgggtcaactaatcaagatttgcacagagaagggtcgtgctgctagaccaaacttgaaggttggaatatgtggggagcatggtggggagccttcttcagttgcattctttgctgaaatcggacttgactatgtttcatgttctcctttt

SEQ ID NO: 251994 - DNA, 403 bp, Glycine max
  unsure (1)..(403): unsure at all n locations
catagacatggccaccgtcacttctgcagccgttgctattccctcattcactggcctcaaggcaagcgcaggcaaagtgagtgccgcagttaaagtctcagctccccaagccacaaggttgggcatcaaggcttcgctgaaagacgttggagtcgctgttgtggccactgccgcgagtgcagtgctggctagcaacgccatggccattgaagtgttgctgggtggtgatgacgggtctctggctttcgttcccaacaatttctccgtggcctctggggagaagatcgtgttcaagaacaacgcaggtttcccccacaacgttgtgttcgacgaggacgagattcctagcggcgtggatgcagggaaaatctncatgagcgatgaagaccttctcaatgcgcct

SEQ ID NO: 251995 - DNA, 400 bp, Glycine max
cttcataaacgcctttcttctccgtttccgtttcctcgttcaaattcgctttttgatctgcgaaaatgagagagtgcatctcgatccacattggtcaggctggtatccaggtcggaaatgcttgctgggagctctactgcctcgagcacggcatcgggcccgatgggcaaatgccaagtgacaagacagttggcggtggtgatgatgctttcaatactttcttcagcgagactggtgctggaaagcacgtgccacgtgcagtgtttgtagatcttgagcccactgttattgatgaggtgagaaccggaacttaccgccagcttttccacccagagcagctcatcagcggcaaagaagatgccgccaacaactttgcccgtggccattataccattgggaa

SEQ ID NO: 251996 - DNA, 382 bp, Glycine max
  unsure (1)..(382): unsure at all n locations
ggaagcccctccagaaaatcaaagctatcttgtccaagtgacaaaataccaagctgcacaaaactgcaagacctggatcgttggtaagtggatcacgccaagagagcaatactgggcaccacgtggaacccattttcatcaatttgttgtcccaccaattttatcatttagaaaagattgcacttatggtgacctggcagccatgagattaccagaagacgtggaaggacttgggtgttgtgagtacacgatggataggggagtggttcacgcgtgccatgcaggaggagtggtacatagccttgaaggttggtctcatcacgaagttggggccatagatgttaacagaatcgatcttgtgtgggaagcagcactcanacat

SEQ ID NO: 251997 - DNA, 320 bp, Glycine max
  unsure (1)..(320): unsure at all n locations
ggctcgctactccttcctcttggccctcctcctcctnctcggcgccggcgtgtccaacgcccgcgaagacatcctgatccgtcaggtggtgccggatgccgtcggcgaagcggcggagaaagaggaggaccacctgctgaacgcggagcaccactttgcgagcttcaaggcgaaattcgggaagaagtacgcgaccaaggaggagcacgaccgtcgcttcggcgtcttcaagtccaacctccgcagagcgaggctgcacgccaagctcgacccctccgncgtccacggcgtcaccaaattctccgatctcacttcggccg

SEQ ID NO: 251998 - DNA, 506 bp, Glycine max
  unsure (1)..(506): unsure at all n locations
aggagagatctcgaatatttggacaggggggtggaatgcataactacctatgacgtcgcatgcacgcgtacgtaagctcggaattcggcttcgtaggtgaagttgttaaacatttctagcttcttcgctctccttcgtccattcttgcacatccccctcttcctcttccttattgtcaatttcacctccaaaccccaaaccctctcacttcctacctttcgtggtcgaagccaaagacaggacccgcagggaagacaggaccgctcgccacactcgcatcagaaagaaggtcgaagggacgcccgagaggccgaggctgtccgtgttccggtcgaacaagcatctctctgtgcaggtgattgatgacaccgcaatgcgcacgcttgcttcggtgtcgacaatgcagaagacggttgctgatgagttcaactactccgctggccctacagttgaagtagcaaagaggatgggtgagatcattgcanaatcctgtttggagaaggngt

SEQ ID NO: 251999 - DNA, 498 bp, Glycine max
  unsure (1)..(498): unsure at all n locations
ngaggatgctgatctgaaattgaatcggtgtaaagatgcaagagcgatagcttgcatgcctgcaggtcgactctagaggatcccctcggggaattccaattccacattttcaagaaataaggaggcaaaaatgtgcatatatgaattggaattatttgttttcttattaggcctatcctgaagccaaaggaaatgagatcggaattcctcggggaattccaattccacattttcaagaaataaggaggcaaaaatgttcatatatgaattggaattatttgttttcttattaggcctatcctgaagccaaaggaaatgagatcggaattcctcggggaattccaattccacattttcaagaaataaggaggcaaaaatgttcatatatgaattggaattatttgttttcttattaggcctatcctgaagccaaaggaaatgagatcggaattcctcgggggtaccgagctcgaattccctatagtgagtcgtattaaa

SEQ ID NO: 252000 - DNA, 397 bp, Glycine max; identical to SEQ ID NO: 251371

SEQ ID NO: 252001 - DNA, 411 bp, Glycine max
tgcagttgataccgatgaggtggtgacaaaggagacagaggaggagaagccagcagcagaggagaaatcacaggagaaaactgataaagtgaaagaggaagcagaagagcctaaagaaactactgaaacagaaacagaatcagcaccagcagcaaccacagaggaagagaacataccagctgagacagtggaagccccagtagaggttcctgttgagaaaactgaagcttagacttatggacagtgtgagtgagaaaaacaagtttaaaaatggtcctagttgtggggatcattaggtctaccattttgcatgtcatgttgaaaagcttttttttctatttatttctttagtttactttaatagtaagtatattattattatatggaggtttaagccttgggtggaatatg

SEQ ID NO: 252002 - DNA, 398 bp, Glycine max
ggcaaacactccactagtccagtgtaccagccatatgtgtcctattcgagtgcattggcatgtgaagctcaattacaaagagtactggagggtcaagatcacaatcacaaatttcaattacagaatgaactactctcaatggaaccttgttgtgcagcatcctaatttagataatattacccagctcttcagttttaattacaagtcactaaatccctatgagggcttgaatgatacaagtatgctgtggggagtcaagttctacaatgattttctttcttcagctggatctcttggtaatgttcagtcagaaatcttacttagaaaagacaaatcaaccttcacatttgataagggatgggccttccctagaagaatttatttcaatggggataact

SEQ ID NO: 252003 - DNA, 520 bp, Glycine max
ggttagaaggggttcttatgagatggggggggaaagatagaactcggagagacatgctagcatgcctgcaggtcgactctagaggatcctctcggtgaattccaattccacattttcaagaaataacgaggcatatatgggcatatatgaatcggaattatgtgatgtcttattacgcctatcctgaagccaaaggaaatgagatcggaattcctcggggaattccaattccacattttcaagacataaggaggcaaaaatgttcatatatgaattggaattatctgttttcttattaggcctatcctgaagccaaaggaaatgagatcggaattcctcggggaattccaattccacattttcacgatgtaaggaggcaaaaatgttcatatatgaattggaattattcgtaaacttatcaggcctatcctgaagccaaaggaaatgagatcggaattcctcggtggtaccgagctcgaattccctatagtgagtcctattaaattcgtaatcatggcat

SEQ ID NO: 252004 - DNA, 523 bp, Glycine max
  unsure (1)..(523): unsure at all n locations
tgggggtatgaagacgtgttgtcatcgataggggaagggattagtatnactctccgagactagctagcatgcctgcacgcctactctagaggatcctctcgctcaattccaatcccttattttcaagaaataacgaggcatatatgtgcatatatgaatcggaattatgtgatttcttattacgcctatcctgaagccaaaggaaatgagatcggaattcctagtggaattccaattccacattatcaagacataaggaggcaaaaatgtacatatatgaattggacttatctgttctcttattaggcctatcctgaagccaaaggaaatgacatcggaattcctcggggaattccaattccacattttcacgatataaggaggcataaatgttcatatatgaattgtaattattcggtaacttatcaggcctatcctgaagccaaacgaaatgagatcggaattcctcggcggtaccgagctcgaattccctatagtgagtcctgttaaattcgtcatcccc

SEQ ID NO: 252005 - DNA, 384 bp, Glycine max
aatttgttgtacggaaattaatgaactgggtgcacggacgagagcagctttcagtgcacgccacaattgggtgttcgtcattatcatagaacagggggaggaggattagatacaagatgtgcaggaacgggccaacagttcgggccaattatttaacaccaaattgtcaaaggagcttgattccctaaaccgcaactttaccaatagcaggaatgtttacatcaatgtttacgaccctgtacttgacatcatcaccaatcaccaaaaatatggctataaagttggagacacatgatgctgtggcacaagcaggatagaggttgcaatactatgcaaccgtttcgattccagctgtcccaatgttcaagattatgacttttggga

SEQ ID NO: 252006 - DNA, 398 bp, Glycine max
aacatcgagtttgaaataaatgaactgggtgcacggaggagggcaggattcagtgcacccccaattgggtgtttgccattacatagaacagtgggaggaggattagaataaagatgtgcagaaaggcccaacagttcggcccaattatttaacaccaaattgtcaaaggagcttgattccctcaaccgcaactttcccaatagcaggaatgttttcatcaatgtttacgaccctctacttgacatcatcaccaatcaccataaatatggctataaagttgcgagacacatgatgctgtggcacacgcaggatagaggttgcaatactatgcaaccgcttcgattccagctgtcccaatgttcatgattatgacttttgagacagttttcatcctacag

SEQ ID NO: 252007 - DNA, 324 bp, Glycine max
tcggggaattccaattccacattttcaagaaataaggaggcaaaaatgtgcatatatgaattggaattatttgttttcttattaggcctatcctgaagccaaaggaaatgagatcggaattcctcggggaattccaattccacattttcaagaaataaggaggcaaaaatgttcatatatgaattggaattatttgttttcttattaggcctatcctgaagccaaaggaaatgagatcggaattcctcggggaattccaattccacattttcaagaaataaagaggcaaaaatgttcatatatgaattggaattatttggtttc

SEQ ID NO: 252008 - DNA, 405 bp, Glycine max
caataaacgatgattctcattatctccctcattttttctggtctctctttctcccatgcttctgtcctagatttctgtgttgcagattatgcaggtcctattggacctgcaggatattcctgcaagaagccttcaaaggtcacagcagatgattttgcttacagtggccttggcattgctggtaacacctcaaacattatcaaagctgcagtgacccctgcatttgatgctcagtttgctggtctcaacggtcttggcatttccgcagcacgtttggacttagcagcaggtggagttataccacttcacactcatcctggagcttcagaattacttgttgtaattgaagggagcatcctagctggattcatttcttctgccaacattgtctacctcaaaactctt

SEQ ID NO: 252009 - DNA, 453 bp, Glycine max
gcacgcgtacgtaatctcggaatgcggctcgagcaataaacgtttagattcattatctgcctcattttttctcgtctcgctttctcccatgggtgtgtcgtagatttctgtgttgcagattatgcaggtcctattggacctgcaggatattcctgcaagaagccttcaaaggtcacagcagatgattttgcttacagtggccttggcattgctggtaacacctcaaacattatcaaagctgcagtgacccctgcatttgatgctcagtttgctggtctcaacggtcttggcatttccgcagcacgtttggacttagcagcaggtggagttataccacttcacactcatcctggagcttcagaattacttgttgtaattgaagggagcatcctagctggattcatttcttctgccaacattgtctacctcaaaactcttaagaagggggatgtt

SEQ ID NO: 252010 - DNA, 420 bp, Glycine max
ttcacctgctgggtctaggccgtcttctcccaggtcacataatgaaagtgaggggtacaacagtgctgatgaacagaagccttgcctggtttcatcttatgatgattttgaaagggagcgacagttcgaaattgatatcagaagggcaaaaggttatgaagtcaaaaaaatgatggaggatggaaattgtctattccgagctgttgcagatcaggtgtatggggattctgaagtgtatgatttgatcagacagatgtgcatagattatatggagcgagagagagatcacttttctcagtttataactgaaggcttcacatcttactgcaagagaaagagaagagacaaggtctatggaaataatgttgagatccaagccatgtgtgaaatgtataatcgtccaattcacatatactccta

SEQ ID NO: 252011 - DNA, 412 bp, Glycine max
ttcttctgttgtgtctaggccgtcttctcccaggtgacagaatgaaagtgaggggtacaacagtgctgatgaacagaagccttgcctggtttcatcttatgatgattttgaaagggagcgacagttcgaaattgatatcagaagggcaaaaggttatgaagtcaaaaaaatgatggaggatggaaattgtctattccgagctgttgcagatcaggtgtatggggattctgaagtgtatgatttgatcagacagatgtgcatagattatatggagcgagagagagatcacttttctcagtttataactgaaggcttcacatcttactgcaagagaaagagaagagacaaggtctatggaaataatgttgagatccaagccatgtgtgaaatgtataatcgtccaattcacata

SEQ ID NO: 252012 - DNA, 405 bp, Glycine max
ctcgagccgtttcggctcgagagccctacagcgaggtgttgcggctgcagaggttccgcgagtgcgagctcattcacgggaggtgggccatgctcgccactctcggagctctcactgttgagtggctcactggtgttacatggcaagacgccggaaaggtggagctagtggaaggttcatcatacctagggcaaccacttccattctcaatcaccacactgatctggatcgaggttctcgtaattggctacatagagttccagaggaacgcagagctggacccagaaaagaggctgtacccaggtggcagttacttcgacccactgggcctggcctcagatccagagaagaaagccacccttcaattggcggagatcaagcacgcccgtctcgccatggtgggct

SEQ ID NO: 252013 - DNA, 497 bp, Glycine max
  unsure (1)..(497): unsure at all n locations
gagaatgaggattgnaatacgacatgggagatgaatgcaagagacatagcttgcatgcctgcaggtcgactctagaggatcccctcggggaattccaattccacattttcaagaaataaggaggcaaaaatgtgcatatatgaattggaattatttgttttcttattaggcctatcctgaagccaaaggaaatgagatcggaattcctcggggaattccaattccacattttcaagaaataaggaggcaaaaatgttcatatatgaattggaattatttgttttcttattaggcctatcctgaagccaaaggaaatgagatcggaattcctcggggaattccaattccacattttcaagaaataaggaggcaaaaatgttcatatatgaattggaattatttgttttcttattaggcctatcctgaagccaaaggaaatgagatcggaattcctcgggggtaccgagctcgaattccctatagtgagtcgtattaaa

SEQ ID NO: 252014 - DNA, 387 bp, Glycine max
tggtgacaatggatttgaccctctgggactagctgaggacccagagaacttgaggtggtacgttcaagccgagcttgtgaatggacgttgggccatgttgggtgttgcaggaatgctacttcctgaggttttcaccaagattggaatcatcaatgcccctcaatggtatgatgctgggaaatcggagtactttgcttcatcgtcgaccctctttgtgatcgagttcatcttgttccactacgtcgagatccggagatggcaggacatcaagaaccctggctctgtcaaccaagaccccatcttcaagcaatacagcttgccccaacatgagtgtggataccctggtagtgtgtttaaccccttgaactttgcacctactttggaggc

SEQ ID NO: 252015 - DNA, 526 bp, Glycine max
  unsure (1)..(526): unsure at all n locations
ngggaagttaatgtgtctnngtaagaagagagggaggagatgtgataagacttacaagcttgcatgcctgcaggtcgactctagaggatcccctcggggaattccaattccacattttcaagaaataaggaagcaaaaatggtcatatatgaattggaattatttggtttcttattaagcctatcctgaagccaaaggaaatgagatcggaattcctcgggggtaccgagctcgaattccctatagtgagtcgtattaaattcgtaatcatgtcatagctgtttcctgtgtgaaattgttatccgctcacaattccacacaacatacgagccggaagcataaagtgtaaagccctgggtgcctaatgagtgagctaactcacattaattgcgttgcgctcactgcccgctttccagtcgggaaacctgtcgtgccagctgcattaatgaatcggccaacgcgcggngagaagcggnttgcgtattgggcgctctttcgcttnctcgctcaatgactcgcttcgctt

SEQ ID NO: 252016 - DNA, 515 bp, Glycine max
  unsure (1)..(515): unsure at all n locations
agggagaaggctgntgtattgataggggggtataaggtatactcggagagacaagcttgcatgcctgcaggtcgactctagaggatcccctcggggaattccaattccacattttcaagaaataaggaggcaaaaatgttcatatatgaattggaattatttgttttcttattaggcctatcctgaagccaaaggaaatgagatcggaattcctcggggaattccaattccacattttcaagaaataaggaggcaaaaatgttcatatatgaattggaattatttgttttcttattaggcctatcctgaagccaaaggaaatgagatcggaattcctcggggaattccaattccacattttcaagaaataaggaggcaaaaatgttcatatatgaattggaattatttgttttcttattaggcctatcctgaagccaaaggaaatgagatcggaattcctcgggggtaccgagctcgaattccctatagtgagtcgtattaaattcgtaatcatg

SEQ ID NO: 252017 - DNA, 403 bp, Glycine max
  unsure (1)..(403): unsure at all n locations
cgccgccatgtccaccgtcaccacccaagccttcgccgcagttttccggccatgtacctcgaaatcgaggtttttgaccggctcttccggtaaacttaaccgggaagtgactatgcggccaatggggtgccctccttctgcctctttcaaggttgaagccaagaagggagagtggttacctggcttggcctncccaacttacctcaatggcactcttcctggtgacaatggatttgaccctctggggctagctgaggacccagagaacttgaggtggtacgttcaagccgagcttgtgaatggacgttgggccatgttgggtgttgcaggaatgttgcttcctgaggttttcaccaagtttggaatcatcaatgcccctcaatggtatgatgctgggaaatca

SEQ ID NO: 252018 - DNA, 490 bp, Glycine max
tagtaaggtgttgcctctgaacttgatatgattgcagagcttgcttgcatgcctgcaggtcgactctagaggatcccctcggggaattccaattccacattttcaagaaataaggaggcaaaaatgggcatatatgaattggaattatttgttttcttattaggcctatcctgaagccaaaggaaatgagatcggaattcctcggggaattccaattccacattttcaagaaataaggaggcaaaaatgttcatatatgaattggaattatttgttttcttattaggcctatcctgaagccaaaggaaatgagatcggaattcctcggggaattccaattccacattttcaagaaataaggaggcaaaaatgttcatatatgaattggaattatttgttttcttattaggcctatcctgaagccaaaggaaatgagatcggaattcctcgggggtaccgagctcgaattccctatagtgagtcgtattaa

SEQ ID NO: 252019 - DNA, 386 bp, Glycine max
tcggggaattccaattccacattttcaagaaataaggaggcaaaaatggtcatatatgaattggaattatttgttttcttattaggcctatcctgaagccaaaggaaatgagatcggaattcctcggggaattccaattccacattttcaagaaataaggaggcaaaaatgttcatatatgaattggaattatttgttttcttattaggcctatcctgaagccaaaggaaatgagatcggaattcctcggggaattccaattccacattttcaagaaataaggaggcaaaaatgttcatatatgaattggaattatttgttttcttattaggcctatcctgaagccaaaggaaatgagatcggaattcctcgggggtaccgagctc

SEQ ID NO: 252020 - DNA, 511 bp, Glycine max
  unsure (1)..(511): unsure at all n locations
ggatagagtgtttaggttgttcatcgcttcacgtcanaccatacagatagcttgcatgcccgcaggtcgactctagaggatcccctcggggaattccaattgctcattttcaagaaataaggaggcaaagatgggcatatatgaattggaattatgtgttttcttattaggcctatcctgaagccaaaggaaatgagatcggaattcctcggggaattccaattccacattttcaagaaataaggaggcaaaaatgttcatatatgaattggaattatttgttttcttattaggcctatcctgaagccaaaggaaatgagatcggaattcctcggggaattccaattccacattttcaagaaataaggaggcagaaatgttcatatatgaattggaattatttgttttcttattaggcctatcctgaagccaaaggaaatgagatcggaattcctcggcggtaccgagctcgaattccctatagtgagtcgtattaaaatcgtaatcatgg

SEQ ID NO: 252021 - DNA, 385 bp, Glycine max
tcggggaattccaattcctcattttcaagaaataaggaggcaaaaatgtgcatatatgaattggaattatttgttttcttattaggcctatcctgaagccaaaggaaatgagatcggaattcctcggggaattccaattccacattttcaaggaattagggagcaaaaatgttcatatatgaattggaattatttggtttcttattaggcctatcctgaagccaaaggaaatgagatcggaattcctcggggaattccaattccacattttcaagaaataaggaggcgcaaatgtgcatatatgaattgggattatatgggttcttattaggcctatactgaaaccccaggggatgtgatcgggatttctctggggtacccagct

SEQ ID NO: 252022 - DNA, 403 bp, Glycine max
cgagggttattggacacattcttcagcgactgcgtttttggatcggaacctcttctgcggcgtagcaatgggacactccaacgtctggaactctcacccaaaaaactacggtcctgcatctcgcacttgccgtgtgtgtgggaatccacatggactgatcaggaagtatggccttatgtgctgcatgcagtgcttccgtagcaatgccaaggaaattgtcttcatgaagtatcggtacaagagcagttgtcaactactgaccaatatagcgtcctggcactaggatgttttgacgatgccatgatcgcagaaacttgagactgtcatttttcatctaactaattatcagacctaatttgtggtactaagaatacttttatataaatcgaattgaacccataaa

SEQ ID NO: 252023 - DNA, 401 bp, Glycine max
  unsure (1)..(401): unsure at all n locations
ctacttttatattcacaacananaaaaaaaaaagagagcataaaccaatggctacttcactttcagcaactgggtgtgttggttcttccttctatggaagttggggaacttcaattgttggtgaggactacaccatgctggccaagtcagtgccatcacaagttcgcatggggaagggaaagcccacgagattgcagcctatgatgaagaatgttaatgaagggaaaggtatatttgcacctcttgtggtgatcactcgcaacatcgttggcaagaagcgtttcaaccagcttagaggcaaagcaattgcactacactcccaggtgatcacggaattctgcaaatcaataggagcagatggaaagcagaggcaagggctaatcaggttggccaagaagaat

SEQ ID NO: 252024 - DNA, 386 bp, Glycine max
  unsure (1)..(386): unsure at all n locations
ctactttgattttcacttcaganaaaaaaaaaagagagcagaaaccagtggctacttcactgtcagcaactgggtgtgttggttcttccttctatggaagttggggaacttcaattgttggtgaggactacaccatgctggccaagtcagtgccatcacaagttcgcatggggaagggaaagcccacgagattgcagcctatgatgaagaatgttaatgaagggaaaggtatatttgcacctcttgtggtgatcactcgcaacatcgttggcaagaagcgtttcaaccagcttagaggcaaagcaattgcactacactcccaggtgatcacggaattctgcaaatcaataggagcagatggaaagcagaggcaagggctaatcagg

SEQ ID NO: 252025 - DNA, 378 bp, Glycine max
tcggggaattccaattccacattttcaagaaataaggaggcaaaaatgtgcatatatgaattggaattatttgttttcttattaggcctatcctgaagccaaaggaaatgagatcggaattcctcggggaattccaattccacattttcaagaaataaggaggcaaaaatgttcatatatgaattggaattatttgttttcttattaggcctatcctgaagccaaaggaaatgagatcggaattcctcggggaattccaattccacattttcaagaaataaggaggcaaaaatgttcatatatgaattggaattatttgttttcttattaggcctatcctgaagccaaaggaaatgagatcggaattcctcgggggta

SEQ ID NO: 252026 - DNA, 428 bp, Glycine max
  unsure (1)..(428): unsure at all n locations
ggccgagggtagaaggtgggctgatatcatcaagccaggctgtgtcaacactgaccctatctttccaaacacaagcttacaggactgatgtggggtacccaagtgggctttggtttgatccacttggctggggaagtgggttcttctgagaaagatccagggagtttgagaacaaaggagatcaagaatgggaggtntggccatgtggctgtgatgggggcatggttccagcacatttacactggcactggtcctattgacaacctctntgctcaccttgcagatcctggtcatgctactatttttgctgctttcactcccaagtgagaagggttggaacaactctatgattgcaagccttggagaaacattgggaaacttgtttaactaagttgtaaggcttaaatgtctttaggggggagttttta

SEQ ID NO: 252027 - DNA, 362 bp, Glycine max
caattaattccaattccatatgttcaataaataaggatgcaaaaattgggaaggttaattggaatgagtgggctggcttattaagcctatcctgaatccaaatgaaatgagatctgaattcctcctcgaattccaattccacatttccaagatataacgatgcaaaaatgttcatatatgaattgtaattatctgttattcttattacgcctatcctgaatccaaatcaaatgatatcggaattcctcgtccaattccaattccacattctcatgacctaagtaatgcaaaaacgttcatatatcaattgtaaatatttattattcttatcatgcctatcctcaatccaaaagacatgagat

SEQ ID NO: 252028 - DNA, 514 bp, Glycine max
  unsure (1)..(514): unsure at all n locations
ggttgggggctgnttttatgatgaaaagttaaagtattcttcgagagacaagcttgcatgcctgcaggtcgactctagaggatcctctcggtgaattccaattccacattttcaagaaataaggaggcacaaatgttcatatatgaattggaattatttgttttcttattaggcctatcctgaagccaaaggaaatgagatcggaattcctcggggaattccaattccacattttcaagaaataaggaggcaaaaatgttcatatatgaattggaattatttgttttcttattaggcctatcctgaagccaaaggaaatgagatcggaattcctcggggaattccaattccacattttcaagaaataaggaggcataaatgttcatatatgaattggaattatttgatctcttattaggcctatcctgaagccaaaggaaatgagatcggaattcctcggaggtaccgagctcgaattccctatagtgagtcgtattaaattcgtaatcatgtg

SEQ ID NO: 252029 - DNA, 406 bp, Glycine max
  unsure (1)..(406): unsure at all n locations
ctcacacactttgtactctccgtccttccttcttcgatccagatctgtctccttctccctcaaatggcttcccttctgcaatgttccatgcccctcgtctctctttccaatcgagctctggtacccggtaccaggatctccaacccaagttcagtttccctttcaattaagggaagaagtttcccatccgttacattgcagcccagagggcgtcggtttcagcttagatgtgcggcaaaaccagagacagtgaagaaggtgtgtgacatagtcaagaagcaattggcactgccagatgaatcagctgttactggagagtctaaatttgctgcacttggagctgattctcttgacacggttgagattgtgatgggacttgaggaggaatntggtattaccgtggaag

SEQ ID NO: 252030 - DNA, 280 bp, Glycine max
  unsure (1)..(280): unsure at all n locations
ggttttagttttggntcctgnggngnnggaccggtgcttgcnatatccaaagggccaagggaaccttaatcaatcttccatacgcttagactcattttttaaaatcattttactatcctgaacctatattattcgtaccatcctaatattgcatatcccttttggtgctacgataactatactaatcatattgcattaaaataagctgataatattatacaacaactaattcatctcattttccggattaatcttaaaccattctttactaacttttata

SEQ ID NO: 252031 - DNA, 352 bp, Glycine max
gtgaaagagaatccgaggcgaagagaagagaaaaattaagatggaggggaaggagcaggatgtgtcgctgggagcgaacaagttcccggagagacagccgattgggacggcggcgcagagccaagacgacggcaaggactaccaggagccggcgccggcgccactggttgacccgacggagtttacgtcatggtccttttacagagcagggatagcagagtttgtggccacttttctgtttctatacatcactgtcttaaccgtcatgggagtcgccggggctaagtctaagtgcagtaccgttgggattcaaggaatcgcttgggccttcggtggcatgatcttcgccctc

SEQ ID NO: 252032 - DNA, 512 bp, Glycine max
gggggaggttgtgttaagaggggaggacgtatagataggctagacaagcttgcatgcctgcaggtcgactctagaggaatcccttggggaaatcccaattcaaaattttcaggaattaaggaggcaaaatggtccatatatgaatgggaataattggttttctaattaggcctatcctgaagccaaaggaaatgagatcggaattcctcggagaattccaattccacattttcaagaaataaggaggcaaaaatgttcatatatgaattggaattatttgttttcttattaggcctatcctgaagccaaaggaaatgagatcggaattcctcggggaattccaattccacattttcaagaaataaggaggcaaaaatgttcatatatgaattggaattatttgttttcttattaggcctatcctgaagccaaaggaaatgagatcggaattcctcgggggtaccgagctcgaattccctataatgagtcgtattaaattcgtaatcatgtca

SEQ ID NO: 252033 - DNA, 384 bp, Glycine max
catgcacgcgtaggtaatctcggaatgcgaattcagctcgagcaattaactgttaagctaactgaactctccctctgtcctgcctcattcctttggcctctcactacaaatacacatctcatctcatccgtctctcacttttaatttttctctgcaatctgaaccttccggatttcgctattctttgttccggtagccagtcagccagccatcgtgctctacaatgtttcacgcgttgagaccactcccttcgatggacagaagcctggaacctctggtctcctcacgaacgtgaccgtattcgtgcaacctcattacctccataacttcgatcagtcaacattcaatgcattaactgtggaaaaagttagaggtgcaacgcta

SEQ ID NO: 252034 - DNA, 344 bp, Glycine max
cgaagggctatatagcataaacatttgagtcttcattgcacaatgtcgacctcttccattaacgggtggtgcctctcttccatctccccagccaaaacctctctcaagaaggccacattaggcccttctgtcttcgcaaccgttagcactccttcttctccttcttcttcttcttcttcttccttcccttctctcattcaagacaggcctgtctttgctgcccctgcccccatcatcaccccaactgtgagagaggatatggcaaaggaatacgagcaagctattgaagaactccagaaattgttgagggagaagagtgaactcaaagccacagctgctgagaa

SEQ ID NO: 252035 - DNA, 341 bp, Glycine max
ggaacttaatggtaccagagtagagtagtgcggaagaaaagaaaaacgaaatccctcgctttgagaaatgggtgtattactcttccggtgggttctgccactgactctgttgctcacttgcgcgttaggtttccaatcggacgagcttctcctcgacgaccaagagttcggcatcgagggaggacgagcctccttcgattccgattcgcacccatctcccacctccaccttgaggaagagcttttctgactcctcctccgactccaagatccacttccctctccaacacgctttcggcgactccgatttctccgacgccggcaacttctccggtcgcctta

SEQ ID NO: 252036 - DNA, 362 bp, Glycine max
cacaactttgcccccttgtaaaacttcttattgtgatgtctaaaagcgaagacttgaagcttttgggaggctggttcagcccatttgccctgagggtgcagattgcccttaacctcaagggtctagaatatgaggttgttgaagagaccttgaatcccaaaagtgacctgcttcttaagtccaaccctgtgcacaagaaaatcccagttttcttccatggagataaagtcatttgtgaatctgcaatcatagttgagtacattgatgaggcttggactaatgttccctccatccttccacaaaatgcttatgatcgtgctaatgctcgattttggtttgcctacattgatgagaagtggttt

SEQ ID NO: 252037 - DNA, 391 bp, Glycine max
  unsure (1)..(391): unsure at all n locations
gtaatggtggatttattcttctatagagaacctgaagaggccaagcaacaagaggaagatgaagcaccacctgcccaagattatgccatttcagacttcaatgctgctggcattggcagcttccctgctactgatggccaatggcctgctgcagtcgaacaaccctggactgaagaagctccacaaccaatctcagcagctcctactaactggacaccagaagcagctgctgcaggagattggggtgaggctgttccagctcctgctccagctccagttccacaagctggtgcgcctncagctcaagcttttcctcctgctactggctgggactagcttttgacaagagattttattccatggtgtcaaaaccatagtttttcttcccctc

SEQ ID NO: 252038 - DNA, 398 bp, Glycine max
gtcagcaggtatcatattgtctaagccgacgacaaaaaatgatcaaacaggttcttcttgttctgctcttcttggcctctggattgaccctctcagtctcagagactgaatctgtttctcttctgcctcacgccgctgagtccttcaatgtcagctatatccagatgaagaacgccgggacttgttcttacttggtggttatatctactagctgttcgtctcctaggtatacaagggatcagatcagtatttcttttggggatgcttatggcaatcagatatatgcaccaagactggatgatccagcttcaggtacatttgagagctgttcttcggatacatttcagataactggtccgtgtgcatatcagatatgttatgtgtacctatatagatct

SEQ ID NO: 252039 - DNA, 396 bp, Glycine max
  unsure (1)..(396): unsure at all n locations
caataaactgctaagctaactgaactctccctctctccttgctcgctcctttcgcctctcactacaaatacacatctcatctcatccgtctctcacttttaatttttctctgcaatctgaaccttccggatttcgtttttctttgttccggtagccagccagccagccatggtgctcttcaatgtttcacgcgttgagaccactcccttcgatggacagaagcctggaacctctggtctccgcaagaaggtgaaagtattcgtgcaacctcattacctncataactttgttcagtcaacattcaatgcattaactgtggaaaaagttagaggtgcaacgctagttgtatctggtgatggtcgttatttttcaaaggaagctattcagattataact

SEQ ID NO: 252040 - DNA, 379 bp, Glycine max
  unsure (1)..(379): unsure at all n locations
tttacatttctctctccagtatggcttctactcacaatgagttttatgcacttatgctagtggtggtggttggctccatggtggcttcctgtggtgctaacttcaaccaagactttgatctaacatggggtgatcaccgtgctaagatattcaatggtggtcagcttctatctctttctctggacaaagtctctggctccggcttccaatccaagaaagagtacctatttgggaggatcgatatgcaactcaagctcgttgctggcaactctgccggcactgtcactgcttactacttgtcgtctcaagggccaactcatgatgagattgattntgaattcttgggaaacgtgagcggtgacccttacattctccacac

SEQ ID NO: 252041 - DNA, 286 bp, Glycine max
gattcaaaaggaagtccctcctgaatatcagagctatctggtccaagtgacaaaataccaagctgcacaaaactgtaagacctggatcgctggtaagtggatcacgccaagagagcaatactgggcaccacgtgtaacccattttcatcaatttgttgtcccgccaattttaccatttataaaagattgcacttatggtgacctgtcagcgatgagattaccagaatacgtggaaggactaggttgctgtgagtacacgatggataggggagtggttcacgcgtgc

SEQ ID NO: 252042 - DNA, 373 bp, Glycine max
accccttcttgatgagtgctgaaaagttgcaaagtggaattcccgcatagcctccagaactgatcaggcatagatcccgtgaagctgcagacatgatcaagaccggaaagatgtgcgctctcttcatgaacgatcttgatgcaagagctggtcgtcttggtggaaccacacaatacactgtgaacaaccagatggtgaatgccactctcatgaacattgctgataaccccaccaatgtgcagcttccaggtatgtacaacaaggaagagaacccccgtgttcccatcattgtcaccggtaacgatttctcaacactctatgcacctgtcatccgtgatgggcgtatggagaagttctactgggcaccaacagg

SEQ ID NO: 252043 - DNA, 352 bp, Glycine max
  unsure (1)..(352): unsure at all n locations
tagggagccaaaatggtgatatatgaattgggaataattggtttcctaattaggctaatctgaaacccaagggaattgaaatcggaattcttcggggaatcccaattccacattttcaagaaataaggaggcaaaaatgttcatatatgaattggaattatttgttttcttattaggcctatcctgaagccaaaggaaatgagatcggaattcctcggngaattccaattccacattttcaagaaataaggaggcaaaaatgttcatatatgaattggaattatttgttttcttattaggcctatcctgaaaccaaaggaaatgagatcggaattcctcgggggtaccgagc

SEQ ID NO: 252044 - DNA, 518 bp, Glycine max
  unsure (1)..(518): unsure at all n locations
gggggagagaggacgtgtcctacccaacganacctaatgcttagccnactatgacgnngaatgcgcatgcacgcgtacgtaagctcggaattcggtcgagaaagacagctcatgaatcttcttcttcttggtgccatttcactccccactgctggaatgcttattccctacacctacttctttgtccctccaggttcaggttcttcagctggcggtactgttgccaaggatgccgttggaaatgatgtaattgccgagaattggctcaaggcacatggacctggtgaccgaacccttacacaaggattgaagggagatcctacctatcttgttgtggagaaagacagaacccttgcaacatttgcaattaatgccgtgtgcactcatcttggatgtgtcgcgccatggaatcaagcggggaacatgttcatctgcccttgccatggatctcagtacaatgaccaatgaagagttgtgacaggacctgctccaatgactcttgcattaacacattgtga

SEQ ID NO: 252045 - DNA, 514 bp, Glycine max
  unsure (1)..(514): unsure at all n locations
nggtagagggctgtcttttctgaagaggattacggcactctcggagagacaagcttgcatgcctgcaggtcgactctagaggatcccctcggggaattccaattccacattttcaagaaataaggaggcaaaaatgttcatatatgaattggaattatttgttttcttattaggcctatcctgaagccaaaggaaatgagatcggaattcctcgggggtaccgagctcgaattccctatagtgagtcgtattaaattcgtaatcatgtcatagctgtttcctgtgtgaaattgttatccgctcacaattccacacaacatacgagccggaagcataaagtgtaaagcctggggtgcctaatgagtgagctaactcacattaattgcgttgcgctcactgcccgctttccagtcgggaaacctgtcgtgccagctgcattaatgaatcggccaacgcgcggngagaggcggtttgcgtaatgggcgctcttccgcttcctnggtcaatggactgc

SEQ ID NO: 252046 - DNA, 516 bp, Glycine max
  unsure (1)..(516): unsure at all n locations
nggttaaggttnttttaacgtaggggggtgaacgggaaatattcggagagacaagcttgcatgcctgcaggtcgactctagaggatcccctcggggaattccaattccacattttcaagaaataaggaggcaaaaatgttcatatatgaattggaattatttgttttcttattaggcctatcctgaagccaaaggaaatgagatcggaattcctcggggaattccaattccacattttcaagaaataaggaggcaaaaatgttcatatatgaattggaattatttgttttcttattaggcctatcctgaagccaaaggaaatgagatcggaattcctcggggaattccaattccacattttcaagaaataaggaggcaaaaatgttcatatatgaattggaattatttgttttcttattaggcctatcctgaagccaaaggaaatgagatcggaattcctcgggggtaccgagctcgaattccctatagtgagtcgtattaaattcgtaatcatgt

SEQ ID NO: 252047 - DNA, 489 bp, Glycine max
  unsure (1)..(489): unsure at all n locations
aggtgttgnttaccgcgggggggggtaagctagcacttcagcttgctgcctgcagtcgactctagagatcccctcggggaattccaattccacaattttaagaaataagggagccaaaatgttcatatattaattgggattatttggtttcttattaagcctatcctggagcccaagggaatgagatccggattccctcgggaattccaattccacattttcaagaaataaggaggcaaaaatgttcatatatgaattggaattatttgttttcttattaggcctatcctgaagccaaaggaaatgagatcggaattcctcggggaattccaattccacattttcaagaaataaggaggcaaaaatgttcatatatgaattggaattatttggtttcttattaggcctatcctgaagccaaaggaaatgagatcggaatttcctcggggtaccgagctcgaattccctatagtgagtcgtattaaattc

SEQ ID NO: 252048 - DNA, 460 bp, Glycine max
gggttcttttcacgcaaatgtatctcgcggcagctgcatgcctgcaggtcgactctagaggatcccctcgggaattccaattcacattttcagaataagaggcaaaatgggcaatatataatgaataattgtttttattagcctatcctgagccaaaggaatgagatcggattcctcgggaattccaattccacattttaagaaataagagcaaaaatgttatatatgaattggaatatttgtttcttattaggcctatctgaagccaaaggaaatgagatcggaattcctcggggaattccaattccacattttcaagaaataaggaggcaaaaatgttcatatatgaattgcaattatttgttttcttattaggcctatcctgaagccaaaggaaatgagatcggaattcctcgggggtaccgagctcgaattccctatagtgagtcgtattaaattc

SEQ ID NO: 252049 - DNA, 317 bp, Glycine max
ttccaggattcctaagtggggggcccagtcctgattaaaagcagttgtagtctgattaggaatcaaggaagaacttccgcatcaattttataactggtagaaaactcacgagcaaagctgatgcatttgagtatgctgaccaagtcttggagcgttggtacccttctgtagaagaagggtacaacaagggcattgtggttcttgtcacgagtcagaaagaatgagcagtcactgatggcccggctttagtcgaagctgtttgggcatagatccttggtgctaccgtgtcaaagaaccttgcatattttgctaccgat

SEQ ID NO: 252050 - DNA, 351 bp, Glycine max
  unsure (1)..(351): unsure at all n locations
gcgcgacgttttgatacgtactattcatgctgcgcgtgatacgacctcctctgatctgagctggttttctggattctgtactgcatacccgacgtgcanagaaaaatgccggacgaaatctagacggctcgtttgaatacgaagaggtgaacgagatgcgctatctgcaagccgagatttccgatacgatgaggttgtacccgccagtgccagttgacacgatggactgcctatacgacgacatattgacggacggaactagggttgggaaggcgtgcctcgagacttaccacacgtacgcgatgggcatgatgaatagcctgtctcacaatgactgtaccgaacttaatg

SEQ ID NO: 252051 - DNA, 389 bp, Glycine max
  unsure (1)..(389): unsure at all n locations
tcggngaattccaattccacattttcaagaaataaggaggcaaaatgttcatttatgaattggaattatttgttntcttattaggcctatcctgaagccaaaggaaatgagatcggaattcctcggngaattccaattccacattttcaagaaataaggaggcaaaaatgttcatatatgaattggaattatttgttttcttattaggcctatcctgaagccaaaggaaatgagatcggaattcctcggggaattccaattccacattttcaagaaataaggaggcaaaaatgttcatatatgaattggaattatttgttttcttattaggcctatcctgaagccaaaggaaatgagatcggaattcctcggngaattccaattccaca

SEQ ID NO: 252052 - DNA, 330 bp, Glycine max
tcggggaattccaattccacattttcaagaaataaggaggcaaaaatggtcatatatgaattggaattatttgttttcttattaggcctatcctgaagccaaaggaaatgagatcggaattcctcggggaattccaattccacattttcaagaaataaggaggcaaaaatgttcatatatgaattggaattatttgttttcttattaggcctatcctgaagccaaaggaaatgagatcggaattcctcggggaattccaattccacatcttcaagaattatggaggcaaatatgttcatatgtgatttggaattattcgtgttcttatta

SEQ ID NO: 252053 - DNA, 309 bp, Glycine max
tcggtgaattccaattcctcattttcaagaaataaggaggcaaaggatggtcatatatgaattggaattatttgttttcttattaggcctatcctgaagccaaaggaaatgagatcggaattcctcggggaattccaattccacattttcatgacataaggaggcaaaaatgttcatatatgaattggaattatttgttatcatattaggcctatcctgaagccaaatgaaatgcgatcggaattcctcgagtaattccaactccacattttcaatgatgtagggatgcatgtttcgttcatatatgaa

SEQ ID NO: 252054 - DNA, 408 bp, Glycine max
gttacttgcggaaaaaagctccacaggcaaggaaaaaacgacaccgagccaaaacaagtccctatttacaccaaactagcctacatattaggccttcgtgtttctccacatcacaggagaatgggaatagggatgaagcttgtgaagaaaatggaggaatggttcagggataacggggcagagtatgcatacatggctacggagaaggacaacgttgcatccgtcaagttgttcaccgacaaatgtgggtactcaaagtttcgtaccccctgcattctcgcgaatcctgttttctcgcatcctgctagaatctctcacaaagtgactatcattgaactctctccgagcgatgccgaaatactctaaccgaacaagttttccacaacggagttcttcccgcgcgacgta

SEQ ID NO: 252055 - DNA, 496 bp, Glycine max
  unsure (1)..(496): unsure at all n locations
gggaagtttttcacaagcaagaacgtattactctgacagacatgcttgcatgcctgcaggtcgactctagaggattccctcggggaattccaattccacattttcaagaaataaggaggcaaaaatgttcatatatgaattggaattatttgttttcttattaggcctatcctgaagccaaaggaaatgagatcggaattcctcggggaattccaattccacattttcaagaaataaggaggcaaaaatgttcatatatgaattggaattatttgttttcttattaggcctatcctgaagccaaaggaaatgagatcggaattcctcggggaattccaattccacattttcaagaaataaggaggcaaaaatgttcatatatgaattggaattatttgttttcttattaggcctatcctgaagccaaaggaaatgagatcggaattcctcggnggtaccgagctcgaattccctatagtgagtcgtattaaattcn

SEQ ID NO: 252056 - DNA, 496 bp, Glycine max
  unsure (1)..(496): unsure at all n locations
ggggaggttttgtttaagcggggggtagatagttatactctacaagcttgcatgcctgcaggtcgactctagaggatcccctcggggaattccaattccacattttcaagaattaaggaggcaaaaatgtgcatatatgaatgggaataattggttttcttattaggcctatcctgaagccaaaggaaatgagatcggaattcctcggngaattccaattccacattttcaagaaataaggaggcaaaaatgttcatatatgaattggaattatttgttttcttattaggcctatcctgaagccaaaggaaatgagatcggaattcctcggggaattccaattccacattttcaagaaataaggaggcaaaaatgttcatatatgaattggaattatttgttttcttattaggcctatcctgaagccaaaggaaatgagatcggaattcctcgggggtaccgagctcgaattccctatagtgagtcgtattaaatt

SEQ ID NO: 252057 - DNA, 518 bp, Glycine max
  unsure (1)..(518): unsure at all n locations
ngggggaggggtgncgttaaagacggggcgaaggtaaagctatnacacgagctatgacgtcgcatgcacgcgtacgtaagctcggaattcggcttgagtcaactttgagatattgcatgctcggtgggctatgcttggattcgtcggtgctctgaatcctggaatattaaaactattgggagcctttcactttgtagaaccaatgtggtggcgtgttggatattcaaagctcaagggagatactctagattaccttggtatccaaagtcttcactttgctggaagtcagggagtggtcgtgattgctatttgccaagcactccttatggttggacctgaatatgctagatattgtgggatcgaggcattggagcctcttggaatatatctgcctggtgatataaattatcctggaggagctntgtttgatcccttgaatctgtccaacgatcctgaagcttttgaagagctgaaggtaaaagaaataaaaaatggacgcttggcaatgggtgcctggt

SEQ ID NO: 252058 - DNA, 409 bp, Glycine max
  unsure (1)..(409): unsure at all n locations
tcaactgtgttatattgcatgctcggtgggctatgcttgcgtccgtcggtgctctgattcctgaaatattagacctattgggagcctttcactttgtagaaccagtgtggtggcgtgttggatattcaaagctcaagggagatactctagattaccttggtatccaaggtcttcactttgctggaagtcagggagtggtcgtgattgctatttgccaagcactccttatggttggacctgaatatgctagatattgtgggatcgaggcattggagcctcttggaatatatctgcctggtgatataaattatcctggaggagctttgtttgatcccttgaatctgtccaacgatcctgaagcttttgaagagctgaaggtaaaagaaataaanaatggacgcttgcaatg

SEQ ID NO: 252059 - DNA, 489 bp, Glycine max
  unsure (1)..(489): unsure at all n locations
ggggggttgttagggggggatgtaagacttgccgacagcttgctgcctgcagtcgactctanaggatcccctcggtgaattccaattccaacatttccagaaattaaggaggccaaaatgttcatttttgaaatgggaataattcggtgtcttaataggcctttcctgaagcccaaggaaatgagatcggaattcctcggngaattccaattccacattttcaagacataaggaggcaaaaatgttcatatatgaattggaattatttgctttcttattaggcctatcctgaagccaaaggaaatgagatcggaattcctcggggaattccaattccacattttcaagaaataaggaggcaaaaatgttcatatatgaattggaattatttgttttcttattaggcctatcctgaagccaaaggaaatgagatcggaattcctcggcggtaccgagctcgaattccctatagtgagtcgtattaaattc

SEQ ID NO: 252060 - DNA, 375 bp, Glycine max
  unsure (1)..(375): unsure at all n locations
caccctnctatccaattacttctcgggcacaatcccttgggtccataaccacctggaaatcactgcaatctcttgacctcgcacacaattccctatgtggggatctccgcaactcaatgaactccctcaccacactccgcagactcgatctcaggttcaacagactaaccggttcaatcccgaagctgccacccaacttgctcgaactcgcgatcaaggccaattctctatctgggtctctccaaaaacaaagctctgaagggatgaagcaattggaagtggtggagctcagcgagaacgcgctcaccggaaccgtcgagtcgtggttctttcttttgccatcgctgcagcaagtggacttggccaacaacacct

SEQ ID NO: 252061 - DNA, 512 bp, Glycine max
ggggaggcttctttacagagggggagggaagtaatctcggagagacaagcttgcatgcctgcaggtcgactctagaggatcccctcggggaattccaattccacattttcaagaaataaggaggcaaaaatgttcatatatgaattggaattatttgttttcttattaggcctatcctgaagccaaaggaaatgagatcggaattcctcggggaattccaattccacattttcaagaaataaggaggcaaaaatgttcatatatgaattggaattatttgttttcttattaggcctatcctgaagccaaaggaaatgagatcggaattcctcggggaattccaattccacattttcaagaaataaggaggcaaaaatgttcatatatgaattggaattatttgttttcttattaggcctatcctgaagccaaaggaaatgagatcggaattcctcgggggtaccgagctcgaattccctatagtgagtcgtattaaattccgaatcatgtca

SEQ ID NO: 252062 - DNA, 416 bp, Glycine max
tctctatattccattgccacccagttttgaatatatttgtattccttctttgtgtcttcactttcttccatacacataaccatgtcttctcagactgttgtcctcaaagttggtatgtcatgtcaagggtgtgctggagcagtgaacagggttttgggaaaaatggaaggtgttgagtcatttgacattgatctgaaggagcagaaggtgacagtgaaaggaaatgtggagccagatgaagttctgcaagccgtttccaaatctgggaagaagactgcattctgggtggatgaagcaccacaatctaaaaacaagcctttagaaagtgcacctgttgcctcagaaaacaagccttcagaagctgcaactgttgcctcagctgagcctgaaaacaagccttcaaaagctgcaattgt

SEQ ID NO: 252063 - DNA, 407 bp, Glycine max
ctgaaaacaaagcagtgtctgctgtgggcaaagctgctggagcaaaatggaagaccatgtctgatgctgaaaaagcaccttatgtggcaaagtctgagaaaaggaaagtggagtacgagaagaacatgagagcctataacaagaaacaggcggaaggtcctactggtggggatgaagaagaatctgagaagtctgtatctgaggtgaatgatgaagatgatgatgaggaaggcagtggcgaggaagaggatgacgattagagaatggactgataattgcatttatgtaggttctgatgattttgatcatctgttgtaggtggtctggtcatttcctgataaacatatttcttgcttccaaaaaatatttccctgctccctccgtaaattggttgtctttccaaaacg

SEQ ID NO: 252064 - DNA, 275 bp, Glycine max
ctgaaaagtgtaggaggctcatgggccacaaagcggtttgggcttccggaagactgtgattgtgtctcttgggttagggtttatgaggtgcacttgcaatgcgttttacaatttacatcacatttcgttgcgcctctgttctctgtcactgctgcgtctctcgtaaccatgcctaagcaaatccacgagattaaggatttccttctcactgctagaaggaaggacgcaaggtcggtgaagatcaagaggagctgagatgtagttaagtacaaggt

SEQ ID NO: 252065 - DNA, 497 bp, Glycine max
gggagtttgtgtttaacagactaactgttatgctcgacgtacaagcttgcatgcctgcaggtcgactctagaggatcccctcggggaattccaattccacattttcaagaaataaggaggcaaaaatgttcatatatgaattggaattatttgttttcttattaggcctatcctgaagccaaaggaaatgagatcggaattcctcggggaattccaattccacattttcaagaaataaggaggcaaaaatgttcatatatgaattggaattatttgttttcttattaggcctatcctgaagccaaaggaaatgagatcggaattcctcggggaattccaattccacattttcaagaaataaggaggcaaaaatgttcatatatgaattggaattatctgttttcttattaggcctatcctgaagccaaaggaaatgagatcggaattcctcgggggtaccgagctcgaattccctatagtgagtccgattaaattcg

SEQ ID NO: 252066 - DNA, 382 bp, Glycine max
  unsure (1)..(382): unsure at all n locations
aaaagttctgccaaatcaagaggggttttaagatcatagtgtgtgttttgcaacaatggctaagttctntgctgctatgatcttggcactctntgccatttccatacttcaaacagtggtaatggctgctaatgaacaaggaggccacttgtatgacaacaagagcaaatatggaagtggaagtgtcaagagttaccaatgcccatcacaatgctcgaggagatgtagccagacccaataccacaagccctgcatgtttttctgtcagaagtgctgcaggacatgcctgtgtgtgcccccggngtattatggtaataaagctgtgtgcccttgctacaacaactggaagaccaaggaaggaggacccaagtgcccttgagct

SEQ ID NO: 252067 - DNA, 405 bp, Glycine max
ctggccaacacgaagccgtgggggttaatgggggtcaagtgggagaatcgcgaaggcccgtacgaaagaagatggtacgactcctgaacaatgtggaaaggctacatgttccatttcattgaagcatgctggtccttcgtgattctccaatacaaggtattatcaggaggaacagagaaacttcaacatatactgttgtacattggactggttccatcggagaacgagactgatacgtcgttattagctgcacaataggtaagaagggcaacaggcacagacttcatcatatctttggccgcagatgatatttctcgctccagctacacatatgttgcaatactgacgtgtaagattatgggtaccaagatcactatttatgacagccaacccccacatggagct

SEQ ID NO: 252068 - DNA, 417 bp, Glycine max
cctgtgtcctacagaagggtaccctgcaggagaaggggaggcataaggttcacaatcaatggccactcctactttaacttggtcctcataacaaacgtaggaggtgctggagatgttcatggtgtggccatcaaagggtcaagaactgggtggatgccaatgtccagaaactggggtcaaaattggcaaagcaacaactatctcaatggccaaagcctctcattcaaggtcaccactagtgatggccgtacagtggtgtcctacaatgttgcccctgctggttggtccttcggccaaacctacactggtgctcaattccgctagagaggccttaataattgttcacaagttgaagttccaaatatatttagttacactacatatggtatatgctataattcctcaatttaagtgtta

SEQ ID NO: 252069 - DNA, 512 bp, Glycine max
  unsure (1)..(512): unsure at all n locations
gggtaagggctctgtaacacgcggggcgcagtaaagctattaccagagctatgacgtcgcatgcacgcgtacgtaagctcggaattcggttcgggggaaaatcctcatttttctgagcagccaaacactctctctctggctctcgaaaattctcagtttgcagagaaaatctgaatcatgtcgtggcaagcgtatgtcgacgatcaccttctgtgtgacatcgaaggtaaccacctgactcacgctgctatcatcggccaagacggcagcgtttgggctcagagtaccgacttccctcagttcaaacctgacgagataactgccatcatgaatgactntaatgagcctggatcacttgctccaactggattgtatctcggtggcaccaaatatatggtcatcccgggtgaacccggtgctggcattcgagggaagaaaggtcctgggggtgttactgtgaagagacccggtgcggcttgacattggcatttattgagaacccaatgcttccg

SEQ ID NO: 252070 - DNA, 517 bp, Glycine max
  unsure (1)..(517): unsure at all n locations
nggggaggcgttntgtctacgacggggcgagtaagtaattctcggagagacaagcttgcatgcctgcaggtcgactctagaggatcccctcggggaattccaattccacattttcaagaaataaggaggcaaaaatgttcatatatgaattggaattatttgttttcttattaggcctatcctgaagccaaaggaaatgagatcggaattcctcggggaattccaattccacattttcaagaaataaggaggcaaaaatgttcatatatgaattggaattatttgttttcttattaggcctatcctgaagccaaaggaaatgagatcggaattcctcggggaattccaattccacattttcaagaaataaggaggcaaaaatgttcatatatgaattggaattatttgttttcttattaggcctatcctgaagccaaaggaaatgagatcggaattcctcggaggtaccgagctcgaattccctatagtgagtcgtattaaattcgtaatcatgtcc

SEQ ID NO: 252071 - DNA, 412 bp, Glycine max
gggcgttttgagatagtgtgcctgtcaggctcttacttggttgctgatagtggtggcacccgcaatcgaactgttgcattaagtgtttcacttgcaagtcctgatggtcgtgtcatcggtggaggagttggtggagtgcttattgctgcaagtccagttcaggtgatacttgggagcttttcatggggtgcatcaaagacaaagataaagaaaaaagaaggttcagaaggtgcagaagttgctatggagactgatcatcagacggttcataatccagttgcagtgaatagtatttccccaaatcaaaatcttactccaacctcatctctaagtccttggcctgcatctcgaccattggatatgcgcaattcccatattgacattgatttaatgcgcgggtgacaatttattt

SEQ ID NO: 252072 - DNA, 339 bp, Glycine max
gttcgataattgtgctgaagtgcgcaaactctatgaaggtggagttacattgcctacaaactttcttagcaatatcactcctataccaataattaaggaactttttcgaactgatggcgaacagttcctcaagtatccaccacctaaagtgatgcaagtcgacaagtctgcatggatgactgatgaagaatttgcaagagaaacaattgctggtttgaatccaaatgtcatcaagattattgaggagttcccactaagtagcaagctagatactcaagcctatggtgatcatacctgtataataacaaaagagcatttggaacctaacttaggtggtct

SEQ ID NO: 252073 - DNA, 304 bp, Glycine max
ggcttccttaagctccttagtgctgctccttgcagctcgaattctatcccctcaagttcttgcaaactatgagaatcccccagtgtacaagcctcccactgagaaaccaccagtttataagcccccagttgagaagcctcctgtttacaaacctccagttgaaaaccccccaatttataagccttcagtagagaagccaccagtgtacaagcccccagtcgagaaacccccagttgataagccctcagttgagaaaccaccaatgtacaagctcccaagtgaaaaacccccaatgtacaagccc

SEQ ID NO: 252074 - DNA, 361 bp, Glycine max
attggaatgatatgttttcttattaggcctatcctgaagccaaaggaaatgagatcggaattcctcggggaattccaattccacattttcaagaaataaggaggcaaaaatgttcatatatgaattggaattatttgttttcttattaggcctatcctgaagccaaaggaaatgagatcggaattcctcggggaattccaattccacattttcaagaaataaggaggcaaaaatgttcatatatgaattggaattatttgttttcttattaggcctatcctgaagccaaaggaaatgagatcggaattccctcggggtaccgaactcgaattcctatagtgagtcgtttaaattcgtaatc

SEQ ID NO: 252075 - DNA, 526 bp, Glycine max
  unsure (1)..(526): unsure at all n locations
ggtgttctgggggtataggnntnnntaactgaatcgcatctatagtcctanccgccctatgatcgcttgtatgcctgcacgtcgactctagaggatcccctcggggaattccaattccacattttcaagaaataaggaggcaaaaatgttcatatatgaattggaattatttgttttcttattaggcctatcctgaagccaaaggaaatgagatcggaattcctcggggaattccaattccacattttcaagaaataaggaggcaaaaatgttcatatatgaattggaattatttgttttcttattaggcctatcctgaagccaaaggaaatgagatcggaattcctcggggaattccaattccacattttcaagaaataaggaggcaaaaatgttcatatatgaattggaattatnntgtttcttattaggcctatcctgaagccaaaggaaatgagatcggaattcctcgggggtaccgagctcgaattccctatagtgagtcgtattagagcttggcgtaatc

SEQ ID NO: 252076 - DNA, 484 bp, Glycine max
agtttttatacgacacgcacgtacagtatcacatagaatgtcgtcgaatgcacgcgtacgtaagctcggaattcgactcgagggcaccactttaacttatactataatattataaaatacagggttggataacacggtaactcacatggcacacccgcgtggtactaggttcgtcccgatcaatgtttagtataaactccctgaatcctcacaagggacgacggataagcgttgctgttccacctaagtttccaagcttccggagggaagcagctctgcaggggaatttggaggctgttagagtcccaacttcggtgcctgtgcgtgtagcatacgaacttcttctagctggtcatcgatatttggatgtaaggactccagaagagttcaatgctggacacgctcctggcgccattaacataccttatatgttcagagttggatcagggatgactaagaatagcaactttattagacaggtgtc

SEQ ID NO: 252077 - DNA, 394 bp, Glycine max
  unsure (1)..(394): unsure at all n locations
ctcttcttccccaccatcacaccaaccaaacctcactctgggtgccatggtcatgggagcctttcgccacttcaaaccggtttccaaatgcagcaccgaaaaccggtttaaccaaaccgtggcctcggacttggacggcaccctcctgggtgtcccctagcgcctttccttactacatgctcgtcgccatcgaaaccggcagcttcctccgtggccttgtcctccttggatccgtccctttcgtgtacttcacgtacatattcttctccgagaccgcggccatcaagtccctgattttcattgccttcgcgggcctgaaggttaaggacattgagatgggcgcgtnctcggtgctgcccaagttctacaccgaggacgtgcaccccgagagctg

SEQ ID NO: 252078 - DNA, 417 bp, Glycine max
tcggggaattccaattccacattttcaagaaataaggaggcaaaaatgtgcatatatgaattggaattatttgttttcttattaggcctatcctgaagccaaaggaaatgagatcggaattcctcggggaattccaattccacattttcaagaaataaggaggcaaaaatgttcatatatgaattggaattatttgttttcttattaggcctatcctgaagccaaaggaaatgagatcggaattcctcggggaattccaattccacattttcaagaaataaggaggcaaaaatgttcatatatgaattggaattatttgttttcttattaggcctatcctgaagccaaaggaaatgagatcggaattcctcggggaattccaattccacattttcaagaaataaggaggcaaaaatg

SEQ ID NO: 252079 - DNA, 418 bp, Glycine max
  unsure (1)..(418): unsure at all n locations
tcggggaattccaattccatatttttaagaaataaggaggcaaaaatgttgatatgtgaattggaattatttgttttcttattaggcctatcctgaagccaaaggaaatgagatcggaattcctcggggaattccaattccacattttcaagaaataaggaggcaaaaatgttcatatatgaattggaattatttgttttcttattaggcctatcctgaagccaaaggaaatgagatcggaattcctcggggaattccaattccacattttcaagaaataaggaggcaaaaatgttcatatatgaattggaattatttgttttcttattaggcctatcctgaagccaaaggaaatgagatcggaattcctcggngaattccaattccacattntcaagaaataaggaggcaaaaatgt

SEQ ID NO: 252080 - DNA, 383 bp, Glycine max
ccccttggggaattccaattccacattttcaaaaattaaggaggcaaaatggtgcttttttaaatgggaataattggtttcctaattaggcctatcctgaacccaaaggaaatgagatcggaaattcctcggggaattccaattccacattttcaagaaataaggaggcaaaaatgttcatatatgaattggaattatttgttttcttattaggcctatcctgaagccaaaggaaatgagatcggaattcctcggggaattccaattccacattttcaagaaataaggaggcaaaaatgttcatatatgaattggaattatttgttttcttattaggcctatcctgaagccaaaggaaatgagatcggaattcctcgggggta

SEQ ID NO: 252081 - DNA, 495 bp, Glycine max
  unsure (1)..(495): unsure at all n locations
ggggaatgattggtcagccacgacgtatagcaagacactgcttgcatgcctgcaggtcgactctagagatcccctcgggaattccaattccttattttcaagaaataaggaggcaaaaatgtgatatgtgaattggaattatttgttttcttattaggcctatcctgaagccaaaggaaatgagatcggaattcctcggggaattccaattccacattttcaagaaataaggaggcaaaaatgttcatatatgaattggaattatttgttttcttattaggcctatcctgaagccaaaggaaatgagatcggaattcctcggggaattccaattccacattttcaagaaataaggaagcaaaaatgttcatatatgaattggaattatttgttttcttattaggcctatcctgaagccaaaggaaatgagatcggaattcctcggnggtaccgagctcgaattccctatagtgagtcgtattaaattcgtaatca

SEQ ID NO: 252082 - DNA, 511 bp, Glycine max
  unsure (1)..(511): unsure at all n locations
ggggagtgtatctgatcactgaatataagtcacctctccannacacttnnnnntttgcttgcatgcctgcaggtcgactctagaggatcccctcggggaattccaattccacattttcaagaaataaggaggcaaaaatgttcatatatgaattggaattatttgttatcttattaggcctatcctgaagccaaaggaaatgagatcggaattcctcggggaattccaattccacattttcaagaaataaggaggcaaaaatgttcatatatgaattggaattattcggtttcttattaggcctatcctgaagccaaaggaaatgagatcggaattcctcggggaattccaattccacattttcaagaaataaggaggcaaaaatgttcatatatgaattggaattattnggacacttattaggcctatcctgaagccaaaggaaatgagatcggaattcctcgggggtaccgagctcgaattccctatagtgagtcgtattaaattcgta

SEQ ID NO: 252083 - DNA, 388 bp, Glycine max
caagcctccagatgcttttgtaactcgtgtgcattcagctcagagaacagaagacgaagactatgctgagggaagtgagacagggttttctgagtcacctgcaaatcctgctaatggtcctgcatccccacctactgccaggcaatcagcacctacatctgcaataggtgcaccagccacacctccacctgttgcacctgtgccagatttacttggagatttgatgggcatggataattctattgttcctattgatcagccagctactcctactgggcctccattacctattttactacctgctgcaactggtctgggtttacaaattagtgcacaactgactagacaagatggtcaaatattttatagtttggtgtttgagaacaac

SEQ ID NO: 252084 - DNA, 357 bp, Glycine max
aaaccctagtctccatacatcaacttgggaggttaaagagacggcaacgttgtgctgtccgccttgaccgagccagagcttcgtcttggccctcgattttgccctgtaaaactaatcccagtaacaacagaaataatcaatggcaccgaaacagaccaaggctgagaagaagatcgcttacgatgcgaagctgtgcgacctaatggaggagtacggccaaatcctcgttgtaaactccgacaacgtgggatcgaaccagctccagaacattcgcaagggtcttcgcggcgactctgttgtcctcatggggaagaacaccatgatgaagcgctctgtcaggatgcacgctgagaaaac

SEQ ID NO: 252085 - DNA, 410 bp, Glycine max
ctttctcacacaatctgggaaccacacacacaaaccattcccttttctcactacggcaatgaccacccaagcttccaccttcgccgtcgccgttccctccgtcgcaacccctttccgccgccaccggaatcccttcgttgttcgagcccaagcggaaccttcagataaatccgttgaaattatgaggaagttctcagagcaatacgcccgtaagtcaggaacatacttttgtgttgacaagggggtcacttctgttgttatcaaggggttggctgaccataaagatacgttgggtgcaccactgtgcccttgccggcattacgatgataaagctgctgaggttgcacaaggattttggaattgcccttgtgttcccatgagagagaggaaagagtgccactgcatgctat

SEQ ID NO: 252086 - DNA, 403 bp, Glycine max
caaattctcattatctctctctctctgtttcgctttcaccgaagaataacttgactttcccgaactccacctgagaaaaagatacccttaattcgcaggcgcgtcttgtgttggacaacaaccacaagatgattaacttcgaagaaaccgagttgcgactcggcctccctggcaacgactcagcactcaagggaagtgctgccaagagaggcttctctgaaactgcttctgttgatttgaagcttaatctttcttcttgtattaacgactctgcctcggattcaccctcatctatgtctacagagaagcccaaagagaacaagactaccactgctgaacctcctccagctaatgatccagcaaaaccacctgcaaaggcacaagtggtgggttggccaccagt

SEQ ID NO: 252087 - DNA, 399 bp, Glycine max
gaaatgttgctaacattgtcccaccatatgaccagtcaaaatacgctggaactggggcagcagttgagtatgctgttttgcatcttaaggtgtctgagattgtggtcattggacacagtgcttgtggtggtattaaggggcttctgtctttcccatatgatggaacctactctactgattttattgaggagtgggtcaaaattggcttgcctgcaaaggcaaaggtgaagacacaacatggggatgcaccttttgctgagttgtgctcacactgtgagaaggaagctgtgaatgtttcccttggaaaccttctaacatacccatttgttagagatggcttggtgaacaagacattgtcactaaaaggaggatactatgactttgttaagggatcttttg

SEQ ID NO: 252088 - DNA, 500 bp, Glycine max
tgaggggttgaatgtggttgggggtataatggaaacactatagaagagctatgacgtcgcatgcacgcgtacgtaagctcggaattcaattatgtacttattgtgaaaccatcagggtttgcttgtccttctattattgttgcttttaggtttctgaagagctcttggaaggcaaggagttggagttttacaaatgggaaggagatgtacctgaattgttgaaagatgttcatgataagctcaacatgctttcagagcattggtctctagatgacaagaatagatgtttaaaagaaactactaaggcattccgttatatgggacaaattgttcgtctaattgtctcataaatagacatttgttctccttttttgttgttgaccttctttgatgtttcaatgttttgtagctgcctggccaaggtgccttacatctgtgatagatctgcacaatcttattgataaggatattaagggcatagcacaaccgataaagacaca

SEQ ID NO: 252089 - DNA, 506 bp, Glycine max
  unsure (1)..(506): unsure at all n locations
ngggaagggtttgttatgcggggagggaggtaatgttatagaccagctatgacgtcgcatgcacgcgtacgtaagctcggaattccggaccggtacctgcaggcgtaccttctatagtgtcacctaaatagctttttgcaaaagcctaggctagagtccggaggctggatcggtcccggtgtcttctatggaggtcaaaacagcgtggatggcgtctccaggcgatctgacggttcactaaacgagctctgcttatatagacctcccaccgtacacgcctaccgcccatttgcgtcaatggggcggagttgttacgacattttggaaagtcccgttgattttggtgccaaaacaaactcccattgacgtcaatggggtggagacttggaaatccccgtgagtcaaaccgctatccacgcccattgatgtactgccaaaaccgcatcaccatggtaatagcgatgactaatacgtagatgtactgccaagtaggaaagtcccataag

SEQ ID NO: 252090 - DNA, 497 bp, Glycine max
ggtaagactctgattcatcgaccactgtatagtatgactatttgacgtccatgcacgcgtacgtaagctcggaattccggaccggtacctgcatgtttaccttctatagtgtcacctaaatagctgtttgcaaaagcctaggctagagtccggaggctggatcggtcccggtgtcttctatggaggtcaaaacagcgtggatggcgtctccaggcgatctgacggttcactaaacgagctctgcttatatagacctcccaccgtacacgcctaccgcccatttgcgtcaatggggcggagttgttacgacattttggaaagtcccgttgattttggtgccaaaacaaactcccattgacgtcaatggggtggagacttggaaatccccgtgagtcaaaccgctatccacgcccattgatgtactgccaaaaccgcatcaccatggtaatagcgatgactaatacgtagatgtactgccaagtaagaaagtcccataa

SEQ ID NO: 252091 - DNA, 458 bp, Glycine max
agacctgcgagcatgcatgcacgcctacttaagctggtacttcggctggagggaagtccctcaagaacatcaaagctatcttgtccaagggacaaaattccaagctgcacaaaactgcaagacctggatcgatggtgagtggatcacgccaggagagcaatactgggcaccacgtggaacccattatcatcaatatgttgtcccaccaattttatcatttagaaaagattgcacttatggtgacctggcagccatgagattaccagaagacgtggaaggacttgggtgttgtgagtacacgatggataggggagtggttcacgcgtgccatgcaggaggagtggtacatagccttgaaggttggtctcatcacgaagttggggccatagatgttaacagaatcgatcttgtgtgggaagcagcactcagacatggcctaagaccagtgtcaagtttca

SEQ ID NO: 252092 - DNA, 511 bp, Glycine max
ggggaatgtgcctgtggtaagaccccagaacgatcagctatcacataggagagtctatgacgtcgcatgcacgcgtacgtaagctcggaattccgagctaggaaattactttgcaaagatgaaagatatcttgtggaactggcaaaataccaagctgcacaaaactgcaagacctggatcgttggtaagtggatcacgccaagagagcaatactgggcaccacgtggaacccattttcatcaatttgttgtcccaccaattttatcatttagaaaagattgcacttatggtgacctggcagccatgagattaccagaagacgtggaaggacttgggtgttgtgagtacacgatggataggggagtggttcacgcgtgccatgcaggaggagtggtacatagccttgaaggttggtctcatcacgaagttggggccatagatgttaacagaatcgatcttgtgtgggaagcagcactcaaacatggcctaagaccagtgtcaagtttcacat

SEQ ID NO: 252093 - DNA, 504 bp, Glycine max
  unsure (1)..(504): unsure at all n locations
agaaagtgatctgaggctttacctcgccccattcnatcatctttaanattatgacgtcgcatgcacgcgtacgtaagctgggaattccgctctagggtatcccctctagaaaatcaaagctatcttgtgcgacttgcaaaataccaagcgtggcaggactgcaagacctggatcgttggtaagtggatcacgccaagagagcaatactgggcaccacgtggaacccattttcatcaatttgttgtcccaccaattttatcatttagaaaagattgcacttatggtgacctggcagccatgagattaccagaagacgtggaaggacttgggtgttgtgagtacacgatggataggggagtggttcacgcgtgccatgcatgaagagtggtacatagccttgaaggttggtctcatcacgaagttggggccatagatgttaacagaatcgatcttgtgtgggaagcagcactcaaacatggcctaagaccagtgtcaagtttcaat

SEQ ID NO: 252094 - DNA, 507 bp, Glycine max
ggggaatgtcttgtgtaagtaaggggggatatagtcattactcggagagacaagcttgcatgcctgcaggtcgactctagaggatcccctcggggaattccaattccacattttcaagaaataaggaggcaaaaatgttcatatatgaattggaattatttgttttcttattaggcctatcctgaagccaaaggaaatgagatcggaattcctcggggaattccaattccacattttcaagaaataaggaggcaaaaatgttcatatatgaattggaattatttgttttcttattaggcctatcctgaagccaaaggaaatgagatcggaattcctcggggaattccaattccacattttcaagaaataacgaggcaaaaatgttcatatatgaattggaattatttgttttcttattaggcctatcctgaagccaaaggaaatgagatcggaattcctcgggggtaccgagctcgaattccctatagtgagtcgtattaaattcgt

SEQ ID NO: 252095 - DNA, 197 bp, Glycine max
tcggtgaatggctattccttattgccaagaaataaggatgcatgaatgtgcatatatgaattgggatcatgtgcttacttattaggcctatcctgaagccaaaggacatgagatcggaatccctcggggaattccaattccacattgtcaagaaataaagacgcaaacgatgtcatatatgaaatggaattatttgt

SEQ ID NO: 252096 - DNA, 399 bp, Glycine max
cacagaatcaagaatcgggatagcacagataagtccagctgctacagaagtttgcacgcacgcattttccttctgtaaaatacatggagtatgctgttgaagttgaaaaccacaaccacagttaaaatgtttttgcagcagaaatcaaatcctcctaataatgcttgactgttacattgagtttaagtgtagccatgagactagcaatatccataaacaccgtttacataatcccataccccttcacaaacctgaaataccccgttccagacacaaccccaaattcccgttccttcatcgtgaagatatctgatccttgaatctccaagctgcttcctttgaatttcccattggtgaagatcacggagaaaaccatgtacaagcctttgccatcaagct

SEQ ID NO: 252097 - DNA, 410 bp, Glycine max
ctcgagccgaatcggctcgagatcaattcccgtaaattatagattctttgacgctgctcggaactctctatcatcacccaactccgcgatcttcaaatggaaaagaaaggccaattataaccgtcatagttctggaatggggaccttcaccactcgcgcgttggcgcagccgcttcagaacgccgacgaactcatcgactccgtcgagacatttatcttcgattgtgacggagttatatggaaaggtgataaattaatagacggagtgcctgaaacgcttgacatgcttcggtcaaagggcaaaagattagtttttgtcaccaataactcaacaaagtctaggaagcaatatggaaagaagtttgaaacacttggcctgaatgtcagcgaggaggagattttcgcatcat

SEQ ID NO: 252098 - DNA, 410 bp, Glycine max
ctcgagccgtatcggctcgagatcaattcccgtaaattatggattcgttgacgctgctcggaactctctatcatcacccaactccgcgatcttcaaatggaaaagaaaggccaattataaccgtcatagttctggaatggggaccttcaccactcgcgcgttggcgcagccgcttcagaacgccgacgaactcatcgactccgtcgagacatttatcttcgattgtgacggagttatatggaaaggtgataaattaatagacggagtgcctgaaacgcttgacatgcttcggtcaaagggcaaaagattagtttttgtcaccaataactcaacaaagtctaggaagcaatatggaaagaagtttgaaacacttggcctgaatgtcagcgaggaggagattttcgcatcat

SEQ ID NO: 252099 - DNA, 411 bp, Glycine max
  unsure (1)..(411): unsure at all n locations
ttcaaagaataatgatgaagtagatggaaaaccgggtgcagcagcactctttgtgaaggtcagcatggatggtgctccctatctgaggaaggtagatctaagaaattatacaatgtaccaggaactgtcttctgcccttgagaaaatgttcagctgtttcactctaggtcaatgtggttcccatggagctccaggaagagaaatgttgagtgagagcaagctgaaggacctcctgcatggttcagaatatgtactcacttatgaagataaagatggtgactggatgcttgtcggagatgtaccatgggatatgttcattgacacatgcanaagactgaaaatcatgaagggttctgatgccattggcttagctcccagggccatggaaaaatccaggagcaggtgctagtt

SEQ ID NO: 252100 - DNA, 214 bp, Glycine max
gaagtgaagcttgtgtgcttcctgtcatcaaggttgacaagggcacagtcgagcttgctggaactaatggagaatccaccattcaggtactagatggcctatgtcagcgttgtgtcatgttctacatagctggtgcacgtgttgccaaatggtgtgctgagcttaagattgatcataacaagccatctcatctggttatacatctgaactccta

SEQ ID NO: 252101 - DNA, 401 bp, Glycine max
cctaaaacatggaactccgtttaaggaaaggaaaacagcgtacgaggaagagagagatagaaaacggcatgcagtggtgggcttcatggcggaggtgttatattggatctcaacgtttgttctcattttgactcttctttgtattctcggttaccagcttatattattggtggacctggagtttgattatatcaacccatatgattccacgtctcagataaaccaggttgtcttgccagagtttatcatccatggaatcttctgcttcaccaatcttatagccgggcattggtttatattcttgatatctctccctttcctgtattacaatctgcgattgtacattaaaagagagcacttagcagatgttactgaaatctacaataagctaaattgggaga

SEQ ID NO: 252102 - DNA, 404 bp, Glycine max
attcggcagaaaaggggcttctgggttttcatcatcatccactgcagagcaagtcactgaaggaattgatggaactggtttcactgccattgtcacaggggcatccagtggtattggcactgagactacgcgtgttcttgctttgcgtggtgtccatgtgattatgggtgtgagaaatatgcttgctgctaaagatgtcaaagaaacaatactcaaggagattccctccgctaaagttgatgccatggagttagatctcagttcgatgaagtctgtcaggaaatttgcatcagagtttaagtcctctggtcttccattgaacatcttaataaacaatgcaggaattatggcttgccctttcagtctctctaaagacaaaattgaactacagtttgccacaaatc

SEQ ID NO: 252103 - DNA, 399 bp, Glycine max
attctgcagattaggggcttctgggttttcatgatcatcggctgcagagcaagtcactgaaggaattgatggaactggtttcactgccattgtcacaggggcatccagtggtattggcactgagactacgcgtgttcttgctttgcgtggtgtccatgtgattatgggtgtgagaaatatgcttgctgctaaagatgtcaaagaaacaatactcaaggagattccctccgctaaagttgatgccatggagttagatctcagttcgatgaagtctgtcaggaaatttgcatcagagtttaagtcctctggtcttccattgaacatcttactaaacaatgcaggaattatggcttgccctttcagtctctctaaagacaaaattgaactacagtttgccac

SEQ ID NO: 252104 - DNA, 414 bp, Glycine max
ggactttggttcttaaaagacgctatatttgaagaaggggatgcggaagaattggctgaagttgaagctaaattggataaagattggaaggctagcaatggagctacaaaaaatagcaataaggatgatgatgccacaaaaaagcataaacggtcatttttatctcagtttttttctcctatctttttacaggcattttctatcaccttttttggtgaatggggtgacaagagccagttggctaccataggtttggctgcagatgagaacccatttggtgtggttcttggagggattctgggacaagcattgtgcactgctgctgctgttgttggaagaaagagtttagcttctcagatatctgaaaaaattgttgcactctcaggtggaattcttttcattggttttggaatt

SEQ ID NO: 252105 - DNA, 406 bp, Glycine max
acttaacaacagcacaaagcgggttactgtctgttcaagctaccatctctctctctctttcttagtgcctccttgccagaagttaaaatggcccaagaaactttcctattcacatctgaatcagtgaacgaggggcaccctgacaagctctgtgaccagatctccgatgctgtgctcgatgcatgcttggagcaggaccctgacagcaaggttgcctgtgaaacctgcaccaagaccaacatggtgatggttttcggagagatcacaaccaaggccaacgtggactatgagaagattgtgcgtgacacatgcaggaacattggttttgtctctgatgatgttggtcttgatgctgacaactgcaaggtcctcgtcaacattgagcaacagagtcctgatattgctc

SEQ ID NO: 252106 - DNA, 512 bp, Glycine max
  unsure (1)..(512): unsure at all n locations
nagagagtgtatttgttaagtgggagggaggggtagatgttagagctacaagcttgcatgcctgcaggtcgactctagaggatcccctcggggaattccaattccacatttttaagaaataaaggggccaaaatggtcatatattaattggaattatttggtttcctaataagccctatctggaacccaaaggaaaatggaaatcgggatttcctgggggaattcccattccacattttcaagaaataaggaggcaaaaatgttcatatatgaattggaattatttgttttcttattaggcctatcctgaagccaaaggaaatgagatcggaattcctcgggggtaccgagctcgaattccctatagtgagtcgtattaaattcgtaatcatgtcatagcctgttcctgtgtgaaattgttatccgctcacaattccacacaacatacgagccggaagcctttaatgttaagacttgggttccttattgagtgagctaacttacttaaattg

SEQ ID NO: 252107 - DNA, 508 bp, Glycine max
  unsure (1)..(508): unsure at all n locations
agtggagtgtatctgctaagaaggaggaggaatacgatttcgagacacaagcttgcatgcctgcaggtcgactctagaggatcccctcggggaattccaattccacattttcaagaaataaggaggcaaaaatgtgcatatatgaattggaattatttgttttcttattaggcctatcctgaagccaaaggaaatgagatcggaattcctcggggaattccaattccacattttcaagaaataaggaggcaaaaatgttcatatatgaattggaattatttgttttcttattaggcctatcctgaagccaaaggaaatgagatcggaattcctcggggaattccaattccacattttcaagaaataaggaagcaaaaatgttcatatatgaattggaattatttgttttcttattaggcctatcctgaagccaaaggaaatgagatcggaattcctcggnggtaccgagctcgaattccctatagtgagtcgtattaaaatcgtaatc

SEQ ID NO: 252108 - DNA, 391 bp, Glycine max
  unsure (1)..(391): unsure at all n locations
ccaaaactcatgctatattctcactctcacaacttcaatcgctttcgctctctctctctctctctctctctaccaaaaaaatggctttggaaactctcaactcaccaacaacaaccgccccatctttccccttcgacgacccaactattccatgggccaaaagaaaacgttcaaagcgttgttcacgcgaccacccttcggaggaagagtacctcgctctctgcctcatcatgctcgctcgcggcggcaccacccgccgcgtcagcactccaccgccgcaaccgactccagatccttccaccaagctcagttacaaatgctccgtttgcaacaaaagcttnccctcttaccaagcgctcggtggacacaaggccagtcaccggaaactcgc

SEQ ID NO: 252109 - DNA, 511 bp, Glycine max
  unsure (1)..(511): unsure at all n locations
ngggaatgtctctcctttgttggatgaggagttaatggtattactcggagagacaagcttgcatgcctgcaggtcgactctagaggatcccctcggggaattccaattccacattttcaagaaataaggaggcaaaaatgttcatatatgaattggaattatttgttttcttattaggcctatcctgaagccaaaggaaatgagatcggaattcctcggggaattccaattccacattttcaagaaataaggaggcaaaaatgttcatatatgaattggaattatttgttttcttattaggcctatcctgaagccaaaggaaatgagatcggaattcctcggggaattccaattccacattttcaagaaataaggaggcaaaaatgttcatatatgaattggaattatttgttttcttattaggcctatcctgaagccaaaggaaatgagatcggaattcctcgggggtaccgagctcgaattccctatagtgagtcgtattaaattcgta

SEQ ID NO: 252110 - DNA, 503 bp, Glycine max
  unsure (1)..(503): unsure at all n locations
atgaggagggtttgtctatgaattggggggtatatagtattactcggagagacaagcttgcatgcctgcaggtcgactctagaggatcccctcggggaattccaattccacattttcaagaaataaggaggcaaaaatgttcatatatgaattggaattatttgttttcttattaggcctatcctgaagccaaaggaaatgagatcggaattcctcggggaattccaattccacattttcaagaaataaggaggcaaaaatgttcatatatgaattggaattatttgttttcttattaggcctatcctgaagccaaaggaaatgagatcggaattcctcggggaattccaattccacattttcaagaaataaggaggcaaaaatgttcatatatgaattggaattatttgttttcttattaggcctatcctgaagccaaaggaaatgagatcggaattcctcgggggtaccgagctcgaattccctatagtgagtcgtattan

SEQ ID NO: 252111 - DNA, 395 bp, Glycine max
  unsure (1)..(395): unsure at all n locations
agcaccacattcacctgaggcttccaaagcaatggcttcccttgcagcatccactgctgctgcttcccttggcatgtcagaaatgcttggaaaccccatcaacttcagtggtgccacaaggccagctccatctgcttctagtcctgcctncttcaagactgtggctcttttctccaaaaagaaggctacaccaacacctncaaaaaaagctgctgctgctgctcctgccaatgatgagcttgccaagtggtatggtcctgacagaaagatcttcttgcctgagggtctcttggaccgatccgaaatcccagagtacttgaccggagaagtccctggagactatggttatgacccatttggtcttagcaagaagccagaagactttgccaaatatc

SEQ ID NO: 252112 - DNA, 397 bp, Glycine max
  unsure (1)..(397): unsure at all n locations
cgagggttattggacacattcttcagcgactgcgtttttggatcggaacctcttctgcggcgtagcaatgggacactccaaacgttggaactctcacccaaaaaactacggtcctggttctcgcacttgccgtgtgtgtggggaatccacatggactgatcaggaagtatggccttatgtgctgcagcagtgcttncgtagcaatgccaaggaaattggcttcatcaagtatcgctaaaagagcagttgtcaactacggaccaatattgtgttctggcactaagatgttttgaagatgttatgtttgaagaaacttgagactttcttttttcatctaattaattatcagacgtaatttgtggtactaagaatacttttatataaattgttttgaacc

SEQ ID NO: 252113 - DNA, 514 bp, Glycine max
  unsure (1)..(514): unsure at all n locations
nggaaaaggcgtgnngtttgcaggagtgccggggaaagataaatattcggagagacaagcttgcatgcctgcaggtcgactctagaggatcccctcggggaattccaattccacattttcaagaaataaggaggcaaaaatgttcatatatgaattggaattatttgttttcttattaggcctatcctgaagccaaaggaaatgagatcggaattcctcgggggtaccgagctcgaattccctatagtgagtcgtattaaattcgtaatcatgtcatagctgtttcctgtgtgaaattgttatccgctcacaattccacacaacatacgagccggaagcataaagtgtaaagcctggggtgcctaatgagtgagctaactcacattaattgcgttgcgctcactgcccgctttccagtcgggaaacctgtcgtgccagctgcattaatgaatcggccaacgcgcggggaaaaggcggtttgcgtattgtgcgctcttccgcttcctcgctcact

SEQ ID NO: 252114 - DNA, 505 bp, Glycine max
  unsure (1)..(505): unsure at all n locations
ggaagatgctgtatatgtgtgttggggaaatgattatattggagagacaagcttgcatgcctgcaggtcgactctagaggatcccctcggggaattccaattccacattttcaagaaataaggaggcaaaaatgttcatatatgaattggaattatttgttttcttattaggcctatcctgaagccaaaggaaatgagatcggaattcctcggggaattccaattccacattttcaagaaataaggaggcaaaaatgttcatatatgaattggaattatttgttttcttattaggcctatcctgaagccaaaggaaatgagatcggaattcctcggggaattccaattccacattttcaagaaataaggaggcaaaaatgttcatatatgaattggaattatttgttttcttattaggcctatcctgaagccaaaagaaatgagatcggaattcctcgnnggtaccgagctcgaattccctatagtgagtcgtattaaattcgta

SEQ ID NO: 252115 - DNA, 370 bp, Glycine max
tcggggaatgcctattccttattttcaagaaataaggaggcagggaatgggcatatatgaattggaattatttgttttcttattaggcctatcctgaagcctaaggatatgagatcggaattcctcggggattcccaattccacatttttatgaaataatgaggcaaaaatgttcatatatgaattgtaattattcggtaacttattaggcctatcctgaatccaaatgaaatgatatcggaattcctcggggaattccaattccacatttccaagaactaccgacgcacatatgttcatatatgaatcgtaattatctgtactcttattaggcctatcatgaagccaagagaaatgagatcgcaattcc

SEQ ID NO: 252116 - DNA, 396 bp, Glycine max
ggcaactatgactggtgtgagcctttcatgccccagggttttcttcaacgcatcagcctcaccgcaaaacgcgcatgctgtaaagttctcacttccacccagccaagcagtgcgaccgggtagtatcaagttgggtcgcgtgatgaggatccgacccgttcgcgctgcgcctgagcgcatatcggagaaggtggaggagagcataaagaacgcgcaggaggcgtgcgccggcgatccgacgagcggcgagtgcgtggcggcgtgggacgaggtggaggagctgagcgcggcggcgagccacgccagggacaagcaaaaggaaaaggactccgacccgctcgagaattactgcaaggacaacccggagaccattgagtgcaaaactttcgaagactg

SEQ ID NO: 252117 - DNA, 407 bp, Glycine max
  unsure (1)..(407): unsure at all n locations
gaatcccaacgctccgatgttcgtgccactcgcctatcggacggtggaggatttctccgaccagtggtggaacctcgttcactccttcccctggttccacgactactggctccgcgagtgcttccaagatccccagttccaaaacgacgacgctttcgacttcgactttgacctagatctccaagatgaagatgaaaaggaacgaaaggaagggaaggaggtggtgtcgttgggggtgctgaaatggcgaagctgtggaggaggatgggcccaggcgccgaggtatgtggaaaaggcccncaagtttgtgaagccccaagtgagcccacgggctattcaccagcccaggtagacgcaacccggcccattccccaccagctatagctgtgtacataagcgcaaatgac

SEQ ID NO: 252118 - DNA, 323 bp, Glycine max
tcggggaattccaattcccatttttaagaaattaaggaggcaaaatggtgattttttaaatgggaataattggtttcctaattaggcctatcctgaacccaaaggaaatgaaatcggaattcctcggggaattccaattccacattttcaagaaataaggaggcaaaaatgttcatatatgaattggaattatttgtttcttattaggcctatcctgaaaccaaaagaaatgagatcggaattccttcgggaattccaattccacattttcaagaaataaggaagcaaaaatgttcatatatgaattggaattaatttgtttc

SEQ ID NO: 252119 - DNA, 514 bp, Glycine max
  unsure (1)..(514): unsure at all n locations
aagtagggnnctcgtngttacggacacggaaagatatatctctagacgagctatgacgtcgcatgcacgcgtacgtaacctcggatttcggttcagccaagaggaacctttacccctaggaccagcaccacctatcttaacttgaaagggccttttaagggttggcttctggggccttaaaacttgcccttttaactgttgaaaagtcctcagtgagaggccttccctctttttcaaggaactcttcttcattcagagttgtggccagtggcaagaagatcaagactgacaaaccttatggaattaatggtggcatggctttgagggatggaactgatgcatctggcaggaaaggaaagggaaagggtgtttaccagtttgtagacaaatacggtgctaatgtcgatggttacagtcctatctacgacaccaaggactggtctccaaccggtgatgtctacgctggcggtacgactggcttggctatctgggctgtgactctacttggtctttt

SEQ ID NO: 252120 - DNA, 408 bp, Glycine max
gataactagaaacagtgtgatgaaaatgaaggtccttgttttcttcgttgctacaattttggtagcatggcaatgccatgcgtacgatatgttccctctccgaatgaacactggctatggtgcccgtactccggaggtgaaatgcgcaagttggaggcttgctgtggaagcacacaacatctttggctttgagaccattcctgaagagtgcgttgaagcaacaaaggaatacatccatggcgaacaatatagatcagactccaaaacagttaaccaacaagcttacttttatgccagagacctcgaagtccatcccaaggacacatttgtgttcagtatagatggcaccgtactctctaatattccatactacaaaaaacatggatatggggtggagaaatttaactc

SEQ ID NO: 252121 - DNA, 401 bp, Glycine max
gtgaagcagcagagggaggagcggcattaaaaatgcagatgttcgtgaaaaccctaacggggaagaccataaccctcgaggtcgaaagctgcgacaccattgacagtgtcatggctatgattcaagacatggaaggcatccctgcggatcagcagcgtttgattgtcgccggaaagcaacttgaagattgaaggaccttggccgattacaacatccagaaggaatcagccttttaccttgtcctaaggcttcgaggtggcatcatcgagccttacctcatggcttaggctcgtaaatacaaccaggacaagaagatttgccgcacatgctatgctcgtctgcaccctacggctgtgaactgacttaagacgacgtgcggtcttagtatccagttgaggcct

SEQ ID NO: 252122 - DNA, 509 bp, Glycine max
  unsure (1)..(509): unsure at all n locations
agaaatggcctgtagtagcttaactgttctaaatcnatcaacatacaagatctatgacatcgcacgcacgcatacgtaagctcggaattcagctcgaggctttttagtttcagttagatcagcatgaatgttggtatgggaatctgtgacaactagttggcatattataactatcctgcatccaatctaaatcatatccgaattactactggctttccaactccacattctcaagaaatatgcacacataaatgtccatatatgaattcacactatatgttttcttattaagacctatcctgaagacaacggaaatgagatcggaatacctatccatatcccacttcctcattcacactacataacgattcaccaacgttcatatatgaattccaattacctgtaatctcattatacctatacttaagccaaaagaaatgataatcccattccttattagttcccatactacaatttcctatagtgagtcgtataaaattctaaataat

SEQ ID NO: 252123 - DNA, 383 bp, Glycine max
gtcagtttctgccatgctttcagtacccaattgctttgtgcggcctagggaggcacaaaaagctgcggatgaagctaaagctaggttcgggcacattgatggagatcatctcactctgttgaatgtctatcatgcgtacaagcaaaataatgaggatccctcttggtgctacgataactttgttaatcatagggcattgaaatcagctgataatgttagacaacaattagtgcgtatcatgtcccggtttaatctgaagctatgcagcactgactttaatagccgtgactactatgtcaacataggaaaagctatgctagctgggtattacatgcaggtagctcatctggagcgtacaggactctacttgacagtgaaagaca

SEQ ID NO: 252124 - DNA, 400 bp, Glycine max
gagaagaaaatagtcgttcgagatggcccgtacgaagcaaactgctcgtaagtccacaggaggaaaggctcctaggaagcagcttgcaaccaaggctgcacgtaagtctgcaccaactactggtggtgtgaagaagccacatcgttaccgtcctggtaccgttgctcttcgtgagattaggaaataccagaagagtaccgagcttttgatcaggaagctccccttccagaggctggttcgtgaaattgctcaggacttcaagactgatctgcgtttccagagccacgccgtgcttgcattgcaagaagctgctgaggcataccttgttgggctctttgaggacactaacctgtgtgccattcacgctaagcgggtaaccattatgcccaaggatatccag

SEQ ID NO: 252125 - DNA, 354 bp, Glycine max
aaggaagtcgaataccttctaaggaaaggatggattccttgcttggaattcgagttggagcacggtttcgtgtaccgtgagcacaacaggtcacctggatactatgatggacgctactggaccatgtggaagctgcctatgtttggctgcactgatgcttctcaggtgttgaaggagcttcaagaggctaagactgcataccccaatggcttcatccgtatcattggatttgacaacgttcgccaagtgcagtgcatcagcttcatcgcctacaagcccccaggcttctaagtcattgaaaaatttgcaaagcatctgtagccaccccactttgtttgttgtacttaaactaca

SEQ ID NO: 252126 - DNA, 364 bp, Glycine max
  unsure (1)..(364): unsure at all n locations
cccctggtggaatcccatttcaaaattttcaggaattaaggaggcaaaaaggtgcttatatgaattggaataatttgttttcttattaggcctatcctgaagccaaaggaaatgagatcggaattcctcggagaattccaattccacattttcaagaaataaggaggcaaaaatgttcatatatgaattggaattatttgttttcttattaggcctatcctgaagccaaaggaaatgagatcggaattcctcggggaattccaattccacattttcaagaaataaggaggcaaaaatgttcatatatgaattggaattatttgntttcttattaggcctatcctgaagccaaaggaaatgagat

SEQ ID NO: 252127 - DNA, 302 bp, Glycine max
tgagcaggatgtgtcgctgggagcgaacaagttcccggagagacagccgattgggacggcggcgcagagccaagacgacggcaaggactaccaggagccggcgccggcgccactggttgacccgacggagtttacgtcatggtccttttacagagcagggatagcagagtttgtggccacttttctgtttctatacatcactgtcttaaccgtcatgggagtcgccggggcttagtctaagtgcagtaccgttgggattcaaggaatcgcttgggccttcggtggcatgatctttgccctcg

SEQ ID NO: 252128 - DNA, 509 bp, Glycine max
  unsure (1)..(509): unsure at all n locations
nggtaggntgtctgcgacaagaagatgaatagtcattgctatcactctacaatagctatgacgtgcgcatgctacgcgtacgtaagctcggaattcgggtcgaggtcagcaggtatcataggtctagccaacgacaaactctccatgcttggtcaattgtccaacaaatatggcaatgccttctcctattgtctcccctcatctttttcagcacaaccaaactcttctgtatcaggtttcttgtccattggagcctcatcattgtcatcatcaccatacaagttcactcccttggtcaagaatccaaagattccaagcttgtactttcttggtttgacaactatcactgtggcaggaaagccactaggagtttctgcctcaagctacaatgttcctaccataattgactctggcacagtaatcacaaggcttcctgtggctatttacaatgcattgaaaaaatcttttgtgatgatcatgtccaaaaagtatgcacaggcaccaggatn

SEQ ID NO: 252129 - DNA, 393 bp, Glycine max
aagcaatgtctcacagaatgcatgtagacaacagtgtaaaactgattgggaagcttttatttggcattgaaaagggtccagaagtactcaacgctgttagaccggctggatcggcacttgttgatgactggcactgcctgaaaaccatggtgaggacttttgagacacattgtggatccttgtctcaatacgggatgaaacacatgaggtcctttgcaaacatctgcaatgtacggataaagaatgaacaaatggctgaggcttcagcacaagcttgtgtcagtattccttccaatccctggagttctctgcaaaggggtttcagtgcataataactccctgtaatgtgcactagtaaagaccaaagtatgattattgctacattatgttaca

SEQ ID NO: 252130 - DNA, 393 bp, Glycine max
aagctttgttttacagaatgcatgtagacaacaggggtagactcattgggaagcttttatttggcattgaaaagggtccagaagtactcaacgctgatagaccggatggatcggcacttgttgatgactggcactgtctgaaaaccatgccgaggacttttgagacacattgtggatcctagtctcaatacgggatgaaacacatgacgcactttgcacacatctgcaatggacggataaacagtgaacaaatggctgatgcttcagcacaggcttgtgctactattccttacaataatggagttctctgcaaaggggacacagcgcatagtaactacctgcaatgcgcactagtaaagaccagagtatgactattgctacatgatggcacat

SEQ ID NO: 252131 - DNA, 405 bp, Glycine max
  unsure (1)..(405): unsure at all n locations
caaccaaaccctaacacacacccatttgattcagtttccatggctagcctcaaggttgcatttttggctgcagtgctctgcatggttgtggtgagtgcacccatggcacatgcagctatcacgtgcgggcaggtgacgagtagcctggccaattgcatcggttacctccagaagggaggaacgccgtcgtcgggatgctgcaacggagtgaagagcctcaatgccgccgccaagaccaccgccgaccgccagacggcgtgcaactgcctcaagtcggccgccagccaaatctccggcttcaacgccaacaacgccgcctcgctccccggcaaatgcggagtctccatcccctacaagatcagcacctncaccaactgcgctaccatcaaggtttgaagagaaagt

SEQ ID NO: 252132 - DNA, 311 bp, Glycine max
gtgaaagagaatccgaggcgaagagaagagaaaaattaagatggaggggaaggagcaggatgtgtcgctgggagcgaacaagttcccggagagacagccgattgggacggcggcgcagagccaagacgacggcaaggactaccaggagccggcgccggcgccactggttgacccgacggagtttacgtcatggtccttttacagagcagggatagcagagtttgtggccacttttctgtttctatacatcactgtcttaaccgtcatgggagtcgccggggctaagtctaagtgcagtaccgttgggattc

SEQ ID NO: 252133 - DNA, 324 bp, Glycine max
cacgcctactctagctgatactctggctcaagcacatttcctcattttcaagaaatcccgacgcaaaggtgggcatatatgaactgcaattatctcttttcttattaggcctatcctcataccataggaaatgacatcggaattcctaggataatcccattcccacattctcatgatatccggatgcacaactgttcatatatgaattagaattatttgatttcttattacgcctatactgacacccaaggacatgataccgtaattcactagagaattccaattccacattttcaagaaataccgaagcaactcctgttcata

SEQ ID NO: 252134 - DNA, 531 bp, Glycine max
  unsure (1)..(531): unsure at all n locations
gagtttagaggtgnagtgtctgtcacgcacgcgtacagtcatcaccatagnagagtctatgacgtcgcatgcacgcgtacgtaagctcgtaatcaatcgacgccttttttgcgaataaggaggcaaattgggacgaggtgaatgagcatgatgtgtcgctgtaatcgaactattttgcagccagacggcctgttgtcacagttgctcagagcctagacgacggccatgactaccaggagccggcgccggcgcgactgtttgtcccttcggagtatacgtcatggtactttgactgtgctgggatcgcagagtttgtggtcactattctgttgtgtacatcaatgtctcaaccgtcatagaaatggcccgagctaagtcttatatcaattgcgattagattgaatgaaattattgcgactttggaggcataagctatgagatcggtatctgctccggggtcctatctcggggtcactataacgcggcggtgtcaattcggcattatattataaatgggttctgggtggaaat

SEQ ID NO: 252135 - DNA, 347 bp, Glycine max
  unsure (1)..(347): unsure at all n locations
ggagagttggcaacaccggtgggatggccgcgattcagttgtctactgagcacaatgcgaattttgaggctgtcaggcaggagcttaaggaattgcacccgaatgacccccagattgttgtcctcaaacatggagtgtggagagtaaagggcattattcaggtttctagatctataggtgacgtatatatgaaacatgcgcagtttaaccgagaacccattaatgcaaaattcagactccccgaaccaatgaacatgcctttcttgtctgctaatccaactattctttctcatcctctccaaccaaatgattccttccttatanttgcatcagatggtttatgggag

SEQ ID NO: 252136 - DNA, 401 bp, Glycine max
ctcaatatccgccattgaattcttcttccatttctcttttttctgcatacccatttcgtttttcttcccaaatggccctttcttgctccaaagttttaagcttttatctctcgcccgttgtgggtggtggtgatgttccgaaaaagctcactttttcttcttttttgggtctttctaagggtgttggtggaagcaggagctcgagggtgtgtgctgcttcaaatgcacccgcaccactcgctggggtcatatttgaaccatttcaagagctcaagaaggattatcttgctgttccgattgcacacaatgtttccttggctcgtcagaactatgcagatgactctgaatctgcaatcaacgagcagatcaatgtggaatacaacgtttcctatgtgtaccac

SEQ ID NO: 252137 - DNA, 400 bp, Glycine max
  unsure (1)..(400): unsure at all n locations
cgagttacagccgcaccttgattcagagcagagcgaccttgaagagctatggctgtcggaaagaataagaggatttccaagggaaagaagggtggcaagaagaaagccgctgatccctttgccaagaaggactggtacgatatcaaggccccttccgtctttcaggtcaagaatgttggcaaaaccctcgtctctcgtacccagggaaccaagattgcttctgaaggactcaaacatagagtgtttgaggtctcattggctgatctccaaggagatgaagaccatgccttcaagaagattcgtttgagagctgangatgttcaagggaaaaatgttctgacaaacttttggggaatggatttcacaactgataagttgaggtccttggtgcggaaatggc

SEQ ID NO: 252138 - DNA, 504 bp, Glycine max
  unsure (1)..(504): unsure at all n locations
ngggagtggttttgtttacgaagggacgcttatctgtcatcactcggagagacacgctagcatgcctgcacgcctactctagcagatcctctcggtgaatcccaattccacattttcaagaaataaggcggcacaaatgttcatatatgaatcggaattatttgatatcttattaggcctatcctgaagccaaaggaaatgagatcggaattactcggggaattccaattacacattctcaagaaataacgaggcaaaaatgttcatatatgaattggaattatccgttttcttattaagcctatcctgaagccaaaggaaatgagatcggaatttctaggggaatgccaattacacatctgaatgaaatagggaggcaaacatgctcatatatgaattggaatgatatgttgtcttattaagcctatcctgaagccaaaggaactgagatcggaatacctcacaggtactgagctcgaattccctatactgagtcggcttaaa

SEQ ID NO: 252139 - DNA, 360 bp, Glycine max
ggcttgtgaatcagcaccacattcacctgagctttttgcgaggattccaaagcatggcttcccttgcagcatccactgctgctgcttcccttggcatgtcagaaatgcttggaaaccccatcaacctcagtggtgccacaaggccagctccatctgcctctagccctgcctccttcaagactgtggctcttttctccaaaaagaaggctgcacctccaaaaaaagctgcagctgctgctcctgccaatgatgagcttgccaagtggtatggtcctgacagaaggatcttcttgcctgtaggtctcttggaccgatctgagatcccagagtacttgaccggtgaagtccccggagactatt

SEQ ID NO: 252140 - DNA, 396 bp, Glycine max
acccctaccatgagttacaaagcatggcgtagagaaccaaaggatggtcctccccaatatagaagcagcactatttttgaagatgctacccctgagatggtgagggacttgttttgggatgacgagttccgaccgagatgggatgacatgcttgcaagctcttcaatcattgaagagtgtcccactactggtactatgaaagtgcagtggatacggaagtttccctttttctgtaaagatagagaatacataattggtcggagaatatgggaatctggaaagcattactattgtgtgaccaagggagtaaattgtccttcaatgcctagaaaagattaacctagacgcgttgatgtgtactactctagttggtgcattagagcagtggaatcaaat

SEQ ID NO: 252141 - DNA, 394 bp, Glycine max
aaagatggatattcatttctctaccctttcgggtggcaggaagtagtaattgaaggccatgataaggtgttcaaagatgtcattgatccactggagaacgtcagtgtaaatgtgataccaactggcaaacaggatattacagaattcgtgtcccctcaagaggttgctgaaactctaataaaaaaggttttggctcctacaaaccagaaaaccaagatagtagaagcaaaagagcaagatgttgaaggaataaagtactatcaatttgaattcattgctaaggcttcaaactatactcgtcatgctctcagcacagtcttcattggcaatggtaagttttacaccttaacaacaggtgcaaaccagagaagattggacaagatgaaagacaggc

SEQ ID NO: 252142 - DNA, 341 bp, Glycine max
gcagaaaaacaagtagttgagaactaagaagaaggaaatggcttcctcaatgatctcctccccagctgttaccaccgtcaaccgtgccggtgccggcatggttgctccattcaccggcctcaaatccatggctggcttccccacgaggaagaccaacaatgacattacctccattgctagcaacggtggaagagtacaatgcatgcaggtgtggccaccaattggcaagaagaagttcgagactctttcctacttgccagacctcgatgatgcccaattggcaaaggaagtcgaataccttctaaggaaaggatggattccttgcttggaattcgagtttg

SEQ ID NO: 252143 - DNA, 496 bp, Glycine max
tagtttatgttacgcacgacatagaccgtcactactcggagagacaagcttgcatgcctgcaggtcgactctagaggatcccctcggggaattccaattccacattttcaagaaataaggaggcaaaaatgttcatatatgaattggaattatttgttttcttattaggcctatcctgaagccaaaggaaatgagatcggaattcctcggggaattccaattccacattttcaagaaataaggaggcaaaaatgttcatatatgaattggaattatttgttttcttattaggcctatcctgaagccaaaggaaatgagatcggaattcctcggggaattccaattccacattttcaagaaataaggaggcaaatatgttcatatatgaattggaattatttgtcttcttattaggcctatcctgaagccataggaaatgagatcggaattcctcgggggtaccgagctcgaattccctatagtgagtcgtattaaa

SEQ ID NO: 252144 - DNA, 402 bp, Glycine max
gtatgttcagttcttggtctcaagtttcatcttgggctgtagactgtagcaaacaccatgaccaccaaggttccaaaatccgtatacgactttgttgtcaaggatgctatgggagatgttgtagatctctccttttacaagggaaaagtccttctgattgtcaatgttgcttctcaatgatatccttaatctgtgctgtgtttgttacttcttcttttgttttccctgattgtgccttctaattaatttaaagccttgatattttcatcttttctattcttttcagtaactactctcaccgctaatgttataaatgttgagaaaatttacaatatgtttgggattgagacagcggcttgaccaactccaattatacggagctgaatcaattgtatgacaagt

SEQ ID NO: 252145 - DNA, 493 bp, Glycine max
  unsure (1)..(493): unsure at all n locations
cggtttatctaagtggggggagacagtaatactcggagagacaagcttgcatgcctgcaggtcgactctagaggatcccctcggggaattccaattccacattttcaagaaataaggaggcaaaaatgttcatatatgaattggaattatttgttttcttattaggcctatcctgaagccaaaggaaatgagatcggaattcctcggggaattccaattccacattttcaagaaataaggaggcaaaaatgttcatatatgaattggaattatttgttttcttattaggcctatcctgaagccaaaggaaatgagatcggaattcctcggggaattccaattccacattttcaagaaataaggaggcaaaaatgttcatatatgaattggaattatttgttttcttattaggcctatcctgaagccaaaggaaatgagatcggaattcctcggnggtaccgagctcgaattccctatagtgagtcngattaaa

SEQ ID NO: 252146 - DNA, 377 bp, Glycine max
tctggtttgtgtggtgtacttggtcaagggtctgaaacagcacagtgtgtagcatttacccggattgatttcccacctttgccacgagtggttcacgtttcagcctcctttaaccatgccgctttcgttatgcaatctggagaggtattcacatgtggagataattcatcttcttgctgtgggcatagagatacaacccgaccaattttcaggccacgccttgttgaatccctgaagggaattccttgcaaacaagttgcagcggggcttaacttcacagtcttcctcaccagacaaggtcatgtttatacatgtggaaccaacacacatggccagcttggtcatggtgatactcatgacagggcaacccccaaaat

SEQ ID NO: 252147 - DNA, 525 bp, Glycine max
taggttgttacgagggagaagtatgcaccactgacaagcttgcatgcctgcaggtcgactctagaggatcccctcggggaattccaattccacattttcaagaaataaggaggcaaaaatgttcatatatgaattggaattatttgttttcttattaggcctatcctgaagccaaaggaaatgagatcggaattcctcggggaattccaattccacattttcaagaaataaggaggcaaaaatgttcatatatgaattggaattatttgttttcttattaggcctatcctgaagccaaaggaaatgagatcggaattcctcgggggtaccgagctcgaattccctatagtgagtcgtattaaattcgtaatcatgtcatagctgtttcctgtgtgaaattgttatccgctcacaatttcacacaacatacgagccggaagcataaagtgtaaaacctgtggtgcctaatgagtgagctaactcacacttaatgcgtttcgctcactgtgcgctcttcacaaggga

SEQ ID NO: 252148 - DNA, 372 bp, Glycine max
gattatcctaagtctttgggaatagtgctgcaatggcttcaagtcaagaggaggtgacccttttgggagctactggaagcccatttgtgtgcaaggttcatattgccctcaagttgaagggagttcaatacaaatatgtcgaagaaaatttgaggaacaagagtgaactgcttctcaaatccaacccagttcacaagaaagttccagtgtttattcacaatgagaagcccatagcagagtctcttgtgattgttgaatacattgatgagacatggaagaacaaccccatcttgccttctgatccttaccaaagagccttggctcgtttctggtccaaattcattgatgataaggtttttggtgctgcatgga

SEQ ID NO: 252149 - DNA, 364 bp, Glycine max
tcggggaattccaattccacattttcaagaaataaggaggcaaaaatgttcatatatgaattggaattatttgttttcttattaggcctatcctgaagccaaaggaaatgagatcggaattcctcggggaattccaattccacattttcaagaaataaggaggcaaaaatgttcatatatgaattggaattatttgttttcttattaggcctatcctgaagccaaaggaaatgagatcggaattcctcggggaattccaattccacattttcaagaaataaggaggcaaaaatgttcatatatgaattggaattatttgttttcttattaagcctatcctgaagccaaaggaaatgagatcgga

SEQ ID NO: 252150 - DNA, 397 bp, Glycine max
gaatggccttattcaacaaggccggtttcaatcctggccggcccagccgtcaccaaccggttggcagtagcaacgcagaggagatcactcgtagtgaatgctgccaaagctgttgaagcggaaaaggtcagttatgacaatgacatggatggtagcaatggaaggaggaacttgatgttcgccgcggcggcggcggctgctgtttgctctgttgctgggatggcagtggcagatgagccaaaaccaggaaccccagcagccaagaaaaagtatgctccgatttgtgtcaccatgccaactgctaggatttgtcgcaattgagggactcggtttttattttacttctgatgatcggaaatgtgcattatggttgtagtaatgttttgatttcacatga

SEQ ID NO: 252151 - DNA, 321 bp, Glycine max
ccttggggaattccaattccacattttcaagaaattagggagccaaaatggtcattttttaattgggattatttggtttcctaataaggcctttcctgaacccaagggaattgaatccggaattcctcggggaattccaattccacattttcaagaattaaggaggcaaaaaggttcatatatgaattggaataatttggtttcttattaggcctatcctgaacccaaaggaaatgagatcggaattcctcggggaattccaattccacattttcaagaaataaggaggcaaaaatgttcatatatgaattggaattattt

SEQ ID NO: 252152 - DNA, 366 bp, Glycine max
gaaacaagtagctggtaaattaaaattggaattagcacaattcgcagaattagaagcttttgcccaattcgcttctgatctcgataaagctactcaaaatcaattagcaagaggtcaacgattgcgcgagttgcttaaacaatcccaatcagctcctcttaccgtggaagaacagataataactatttatactggaacgaatggttatcttgattcattagaaattggacaggtaaggaaatttcttgttgagttacgtgcttacttaaacacgaataaacctcaattcaaagaaatcatatcttctaccaagacattcactggggaagcagaagtccttttgaaggaagctattcaagaacagat

SEQ ID NO: 252153 - DNA, 294 bp, Glycine max
aataaaatttgaaataacaccagtcaggcttatttaaaacctttgcccaaactactttttaacctcactaaacctcctcaaaacaattaaccaaaagtcaaccaattgcaccaatttcttaaacaatcccaatcagctcctcttaccgtgtaataacatataataactatttatactttaactaatggttatcttgattcattataaattgtacatgtaatgaaatttctttttcaattaccttcttacttaaacacaaataaaccttaattcaaataaatcatatcttctacc

SEQ ID NO: 252154 - DNA, 367 bp, Glycine max
cttctcataaccttcttctggatctctctggaagttattatggacacaagcaggtatgagggaaaaagggtcttgaggtacaaagaggaagatgaaaatgatgatgatgaagaagaagaagaggtgagtgaggtgggttttggagaagacagaagaaggaataagagagtaatgagagatctccatggaaagagatcagggtccaaaggtggaggctcaatgccaccttcttgtcaagtggataattgagatgctgatctgagtgaagctaagcagtaccacagaagacacaaggtttgtgagtaccatgccatagctccttccgtacacatggcagggctgcaacaaaggttttgccaacaatgta

SEQ ID NO: 252155 - DNA, 329 bp, Glycine max
  unsure (1)..(329): unsure at all n locations
tcggggaattccaattccacattttcaagaaataaggaggcaaaaatgttcatatatgaattggaattatttgttttcttattaggcctatcctgaagccaaaggaaatgagatcggaattcctcggggaattccaattccacattttcaagaaataaggaggcaaaaatgttcatatatgaattggaattatttgttttcttattaggcctatcctgaagccaaaggaaatgagatcggaattcctcggggaattccaattccacattttcaagaaataaggaggcaaaaatgttcatatatgaattggaattatttgntttcttatt

SEQ ID NO: 252156 - DNA, 346 bp, Glycine max
tcggggaattccatttcctcattttcaagaaataaggaggcaaaggtgggcatatttgaatgggaataattggtttccttattaggcctatcctgaagccaaaggaattgagatcggaattcctcggggaattccaattccacattttcaagaactaaggaggcaaaaaggtccatatatgaatgggaattattggtttccttattaggcctatcctgacgccaagggaagtgatatcggaattcctcggggaattccaattccacattttaaagatatagggacgcaaatgtgtacatatgtgaattgagaatatgtgttctcatattaggcctattcttgaccc

SEQ ID NO: 252157 - DNA, 246 bp, Glycine max
gatctcgataaagctactcaaaatcaattatcacgaggtcaacgattgctcgagttgcttaaacaatcccaatcagctcctcttaccgtggaagaacatatactaactatttatactggaacgaatggttatcttgattcattagaaattgtacaggtaaagaaatttcttgttgagttacatgcttacttaaacacgaataaacctcaattcaaagaaatcatatcttctaccaatacattcact

SEQ ID NO: 252158 - DNA, 403 bp, Glycine max
  unsure (1)..(403): unsure at all n locations
gttaactgatactcctgatatcagaaaaagaaaaaagaaaaaaatgtctctagtgactgcagagatcaaagccaaagcagaggtgtatcatggagatgaactctgccaagagaagtcaaagttgctgctaaaggaggtagggctacctaatgggcttttgccattgaaggacattgaggaatgtgggtatgagagggatagtgggtttgtgtggctgaagcagaagaagagcacagaccacaagtttgagaagattgggaagctggtttcctatgctcctgagatcactgcctatgttgaggttggtaagatcaaaaagctcactggtgtgaaaaccaaggaagctctggtttggatcacactcagtgagatctttgttgatgatcctnccactggcaagatc

SEQ ID NO: 252159 - DNA, 397 bp, Glycine max
ggttctgcacgctctgcttccagcgagtgttctttcttcgtttcaacaccttaatttgcacacgctgcttcttcagcttgagaaatggcacaagaaacctttctattcacatctgaatctgtaaacgagggtcaccccgacaagctgtgcgaccagatctctgatgcagtgctcgatgcgtgccttgaacaggaccctgacagcaaggttgcctgtgagacatgcaccaagaccaacatggtcatggtctttggagagatcacaaccaaggccaacgtagactatgagaagattgtccgtgacacatgccgcgaaattggattcatctctgatgatgttggtcttgatgctgacaaatgcaaggtgttggtcaacattgagcagcagagccctgata

SEQ ID NO: 252160 - DNA, 335 bp, Glycine max
aagtagttgtagaactaagaaggagaagcaaatggcttcctcaatgatctcttccccagctgttaccactgtcaaccgtgccggtgccggcatggttgctccattcactggcctcaagtccatggctggcttccccaccagaaagaccaacaatgacattacctccattgctagcaacggtggaagagtgcaatgcatgcaggtgtggccaccagttggcaagaagaagtttgagactctttcctacctgccagaccttgatgatgcacaattggcaaaggaagtagaataccttcttaggaagggatggattccttgcttggaattcgagttgg

SEQ ID NO: 252161 - DNA, 369 bp, Glycine max
tggaaattggggagtttgcttgacttatggctcttggtttgcacttggaggtctagcatctgctggttagacttacaccaattgtgctgccattcgcaaagccgattaatttctacttactacacagagagaggacggtggatggcgagagagtcatctctcaagcccatagcagatatatgtacctgtagaaggaagccgatcaaatgttgtacatacagcatgggctcttatgggactaattcatgctggacaggcggattgagaccccatgcctcttcaccgtgctgcattagtagctcattaattgtcagcttgaagagggtgattggcccccacaggttatcacgggagtgttcacgaaaaatt

SEQ ID NO: 252162 - DNA, 384 bp, Glycine max
tcggggaattccaattccacattttcaagaaataaggaggcaaaaatgttcatatatgaattggaattatttgttttcttattaggcctatcctgaagccaaaggaaatgagatcggaattcctcggggaattccaattccacattttcaagaaataaggaggcaaaaatgttcatatatgaattggaattatttgttttcttattaggcctatcctgaagccaaaggaaatgagatcggaattcctcggggaattccaattccacattttcaagaaataaggaggcaaaaatgttcatatatgaattggaattatttgttttcttattaggcctatcctgaagccaaaggaaatgagatcggaattcctcgggggtaccgagc

SEQ ID NO: 252163 - DNA, 504 bp, Glycine max
  unsure (1)..(504): unsure at all n locations
nggtaatgttgttttacagagggaggtagatagttattactcggagagacaagcttgcatgcctgcatgtcgactctagaggatcctctcggggaattccaattccacattttcaagaaataaggaggcacaaatgtgtcatatatgaatcggaattatttgctttcttattaggcctatcctgaagccaaaggaaatgagatcggaattcctcggtgaattccaattccacattttcaagacataaggaggcaaaaatgctcatatatgaatcggaattatttgttgctcttattaggcctatcctgaagccaaaggaaatgagatcggaattcctcgtagaattccaattccacatttgcatgacataaggaggcactcatgttcatatatgaattgcaattatgtgctatcttattaggcctatcctgaagccaaaagatatgagatcgcatatcctgggcggaactgagctcgaattcattatagtgagtcgtattaaat

SEQ ID NO: 252164 - DNA, 400 bp, Glycine max
gcgacgatgaaagcaatgacagcaacgacaacgtttgatgtctctgccgcttgcttccgtgcccctccttcttgttcaccgaatccatgccacaccagtttttcagttataaactccctgaatcctcacaagggacgacggataagcgttgctgttccacctaagtttccaagcttccggagggaagcagctctgcaggggaatttggaggctgttagagtcccaacttcggtgcctgtgcgtgtagcatacgaacttcttctagctggtcatcgatatttggatgtaaggactccagaagagttcaatgctggacacgctcctggcgccattaacataccttatatgttcagagttggatcagggatgactaagaatagcaactttattagacaggtgt

SEQ ID NO: 252165 - DNA, 351 bp, Glycine max
accgcattccccttcttctccttctaacccaacctgtttgtccgacaatcacattcaacgcttctgtcatggaagaagttaatgtcgtggaaactaaggatggaactgtctcagtagctgctgcgtttgctggtcaccaggaagccgtgcaggatagagaccacaaatttttaagcaaagctgttgaagaagcatataaaggggtagattgtaaagatggaggcccttttggtgccgttatagttcataatgatgaaatagttgctagttgtcacaatatggttctgtgtaacacagacccaactgctcatgctgaagtgacagcaataagagaagcttgcaagaagctta

SEQ ID NO: 252166 - DNA, 537 bp, Glycine max
  unsure (1)..(537): unsure at all n locations
ggtttagagttttaaaaagacacganagtactgctctaccagagctatgacgtcgcatgcacgcgtacgtaagctcggaattcggctcaacctggggattcagaaccccattaacctgacctttttgggaggatgccaaaccatggcttcccttgcagaatccactgctggctgcttcccttggcatgtcagaaatccttggaaaccccatcaacctcagtggtgccacaaggccagctccatctgcctctagccctgcctccttcaagactgtggctcttttctccaaaaagaaggctgcacctccaaaaaaagctgcagctgctgctcctgccaatgatgagcttgccaagtggtatggtcctgacagaaggatcttcttgcctgagggtctcttggaccgatctgagatcccagagtacttgaccggagaagtccccggagactatggttatgacccatttggtcttagcaagaagccagaagatttttccaaatatcaggcatttgaaatgatttacgccacatggggtatac

SEQ ID NO: 252167 - DNA, 399 bp, Glycine max
caatttctctctcttttctctcttctgaattattgtcatggctaagagctcattcaagatggaacacccacttgagaggaggcaggctgaagcatctcggataagggagaagtatcccgaaagaattccagtaattgttgaaagggcagagaagagtgatgttcctgaaattgataagaaaaagtatctggtccctgctgatttgactgttggccagtttgtgtatgtggtgcggaagagaatcaagctgagtcccgagaaggccatcttcatttttgttaagaatattttgccaccaactgcggcaatgatgtctgcaatttatgaggaaaacaaggatgaagatggatttctatacatgacttacagtggagagaacacatttgggcttgtgttctg

SEQ ID NO: 252168 - DNA, 380 bp, Glycine max
ctcaattactacatcgtattctgcaaattcaaaccgggtcttggttttctgaaagatgggaggtggcaaggacaagcatcatgatgaatctgacaaaggaattttttcacaccttgctcatggggtagctggtgcagcacatggtggacatgggtacccacctggggcttacccaccaccacctggggcataccctccacaacaaggatatcctccagctgggtatcctccacaacaagggtatcctccagctgggtaccctccacatcaaggctatcctcctgctggttaccccccagctggttatcctggttcatcacatgcaccaggttctcatgggcacggcggtatgggagcaatgctcgctgggggtgctgctg

SEQ ID NO: 252169 - DNA, 332 bp, Glycine max
cttgactccgttagatctgttattaacggctgtcatggtgtctttcacactgcttctcccgtcaccgataatcccgaagaaatggtggagcctgcggtgaatggagctaagaatgtgatcatagcagctgcagaggctaaagttagacgcgtggtgttcacctcatccattggtgccgtttacatggaccccaaaaggagcatcgatttggtggttgacgagtcctgttggagtgatttagaattttgcaagaacaccaagaattggtattgctatgggaaggctgtggctgaagaagcggcatgggacacagcacaagagaaaagggtgga

SEQ ID NO: 252170 - DNA, 334 bp, Glycine max
acgtcgcacgcacgcatacgtaagctctcggttcagggcctaatgaaaatccgtctggacaagaaaatttcaaccaatggcaagggaaatggcccccccaagaatgatcctaaacgttcccttgggtcctgttgcaccctaggcttttgcttttgccatctcgagtcaattggtgtggcattgggattatattggatgccacagctcacggtcatgtggcggattggatctttgccatatcaatgggtctggcttgtggagtatttatctatgtatcagtaaaccatctgttggcaaaagggtacatgccccacataccaacaaaggttgactc

SEQ ID NO: 252171 - DNA, 308 bp, Glycine max
  unsure (1)..(308): unsure at all n locations
tctgcctcccttttccgtcgcaaatcaaatcgaactcgtcctcaagttgaaaatggggctgtcgttcaccaagttgttcagccggctgtctgccagcaaagagatgcctatactaatggtgggtctcgatgctgctggtaagaccagcattctgtacaggctcaagcttggagagattgtcagcaacattcccagcactgggtttaatgtggaaactgtgggatacaagaacatcagcttcactgtctgggatgttggacgtcatgacaagatccgtccattgtggcgacattacnttccaaatacac

SEQ ID NO: 252172 - DNA, 298 bp, Glycine max
ctaacaacacaggcgcagacgcaaacgcaaacgcaaacgcaaacgcaaacgcagagcgtgatccattgacgaagatggtgcagcgtctcacctaccgcaagcggcacagctatgccaccaagtccaaccaacacagggtcgtcaaaacccctggtgggaagctcgtttatcagactaccaagaagagggccagcggacccaagtgccccgtcactggcaagaggattcaggggattccacacttgaggcctgcagagtacaagaggtcaaggttacccagaaaccgtacgactgtcaa

SEQ ID NO: 252173 - DNA, 89 bp, Glycine max
attgtgggaaatgggagggtttatgttctatgttactttgtactccaatcttttatgaatgtacgagggaaacttgttttgtttgatta

SEQ ID NO: 252174 - DNA, 359 bp, Glycine max
attgaatcgactaaaaaatgaaatgaatcatttcatattgatagtattgctatgcttagtccccaaagaaccagatttcgtaaacaacatagaggaagaatgaaaggaatatcctatcgagggaatcatatttgcttcggaagatatgctcttcaagcacttgagccagcttggataacatctagacaaatagaagcgggacggcgggcaatgtcacgaaatgttcgccgaggtggacaaatatgggtacgcagtagttccagacaaaccggttacagtaagacctactgaaagacgtatgggttcaggaaaaggttctcccgaatattgggtagctgtcgttaaacctgggaaaatac

SEQ ID NO: 252175 - DNA, 315 bp, Glycine max
gccaaacacgaccttatcggcgatccaatttcgatctgtgcaaatcgtaaccctactcacttgcttctgcaattctggtggactggatccattttcatctcaattctcgtctctcttcagtaagttagggcacagcacacaataacaattcattctcttagacatggcttccgctgcgccaggtgcaaccaatgatgctttatacaaggaattgtggcatgcctgtgctggaccccttgtcactcttccgcgtgaaggggagagagtttattacttcccgcaaggtcatatggaacagcttgaggcatctatgaa

SEQ ID NO: 252176 - DNA, 311 bp, Glycine max
ctaaaattggagtgattgagtcacttttagaaaaagttgaaatccttcttcttggtggaggaatgatcttcacatttgacaaggtacaaggtctttcagtgggttcaacccttgtagaagaagataagttggatcttgctacatcaatacctgcaaaatccaaggaaaagggggtgtctctcgtgttagcaagtgatgtggtgactgcagagaaatttgctcctgatgctaatagcaaagtcgtgccagcatctgccatccctgatggctagatgggatttgctattggtccagattctgttaaatcattc

SEQ ID NO: 252177 - DNA, 159 bp, Glycine max
ccgaatagccgctattctactcgcaagcaaatcagaacatgagaagagaatggcaggagcagaggggctaaacagggaacagtacgtgtaccttgcgaagctgtcggagcaggcggagcggtacgaagagatggtggagttcatgcagaaggtggtggt

SEQ ID NO: 252178 - DNA, 323 bp, Glycine max
tttggtgactctggagtggtgatctatggaatgatccctcttacgcactcttggtatggaactcgatcacatccttcagggctaacagcagggttccataacagagttatcagggatggctagggaccagttgcacagatctttgctcggaactcgtgcacgattagagtacctgccatggacctttcggacgcggaacaagcagaggatgatgattctagccctgagttgctacttgcgggcattatgggaggcgtgcgaaagcatgaggttcaggtttcaggtcgaaatgcgtctgaatctggtgttccagggggggttga

SEQ ID NO: 252179 - DNA, 341 bp, Glycine max
gccaccactgtagttacaggcatagttggttgtgcacgattaaagccaacagttgcagcaattgaagcacggaaagacatagcattggcgaacaaagagacaatgattgcgggagccccttttgttcttcctcttgctcacaaacataacataaaaattcttcccgctgattcggaacattctgcaatttttcagtctatccaggggttgccaaagggtgcacttaggaaaatccttttaactggatcaggaggtgctttcagagaatggcctgctgaaaagatgaacgatattaaacttgctgatgcattaaagcatcccataatgagtttggggaaaaa

SEQ ID NO: 252180 - DNA, 290 bp, Glycine max
ggaattgattcgggaaaagattgaagaattacttcaacaagaaagtcttatcaatgaataccgtgttcgattacatttcattggagacttgcaactattgactgagcctgtcatggcttctgtggaaaaagcaatgagagttactgctcacaacaaccagagagttcttttgatttgcgtagcctatacttctcgtcacgagattgtgcatgccgttcaagaatgctgcaaggaaaaatggaatgaagttcaagcatcaaaagaagcaaagcttacaaatggtgcatttg

SEQ ID NO: 252181 - DNA, 355 bp, Glycine max
gctgcaaaagttgacgagtatgctcgtggcatgatcagtggttctggatcatcactttttgaagagcttggactctactatattggtcctgttgatggtcagagcataaatgatcttgttgccattctcaatgaagttaaaagcactaacacaaccggtcctgtagtgatccatgttatcactgaaaaaggccgtggatacccatatgcagaaaaggcagctgacaaataccatggggttgccaagtttggtgcaccagctgggaagcaattcaaatccaaggcgaccacgcggtcttatacaacagacttggctgaagctttgattgcagaagccgaagctgacaaagacgttg

SEQ ID NO: 252182 - DNA, 599 bp, Glycine max
  unsure (1)..(599): unsure at all n locations
gggccgcgcgggcggcggggcgcgcgntcgggcgcgncgggctccttntcctnctctgtctgttctcatggagcgcgtgcgggggggncggaggggtacgtccgttgcgcgggctgaatttaggtgacactatagaggagatatgacgtcgcatgcacgcgtacgtaagctcggaattcggctcgagctcgagccgctcgagccgattcggctcgagatccacacaaactcagggtagggcagagagagagagagagagagagagagagagagagaatgggagggtgggcgatcgcggtgcatggtggcgctggtgtcgaccctagtctcccactcgagcgccaagaagaagcgaaacaacttctcacgcgctgtctcaatcttggaatctctgcgctaaattctaatcttcgcgccatagatgtcggcgaacttgtggggggggaattggaaacgggtccgctgttcaattcgggccgtggatctgccctgacgagaaagggaacggtggagatggaggctagcagcatggatggtcgaagcgaggatcccgggcggtttgcggtcgtacaccgttgaagaaccgatgtgccttgccg

SEQ ID NO: 252183 - DNA, 288 bp, Glycine max
tgaccatggcaaacatgattatggcttcaacaaaacctcgggttccagtctgcaccagttcccgttcccccaaaccaaatctcccaagtctccaaatttcaccccccaaagccccaaccttgaaactgaaactcccaatttcaaagccccaaatgcagtccctcctgggagggatagcaccactggtcttggccagaccctccctagcagaagaatttgagaaagcatcactctttgacttcaacctcaccctgcccataataatggtggagtttctgctgctgatgg

SEQ ID NO: 252184 - DNA, 245 bp, Glycine max
acatgtgtatggctttaagctgccaatctttgtgattcttatcatcgttaccatttgtgtgacaattgtggggacatactttttgttaaatgctgagaactaccactggcaatggacttctttcttttcagctgcctcaacaactgtttatgtttacttggacgcaatataccacttctatgtgaagacgaagatgtcacgcttcttccagaccagcttttattttggatacactttgatgtttt

SEQ ID NO: 252185 - DNA, 302 bp, Glycine max
tgtggaagttgcatgcttagtttctgggatcttgtcctttggatctgagacactctctgagctttctttcttagaaaacgatgtcgtctcaacaagaagaccttcctcgtcatctcaacttcaaggtcaacctcatatggtggacctcactctcagtcaggaagctgattctaaaggagctgtctgtttggatggaacggtgcctggataccatttggatcgtggatatggatctggtgcagatagttggggtattcatttggatggacgaggatggtgtaatagcatcagaaactgtgtct

SEQ ID NO: 252186 - DNA, 269 bp, Glycine max
catgatcagaaccagagatcgctgatgtatgcgttcgtgtcacgcggcaaggtgattctcgccgagtacactgagttcagtggcagcttcaacacaatcgcgttccactgccatccagaagctccctgcctccaacatcaggttcacctacatctgtgacagccagaccttcaactacctcgtcgacgacagattcacttagtgtgttgttgcggatgaatctattgggagacaggtgcctgtggcttttctggagcgtgtgaaggatg

SEQ ID NO: 252187 - DNA, 306 bp, Glycine max
ctcgagcgggttcggctcggggcttatggtggagacggatgcatctatagacgaggaacggtgtggtaggcgacgacatgcttcggggagttgaaaatagacgtggatccggggattcccgaaataggtcaacctttcggactgcagctgaatccactggcaagcaagagacaatctgatgaactgagagatcttactatccagaagagagtatggcatgtgcacagtgtattcgttaggggcatatgatttgggtgcacgtcaatcgtggtctgtgcctttggccagaacgctaatttcaggtgt

SEQ ID NO: 252188 - DNA, 389 bp, Glycine max
ctcatcaagggttgtgaaagcagagaagtgagatacactaagttatcctcataaatacactctaattaggtggcaagataagtgtctaaccttagtaacattggcgacatattgtgttcattttggaattgtgccactagagttctattcaattcatctatggctgccgcttcttatgctatgcaatcaatcctggcaaaccctttgatgcgcatttccagcgggtcgagggtgaaccaagtgggcgttccggcggtggcacatgagaaggaatgttggcctgagaggtagggccatggctaaggaaggagaacggagtgagcctgcagccccagttagacggccaccatcagtagaagccaagccagaggcggtcgctgctccttcac

SEQ ID NO: 252189 - DNA, 307 bp, Glycine max
atttccctgtctctgttctcttcaccattctctttcttctttgtttcaagtttcaacaacccagattcactctctctctcgtaattttctctcttattgaggctggaaaaagagagcaaaaaaactaaaaaatgcctgcggtcggaggtataaacaccggagggggcaaggagtaccctggaagcctcactctagttgtgacggtaacatgtatagttgcagccagtggtggtttaatcttcggttacgatagggggatttcaggtggagtgacgtccatggattggtttcgggccaagttttttcc

SEQ ID NO: 252190 - DNA, 316 bp, Glycine max
tctgagctcactaagcttacactgttagggcgcttgattttatctctgaatttgatgtgccatcctttagagacaagaccatcatcatgtttaaagtgacgggacttcgcactggtgcacttgggttcacgtgttcggcattcctgtctatcccagttacaacgggattcgtacttctctgctatatagatatcccttgtgaacatgccacaagatatcatgtatggctgggacatcacataatggtgctttttactgtcgatggactcctctaagttattgcatgggcaatagaaggtcaccttgtacaagaatt

SEQ ID NO: 252191 - DNA, 381 bp, Glycine max
gttggggaacatattgccctggggagtatcctagtcctcccccagaatattcaacctgcttgggtgatctgtacagtgttgcttggatggaagacagtgacagacacaatttacgaacagaaactctgcatcaacaatataaattggttaaagagaggactatatctggagattcatactatggctctcacgtgatgcagtatggtgatgtacggcttagcagtgatgttctcttccattatttgggtacagatcctgctaatgataatttcacttttgtggacgaaaagtccttatggtcaccttcagaaccagtcaaccaacgtgatgctgatgtcatccatttttgggataagttccgcaaggctcctgagggttctc

SEQ ID NO: 252192 - DNA, 360 bp, Glycine max
  unsure (1)..(360): unsure at all n locations
gtacgtaagctaggnattcggctcgaggtgaaaatggattggcaaagcatgatgggcaacctggacccattccaaagaacaatcttaatcctcgtcccactaacactactcctgctgctgttactatctcgtacccgtccaagaccgccctatccaccaggccctaagggcttcccaatcataggaaacatgtttatgatggaccagctaacccaccgcggtctcgccaacctggccaaacactacggcggaatcttccaccttcgcatgggcttcctccacatggtcgccatctccgaccccgatgccgcgcgacaggttctccaagtccaagacaacatcttttccaaccggcccgcc

SEQ ID NO: 252193 - DNA, 282 bp, Glycine max
gaaaatctttccaatgtgagcttgtctttgccaagatgggaatcaaccccatcatgatgagtgctggagagttggaaagtggaaatgcaggagagccagcaaaactgatcaggcagagataccgtgaagccgcagacttgatcaagaagggaaagatgtgtgctctcttcatcaacgatcttgatgcaggagctggtcgtcttggtggaaccacccaatacactgtcaacaaccagatggtgaatgccaccctcatgaacattgctgataaccccaccaatg

SEQ ID NO: 252194 - DNA, 309 bp, Glycine max
attgtttgttgttgtaactcgttcttcttcttttgttgttctgtgtttgtgtttgttttttctctcacctgaaaatgtcttgctgcggtggtaactgtggttgcggaagctcctgcaagtgcggcaacggctgcggaggctgcaagatgtacccagacttgagctacactgagtcaaccaccaccgagaccttggtcatgggagtggcacctgttaaggctcaatttgagggtgctgaaatgggtgtgcccgctgagaacgatggctgcaaatgtggaccaaactgctcctgcaacccctgcacttgca

SEQ ID NO: 252195 - DNA, 265 bp, Glycine max
atcgatacccgcagcatgagtcactcgaatcccatcaggagacataacacagcatttcccttagcgtaggaaatggaagtcacacttacagcctgcaagtcggttatctcgccttcagtgcacgtcgcatgtttgtttgcggggaatggcggaattaagagctcgcaatgcagtttcttagccggagcgatgaaagtgaggtttcccaggcaggtaagtcaagttagccaccttcgcagagagcggcagacgcgtcactgcggtg

SEQ ID NO: 252196 - DNA, 305 bp, Glycine max
caacactataggcgaaggactttaggttgggatttgggaattagggttgttcgcgtggcgaagatgattgaggtggttttgaacgatcgattggggaagaaggtgcgcgtgaagtgcaacgacgactatgccagcggcgacctgaagaagcttgtggcagctcagactggcacaagagccgacaagatccgcatccagaagtggtacagcatctacagcgatcacatcactctcaaggattacgagatccatgacagcatgggtctcgaactctactacaactaaacacaacaaagtgtgtttta

SEQ ID NO: 252197 - DNA, 323 bp, Glycine max
  unsure (1)..(323): unsure at all n locations
cttttattgaaatcctcaagcttcaatttgctttgtgcacactcatccaactattataaccaaacactcctcttcaaattcttcgtcttcgtcttgatcgtgttctatctgtgacgagcatcatggcctcgaaagcagtgctattgttggctatgtgtgtgcttccggccatggttgtggccattcgcccagcaaagaaacctttttgcgtgaagggtcgcgtctactgtgacccttgccgtgctggttttgagacctcagcaatcaactacattgccggtgctgagattatgttgcaatgcaagagcatggttancaacgaa

SEQ ID NO: 252198 - DNA, 293 bp, Glycine max
tggtaactgcctacgtttggctgcactgaagcttctcaagtgttgaaggagcttcaagaagctaaagacgcataccccaacggcttcaaccgtatcatcgggttcgacaacgttcgccaaatgcagtgcaacagcttcatcgcctacaaggccccatgcttctaagtgtgaaaaatttgcaaagcatttgtagccgccaccccactttgcttgtttggacctaaactacattcccacttgtttttgcgttttgagatttcatcatcctgtatttttggtttctgttttccgac

SEQ ID NO: 252199 - DNA, 466 bp, Glycine max
cgattgattgccgtgcacgataaaagaatatgacgtcgcctgcacgcgtacgtaagctcggaattcggctcgagggaaaactttctttatatacagcacttggaggagtccgcccttcagcttgtttacccattacaattgatgtgggcacaaacaatgagaagctgctgaatgatgaattatatattgggctaaagcaaagacgagcaactgggcaggaatatgctgaacttatgcacgaatttatgacagcagtcaagcaaacttatggggaaaaggtcctaattcagtttgaagactttgcaaaccacaatgcttttaatctgcttgagaaatatagatctacacatctggtctttaatgatgatattcagggaacagcaaccgtgggtcctgccggaccaatttcacacctcgaaatttggtttgggggaaccttagctgatcacagattcttattccttgg

SEQ ID NO: 252200 - DNA, 303 bp, Glycine max
ggaaatcggtctggagatacagcacttggaggactccacacttcagcatgtttacccattaggattgatgtggggacatgcaagggcaagctgcagcttggagacttataaattgggctattgcacgcagcaccacctgggcatgactatgtcgaccttatgcacgaatttatgacagcatgcacgcaaacttacggggaaaaggtcctatgtcactttgatcatcttggcatccacactgcttttcatctgcttgagaaatatcaatctacacctctggtctgtacagatgattttcaggga

SEQ ID NO: 252201 - DNA, 600 bp, Glycine max
  unsure (1)..(600): unsure at all n locations
ggggcgggtgaggagggcggagagcnacgggggcgtggcgttnantatttnancnatanctgttcttttgcggcgagccggccgggctgcgggggtcggtacggtgagggggctgaatgtaggtgacagtatagaagagatatgacgtcgcatgcacgcgtacgtaagctcggaagtcggctcgagatcaatttcgatctctcttatactctcactacgctctttgctctttcttttctccactatggctgcacaagaaaacaacttccaagactacttgcctgtgatggccaacaagcttggtggggatggcctaattgatgaagtgtgcaatgggttcgatcttttgaaggattctgataaaggggtcatcacttttgagagccgcaagatgaagtcgtacttgcttggtcttcacggtctgagtgatgaggatgcgggcgtccatggttttggaaggtgactttgagggtgatggtgcactcaaccagatggagtggtgtggcttgatgttcagactcagccgtgaattgatgggaggtgcaaagatggggggttaagaactccgtgcagaaggagctgaggggtgtgtgaagttcn

SEQ ID NO: 252202 - DNA, 331 bp, Glycine max
acaggtttcgcccgttacaacatcatcaagatctcttccgtcctctctttgccaccgacgttggcattgcatttgacatgatgcttctcgctcacaacgccggcggcaaagagaggacggaagagaactggaagtggctgttcaaagaaacaggtttcgcccgttacaacatcatcaagatcaacgctcttccttccatcattgaggcgtttccaatctaacgaagaggaagccactagagtgcatgtgcgtgggtgtatgttgcatgtgttgttattattattaagagctatgtgatcttcgtgtgatgtggggttcagccctacccgtg

SEQ ID NO: 252203 - DNA, 295 bp, Glycine max
gttccttctttctttatcatcaccagtgttccatatttcagagaaaatggctttatcatctccctctctagtgttcaccgtacagaggtgtcaaccggagctggtggctcctgctaaacccactcctcgcgaagttaaacccctctccgacatagatgaccaacagggcttgcgtttccaaattccattcatactattctatggtaatgaaccatcaatggcagggaaagaccctgctaaggtcattagagaggcacttgcgcaaactcttgttttttactacccttttgcgggt

SEQ ID NO: 252204 - DNA, 305 bp, Glycine max
cagtgttcactgcaaagaacacctcacctgaccgcctcgcatcgaagactctgacgccgatcctcttcccaagcgcgtctccaccgtctggagagctcgcacaaacgacatcgccgtcaagcatacgataatcacggtgtgctaggtgcctgaggaggcaggtttctccgacagtgatgcgttgattttccccgacatgatcacatacatgggtgtggacgagtcacacgtggatgtgttttttaatgatgtgagactgactggtaaagagtggcgtggtggaaagcaacggaacggggtgttga

SEQ ID NO: 252205 - DNA, 276 bp, Glycine max
cgctcagcaatgctcccaagatctctcccagcgttacaacgtcaacgtcccgtgccggcattgttgctccattcacttggcccaagtccatggctggcttccccatcaggaagaccaacaatgacattacctccattgctagcaacggtggaagagtgcaatgcatgcatgtgtggccaccagttggcaagaagaagtttgagactctttcctacctgccagaccttgatgatgcacaattggcaaatgaagtagaataccttcttaggaagggat

SEQ ID NO: 252206 - DNA, 294 bp, Glycine max
aaaaataagacattgtttggtttggttacttgctcgaatttcctcgaatcgcttaatttgtatttgattagttaaaccgcaacgcggaatctcttttctcgaactggctaactctcaggcaagtggttcggacgctgattccagcaacaagcggctggtgctcgcactgtatgacgccctaaactccggcgactccgacgccgtcgtcaagatcgtcgccgccgacctcgagtggtggttccatggtccgccctcacaccagtttttgatgcgcatgctcaccggcgactccgc

SEQ ID NO: 252207 - DNA, 314 bp, Glycine max
cgcggcaatacaaaaagccgcgtttgctttgctcgctcgcactcacaaccacaacacaacgcggcagagcgaagagaaggggcaaaagagaaagaagcgcttatcgaactcggacggaagcactgagttgactcggagggagtggaaagtgttgttgcgtaatgtctggtggtatcgctcgtggacgcctcaccgaggagcgcaagtcgtggcggaagaaccatccccatggttttgttgcgaagccggagacgctgcccgatggaaccgtgaatttgatggtgtggcattgcactattcccgggaagactggg

SEQ ID NO: 252208 - DNA, 259 bp, Glycine max
caccgatcaaagaagaaacaaccgcaacagatctccgtttctcgccaaacaaacacaaaatggctgccttcagcggcgacgaaaccgcacctttctttggcttcctcggagccgccgctgccctcgttttttcctgtatgggagcggcgtacggaaccgcgaagagcggcgtcggggttgcgtcgatgggcgtgatgaggccggagctggtgatgaaatcgatcgtgccggttgtgatggctggtgtgttgggtatcta

SEQ ID NO: 252209 - DNA, 326 bp, Glycine max
ctgtagttcactgcttgaaaaattgatgagacacaagcatggttgggtgtttaattctcctgttgatgttgagactcttggtttgcatgattattttactatcagcactcatccaatggacttgggaactgtgaagacaaggctgaacaagaattggtacaaatcaccaaaggagtttgcggaggatgtgagactcacttttcgtaatgccatgacatataatccacagggacaagatgttcatattatggcagaggttttatcaaagatattcgaggacagatgggctatgatcgagtcagattacaatcggggagatgagatat

SEQ ID NO: 252210 - DNA, 332 bp, Glycine max
cacaggagttgtaaattaagagcatggctgcacaagctcttgtatcatcatcatctcttaccttctcagccgaggctacaagacaaagtcatggaccaagatcacgccaatctccatttggcttctcaagaaaagcctcggttcttgttaaggcagctgctactccccgtgtcaagcaaggatcatacagacctttgtggtttgcatcagagcaaagtctttcctagttggatggcagccttcggggtgactagggagttgaccctctgggactttcggaccctgaaggaagaggagggttcattgacgggaagtggctagcatatggggag

SEQ ID NO: 252211 - DNA, 404 bp, Glycine max
agccttccaaaatatcctcccagcaaggagatggatgcaaagctacgggatgaagaagctaggagattgagagcagctggtaaagctaatgctgatggtgtcaagaaatctcgtccacgtgagcgagttgggaggggaattgcagttccagaggccaatgccgaactgcaagcaaatattgatagacgacggctgatcacacattcaaatgctaagagcaagagtgagaagtttcctcctccccaccaagatggagctctaggctatcctttgggttcttcacatcacatggacccagtttttgatccccctgatgttccatttagttctacaaacttctcacaacctaaagcagatatccagacctggtccggcccaatggtagatccttctggtgtgggcgt

SEQ ID NO: 252212 - DNA, 347 bp, Glycine max
gatattcgttatgtggttggatttggtgacttatttgcaccatcatggccatgaagacaaattaccttggtaccgtggaaaggaatggagctacctcaggggtggtctaactactcttgatcgtgattatggatggatcaataacattcaccatgacattggcactcatgtcattcatcacctatttcctcaaattccacactatcacttagttgaggctactgaggctgctaagccagtgtttggaaaatattatagagaaccaaagaaatcagcagcacctcttccttttcaccttattggggaaataataaggagcttcaagactgaccattttgttagtgaca

SEQ ID NO: 252213 - DNA, 392 bp, Glycine max
  unsure (1)..(392): unsure at all n locations
agaccgcattggtgcccagtagaatttctcaacactctatgcacctctcatccgtgatgggcgtatggagaagttctactgggcaccaacaagggaagaccgcattggtgtttgcaccggaattttccgcactgatggtattcctgaacaggacattgtcaagcttgttgacaccttccctggccaatccattgatttctttggtgcactgagggccagagtatatgatgatgaagtgaggaagtggatttctggtgttggtgttgacagtgttgggaagaagcttgtgaactcanaagatggacctccaacctttgagcaagccaagatgactctggagaagctcttgctgtatggtaacatgcttgtccaagaacaagagaatgtcaaga

SEQ ID NO: 252214 - DNA, 363 bp, Glycine max
accgcacttctgttccgcaattatcatgggcaaggtcaagatcggaatcaacggatttggaagaattggccgtttggtagccagagtggctctgcagagagacgatgttgaactcgttgccgttaacgaccctttcatcaccaccgattacatgacatacatgtttaaatacgacagtgttcatggacactggaagcatcacgatgtcaccgttaaggacgagaagacccttctcttcggtgacaagccagtcactatttttggacacagaaaccctgaagagatcccatgggggtcaactggagctgacatcattgttgagtccaccggagttttcaccgataaggacaagggcgccgcaca

SEQ ID NO: 252215 - DNA, 286 bp, Glycine max
ctagtttcttacaaggctctactctactgcttcaccttctgctctagaaaattcagtggtgatacatggcttcggctactctctctgtagccaaaccagcccttcaggcaaatgggaaaggcttctctgaattctctggcctccgcagctcatcaggcttccttcccttttctagaaaatcttcagaggatttccattctgtcattgccttccagacctatgcagttggaagcagtggaggatacaagaagggtgtgacagaagcaaaactgaaagttgccataaa

SEQ ID NO: 252216 - DNA, 293 bp, Glycine max
  unsure (1)..(293): unsure at all n locations
gtacgtaagctaagnattcggctcgagctcgcaagcaaaaagaaagaatcccaggcgaggagaaagatggatgggaaagagcaagatgtgtcgttgggaacgaacaagttccccgagagaaagccaattgggacggcggcgcagagccaagacgacggcaaggactaccaggagccggggcccgcgccgctggttgacccgacggaatttacgtcatggtcgttttacagagcatggatagcanagtttgtgggcacttttctgtntctctacatcactgtcttaaccgttat

SEQ ID NO: 252217 - DNA, 309 bp, Glycine max
  unsure (1)..(309): unsure at all n locations
caacaatattcttctcaagctgtgctattggccggtggacacgcagctaatggtgctgtggcccaaggttcccattctgaangggatttaaacaacaccactatatttgttgganggcttgattctgacaccagtgatgaggatctcagacaaccatttttgcaatttggtgaggttgtctctgtgaaaattccagtgggtaaagggtgtggatttgttcaatttgcagacagaaagaatgctgaggaagcaattcacgcattgaatgggacagtaattgggaagcagacagtgcgactttcttggggt

SEQ ID NO: 252218 - DNA, 340 bp, Glycine max
  unsure (1)..(340): unsure at all n locations
gagatggaaagactttcgtttccacagcacgtggtaagaaatatcccgtgactgtcaacctaagggaaccaaagaaaaatgcttttgaatgggctacatccttgaaagcccctcaaacaaaaggtgcaattccggttaatcaatccaaaacaaactttttcaaaaattaagccaaggaatccacaaacaaaactgaagcccaaaaagtgcgagataatctcatctacaattacaaacctacttttggtggaacggctgggaaaggatatgatcaagtgtatctctttgaataattctatctgtangaggtgtccttgaatttgattttatgcacaataaa

SEQ ID NO: 252219 - DNA, 297 bp, Glycine max
caaaagcatcattagaagtggtacacaaacatgggccatgctcccaactaaatgatcatgatggcaaagctaagtctaaaacaacaaacaatgacattctgaaccaagacaaagaaaaggtgaagtacattaactcaagggcccctaagaacttgggccaagatagtaatgttgaggaattggactcagctaccctaccagccaaatctggtagccttattgggtctgggaattactttgtggttgtggggtcttggggacaaccaaagagggacttgtcactcatttttgacactg

SEQ ID NO: 252220 - DNA, 350 bp, Glycine max
  unsure (1)..(350): unsure at all n locations
cagcaacaataacaatggcagcctcactacaagctgcagctaccttcatgcaacccaccaaggtgggcatggccactcgcaacctcaaatctacacaatgcatttctaaggcttttggcttggaacccgctgcagctaaactcatttgctcccttaagcccgatctcaaagattttgctcaaaaatgtgtcgacgccaccaaaattgcaggattcgcccttgccacctcagctctcgttgtttctggagcgagtgcagaaggtgttccanagaggctaaccttcgacgaaatccagagcaagacatactttggagtgaagggaactggaactgctaatcagtgcccaacc

SEQ ID NO: 252221 - DNA, 505 bp, Glycine max
  unsure (1)..(505): unsure at all n locations
taatgaatcagcttgcatatantagatactgacgtcggacgcacgcgtacgtaaactcggaattcggctcgaggattgacagactgagagctctttcttgattctatgggtggtggtgcatggccgttcttagttggtggagcgatttgtctggttaattccgttaacgaacgagacctcagcctgctaaatagctatgtggaggtaaccctccacggccagcttcttagagggactatggccgcttaggccacggaagtttgaggcaataacaggtctgtgatgcccttagatgttctgggccgcacgcgcgctacactgatgtattcaacgagtctatagccttggccgacaggtccgggtaatctttgaaatttcatcgtgatggggatagatcattgcaattgttggtcctcaacgaggaattcctcgtaagcgcgagtcatcagctcgcgttgactacgtccctgcccttttgtaacacngcccgtcgctcctaccgatt

SEQ ID NO: 252222 - DNA, 358 bp, Glycine max
  unsure (1)..(358): unsure at all n locations
acaatttatctctatcagaaaaggagaaaaactgcgtctaatagttttagattctgaagaggaagagaaagatacgttgtaactagcaaaggatacgccctgtttggcgtaatccttaaacgtagcattagtgttaacgttgtaggttgtgaagccaaccttgtgatccccttctgcgcctttagcatagcctttgaaagtatccgaaccagggttaaaagaattcccgtagtttttgaaatccagtttggtcctttctttggtgttcttagcataagattganacgagtcatcagctatgttagcctggtctctgtaattagcaaaactctcagtgctagcgtgagttctaacagcg

SEQ ID NO: 252223 - DNA, 311 bp, Glycine max
acaatttatctctatcagaaaatgagaaaaactgcgtctaatagttttagattctgaagaggaagagaaagatacgttgtaactagcagaggagagggcctgtttggcgtaatccttaaacgtagcattagtgttaacgttgtaggttgtgaagccaaccttgtgatccccttctgcgcctttagcatagcctttgaaagtatccgaaccatggttaagagaattcccgtagtttttgaaatccagtttggtcctttctttggtgttcttagcataacattgatacgagtcatcagctaggtgagcctggt

SEQ ID NO: 252224 - DNA, 369 bp, Glycine max
cttgctttgtcagctagagattctgtagtttatttaggaggaccttcttgggaagtggggttggggagaagagattctactacagcaagcagaagtgatgctaataatagcattcctgggcctttcctcagtctaactgctctgataaacaattttgctaatcaaggcctctcagttacagatttggtggctctttcaggggcacatacaattggcctggctgaatgcaaaaatttccgagcacacatctacaatgattccaacgttgatccctcttaccgaaagttcctgcagagcaagtgccccagaagtggaaatgataaaacaatcgaaccccttgaccaccaaactccaatccaatttgataat

SEQ ID NO: 252225 - DNA, 353 bp, Glycine max
gacagccagagccaccttcggatctgagagatcgccacgcacgcacgcacgcttcctttgattttgtcttccgcttcgtcatttcctattctcagcttccaattctcctcctccttcttctaattctacttcttttcgagggttttcgttcctctgtgcctgattgatccctaattcgataccatgcggaagaagctcgatacccgtttccccgctgctcggataaagaagataatgcaagcagatgaggatgtcggaaagatagcgttggcagttcctgttttagtttctaaagctctggagttatttttgcaagattcttgtgaccgcacttatgaagtaacccttcagag

SEQ ID NO: 252226 - DNA, 300 bp, Glycine max
  unsure (1)..(300): unsure at all n locations
ccggtaacgatttccccacactctaagcgcctctcatccgtgatgggcgtttggagaagttccaacggggcaccaacaagggatgaccgcattggggtctgcactggaatttttcgcacccaatcaattcctgaacaagacgttgtcaagattgttgacaccttccctgggcaatccattgatttctttggtgcactgagggccanagtatatgatgacgaagtgaggaagtggatttctggtgttggtgttgacggcattgggaagaagcttgtgaactcaaaagatggacctccaacc

SEQ ID NO: 252227 - DNA, 429 bp, Glycine max
cgaagaaagattcgaaacgaagaaagaaagcgttgtgaagaatggcggaagagggacaagtgatcggtgtccacagcgtagaggagtggaaggaacatctcaagaagggagaagagtccaagaaattgattgtggtggattttactgcttcttggtgcggtccatgccgtttcattgccccaattcttgcagagtttgctaaaaagttgccgaatgtcaccttcctcaaggtggatgtggatgaattggagactgtttccaaggagtggggaattgaagctatgccaaacttcctgttcttgaaagaaggcaagctggtggacaaggttgtgggtgccaagaaagaggagctgcaattgacaatagccaaacatgccgcaattgctgctgcttgaagtgccatatgaatatgttaagaataatagacta

SEQ ID NO: 252228 - DNA, 369 bp, Glycine max
ttatgtttcaagatattactcccataacaacgattaccttgaaatttgccgttgctacaaggcactatatgagattccatctgtcaaagaagagcctgccaagtggattccaatcctaaggaaaatatgtcggtacttggttctagcgccctacgatccaatgcaatcaagctttctcaattccaccttggcggataagaatctatctgagattccagacttcaagctactcttgaaacagctggttagcatggaggttatccaatggataactcctatgggatacatataatagtgaatttgagaatgagaacgcctctgggaaatctttgggagaaaaagcagcagaagatctaaggcagggaataa

SEQ ID NO: 252229 - DNA, 385 bp, Glycine max
  unsure (1)..(385): unsure at all n locations
gtgaagctgggcccatcagcccccgaagtcgggagggtcagcatgaggaagaccgtcaccaagcaggcctcctccggaagcccatggtacggcccagaccgcgtcaagtacttgggcccattctctggcgagcccccgtcctacctcactggcgagttcccaggtgactacggctgggacactgctgggctttcggccgacccagaaaccttcgccagaaaccgtgagctcgaagtgatccactccaggtgggccatgctcggggccttgggctgcgtcttcnccgaactattgtcccgcaacggggtcaagtttggagaagctgtgtggttcaaggccgggtcncagatcttcagcganggtgggctggactacctgggcaacc

SEQ ID NO: 252230 - DNA, 346 bp, Glycine max
ggcagcgtcactacaagcagcagctactttcatgcaacccaccaagttgagcaggagcaacactttgcagcaaaagtctactcagtccatttccaaggcttttggtttggaacctgttggagctaaaaaggtcacatgctcccttcaggctgatcttaaggacttggctcacaagtgtgttgatgctaccaaaattgcaggattcgcccttgccacctctgccctcgttgtctctggggcaagtgctgaaggtgttccaaagaggctaaccttcgacgaaatccagagcaagacctacttggaagtgaaggggacaggaacagcaaaccagtgcccaacaattgat

SEQ ID NO: 252231 - DNA, 318 bp, Glycine max
aaattttaaaagaataccccctctttttgctgcatcagaggagttgtaaattaagagcatggctgcacaagctcttgtatcatcatcttctcttaccttctcagcggaggctgcaagacaaagtcttggaccaagatcactccaatctccatttggcttctccagaaaagcctcctttcttgttaaggcagctgctaccccccctgtcaagcaaggatcagacaggcctttgtggtttgcatcaaagcaaagtctttcttacttggatggcagccttccgggtgactatggatttgaccctctgggactttcagaccc

SEQ ID NO: 252232 - DNA, 523 bp, Glycine max
  unsure (1)..(523): unsure at all n locations
cggcggctaagaatgaatcangtagcctgcagaagagactgacgtcggatccacgcgtacgtaagctcggaattcggctcgagtgccaaggttatcaatgacaggtttggcattgttgagggtttgatgaccactgttcattccatcaccgctacccagaagactgttgatggaccatcagccaaggactggagaggtggaagagctgcttcatttaacatcattcctagcagcactggagctgccaaggctgttgggaaagtcctccctgctttgaatggaaaattgactggtatggcattccgtgttcccaccgtggatgtctctgttgttgacctcacagtgaggctggagaaagaagcttcctacgatganattaanaatgctatcaaggangaatcagnagggcaagttgaagggaaatcntggttacactgaanatgatgtggtctccactgactttatcggcgatagcagatcaagttatttttgagcaaaggctgggtttgcattgaataagaat

SEQ ID NO: 252233 - DNA, 377 bp, Glycine max
tctctgtctcgtttacacatctctccaacctttcactttcgtttctcagttttattcgaatccctctctcaatctcctttccaaatggccagcgttgaggttgcacagcaaacaccaacaacagttccagaaaatgaaacaaccgaggtaagcaagacccaggaaacaaccccagtcactgaggctcctgcaacagaacaaccagcagctgaggttcctgcaacagaacaaccagccgctgaggctcctgccccagaatcaaccaccgaagccacaaatgaagaaatcaccgaggcaccaacagaaacagtagaaaaaacaactacagaagtaaccacagaggaagagaaccaaccagctgagtcagttgaaacccc

SEQ ID NO: 252234 - DNA, 362 bp, Glycine max
gaaaaaccttgatatgtttgaaggagatatagagaagccaaaggcagagagtatgaaagtggacttacaagggttgatgcatgacagtgtaaatgcaattgagtttggtagaaataagaatttgtcttccaaagttgaaaagcttcatgaggaagttgacattcaagagcttggtgaaatatctgctgaagctcaacaatatatttttaatttgcaatctcgtttgtcttctatgaaaaaggagctgcatgaagtaaagaggaaaagtgctgctcttcaaatgcaacagtttgttggagaagaaaagaatgatttattggattacttgaaattccttcaacctgaacaggttgctcagcttt

SEQ ID NO: 252235 - DNA, 360 bp, Glycine max
gttacttcttcttcttcttcttcttcttcttcttctctctggaattttccctgacttttgtgtgcatcgatggcggcgatcagtctccggaaggggaacacgcggctgccgccggaggtgaaccgcgtgctgtacgttcggaaccttcccttcaacatcacgagcgaggagatgtacgacatcttcggcaagtacggcgccattcggcagatccgcatcggcaccaacaaggacactcgcggaacggccttcatcgtctacgaggacatctacgacgccaaaaccgccgtcgaccacctctccggcttcaacgtcgccaaccgctacctcatcgttctctactaccagcaagccaagatg

SEQ ID NO: 252236 - DNA, 330 bp, Glycine max
cctagaaatcgatcactgatccagttggagtacctctacaggatagacctcaacagaaaactgaagagtaacggcagcaagtgattgagttcagtagttcctcatataaaattattgactctcgagatacagtaatatggagaagacatgattgtttcaagcagcgacagaaccggaagcaccctttgtttcaaagtttcaaagaggggaggacgggttattcacatttcatttgatggtcagaggcgaattgagagctaagctgtggtaattctaacgattctccccgggaaaaatatagatgtctccgacgtcacccgtacgatgtgg

SEQ ID NO: 252237 - DNA, 350 bp, Glycine max
  unsure (1)..(350): unsure at all n locations
gcaaggagtttggtgattgagaccttgggacaatttgangcaacaaccttggggaatgctagttttcgtaccgtgctggaatgccgacnatcaagttgagaaatatgaaagtcttgcatcanaagtggctctaggacttcgntttcacnctgagaatgttcaagaatgcattcgattgacagaagaatttcggttacttcccagaggccatatatccaaggaagataaattggagataaagaagatggcactatatgctgcggatgttgcaataaccgaagccactaaactgatgagaggaaatgatatgtcagatgaagccaaggaagtcccccagcaacacattttta

SEQ ID NO: 252238 - DNA, 437 bp, Glycine max
  unsure (1)..(437): unsure at all n locations
gcagaaaaacaagtagttgagaactaagaagaaggaaatggcttcctcaatgatctcctctccagctgttaccaacgtcaaccgtgccggtgccgggatggttgctccattcagcggactcaaatccatggctggcttccccacgaggaagaccaacaatgacattagctccattgctagcaacggtggaagagtacaatgcatgcacgtgtggccaccaattggcaagaagaagttcgagactctttcctacttgccagacctcgatgatgctcaattggcaaatgaagtcgaataccttctaaggaaaggatggattccttgcttggaattcgagttggagcacggtttcgtgtnacgtgagcacaacaggtcacctggatactatgatggacgctactggaccatgttgaagctgctatgtttggctgcactga

SEQ ID NO: 252239 - DNA, 325 bp, Glycine max
cttgtttctctcaaagatggcgttgcccaaaggtgaattccaaggttggaacgaagggggttccgtcaacaacaagttcaaaccaacccttaaaggcttgggcaatccaaattaccatggggttaaaaaaaaaatttgataaggcaccaaggaggaatgatgtaaaagctatagttttgactggcaaaggtggcagattttctggtggctttgatatcagtgttatgcagaaggttcaccagactggggattcctcgcatctccctgatgtctccgtggaactagtagtcaattcaattgaagattcgaagaaacctgttgttgc

SEQ ID NO: 252240 - DNA, 392 bp, Glycine max
aagagattgaagagacccagcagaccgacaaggacagatggaagggtcttgcctatgatatctcagacgaccaacaagacatcacaagaggaaagggtttggttgactcccttttccaagctccacaggatgctggaactcactatgcagtcatgagctcctacgagtacctcagcactggacttcgccagtacttggacaacaaaatggatggattctacattgctccagcttttatggacaagcttgttgttcacatctccaagaacttcatgaccctgcccaacatcaaggttcctctcattcttggtatctggggaggcaagggacaaggaaaatctttccaatgtgagcctgtccttgcccagatgggaatcaaccccatcatgatg

SEQ ID NO: 252241 - DNA, 379 bp, Glycine max
  unsure (1)..(379): unsure at all n locations
accagttcatcttgagagcaggtgcagccaaggcccttggatcattcaggagtaacccccataattgagatgtctttctcttcatgatgatggctctagtggaaagaagataattggagagatggaggttgatatggcaagtttaataatgggaaatgcttttggctttgtatttgcaacgtttctttgaccctctcgattatgtcttcaagattgtggataagtgtagattaaagtctctttcatgacagggggagccttttgcactttcctctgtggtgttcttcnctttagtgtgtcatttttcttttttaagttattctcttctgtcatctctgtactcaaacanatcatgggaaatattttaaattttaatttt

SEQ ID NO: 252242 - DNA, 335 bp, Glycine max
gaaagagatcacatagcagaatggcttctactcaatgtttcttgcaccaccatgctcttaccacccctgccagatccccatcacaacgcatcatggttagcaccaagcctaaccagcttgtttgcaaggcacagaagcaagaggatattgatgtcagcccaatctctcgccggttagctctaaccgtgctcattggtgctgctgctgttggctccaaagtccaacctgctgatgcagcttatggggaagctgccaatgtgtttggaaagccaaagacagacacagatttcctgccatacaatggagatggattcaaactatcgattccctcaaag

SEQ ID NO: 252243 - DNA, 429 bp, Glycine max
  unsure (1)..(429): unsure at all n locations
attaaccacaagcataagcacaagcacaagcacaagcacttctctaattccctttcacactctattacagatttcacaagtgcttacacttcaaatggctttggaagctcttcaatcacccaccacagccactccatcgtttagtccctttgaagaaaccagtctcagttacttagagacaccgtggacgaaaggaaagcgttctaagcgtagccgcacggagcaacaactgcaacacccttcatgcaccgaggaagagtacctcgctctttgtctcatcatgctcgctcgcggcggcgccggcagtgtctccaccgccanaaccgctgtctccgacaacaattctgcgccgctatccgccggcaaactgagctacaaatgttcggtttgcaacaaagccttctcctcttaccaagcactcggaagaca

SEQ ID NO: 252244 - DNA, 242 bp, Glycine max
ggttaagcggtgagatttgcgaatctgagaaatggcggattcttctcgggaggagaacgtttacatggcgaaattggcggagcaggccgagcgttacgaggagatggttgagttcatggagaaggttgcaaagactgtggaggttgaggagttgacggtggaggagaggaatctcctctctgtggcttacaagaacgtgattggtgcgaagagggcttcgtggaggatcatatcctccattg

SEQ ID NO: 252245 - DNA, 322 bp, Glycine max
atagctttgggagcaaaaactgcacaaagctcctcagtgccccccaagttttcctttcaaagcaattttgtgctttgctttgaatgtcttccttttcgatccctacacttcaatttgtagcaagaggaatttgttgtttcctacttagcatgattatttatcaatggcgtctttggtatcttcagcatttactcttccaagctctaaacctgaccagcttcaatcacttgccccgaaacatctttttcatcagtcattccttcccaagaaagccaattacaatggtagctcaaaatcctctctgaaaattaaatgtgctgtc

SEQ ID NO: 252246 - DNA, 393 bp, Glycine max
  unsure (1)..(393): unsure at all n locations
ccctcttttgctgcatcagaggagttgtaaattaagagcatggctgcacaagctcttgtatcatcatcttctcttacctttccagccgaagctgcaagacaaagtcttggaccaagattactccaatctccatttggcttctccagaaaagcctcctttcttgttaaggcagctgctaacccccctggtaagcaaggatcagacaggcctttgtggtttgcatcaaagcaaagtctttcttacttggatggcagccttccgggtgactatggatttgaccctctgggactttcanaaccctgaaagaacaggagggttcaatgagccgaaatggctagcatatggtgagataatcaatggtcgttatgcaatgtttggtgcagttggtgcaat

SEQ ID NO: 252247 - DNA, 519 bp, Glycine max
  unsure (1)..(519): unsure at all n locations
ctggtttngcaattatccatcgtctgtcacagacttncttaatgcgtccaggtcgactctaaaggatcccctcggggaattccaattccacattttcaagaaataaggaggcaaaaatgttcatatatgaattggaattatttgttttcttattaggcctatcctgaagccaaaggaaatgagatcggaattcctcggggaattccaattccacattttcaagaaataaggaggcaaaaatgttcatatatgaattggaattatttgttttcttattaggcctatcctgaagccaaaggaaatgagatcggaattcctcggggaattccaattccacattttcaagaaataatgaggcaaaaatgttcatatatgaattggaattacttgttttcctattaagcctatcctgaagccaaaggaaatgagatcngaattcctcgggggtaccgagctcgaattccctatagtgagtcctattaaattcgtaatcatgtcataactgtttcctgtgtgaag

SEQ ID NO: 252248 - DNA, 358 bp, Glycine max
ctttcctgggaaaaaattggaacctgcctctgttaaagtttgtatttttctgagtgggtgggttgattgagagtgctgtgcaagctttggaactttttcccaacctgctacttcaatggccactgaagaggttaacaaacctcaatcacttcctccataccctgagatgatagtgaaagcacttgaagcactgaatgagccaaatggatcgaacaagtcagcaatatcaaagtacatagaaaccacctacggtgagttgccagacgcaaccggttttggggagtcaccttaacaagatgaaagacagtggagagctttctttcaaacagaacaattacatgaaagctgacccaaatgc

SEQ ID NO: 252249 - DNA, 412 bp, Glycine max
gtttcttcaggtcgagtagatttgccaggctccaaggtattcagtgtgctatggctgggaagaatgcttatttgagattcacttgtagcacgggtgatgccatggggatgaacatggtttccaaaggggtgcaaaacgttcttgattttcttctgaatgatttccctgacatggatgttattggcatttctggaaattattgttcggacaagaaacctgctgcagtaaattggatcgagggacgtgggaaatcagttgtttctgaagcaattatcaaagaagaagtggtgcagaaggtatttgaaaacaacgtgtctgccctggtggagcttaacatgctcaaaaaccttgctggttctgccgtcgccggtgctcttggtggaattaatgcccatgctagtaacatggtttc

SEQ ID NO: 252250 - DNA, 331 bp, Glycine max
gagatggaccatgggaaatgatgagggaatttgatgataacatcccttctcgggcatttgacaattttcagtttgtgaattttactgaaataatgacaaggaatgtagattcaaccagaaaagagacagattttgccctttcagctttgatggagataccttcccaatacaaggcaaccctaaagcttggcaaattgggtacacggagggggcattcaccagatagggttgctctacccccacctctttatagtaaaacctcttccagcatcagcacaaactctacagggtcaaacagttttcaccaggggacacctacacatactaccta

SEQ ID NO: 252251 - DNA, 361 bp, Glycine max
  unsure (1)..(361): unsure at all n locations
aatacactcataacacaaagcacaaagcaaagctcatccttgagttaaaaaatggcagcagcttcttccatggctctctcatccccatcctttgctggcaaagccgtgaagctgggcccatcagccccagaagttggaaaggtgagcatgaagaagaccgtcaccaaacaggtctcctcangaagcccatggtacggcccagaccgagtcaagtacttgggcccattctctggcgagcccccgtcctacctaaacggtgagttcccaggcgactaccgctgggacactgctgggctttccgcagacccagaaaccttcgccaagaaccgttaaatcgaattgatccactccaggttggcca

SEQ ID NO: 252252 - DNA, 310 bp, Glycine max
accaggcgcacgttagcacaaactatcatggccacggcaacagcagctgccacctcgtcctttatggggacgcgtctcctggaagctcactccggggcggggcgagtgcacgcccgattcggcttcggcaagaaaaaggctcccgccccaaagaaagcctccaagggatcgggccgagacaccgacagacccctttggtatccgggcgccaaagcgcccgaatatctcgatgggagtcttgtcggagactacgggttcgatccgtttgggctaagggaaccccgcggagtacctgcagttcgagctggac

SEQ ID NO: 252253 - DNA, 293 bp, Glycine max
  unsure (1)..(293): unsure at all n locations
gagaagaagaaattagtagcctatcatgaggctggccatgctctagtgggtgctttaatgccagaatatgaccctgtagccaagatatcaattattcctcgtggccaagctggtggtctcacattttttgctcccagcgaagagaggctcgagtctggattgtacagtagaagttaccttgaaaatcagatggctgttgccctgngtggaanggttgccgaagaggttatttttggccaggaaaatgtcaccaccggagcatcaaacgacttcatgcaagtttcacgagtggc

SEQ ID NO: 252254 - DNA, 349 bp, Glycine max
aggtcgacactaaaggatcccctcggggaattccaattccacattttcaagaaataaggaggcaaaaatgttcatatatgaattggaattatttgttttcttattaggcctatcctgaagccaaaggaaatgagatcggaattcctcggggaattccaattccacattttcaagaaataaggaggcaaaaatgttcatatatgaattggaattatttgttttcttattaggcctatcctgaagccaaaggaaatgagatcggaattcctcggggaattccaattccacattttcaagaaataacgaggcaaaaatgttcatatatgaattggaattacttgttttctta

SEQ ID NO: 252255 - DNA, 332 bp, Glycine max
cagaaatgggcagtgcttctctgattccagtttcctggttgccttggcggccactttctcctttcaagggaacggtgaaaaccttggtcgcaaaagcatggctgaagaagattcagcaagcaagacccctcatttccgtggttaacaaggctgcctctctatcttcccccgtgacagcacccagcgtcggcgttcggtttcggctggacaatttggggccgcaaccgggttcgaggaagagggctaagagaaagggtagaggaatatccgcacggcaaggggcaagttgtggttttgggatgagaggtcagaaatctcgatctggacctggc

SEQ ID NO: 252256 - DNA, 360 bp, Glycine max
cactacctcaattactcaactaaagcttcattcattcatcgtgtcgtgttgtgttctttgcaaccatgcttcttagaacagcgtcctctttctctctcttcaacgccaacggcgaccatatactactcccttcctctgttcgctactctcagggcaaacacttggttccatgcgctaccaagaactccaataaccggcccttaaccggcgtcgtatttgaaccctttgaagaggtcaagaaggagctcgaccttgttcccactgtcccacaagcttcccttgctcgccagaagtacaccgatgaatctgaggctactatcaacgaacagattaatgtggagttaaatgtttcgtacgttt

SEQ ID NO: 252257 - DNA, 299 bp, Glycine max
attttatgtttgtttttgcgagcgtaaggttgaggagaagagatggtgggagcacggccacgggacatagatgacttgcccaagaacgccgccaacgacacagcgcttacgccgttgtggtttctagagagagctgctacggtccaccccaccagaaactccctcatccacggatctcgtcgctacacgtggcagcagacttaccaccgttgccgtcgattcgcctccgctctttctaatcattccatcggtcttggaaacactgtagctgttattggcaccaacattccagctcttta

SEQ ID NO: 252258 - DNA, 376 bp, Glycine max
  unsure (1)..(376): unsure at all n locations
gtgtctatgcaaagttctggaatcaacccctaaggtcnccccactccttcaaaaatcctctcttttatcctacaacactctaatcatcgtcatcaaggacctcctccatcctcccccagtaacaacacaacataacattcagagaaaaacaaaactatcatacccacatggatttgcaatgaaagtgagagagtccaattatgcgaacgctttgtgatgcttgtgagagcgccgcggctatagttttctgcgccgctgatgaggctgcactttgtcgtgcctgtgatgagaaggttcacatgtgcaacaagctagctagtaggcatgtgagggttggtcttgctagtccaagtgaatgtacacggtgtgacatatg

SEQ ID NO: 252259 - DNA, 368 bp, Glycine max
  unsure (1)..(368): unsure at all n locations
gacttgttggtcatgagttcgaatccgaaaacagcctctttgcatatgcaagggtaagactgcgtacaacatccctccccaataccttcgcatagcgaagagcctctggacaatgggctgagcttttggggttggccggtttcatacgtccctatgcaagtgctggagcccgagacatattttacggagtcaattatgcttcagcagcttccggaattagagacgaaactggacaacaattgggaagccgtatcagtcttagagggcaggtgcanaaccacataaggaccgcgtaccagatngtaaattcactgggagatgtgaacagaacctttaacttacctgggcaggtgcatttattcaattgg

SEQ ID NO: 252260 - DNA, 397 bp, Glycine max
ctctcattttcccacgacccattttcatttttccaaaaagatgtcaactttgcttcaaactagaacactccctctttttacgttcccgtttcatgggcatctcttggaatcgggaaccatagacatcgccatggaaaaggacaagtctcacactcacagctttcttcacagtatcgtcaaacacttcaaattcggttcaccgaaagagcgaaacaatgaagctgacgtacaccaaatggctgcacaggagcagaagatctttgcctacgaaaccttgacagctgcaactaagaattttagtgctattcataagcttggtgagggaggttttggaccagtctacaaggggaagctgaatgatgggagagagattgctgtgaagaagttatcacacacg

SEQ ID NO: 252261 - DNA, 425 bp, Glycine max
tgagaactaataagaaggaaatggcttcctcaatgatctccgccccagctgttaccaccgtcaaccgtgccggtgccggcatggttgctccattcaccggcctcaaatccatggctggcttccccacgaggaagaccaacaatgacattacctccattgctagcaacggtggaagagtacaatgcatgcaggtgtggccaccaattggcaagaagaagttcgagactctttcctacttgccagacctcgatgatgcccaattggcaaaggaagtcgaataccttctaaggaaaggatggattccttgcttggaattcgagttggagcacggtttcgtgtaccgtgagcacaacaggtcacctggatactatgatggacgctactggaccatgtggaagctgcctatgtttggctgcactgatgct

SEQ ID NO: 252262 - DNA, 392 bp, Glycine max
cacttctcttcttcaattcattctagttctggattccgactcgccgcattgactcggtccgggttggggtcgactcagttcggtttttcattctctcgcgaatctaatctataggaaaagctaagggcacatcacaatgaaggcattgattctggttggggggtttggaacaaggctgaggccactgacactcagttttcctaagcctcttgttgattttgctaacaaacctatgattctgcatcagatagaggcccttaaggccattggagttactgaggtggtgctagccatcaactaccaaccagaggttatgttgaatttcttgaaggattttgaaacaaagctcggcatcaagatcacatgttctcaggaaactgaaccattgggaa

SEQ ID NO: 252263 - DNA, 425 bp, Glycine max
caggttgactggattgggcagaaaaatcaaatagatgtcgccaaggctgctggagtgaagcacattgtgttagtagggtctatgggtggaacggaccttaaccatcctttgaacagcttgggtaatgggaatatattggtttggaaaaggaaggctgagcaatatctggctgattccggcatcccatatacaattataagggctggtggcttgcaagacaaagatggaggtcttcgggaactacttgtagggaaggatgatgagcttctccagactgaaaccagaaccataagtagatctgatgttgcagaagtctgcattcaggcactaaattttgaggaggctaaattcaaggcatttgacttggcatcaaaacctgagggagcaggttcagcaacaaaggatttcaaggctttattttccca

SEQ ID NO: 252264 - DNA, 534 bp, Glycine max
  unsure (1)..(534): unsure at all n locations
tgtnnagagaaagtgtgtttaaaatatgttgttgantgcaattctctagaagagctatgacgtcgcatgcacgcgtacgtaagctcggatttcgggcttcgggcccgagaccattaaaaaaaaaaaaaattccgcgattcgctctgctcttggaaaagtgaaaaccagaagtacgaacgaaagagaagagcgatttagaagtgagagaagatggggttgtcgttcacgaagctgttcagcaggttgtttgcgaagaaggaaatgaggattctgatggtaggtctcgatgctgctggtaagacaaccatcttgtacaagctcaagcttggagaaatcgtcaccactatccccaccatcggatttaatgttgagactgtggagtacaagaacatcagcttcactgtgtgggatgttggtggtcaggacaagatccgtccactgtggaggcattatttccagaacactcagggtctcatttttgtggttgatagcaatgatagagatcgagtggttgaagcaagggatgagctgcac

SEQ ID NO: 252265 - DNA, 348 bp, Glycine max
  unsure (1)..(348): unsure at all n locations
gagcaacactgcactgggtgggaaccgaaccttggcaggagtggtggccctccaacagaaccaactatctttctctaccttagcttcctctctttctgacttcagtggaaccagacttcaaactcaacttcagttcaagagaaagcaatgccatccaaaagggtctttctacgtctccgcatcgagcaccaagaaaatcctaataatgggaggcaccaggtttattggtgtgtttttgtctaggctccttgtcaaagagggtcaccaggtgactntattcacaagaggtaaagcgcctgtcactcaacagttgccaggtgaatcagacagtgattatgctgatttttc

SEQ ID NO: 252266 - DNA, 411 bp, Glycine max
cttttggcgcttattaaattacaccggaaatgggtgcacactttgtaatgtacctagctaagttgaatgaaaaatcaaaatcaggactacccctgcctggtgtgaagagatttatctttgtgctccaaggtgctgtcaccctcactaatgctgctggtgttagccaactactgaacgttgattcttatgcttattttcctgcaaattttgagcattcaattgaatgtgatacacctgctactattgtggtatttgaacggagatattctacgctaccaaatcatatcccagagccattggttggttcaactgataagcagccactccttgagactccaggcgagatttttgaactgaggaagctaattccaacatctttggcatatgacttcaatatccacataatggatt

SEQ ID NO: 252267 - DNA, 384 bp, Glycine max
gttgaaagttatataagtagcaaagatgtttccattcgggcacaagggtgaaaagataaaggggactatggtggttatgcagaagaatgtgttggatatcaacagcatcaccagtgttgacgggatcgtcggcaccggcttagacttcttaggcagtgcactcgatacagttacttttttagcctcctccatctccatccaacttattagtgctaccaaggctgatggtgggaaaggaaaagttggaaaggctacacatttgagaggaaagattacattaccaaccataggagctaaggaagaagcatacgatgctcaatttgattgggacagtgacttcggaattcccggtgcattttatattaagaactacatgcaaaacga

SEQ ID NO: 252268 - DNA, 335 bp, Glycine max
gtccggaaatcgttcctatcatcaattcttaaatctcgaaccgtctggttcgtgccgatcactaagtcacactttatcaatggccggtagaggcaaaaccctaggatccagcgccgcttagaatgccaccttaaggagcagcaaagccggccttcaattccccgtcggtcgtatcgccaggttccttaaagccggaaagtacgccgagcgcgtcggcgccggagcccccgtctacctcgccgccgttctcgaatatctcgctgctgaggttttggaattggctggaaacgctgcgagagataaccagaagactcgaattgttccacgccacattc

SEQ ID NO: 252269 - DNA, 434 bp, Glycine max
tatctgtatcccttccttaatacaacaagcaagtcaagaccatttgagtacttgaggcttaccagtcttggtgtaattggtgcattggtgaaggttgatgatacagaagttataagtttccttctttcaacagagataattcccctgtgcctgcgcaccatggaaatgggcagtgaactatccaaaacagttgcaacatttattgttcaaaaaattctgttggacgatgtgggcttggactatatttgtactacagcggagcgctttttcgcagtaggtcgagttctggggaacatggtggcagctctcgctgagcaaccctcatctcgtctattgaagcatatcattcgatgctatcttcgcctatcagataatccaaaggcttgtgatgcattaagaagctgtctaccagacatgttaagagatgctacttt

SEQ ID NO: 252270 - DNA, 382 bp, Glycine max
  unsure (1)..(382): unsure at all n locations
agaaaaacttcacttcacttgcatgccaaatgagaacaaccggttcttagaataatttcctcggtgtttaagccttgtcgatttccgaacaccaatccgagttaattaaacaatgagagtttcgacagaaaagttagagacagagccggagagcaaaaagataaaacgcattcgtggcggcggcggcggtgactcgagcaataagcaccctttgtaccgcggcgtgcggatgcggaactgggggaaatgggtgtcggaaatccgcgagccgcggaagaagtcgcggatatggctaggcacattcccgacgccggaaatggcggcgagggcgcacgacgtggcggctctcagcatcaaaggcttcgncgccattctcaacttc

SEQ ID NO: 252271 - DNA, 412 bp, Glycine max
gtgtttcatttgtgaaactaacaacaacacaaggccatcatcatggcagctgcttccccaatggcaagccaactcaagtccaccttcactaggactcttgtagctcccaagggcctctctgcctcttcaccacttcacctcgtgccttctagaaggcaatttagcttcactgttaaggccatccaatcagagaagccaacctatcaagtgattcagccaatcaacggtgacccattcattggaagcctggaaaccccagttacatccagccctttgatcgcatggtacttgtccaacctgcccgcatacagaaccgcagtgagcccactactaagagggatcgaagtgggcctggcccacggataccctctggtgggcccattcgtgaaggccgggcctcttaggaacaccg

SEQ ID NO: 252272 - DNA, 393 bp, Glycine max
tggcttcaattggcctggaaaaccactgaacctaaccgtcaggcttcccgtcccttcctggtgacagttccaggccttggtcagtacatctctggtgccattctctttgaggaaacactctaccaatccacaactgatggcacgaagattgttgacgtgctgcttgagcaaaacattgctcctgggattaaagtcgacaagggtttggtgccccttgcaggttccaacgacgagtcatggtgccaaggtttggatggtctagcctatcgctcagctgcatactacgagcaaggtgcccgtttcgacaaatggcgtactgttgtgagcattcccaactgtccctatgctcttgcagttagagaagcaacctggggtctggctcgctatgctgca

SEQ ID NO: 252273 - DNA, 389 bp, Glycine max
tatgaaggagcctggcatgaaggcagaaggcaaggacttggaatgtatacatttagaaatggtgaaacccaatctggtcactggcaaaatggagtccttgacattccaagcacacggaacaccacttctccagtttctcctgttggtgtctattattccaaagtactcaatgcagtgcaggaagcaagacgagctgccgagaaagcctatgatatggctaaggtagatgaaggggtgaacagagctgtagcagcttctaatagagcagccaatgcagctagagtagctgctgtaaaagctgtacaaaaacagaattatcatgttagcagtgaaagcttctcaattcctgttgtgtaaagagtatctcagctgcttttatattagaagag

SEQ ID NO: 252274 - DNA, 344 bp, Glycine max
caccaaggggagtggcttgattaacgctcgtatgttcaaaacgtgtattcatttagtaatggtgtaaccttccgttcggaccttcaacctcggaaactgagaaattgcatttcaatcaacatcggtcaggccggttttcaggtcggaaacgcctgctgggagctctactgcctcgaacacggcgttcaacctgatggccagatgccctgtgataagactgttggtggaggtgatgatgctttcaccaccttcttcagtgatactgcggctggtaagcacgtgcctggtgcgatttttgcagatctcgagcctactgtgattgatgaagttaggactgtgacata

SEQ ID NO: 252275 - DNA, 276 bp, Glycine max
cccttggtgaatttcaaattcaatttttttaaaaattaggagcaaaaatttcgtgtgtgattgggaattattggctccctaattaggcctatcctgaagccaaaggaattgagatcggaattcctcggggaattccaattccacattttcaagaaataaggaggcaaaaatgttcatatatgaattggaattatttgtttccttattaggcctatcctgaagccaaaggaaatgagatcggaattcctcggggaattccaattcacattttcaaga

SEQ ID NO: 252276 - DNA, 399 bp, Glycine max
cacgccacatatcttcccaaatcaggaaactctttctcttctgccgtttcctagtctcacacccaaacctcatggaaggctctgtcaacgaacgtcttgattttgggaagatgggatatgggtgcaatcattaccggagaagatgcaggattcgtgctccctgctgcaacgagatctactcatgccgtcactgtcataacgacgctgcgagcttgttgaagaatccctttgatcgccacgagctcgttcgccaagatgttaaacaagttgtttgttcagtttgtgacactgagcaacctgttgctcaagtttgcacaaactgtggcgtcaaaatgggagaatacttatgcaacatctgcaaattcttcgatgatgatgttgagaaagaacaatttcact

SEQ ID NO: 252277 - DNA, 378 bp, Glycine max
ggtgtttcatttgtgaaactaacaacatcacaaggccatcatcatggcagctgcttccccaatggcaagccaactcaagtccaccttcactaggactcttgtagctcccaagggcctctctgcctcttcaccacttcacctcgtgccttctagaaggcaatttagcttcactgttaaggccatccaatcagagaagccaacctatcaagtgattcagccaatcaacggtgacccattcattggaagcctggaaaccccagttacatccagccctttgatcgcatggtacttgtccaacctgcccgcatacagaaccgcagtgagcccactactaagaaggatcgaggtgggcctggcccacggataccttctggtggg

SEQ ID NO: 252278 - DNA, 341 bp, Glycine max
  unsure (1)..(341): unsure at all n locations
ggaaaaccgcttgttcgacctgcccaaatcttaatcaagaggggtgagttttgtttttccagccatgacgccgctgatcctgcatgctgggaaaaccaacgaaatcttaacagacactcattgcagncgagtttgctggcgtgcaagttgattttgcccctaatttgagatggtgtctccaataaaacttctgaatttttaaagatcaatcctattgccaaggttcctgtgctggaaacccccgttggtccaatattcgagagcaatgccattgctcgctatgttacccggttgaaaggtgataacactttgtatggatcttccttgattgaatatgccca

SEQ ID NO: 252279 - DNA, 434 bp, Glycine max
cccaatttcattccatggccgattcaacctcaagcgattcactctctgtagacatcgattccttatctccttcacctcaggaacatatcatcagaacacgtcatggttccgtatctgttgctgtatatggagaccaggataagccagctcttatcacatacccagatttggctttaaattatgtctcctgctttcaggggttattattttgtcccgaggcatattaccttctgctccataatttctgcatttatcatattagtccacctggacatgagttgggagctgctgaaatcgatccagattaccctattctttctgtagatgacttagctgatcaaatagctgaggttctcaacttttttggtcttagtgcagtcatgtgtatgggagtaactgctggggcttatattcttaccttatttgcaatgaag

SEQ ID NO: 252280 - DNA, 294 bp, Glycine max
gtatctttcaatttccatccacgggtatagccttttctatttgggcgttctaatgttcaacggcatgcacaccaatggccaataaaacggcgtagtccaggaggcccttttaccatcctactttgacaggatgtaacggagccttagcaattctcaaggagagaaccggttcgagccattacgcgataaccaatttcatctaaggcaggcccaaggagttgcctccaacctacaaaaagcttgttctcgttcatctcaagaagtctgttgttgctggcaagctcgttaaggtca

SEQ ID NO: 252281 - DNA, 420 bp, Glycine max
tggaagccacggcctccgcaatgagcttcgcccttccctcaacaaaagcccaagcccaagcccaactcctgacccggcccaccaatccattcaccattccctcccgcagcccagcccaccgccccccgccgcgcctccccaccatccgcgccgcaattccccgcacaaagaaagaggcaacggtggagactgtgcgggagcagctcgagaactgttacctcctcgccggcatcaactacaagggcttcacggtgaagcagttccaggagcttcgaaagacgctcccagaaacaacgaaactgatcgtggcgaagaacacgctcgtttacaaggccgtggaaagcacgccctgggagacgctgaagccctgcatgaagggcatgaacgtgtggctcttcgtccacaccgaggagatccctt

SEQ ID NO: 252282 - DNA, 423 bp, Glycine max
catcaattctctctcatactctcactactctctttgctctttgttttctccactatggctgcacaacgaaacttccaagactacttgcctgtgatggccaacaagcttggtggggatggcctaattgatgaactgtgcaatgggttcaatctgttgaaggattctgataaaggggtcatcacctttgagagcctcaagaggaactctgccttgtttggccttcagggtcttagtgatgaagatcttcggtccatggttttggaaggtgactttgatggtgatggtgcactcaatcagttggagttctgtgttttgatgttcagactcaaccctgaattgatggaaggctcaaagatgtggcttgaacaagtccttcaacaagagcttaaggattatttctaactttcctttttttttttctcc

SEQ ID NO: 252283 - DNA, 533 bp, Glycine max
  unsure (1)..(533): unsure at all n locations
ggttnnnnnnnaggatagtatgtgttagtagagagggaggatatatctatagaacagctatgacgtcgcatgcacgcgtacgtaagctcggattccggttcgagctgctaacattctcttagataacacttacactgcaaaagtgtctgattttggagcttcaagattggtaccaattgatcaaacagaaatagccacaatggtgcaaggaacttttggttacctggatccagagtacatgcgtacaagccaactaactgagaaaagtgatgtctatagctttggggtagtgcttgtagagctgctaacaggggagaaaccatattcttttggcaagccagaagagaaaagaagtctcactaaccactttttgtcttgcttgaaagaggatcgcctatctgatgttgttcaagatggcattatgaatgaagaaaattaaaaggagatcatggaggttgctattcttgctgcaaagtgcttgagactcaatggnngagaaaggcctagcatgaangaagtgcctatggagtnga

SEQ ID NO: 252284 - DNA, 514 bp, Glycine max
  unsure (1)..(514): unsure at all n locations
gagtnaggagagttgatagtagggggggagtattgtcagaacagctatgacgtcgcatgcacgcgtacgtaagctcggaattcggctcgggatcaagggttgtgaaagcagagaagtgagatacactaagtgatcctgataaatacactctaattaggtggcaagataagtgtctaaccttagtaacattgccacatattgtgttcattttggaattgtgccactaaaattctattcaattcatctatggctgcctcttcttatgctatgcaatcaatcctggcaaaccctttgatccgcatttccagcgggtctagggtgaaccaatttggcgttcctgctttgcacatgagaaggaatgttggcctgagagttaagtccatggctaaggaagaacaaccaagtgagcctgcaaccccagttacaccgtcaccatcagtagaacccaagccacagccagtctctgctccttcaccaaaggtgagcactaagttttctgatgtgttggcattcc

SEQ ID NO: 252285 - DNA, 543 bp, Glycine max
  unsure (1)..(543): unsure at all n locations
ggngnaggggnnnnnngggggggagggtattgttagtggggtgggggatatatgtaaagaccagctatgacgtcgcatgcacgcgtacgtaagctcggaattcggcttgagccaaaaagggctccaagattgggcatcatctcccaattggttgccaagcgcaaacacatgtttggcaggccttgccggccctccttctccttttcctcggggtcctcggccgcggccgttcaaacctccccccaggcccaaagccttggcccatcataggcaacctaaactaaattgggtcccttcacatcggtcgatccacacgcttggcaaaaaatacgggcccatcatgcacgtatggttcggttcgagctccgtggtggtgggctcgtccgttgaaattgccaaggccgtcctcaaaacccacgacgccaccctcgccggcaggccgaagttcgcgggcggcaaatacacaacctacaactactcggacatcacttggttccagtacgggccatactggcgcccagcccgtanaatgtgcctaatgaa

SEQ ID NO: 252286 - DNA, 414 bp, Glycine max
aatcgcccttccaattttcttcaattcaagcaccaaaactgcttcctgaagttcccgaacccaaacctccatcgactgcgcaggctcaattgctcagtatcagacggcaccgtttcgtcttcgcttggtgccacggactcgtctcttgcggtgaagaagaaagcagcagaggtgtcttctgagctcaaagggacctccatatttctggttggtttgaagagctctcttaaaactagtttggggaagctgctggctgatgcattgcggtattattatttcgacagtgatagtttggtggaagaagctgtacgtggtgcactggctgcaaaatcattcagagagagtgacgaaaaaggcttctatgagtctgagactgaagtactgaagcaattatcgttcatgggtcgactagtg

SEQ ID NO: 252287 - DNA, 430 bp, Glycine max
gcagttacttgggctttaaaaagccggcaattgaagacccagtgaagactaataaaattcctaggcaggtacctgagcaggcatggtatatgaaatccgtcttctcaattcttattggaggcattcttccatttggtgcagtgttcatcgagctcttctttatcctgacatcaatatggctgaaccagttctattacatcttcggctttcttttcatagtgtttgtgatcctattaatcacctgtgccgagattaccattgtgctttgctacttccaattgtgcagtgaggattacaattggtggtggagatcttacctcactgctgggtcctctgcgctgtaccttttcctctactcaattttctacttctttaccaagttggagatttcaaagctggtctcgggcattctttactttggatacatgat

SEQ ID NO: 252288 - DNA, 417 bp, Glycine max
  unsure (1)..(417): unsure at all n locations
cagatctttggtttgggaaaggcccatttggcaaccggtggtggaccatttttcaagtagaagcattcaaccaggggtcccaaacctaatggaaggcagtttggtgacctcaaaaccatcaactgtcattgatgttttaaacccagcacccaaagaagttgtttcacaggtcccttggtctcctgatgaagagttaaacgaagctgtatcagcagcacagaaggcatttccatcatggcgtaacactccaattacaacacgccaacgtgttatgctgaagcttcaagagcttatacgcagagatatggataaactngctctgaatgtgaccacttgacacggaaagacattgaaggatgcccaaagagatgtatntcgtggtttagaagctggtgaacatgcttgtgggatggcaac

SEQ ID NO: 252289 - DNA, 377 bp, Glycine max
ttccaatttccaattcaaaaccctaactccgttcgaagcaccaaatcgtgatggcaccaaaggcagagaagaagccagcagagaagaagcccgcggaggagaagaaatcgacggtgggagacaaggctccggcggagaagaagccaaaggccggaaagaagcttccgaaggagggaggcgccggcggagaagggaagaagaagaagagaaacaagaagagcgtggagacatacaagatctacatcttcaaggttctgaagcaggttcaccctgacattggtatctcaagcaaggccatgggaatcatgaacagcttcatcaacgacatcttcgagaagcttgcccaggaatcttctagacttggccggtacaacaag

SEQ ID NO: 252290 - DNA, 422 bp, Glycine max
cagcactggagccattccattttcactctttgtaatactaatcttgctttggttctgcatatctgtaccccttaccattgttggtggctactttggagccaaggcaccccacattgagtatccagtccgaaccaaccaaattcctcgcgaaattccccagcagaagtacccatcatggctgttagttcttggtgctggcacccttccatttggcaccttgttcattgagctcttctttatcatgtccagcatttggatgggtcgcgtttactacgtctttgggtttctcttcgctgttttgatccttcttgtggtggtttgtgccgaggtatctctagttctgacttacatgcacctgtgtgtggaggattggaaatggtggtggaaatcgttctttgcctacggttctgtcgccatataca

SEQ ID NO: 252291 - DNA, 414 bp, Glycine max
cttcgacctcgcatcgcaccttcaacttaacctattccacttgtaatcgtaaacgctttgctagaagaagagacaaagtgtgtctgtgtgtgtgagagagagagcaatggctggctcgtgtgcacgccgttctatgattgttctagccatcatttccttcggatgtctatttgcgattttcattgctaaggaggaagccaccaagttagggacggtcatcggcattgatcttggaacaacctattcatgtgtcggtgtttacaagaatggccatgtcgaaatcatagccaacgaccaaggtaaccgtatcaccccatcgtgggttgctttcaccgacagtgagagactcattggggaggctgccaagaatcaggcaactgtcaacccaaaaaggaccatctttgatgtcaagag

SEQ ID NO: 252292 - DNA, 424 bp, Glycine max
gctggttcaactgaggtgatggctttgaatttgccttctcccgcccaagtgaagcccttatttttctcttcaaataactccacaaaacttccaggtagcttttctttgaagagaaaagatagtgacacaacagtagagagacgagtttattgctctgccgctgctcaatcaccaccaccagcatggccaggaacagctattcccgagccttctgatttcaagacatgggatgggcaaaaacctatttctgtcttaggatctacgggttcaattggaactcagacactgagtatagtggctgagttcccagaaagatttaaagttgtgagccttgctgctggctctaatattactcttcttgctgaccagattaaaacatttaagcctgaagttgttggtcttagaaatgagtctttaattgatg

SEQ ID NO: 252293 - DNA, 417 bp, Glycine max
tgtacatcgtataacgaattacagacctaaaacttgggaatggcacgtctcttttgatattcacaaacattatctcgtacttgccagcttcttttggtaggacaattgctcaagcatttaatgatgcaaactacattggacttggtaccattgttttgtccttctttttgttggtagttggtattgtttatgttcaggaagcagagagaaaaatcccgcttaactatgcttctagattcaccagcagaagcactggtcttgaaaagtccgcttacctaccctttaaggtaaatagttctggagtaatgcctatcatattttctacatcatcattagctcttcctggtactttagcgcgcttcactggtttaactgcactaaagaaggctgcagtggcgttaaatccaggaggttctt

SEQ ID NO: 252294 - DNA, 414 bp, Glycine max
ttcaccggagcttgggttgagactgctcctttcacccgttacttccgaccttcttctccgcacagcatgctgttctatagggcttgcgcttcccgtatattccacgtttaaagctattgagaacaatgacccatatgagcaacaaaggtgcctattgtattgggcagcttatggatcttttagtgctgcagaaatgtttgctgaaaaattactttcctggattccactctattatcacatgaagtttgcatttcttgtttggctacagcttcccactcttgatggtgcaagacaactgtattctagtcacttgcgtccattcctgttgaagcatcaagctagaatggatctgattgttgaatttgtgtatggtgcaatgaagtaaattattagtgcatacccaccagattagag

SEQ ID NO: 252295 - DNA, 388 bp, Glycine max
cttagtcccaattttctagggttttattcattttccgatggcttctgcagatgttgagtaccgttgctttgtcggtgggctcgcttgggccactgacgaccatgccctcgagagagccttctctcagtacggcgaaatcgttgaaacgaagattatcaacgatcgtgagactggcagatccaggggttttggatttgtgaccttcgcctcggagcagtccatgaaagatgcgatcggagcgatgaatggacagaacttggacggccgtaacatcactgtcaatgaagctcagtcccgcggtggcggcggcggcggcggatgaggaggatacaatcgtggtggcggtggatatggtggtcgtagtggcggtggcggtggtggataccgt

SEQ ID NO: 252296 - DNA, 374 bp, Glycine max
gccgtttgctccccaaaaaggaaagaagcagattctgtcctgtgaaatcaacaagaaaagatgtcaggtgaagaggtagctgttgcagttgaggtacctgctacttcaattccaggtgagccaatggacatcatgactgctctacagcttgtgctgagaaaatctctggcctatggtggtcttgcacgaggtcttcatgaaggtgccaaggtgatcgagaagcatgctgcacagctctgtgttctagcagaagattgtgaccaacctgattatgtgaaactggtgaaggctctttgtgcagagcacaatgttagtcttttgacagttccaagtgcaaagacccttggagaatgggctggtttgtgtaagattga

SEQ ID NO: 252297 - DNA, 421 bp, Glycine max
accctttctgcccctcagtcactctccctcacctataccttcagccacactggaccaccacaaacttctcctcctcagcatcatatcttctgagttctgagtgttccattccaattccaagttacaacttggctgtgtctatggatcgcgctcagcttctgttgctgggtgtacccctcttcctcttctgctctgacctcttctcccttttcactcatcatccaccgccgccaccccaccaccaccaccaccaccaccatcctcacccgccgcaccaccaccaccacccaccggaccaccatcaccacccaccccaccaccaccatcatcacccgccccaccaccatcaccagccggtgacaatagatttccctcccgagaaacccaccaacaatattgcaacttcgggtctcggcaacac

SEQ ID NO: 252298 - DNA, 368 bp, Glycine max
  unsure (1)..(368): unsure at all n locations
agacagaggttagagaaagagagggagtaagtgggtaaaggaaagagaactaaagaaacaaacctaacacaacacaaatccttgaaacgacgacggaaatggccgtttcgagctcgcacatgcgtttcacctttgagtgccgctccgatcccgatttctcgccccccccgccgtccttcgacaacctccgccgccgcaacttccgctcctccgcaggatccggcgcggcgtttcacggcatctcctncctcatcctccgcttccctcccaacttccagcgccagctaagcaccaaggcgcgccgcaactgcagcaacatcggcgtcgcgcaaatcgtcgccgcttcgtggtcgaacaacagcgacaac

SEQ ID NO: 252299 - DNA, 413 bp, Glycine max
catgcattaagccacgtgaccagcattgtctcatttgctgcagtcgctggctctttgactcataccattaaagctcttgagccattcttcactgctgctgcttcacagttcatacttggccaatcaatgcccatcactctgtggctgtcactggctcctgttgttattggtgtgtccatggcatctttgaccgagctctcattcaactgggtcagcttcataagtgctatgatttcaaacatttccttcacgtaccgaatcatctattcaaagaaagccatgactgatatggacagtaccaatatctatgcctacatttccatcattgctctaattgtgtgtataccacctgtcgtaattttggaagggcccacactgttgaagcacggctttcatgatgcttttgctaaagt

SEQ ID NO: 252300 - DNA, 404 bp, Glycine max
gctcttttaaagttctggcccgaaccctttctttcgtcacaatcacaacttggtaaaggtactccgtgcaagaaagatgaagctcgagttcgcaaatgtgctacttctgtgccttgtccttagctcttctttcttggaaatctcaatggctggttctcctttctgtgactcaaagtgcgcgcagaggtgtgccaaagctggggttcaggacagatgcttgaggttttgcgggatctgctgcgagaagtgcaactgtgtcccatctgggacttacggaaacaaggacgagtgcccttgctacagggacatgaagaactccaagggcaaggacaaatgcccttgaagaatatctaatttcatcatcacactccattccaataaactaccttgtattgtatcttcag

SEQ ID NO: 252301 - DNA, 408 bp, Glycine max
gggtaagtaaattgggaatggtggtggtagtgccaggtgtctgtctgaggagaaaatagaataaaaagctatgaaattttggcacaaggtctgattgtagaattgaagaagatgactggggggggtatcactatgcaatcgacgccgggaagctcaggatacttggatttgtatccagagcggaagatgtcctttttcaaaaatccttacattctcggactggctgctgtcgccggcatcggtggtctcctcttcggctacgacactggtgtgatatcaggggctcttttatacattaaggatgattttgaagaagttagaaacagcaatcttctccaggaaacaatagtcagcatggctattgccggggcaatcgtgggagcaacattgggtggttggattaatgat

SEQ ID NO: 252302 - DNA, 424 bp, Glycine max
gaaggcgaagaagaagctcagaggcttcatcgctgagaagagatgcgctcctctaatgctccgtttggcatggcactctgctggaacttacgacgtgagctcgaagaccggtggtcccttcggaaccataaagcacccctccgaactcgctcacggcgctaacaacggtcttgacatcgctgttaggcttttggagccactcaaagcggagtttcctattttgagctacgccgatttctaccagttggctggcgttgttgccgttgaggtcaccggtggacctgaagttcccttccatcctggaagagaggacaaacctgagccaccaccagagggtcgcttgcccgatgccactaagggttctgaccatttgagagatgtgtttggcaaagctatggggcttagtgaccgagatatcgttgct

SEQ ID NO: 252303 - DNA, 498 bp, Glycine max
  unsure (1)..(498): unsure at all n locations
gggtaagttattgatagtgagaggacgatatatgtaaagaccagctatgacgtcgcatgcacgcgtacgtaagctcggattcgctcgagggaaagtcctcgcggcaagttgtgcgtaagaggtcggcagccgtgcgcatggcgtgaagagtttgagcggangttggaggtgtggcgagggtgaggcaccccaatgtggtggctctgagagcttattactatgccaaggaagagaagctgctcgtcaccgatttcgtccgcaacgggaacttgcacaccgcattgcatggtggacctttcaattcattttcaccattaccatgggcagcaaggttaaaaattgctcaaggagcaacaagaggcttaacatacatacacgagttcagtggtagaaaatatgtccattgcaaccttaaattaacaaaaattcttcttgaccaggatcatagtccttacatatncngtttcggacttacccgtctggcatangtagctcaaa

SEQ ID NO: 252304 - DNA, 399 bp, Glycine max
gtccaccaggttggggattggcaggcctcctggatgtgcctttggaagggtctgtggccctgggttctccattcacttttgccactacattagagcaggaatacaggagtgatatctttggggagagaggcattttacttggtgctgttcatggggttgtggagtccctgtctaggagatacactgaaaatggaatgaacgaagatctggcctataagaatactgatgagtctataacaggaattatatctaaaaccatctcaactaacggcatgctagctgtatacaatgctttatctgaagatgagaaaagggaatgtgagaaggcttatagtgcttctttatatccttgcatggaaattctgtatgagtgctacgaggatgtagccagtggtagtg

SEQ ID NO: 252305 - DNA, 521 bp, Glycine max
  unsure (1)..(521): unsure at all n locations
gggggnggggggagagagtttgaatgttagaggcggggagattgtcagaacagctatgacgtcgcatgcacccgtacgtaagctcggaattcggttcaagctcaagccgaactctttggtgaccacaccaccattaacaatggctgcctaactacaagctgcagctaccttcatgcaacccaccaaggttggcatagcctctcgcaacctcaaatctacacaatgcatttctaaggcttttggcttggaacctgctgcagctaaactcacttgctcccttcagcctgatctcaaagaatttgctcaaaaatgtgtcgacgctaccaaaattgcangattcgcccttgccacctctgctctcgttgtttctggagcaagtgcagaacgtgttccaaaaaggctaaccttcgacgaaatccagagcaagacatacttggaagtgaagggaactggaactgctaaccagtgcccaaccattgaatgtggagtggactcattcgccttcaagccagggaaataca

SEQ ID NO: 252306 - DNA, 372 bp, Glycine max
ccgctcgagcggctcgagcggctcgagattctcttcactttgaagttacatagtttttcattgttttacttaatctacaatggctgcttcaacaatgactctctcttcatcatcattggctggccaagctatcaagcttgccccctccacccctgagcttggtgttggaagggttagcatgaggaaaacagcctccaagactgtttcctcaggaagcccatggtacggcccagaccgtgtcaagtacttgggcccattctctggtgagcccccatcctacctcactggtgaattcccaggtgactatggttgggacactgctgggctttctgctgacccagagacttttgccaaaaaccgtgaactcgaagt

SEQ ID NO: 252307 - DNA, 524 bp, Glycine max
gtaagagagatctgtgcatgacatgtgggagaatagtatgcactctataagagctatgacgtcgcatgcacgcgtacgtaagctcgggctcgagacttgccatctcagcattagcgtcaatgtgcatgagcttcaacctgggaacagcattcaagggtctctcttaatcttcttcctcatcgttctccgctacaagtgctagataatctctgcgtgcggatgctacctagatggcgtcgctgacccggcgctgtccgctgaccatagataacgcccacaagaagggctctggcagcaccaagaacggacgctactcgcacggcctgcgtctagtagtcaacatatactgagaccatgtcgacaagccctgctacatcatcgttcgacagcgcggaacctagtttcatgcacgatacaatgttgtgctttgcaaagattataccattctctccttgattgatggagttgttaaatttgagaaatatcgacctgacaggaaaaaggtgagtgtttaccctaaagaa

SEQ ID NO: 252308 - DNA, 415 bp, Glycine max
atgatcttgaattcattcgtgacgtgtgcaatactcaaattggaaaatattacggtccgtgtgttcctattatgtaactatgtatcattaatcttgttctaatggtcggggctctagtaccttggaaaatcatacagttacctcacggcgagttagctgcacccacacatgatataaatactaccgttgctttagctctacttacatcaattgcatatttctatgcaggtctttcaaaaaaaggattagcttattttaataaatacatccaaccaaccccaatccttttaccgattaacatcttagaagatttcacaaaacccttatctcttagttatcgacttttcggaaatatattaactgatgaattagtagttagtgttcttggttctttaatacctttagtagttcctat

SEQ ID NO: 252309 - DNA, 287 bp, Glycine max
ctcttaatccccaatttctaagggtttaatcaatttcccaagggcttctgcaaatgtggagtaccgttgctttgtcggtgggctcgcttgggccactgacgaccatgccctcgagagagccttctctcagtacggcgaaatcgttgaaacgaagattatcaacgatcgtgagactggcagatccaggggttttggatttgtgaccttcgcctcggagcagtccatgaaagatgcgatcggagcgatgaatggacagaacttggacggccgtaacatcactgtcaatg

SEQ ID NO: 252310 - DNA, 415 bp, Glycine max
  unsure (1)..(415): unsure at all n locations
tgcacgccgtacgtaagctcggatttcggttcaggctcagccgcatagttaaggaaccgaaactccacataggaatcacttggtttctttgctctcccccaacccaatggctacttccattaacagcagtgctctggggtggaaacattcatccttcttcgtacaatccaataatggcttcaacgttgcttcgcctcctttcaaaccaaagccgncacgctcctccaacttttctctctattgctctgccgcctcctcttcttctgatccactgttggttaaggctgctaggggagatcctgttagtcgtcctccagcatggatgatgcgccaggcaggaaggtacatggctgtttacaaaaatcttgctgagaaatatccatccttccgagagaggtcagagacaactgaactc

SEQ ID NO: 252311 - DNA, 537 bp, Glycine max
  unsure (1)..(537): unsure at all n locations
ngagntggtnnnnnnggggtnaggggattgttagaagggggagggtatatgtatagactagctatgacgtcgcatgcacgcctgtacgtaagncctcggaattcgggctcgagcctttgggattaaggtccataattaatggcccttgtttacttaatgaaaatgtgatttcaatccttctgcttgtaccataaccaattgatgatgccattcttctattctatgccacaatcatgagtttggttcactttggatacatagtgtgcaataattctaatgggtggttttgttgaacacattaattcacgtgaccatcatgaaactcaaggttgatcttgagtgtgagacatgctacaagaaagttaagaaacttctcggcaagtaccctcagaaattcgggaccagaagttcgatgagaaggaacacattgtgttcatcacagtggtgtgttgcagcccagagaagttaagagacaagctttgctacaaaggtggatgctcaatcaaaagcttgagatactgaaaccgnccaacccaa

SEQ ID NO: 252312 - DNA, 315 bp, Glycine max
tggcccgattccacttccggactttcggctcgattgtccaaccacctttggggcttaaattcggtccagtccttccccaacacgctctccatcctccccatcgcgtacgtgtggtacgtcacgaaccaccccttcccaaccctagttccgtccggcaatacgtcgtcgtttaggcactccatcgtgtcaaccggcactggcgggtacaacctcatcggctgcgaaatcgccgcttgcagaatccagaaaaaccagctcagagcagacgacgtcgtatcacgcccctgcagaataaaacttatcacatcgtctcgc

SEQ ID NO: 252313 - DNA, 403 bp, Glycine max
atttttcaagtaacttaaggtttcaaacctaggaagttggaagtcatggcagcaacattgatggcagcaacaacaagttctggtactcttaaagcaactcctttccttggccaaggcaagggtgccaatgccaatgctcttagggatgttgtctccatgggaactgggaagtacaccatgggcaatgatttgtggtatggaccagacagagtgaaatacttgggacccttctcagctcagaccccttcatacttgaaaggagaattccctggggattatggatgggacactgctggcttatctgctgacccagaagcatttgccaagaacagggctcttgaggtgatccatgggcgatgggccatgcttggagcactaggatgcatcaccccagaagtgctag

SEQ ID NO: 252314 - DNA, 400 bp, Glycine max
  unsure (1)..(400): unsure at all n locations
gcatttcctcgtttttttcttcccttttctctttctgcggcgacgatctcagattccggccactcctctcgccggcgagcccttactcttccctcctccgtcgagccctctccgattcgaatcgttcccagcctcgcaccaccatgaatcccgaatacgattatttgttcaagcttttgctgattggagattctggtgtacgcaagtcatgtcttctcctgaggtttgctgatgattcataccttgacagctatatcagtaccattggagtggactntaaaatccgcactgtggagcaggatgggaagactattaaacttcaaatttgggacactgcgggtcaggaacgtttccgaacaatcactagcagctattatcgtggggctcatggcattattgt

SEQ ID NO: 252315 - DNA, 401 bp, Glycine max
tcaaagtgaagacggtttttggtggtggaccacattgggttaatacttgttgggacgagcagttggcatgggatttgctagctaatcagcttctttttgaggccttaaattactctcatttctgcaagtatgcttgctctgaagaaaatcctgagctcctggacatgggaggtccagttgaaggtggatttagtgtcgcatttgatccccttgatggctccagcattgtggacacaaatttcacagtaggcaccatctttgtgtgtggcctggagataagttgactgggatcaccggaagagatcaagttgctgcagccatgggggttttgggtcctagaacaacatatgtgcttgctctaaaagacttccctggcacccatgaatttcttctgcttgatg

SEQ ID NO: 252316 - DNA, 508 bp, Glycine max
  unsure (1)..(508): unsure at all n locations
gagttnaagggtagagtttgnttatgtggatgtgggggtgatggtaacactgctatgacgtcgcatgcacgcgtacgtaagctcggatttcggctcgggagcaactccttttgctttattgtggtattcttcattttaagcaccatcatcttcctattttgttttccaatattgctgtttgttgtggtaaatttttctgtagttcatcatcatgctagaaggcaaggctgtgattggtgagactgacatgcttcagaccatgcagcaagatgctatggatttagcatccaaagcactcgatttctttgatgtcactgaagccattaagattgctcgatttataaagaaggaatttgataggatgcatggacctggtttgcagtgtattgtaagcactgattttggttcgtttgtgactcacttgtgtggcttgttcatctatttctgcttaggcaacttggcaattttgctattcagaggctcggctgctccagaggcacatgaaaat

SEQ ID NO: 252317 - DNA, 364 bp, Glycine max
  unsure (1)..(364): unsure at all n locations
attacacaagaactctccaaggatcctccttcccacgaaattcatttggtgggaaaatccaagaagagggtggaatttcaagccagggaagatggattatttcaatgcaccaggaagaaaccatctctttgttccggggccggttaacatcccggaccagatcattcgggccatgaacagaaacaatgaggactaccgttctccagcaattccagctatgaccaaaacactgcttgaggatgtcaagaagattttcaagaccataactggaatcccatttctcatccctacaactggtactggtgcttgngagagtgctctcacaaacacactgtctcctggggatcgaattgtatctttcctg

SEQ ID NO: 252318 - DNA, 340 bp, Glycine max
atcacttcatcatggcttcctcgtgtgcttcctctgccattgcagctgttgccatctccacaccaagttcccagaagaatggatcactcttgggaagcacaaaagcttcttttcttagtgggaggaaactgaaggtgaacaactttacagcaccagttggagcacgatccagcactacagtttgcgcagttgctgagcctgataggcctctgtggttcccaggcagcacccctcctccatggctagatggcagtttgccaggagattttggctttgatcctctaagtcttgcatctgatcctgagagcctgagatggaatgtccaagcaaaacttgtgca

SEQ ID NO: 252319 - DNA, 351 bp, Glycine max
cagaaaacgaagattcctgcggaatccgcgtcaccggcatggaattctcctacgacgtgcagcaaccgccgctcttcctcgacttcaacctcaacgtctctcccggatcccgctgccttctcgtcggtgccaatggatccggaaagacgactttgctgaagattctggcggggaagcacatggttggaggaagagacgttgggcgcgtcttgagtggttccggttttcacgacactcagctcgtttgtagcggagatctcgcttatttgggcggatcttggagccaaaaacgtggctccgctggagaaattccgcttcaaggagacttctctgctgaacatatgatctttg

SEQ ID NO: 252320 - DNA, 405 bp, Glycine max
  unsure (1)..(405): unsure at all n locations
agaattcgttgcatcagacttttcagatgctgcagaacgaatgccaggtttctctgaacactgttgacagcattgaaacctttgttgctgatattaatagtggaagatgggatgcgatattgcctcaagtttctcaactcaagcttcccaggaataagttggaggatttgtatgagcagattgtattagaaatgattgaacttcgagaactggatactgcacgtgctattttaaggcaaacgcaagtgatgggtgtaatgaaacaagagcagcctgaaagatatttgcgtcttgatcatctcctagttagaacttattttgatccaaatgaggcttatcaagactcaacanaagagaagcgacgtgcacaaatagcccaagctattgcagcagaagttactgtag

SEQ ID NO: 252321 - DNA, 317 bp, Glycine max
cttctcaatcgcaaattttctcccccaaatcgtagatctacggctaaattggtgtagtgtggtaagatgggaggaggatttagagtgcttcacttagttaggccatttctctcgcttcttcctgaagttcaaactgctgacaggaaagtgccatttagagagaaggtcatatacactgtgatctctcttttcattttcctggtttgtagtcagctccctctatatgggatacactcaacaacaggtgctgatccattctattgcatgcgtgttattctcgcttcaaaccgtggaactgtcttggaacttggaatcac

SEQ ID NO: 252322 - DNA, 364 bp, Glycine max
ctttaatgagcagactactgtagtgcttgatggaaagttgatatccatggaaatcagatcaaaaatagctgctaaggtaagacaaatgaagaaaggcctaggaaaagttcctggattagctgtaatcttaatgggccaaagaagggattctcaaacttacgttcgcaacaagataatggcctgtgaagaagttggaatcaagtctttggtgactgaattacccactgattgtgcagtaacagatgttcaaaatgccatcatgagatttaacaaagatccatccattcatggtattcttgtgcaacttcctctaccgcaacatctagatgaagaaaaagttttggatgctgtatgtctaggaaaa

SEQ ID NO: 252323 - DNA, 361 bp, Glycine max
atccaatcgcaacggtgtcgcttggctctcacacccataccctatctgccgaccgtggtccactatcgtatccgccctgacaggaggaaagtccacgaccgtatctaagagctccgatccctaacttgctgtgaatgacaagggagccgccacctaggcttggaaacctgccggcacagagaacgctatgattgaccgtgtcaagccataaaggccgacaagagctggcatcagaatcatggaacactgcaggaaggcattacacaatgaacatcctgaagacaaagcagagtttcctgctggcaaatctgctgaagcaacatgtaagaccatgtatgatgctgaagaagcaccttatgtg

SEQ ID NO: 252324 - DNA, 402 bp, Glycine max
ctcgagccgctcgagccgtgcacacgaataccatcatcacgagcatgataatgggaaagaggagtaatgcgggaaaacgatgatgtggccaggttgaggaaggtggtgagggaggtctgggagttgcttggggcgtttaactcgggggatgacattgcgttcatgaggcctttggatctgcaagggtttgtgaagaagaacatggaaactcaccacaaggtggatgccatgatggagaacgtgttgagggagcatgacgaggctagggctaatgaagatgctgactctgataagaagaaagatctttgtgatatttggctgaacctcaatgaatctgatgatgctgacaataagctcactatacagagtgccaaagcctatgctcttgacatgttcatcgac

SEQ ID NO: 252325 - DNA, 406 bp, Glycine max
tggctgcagtgttctgggctttggctttggtaagcctctgtggccagctaccttccaatgcccaagcacctgcaactgcgccggcaaactcaccacctacaaccccagctgcaacatcaccatcttccggcacgccactggcggtaacactaccaccaacagtggtggcatcccctcccaccacaagtacaccaccaactacatcccaaccacctgcaattgtagctcccaaacccgcacctgtgacaacaccagctccaaaagttgcacctgcttcaaacccaaaagccccaacaacccaaacttcaaaaccacaaccaccaaaaagtatcaccagttgtaactcccacatcgccacccccgatacctccaccacccgtttctacgccaccgccattgccaccac

SEQ ID NO: 252326 - DNA, 401 bp, Glycine max
  unsure (1)..(401): unsure at all n locations
ctcgagccgttcgaagcaactattctcagagatccacaccagcttttagggcttcttcaagcttgcgcttgggacatgtgacatctgatgatggattgcctatggtagctgaaagttactcttctagacatccaaggccattgagcaccattggctggaggaatggtgatagaaatgggaggtcaagaatttctagtgaaagatatcgatcattgactgaggagagtggtctccatgatcgattttcctctgagggtttcgtggttgttgagcgtgcatcagtgtatggttccaggaatatgcttgatcagcaccgagacatgaggatggatgtagataacatgagttatgaggaactacttgcactnggtgagaggattggctatgtgaacacaggagtc

SEQ ID NO: 252327 - DNA, 359 bp, Glycine max
cgccgcgattttccggccatgtgcctcgaaatcgaggtttcggaccggctcttccggtaaactcaaccgggaagtgactatgaggccaatggggtgccctccttctgcctctttcaaggttgaagccaagaagggagagtggttacctggcttggcctccccaacttacctcaatggcactcttcctggtgacaatggatttgaccctctgggactagctgaggacccagagaacttgaggtggtacgttcaagccgagcttgtgaatggacgttgggccatgttgggtgttgcaggaatgctacttcctgaggttttcaccaagattggaatcatcaatgcccctcaatggtatgatg

SEQ ID NO: 252328 - DNA, 414 bp, Glycine max
gtgatttcagtgagtgatcggtgttcacttgatctcatcataatcgtcagcgtcaattgaagaagatgccgatcagaaacatcgccgtcggaaggcctgaagaggcgactcaccccgacacgttgaaggcggctttggctgagttcatctcaaccttcatcttcgtgttcgccggctcaggctccggcatcgcctacaacaagctcaccgacaacggcgctgccacccctgccggcctcatctccgcctccatcgcccatgcattcgccctcttcgtcgccgtctccgtcggcgccaacatctccggcggccacgtcaaccccgccgtcaccttcggcgccttcgtcggcggcaacatcaccttcctccgcggcatcgtctacgtcatcgcccagctcctcggctccatcgtcg

SEQ ID NO: 252329 - DNA, 386 bp, Glycine max
gtgatttcagtgagtgatcggtgttcacttgatctgatcagagatcgtcagcgtcaattgaagaagatgccgatcagaaacatcgccgtcggaaggcctgaagaggcgactcaccccgacacgttgaaggcggctttggctgagttcatctcaaccttcatcttcgtgttcgccggctcaggctccggcatcgcctacaacaagctcaccgacaacggcgctgccacccctgccggcctcatctccgccttcatcgcccatgcattcgccctcttcgtcgccgtctccgtcggcgccaacatctccggcggccacgtcaaccccgccgtcaccttcagcgccttcgtcggcggcaacatcaccttcctccgcggcatcgtctacgt

SEQ ID NO: 252330 - DNA, 160 bp, Glycine max
ctcgagccgattcggctcgagaaaagaaatcagatataatagttaataaggtaaccttgtcaattttggattttctttgaggtttcgttctggctttatgtttaggatcttgctataatacattatggttttcgaatcttattagcctttcaatttttta

SEQ ID NO: 252331 - DNA, 402 bp, Glycine max
  unsure (1)..(402): unsure at all n locations
gaccatcttagaaattaacctacctattcaacccttatattgggaccgcgttaacctaccaccacttttttatttccccttggctggacatggtgaaaccagcctggctagtgttgatcttcttcctttcttctgtaaaatgattcattttcctctaactacagcattgatacttgcaagatgtacaaaggggtaaggaagagaaaatggggcaaatgggtgtccgaaattcggcttnccaacagccgtgagcgcatatggttggggtcctatgacacccaagtgaaggcggccagagcatttgatgtcgcactttattgcctacgtgggcaaagtgcgaagtttaactttctgacacacctcgacacttggaaattaatatggggttaccatgtgacatac

SEQ ID NO: 252332 - DNA, 509 bp, Glycine max
  unsure (1)..(509): unsure at all n locations
aggtnaagagtgatctgcttagaggagacgatgagtaaatcttcagaacagctatgacgtcgcatgcacgcgtacgtaagctcggaattcggcttgaggcataagggcatttaccggaaagggggttattaacatcctggggctttctgtgtggatctggttgtgatgggggatatccctagtatgcgtggcaatacttagcccaccacggtgttgtcactgaagagtgcgacccatattttgatcaaattggctgttctcatcctggttgtgagccagcttaccggactccaaagtgtgtcaaaaagtgcttaagttggaaccaagtttggaagaagtcaaaacactatagtgtcaatgcatacagagtgagctcttatccccatgatatcatgacggaagtttacaagaattggccagttgaaagtgcatgcactggttatgaagaatttgctcactacaaatcaggagtttacaaacacattacaggttatgaaactagtggtcat

SEQ ID NO: 252333 - DNA, 402 bp, Glycine max
aatagcatcagtgatatgaggcacgacctaaagatgaaaacaccataataagaataagaataataattataatgataataataatattaggaccaacatgtaaaatgaaaaccttggtttataaattatcatcacaataaaaacatagtacaaattggtttaggccaaacctgaacagtttttcctaaatagtctccttttctttctttgtcaatgacagactgtcatgaaaaacaggaaaagaaaagtaaactttagtgaaaaattttgtaatgatcttcaaaatctgcgtcataactctaaagtctaaacataaacaacttgcctggtaaatcttcccagtagttatgttgttatcacgggtcaacttgatgtctataaaacgctcatagtttccaagat

SEQ ID NO: 252334 - DNA, 413 bp, Glycine max
  unsure (1)..(413): unsure at all n locations
cggaaaggctcttggtttatccatacatgtccaatggcagtgttgcttcccgtctcaagggtaagccagtgctggactggggcacaaggaagcacattgctttaggagcaggaagaggactactttaccttcatgagcagtgtgatccaaagataatccatagggatgtgaaagctgccaacatattgcttgatgactattatgaagctgtagttggagattttgggttggcaaagcttttggatcaccaagattcacatgtcacaactgcagtgaggggcactgtggngcatattgccccagagtacttatccacaggacaatcctctgagaagactgatgtttttggatttggcattctcctccttgaattgatcacaggccaaagggctctagagtttggaaaatcagct

SEQ ID NO: 252335 - DNA, 526 bp, Glycine max
  unsure (1)..(526): unsure at all n locations
gtaagagtgatctnctttgtgtataggtgagtgaataggaacactatagaagagctatgacgtcgcatgcacgcgtacgtaagctcggaattcggctcgagccttgggctgaacttggaattgacattgttattgagggaaccggagtgtttgtggatggccctggggctggtaaacacatccaagcaggtgccaagaaagttattatcactgctcctgcaaagggtgctgatattccaacttatgttgttggtgtaaatgaaggggactacactcatcagatctctaacattataagcaacgcttcctgcaccacaaactgtcttgctccctttgtgaagatcctggatgaagagtttggaattgtgaagggaaccatgacaaccacacattcctacacaggagaccagaggcttttggatgcttcacaccgtgacttgagaagagccagtgctgcagcactgaacattgtcccaaccagcacttgaacttgccaaggttgggtctctagtgttgccacacctta

SEQ ID NO: 252336 - DNA, 413 bp, Glycine max
agtttttcaactcttccatagcctttgtcttctgtcttcgggtaaaacagtttattttggacctgcttctgctgcaaaggagttttttgcttcaaatggttttccttgtcctcctctcatgaatccatctgatcatttactgaaaactataaacaaggattttgatcaggatattgaagcgggtttagcaggaactgaaaacatactcacagaagaagtaatccacatccttgtgaactcatacaaatcatctgaaaggaatcaagaagttcaaaatgaagtagctttactatctaagaaggacaccagttcattggatatgaagaaagggaatgcatgcttccttaatcaatgcttagttctaaccaaaggatcgttcattaacatgtatcgtgatctaggctattattggt

SEQ ID NO: 252337 - DNA, 180 bp, Glycine max
tacttcaatggctactgaaaaggttaccaaacctcaatcacttcctccataccctgagatgatagtgaaagcacttgaagcactgaatgagccaaatggatcgaacaagtcagcattatcaaagtccatagaaaccacctacggtgagttgccagacgcaaccgttttggggagtcacct

SEQ ID NO: 252338 - DNA, 339 bp, Glycine max
  unsure (1)..(339): unsure at all n locations
gttaaatcatttcaattgaacaaggttaacctcaatccatggggaatattccaccaaacccaatgtccggaaccttcaacgtaccgtaagggagccccaagagataacacangaatgatcacatctttaccagtatctacctgttcaagtcctttgcgacagtatgggccagcacacaagagctgtttcctttctcctgctcacccaacttacactntgatggggcaaaataccctcccctcatatccagtgagatcaaatgccacattcactcttgacccttttcatgaaactgctttctacaaagcccacacacccggtggatccccaagaagactc

SEQ ID NO: 252339 - DNA, 390 bp, Glycine max
ggaaaaatgagcaacttgctgagattacttctttctgcaaataatttcacagggataataccagatacatatggaaatctaaagaatctcactcagtttaggatagatgggagcagtttatctgggaaaatacccagttttattgggaactggaccaaacttgatagattggatttgcagggcacatccttggacggcccaattccttctgtcatatcttacttgacaaatttgacagaattgaggatatctgatttgaagggaccaactatgacatttcctaatctgaagaatttgaaaattttgctaagactggaattgaagaattgcttaataactggtcccattccaaactacattggagaaataaaaaggttgaaaaccatgttc

SEQ ID NO: 252340 - DNA, 411 bp, Glycine max
gtcttaatttgttctcttcagccatggcgatggtgcaagatgaacgatgcgttcagaaaagctactggattgaacatacgacggacttgtccgtagagtcaatgatgctcgattccaacgcctctgatctcgacaaggaggagagacccgaagttttgtccctactaccaccatatgaaggaaaatcagttgtagaacttggagcaggtattggaagattcacagttgaattggccaagaaagctggccagttacttgctgtggatttcattgagagtgctataaagaagaatgaaagcattaatggacaccactagaatgtcaagttcatgtgtgctgatgtcacttttccaaacttgattaattctgaaggatcggttgatctgatatcttcaaattggttactcatgt

SEQ ID NO: 252341 - DNA, 410 bp, Glycine max
ctttctcccctacacaaaacatggctttgcccaatcagcaaaccgtcgattaccccagcttcaagcttgtcatcgtcggcgacggtggcacaggaaagacaaccttcgtgaagaggcatctcactggtgaattcgagaagaaatatgaaccgaccattggtgtggaggttcatccgttggattttttcacgaactgtggaaagattcgcttctattgttgggatactgctgggcaagagaagtttggtggcctcagagatggatattatatccatgggcaatgtgcgattatcatgtttgatgttactgcccgtctaacatacaaaaatgtccctacctggcaccgtgatctttgccgggtctgtgaaaacatcccaattgttctttgcggtaacaagggtgatgtcaag

SEQ ID NO: 252342 - DNA, 322 bp, Glycine max
caaatcttttctaagtgtagtagaggagaggaaccgcgccaaccctctcttcttcttcttcttcttcaatccttttataacctttatagtttcattcttaatcgttgggaaaaatgttcatcgagaattttaaggtagagagtcctaatgtgaagtacaccgagactgagattcagtccgtgtacaactacgaaaccaccgaacttgttcacgagaacaggaatggcacctatcagtggattgtcaaacccaaatccgtcaactaccaatttaaaaccaacacccatgttccaaaatttggggtgatgctcgtgggtttggg

SEQ ID NO: 252343 - DNA, 372 bp, Glycine max
  unsure (1)..(372): unsure at all n locations
acattccttggttgaaacgcaggattcatctgttattgcacagttggggatacctgacatgcgcttaccgctcctttatacattatcttggccagaaagaatctattgctctgaagtaacttggcctcgtcttgatcttagcaagtattgttctctaacattttatgcaccggatgacaagaagtttccatcggtgaatctttgctatgctgcgggacgtgctggaggcaccatgacaggagttcttagtgcagcaaatgagaaagctgtagaaatgtttgttgaagaaaagattagttatctggatatattcaaagttgtggaactaacttgtcaggaacatcanaaggaattagtagcatcttcgtcact

SEQ ID NO: 252344 - DNA, 261 bp, Glycine max
  unsure (1)..(261): unsure at all n locations
ctagcaacggtggaagagtgcaatgcatgcacgtgtggccaccaagtgcaagaagaagtttgagactctntcctacctgccagaccttgatgatgcacaattggcaaaggaagtagaataccttcttaggaagggatggattccttgcttggaattcgagttggagcacggtttcgtgtaccgtgagcacaacaggtcaccaggatactacgatggacgctactggaccatgtggaagctgcctatgtttggttgcactga

SEQ ID NO: 252345 - DNA, 375 bp, Glycine max
ctcacatcacacacactctcatagctgtagcggcgacactaagatcggggaaagaatggcgaaaacgacgtcgttgctgctctttacactgctcctcttcggaaccctagctctcatccaggcgaagaaatcgaaggaggatttgaaggatgtgacccacaaggtttactttgatgttgagattaatggaaaagaagcaggtcgtattgtaatgggtcttaatggaaaggctgttccaaaaactgcagaaaacttccaagcactttgcccaggggaaaagggaactggtaaaggtgaaaagcctttccttaccaaaggtacttaatccaataaaataatcctaagcttaatcctcaagggaggtgattttacaac

SEQ ID NO: 252346 - DNA, 388 bp, Glycine max
tgaaaattctctttagagagatagagagaggaagaaagaatggcagcttgcactgtctactcaacacaatctctgagcacaaattgctccatctcaaccccatcaaagacgcaactcagttttttccaccaaaagcaggtagttttctggaggaacagcaagaagggcagctgcagcagcagaagaagctatgtgataacatgtgcagcaagtgactcacagacagtggtgattggcctggctgcagactcagggtgtgggaagagcaccttcatgaggaggctgaccagtgtgtttggaagaacagcagagccaccaaagggtggcaaccctgacttcaacactctcatcagtgacaccaccactggcatatgcttggatgattacc

SEQ ID NO: 252347 - DNA, 406 bp, Glycine max
gcgagttgttgtaaagctagccttgttgcagccatggccacccacgcggctctagcttctacaaggatccccactaacaccaagttcccatccaaggcttcacactctttcccaacccaatgcgcctcaaagagacttgaggtgacagaattctctgggctaagatccacttcatgtgtgacatatgctaacgatgctagagaatcttccttttttgatcttgtagcttcccaactcactcccaagaccaatggatcatcaactcctgtgaggggagagacagtggccaagttgaaggtggcaatcaatggtttcggacgcattggtagaaacttccttcgctgctggcacggccgaaaagactcaccccttgaggtcgttgttgtcaacgacagtggtggtgtca

SEQ ID NO: 252348 - DNA, 349 bp, Glycine max
gtctgaatttcatgttaaacaggatttcgtgactagtaaagatggtaccaagatcccaatgttcattgttgccaaaaaggatattactttggatggttcacacccatgtttgttatatggatatggtggttttaacatcaatattacgccatatttcagtgtcagtcgcattgtactcacaagacatttaggtgttgttttcagcatagcaaatattcgtggtggtggagaatatggggaggaatggcataaagcaggctcccttgcaagaaagcagaattgctttgatgacttcatttctgctgctgaataccttgtatctactggttacactcaacccaaaaaggta

SEQ ID NO: 252349 - DNA, 401 bp, Glycine max
gaaacggatccgctgttcaattcgggccgtggatctgccctgacagaaaaaggaacggtggagatggaggctagcatcatggatggtccaaaacgacgatgcggcgccgtttcgggtcttaccaccgttaagaacccgatctcgcttgctcgtttggttatggacaaatccccgcattcctacctcgccttctccggcgccgaagaatttgctaggcaacagggtgtggaggttgtggacaacgagtactttatcacacctgacaacgttggcatgctcaagctggcaaaggaagcatacacaatcctgtttgattaccgaatcccaacatcggggtcgaagacgtgcgaatccggtgtgaagagtccactgcaaatgaatggactcccattaagcgtgta

SEQ ID NO: 252350 - DNA, 413 bp, Glycine max
cgaatatcctttgctcatggaatgggacttatttctgatgaactatacaggtcactgcaaaaaaattgtaaaggagagtacataaatgtagacaccaaaaatgtattatgttctagaaatatcgagacattcaatgaggttacatcaggacttagtatggtcaatattttggacccgtcatgtgattggcttgatactgaaacatcttggaggagatctctacttaagaaatatccgagaaagaatttccttaatactcatctcaaattgccatccttaaactgtcggagttatgcatacttcctctgcggttattgggccaatgatgatagtgttcgcagtgcactgcatatccgtaagggaactataggaaaatggcgtcgctgtaccttcaatatacctaacaaggagga

SEQ ID NO: 252351 - DNA, 306 bp, Glycine max
ttctgattcgtcacgtcagacaaaggaaggggttagggtgtgacctgagatcaaaatgttgcggaggcttctctcttctcacctcaaaaccctagcctcctccgccgacgccgtcaccgtcactccccgatctgcttccgcctacgccagattcgccggtctctctcgctcctgcctctacttctcaacccaatccgaggatgctactgcgatcaaaaagaacgttgaggacataatgccaatcgctactggccacgagcgcgaggagcttcatgctgagctcgaaggaaggaatattcctgaaat

SEQ ID NO: 252352 - DNA, 413 bp, Glycine max
aaaagaaaatcctcacccattttcttcgtagccaaacactctgaaattctcagttatgtcgtggcaagcgtatgtggatgatcacctactgtgtgaaatcgaaggtaaccacctcactcacgccgctatcatcggccaagacggaagcgtttgggctcagagcaccaacttccctcagttcaaacctgaggaaataactgccatcaataatgactttaatgagcctggatcacttgctccaactggattgtatatcggtggcaccaaatacatggtcatccagggtgagcctggtgctgtcattcgagggaagaagggtcctggtggtgttactgtgaagaagaccggtgcggccctgatcattggcatttatgatgaaccaatgactccaggtcaatgcaacatggtagttg

SEQ ID NO: 252353 - DNA, 509 bp, Glycine max
  unsure (1)..(509): unsure at all n locations
gggggaagagagatttgnttatgaaagatggggggggaggtgattaacactagctatgacgtcgcatgcacgcgtacgtaagcctcgaattcggcttgagctccaaccgcttgaaccggttaatggaaggaaattccaagcggaaaggaaaagaaaatttaaaatgaaggggaaggaccaggatttgtcgttgggagcgaccaagttcccgaaagcagccgattgggacggcggcgcatagccaagactactgcaaggactaccaggagccggcgccggcgccactggttgacccgactgagtttacgtcatggtcctttacagagcagggatagcagagtttgtggccacttttctgtttctatacatcactgtcttaaccgtcatgggagtcgccggggctaagtctaagtgcaataccggtgggattcaaggaatcgcttgggccctcggtggcatgatctttcgcctcgtttactgcaacgnntgcaatttaggggacacatana

SEQ ID NO: 252354 - DNA, 234 bp, Glycine max
ctcgagccgctctagccgctcagtgaaagagaatccgaggcgaagagaggagaaaaattaagatggacgggaaggagcacgatgtgtcgctgggagcgaacaagttcccggagagacagccgattgggacggcggcgcagagccaagacgacggcaaggactaccaggagccggcgccggcgccactggttgacccgacggagtttacgtcatggtccttttacaagagcagga

SEQ ID NO: 252355 - DNA, 381 bp, Glycine max
ctcgagccgataaaattcataatgctgcaacagaaaatgttggaaataggcctagtgcaactactcaggaaattccttcagttgtggatattgatggccaagcttcttcaatcttttagacaatgtattttgaaactcttaaaattggaagggtctgattggttgtttaaacagaatgatggggctgatgaagatctgattgaccgtgttgcttgcagggagaaatttgtttatgaaattgaaaccacagagatgaaccgcaatcatatgggagaaactcgatatctttcttctgatgggaaaggcttgtcttcaatgaagaataatggagcaaaatggtctaatttttctggaacctcaatccctaactgtggggaaaga

SEQ ID NO: 252356 - DNA, 333 bp, Glycine max
gcaagagtgggaagtcaagctggaatattcagccctcgctttaggcattgttgggtatatttgcttagccttattgttctttccggtcacgagagggtcttcaattttgcggttcattggcttaaacttagaaggaagcatcaagtatcatatctggctaggacacattgcaatgaccctcttcacagcccatggtctaggttatattattttttggggaaagacacatcaaatcttggagatattcaaatggaacaaaattggcatctcaaatgtggcttgagccggttctttggtaactggaataaaaccgtgggctggtaccctaacctt

SEQ ID NO: 252357 - DNA, 422 bp, Glycine max
  unsure (1)..(422): unsure at all n locations
ttctttttttgttctcatctccacaccatgtcctaatcttgctgcaccatcgttctccatttttggctttacaaaaccactgtgtctgattaagggttctttaatatttccaatatttcttgtagtgaaaaagttgttagctaaaagaagaccaagtttttggtgttgtagaaggaagagaagaattaacatgaaaattcagtgtgacgtgtgtgagagagctccagcaacagtgatttgttgcgcggatgaggctgctttgtgtgccaaatgtgacgttgaagttcatgctgcanacaagcttgcaagcaagcaccaaagacttcttcttcaatgtctatcaagcaagctttccacatgtgacatttgccaagacaagccaacattcatattttgtgttgaagacagagcactcttctgtc

SEQ ID NO: 252358 - DNA, 413 bp, Glycine max
agactcgagagctgttcttggcaggagggatacagagagaaagaacagtccggtggtggcacagcgtttgtcaactgatcataatgtagctgatgaggaggtgagaaaagaagttgaagctctccatcccgatgactcacacattgtggtttatagccgtggagtttggaggattaagggcattatacaggtgtcaagatctattggtgatgtgtatttgaagaaaccagatttctaccgtgacctgggttttcagcagtttggaaatcctattcctttgaagcgttctgtaatgacagctgaaccatcaatcattattagggagcttgagtcagaggatttattcttgatatttgcatcagatggcctctgggaacaattaagtgatgaggctgcggttcagatcgttttca

SEQ ID NO: 252359 - DNA, 380 bp, Glycine max
  unsure (1)..(380): unsure at all n locations
ctgaaagcgaacaagtagagaacaaagaaagagagagagaattgaatgtgaatggggaatcagaagcagaagtggacgcaggacgaagaatatgctctcatcgccagcgttgaaaagcactgtccctgaaagtggatgaacattctcaaggatccccaattcgcccctttactaacttcccgttccaacatctacctcaaggataaatggcgcaatttgagcgtcagcaacggtgctcacggctccaaagaaaaatctagggttcccaagcttaaagccctacatgctcctgctgctcctaccgncactcctcagaacgccgctcctgctctgcataacgcagcatctgatgtcactgcatcagatgcttctcagaatga

SEQ ID NO: 252360 - DNA, 407 bp, Glycine max
gctttgcttccaagagtaagtacatgtttggccgtgttagcatgaagatcaagctcatacccggagactctgctggcactgtcactgcattttatatgaactctgacaccgacactgtacgtgatgagctggattttgagttcttggggaaccgtagtggtcagccttacacagttcagacaaacatctatgctcacggaaaaggagatagagaacaaagggtcaacctctggtttgacccttctgcggattttcacacttatactattatgtggaatcatcatcatattgtattctacgttgatgattttcccattagagtgtacaagaacagtgaggggaaagggaatcccatacccaacaatgcaaccaaatgggagtgtattcgacattgtgggaagctgata

SEQ ID NO: 252361 - DNA, 464 bp, Glycine max
actatataagagctatgacgcccccgtcctaagcttggaattcggcttgaggaggaggaaaattaccggcccattattccatgacctaatccacaggtttaggattgcattttcaacagtggttggtttaactggaatttacacaaaaaagcttagctggcatgggcatggagaactgtttacaagtgaccacagtaggcacagccacaccccaatgcctttctgcattctttcaatcttcaagggataagcttgccttcccaactcacagaggtttcaagaaatccttgcaaaactcaacactgtcatgcccttgtctctactcaaccggtgctgcctatagaaagtcccgttttgtttgcaatgctcgtgaagcagtaaatgaagttaaagtggtgactgactcaagctggaataaccttgtgattgcaagtgagacccctgtgctggtagagttttgggca

SEQ ID NO: 252362 - DNA, 384 bp, Glycine max
  unsure (1)..(384): unsure at all n locations
gaagcactatgacgtccatgcacgcgtcgtaagctcggattcggctcggctcccaacagtgtccaaatccaacgcacactttttcccccatggggttgaacaatggcgtccccgccactggcaccggcctcatcgttagcttcggcgagatgctcatcgacttcgtccccaccgtctccggcgtgtccctggccgaggcccctggcttcctcaaggcccncggcggcgccccagccaacgtcgccatcgccgtgtcgcgactcggcggcaaagccgccttcgtcggcaaactcggggacgacgagttcggccacatgctcgccggaatccttaaggagaacggtgtccgcgccgacggcattaacttcgaccagggtgcacgca

SEQ ID NO: 252363 - DNA, 394 bp, Glycine max
catttagctacccttactttctatggcttccaacagactcctggccaccattttggtgcttactctcctctcttactcaacattcactcatgccaattgcccaccacccactccatctccaaagcccacaccaccaactccaataccaacaccactcacaccaaagcccacacgacccactccaaagcccacacaaccaactcctaaagccaaacgactcacaccaaatcctacaccacctactccaaagcctagttgtcctcctccttctcctccttcaccaccatcaaacaaagcctcatgccccaaggacacattaaagctaggtgcttgtgctgatctcttaggacttgttaacattattgttggaactcctccttcgagccagtgttgt

SEQ ID NO: 252364 - DNA, 366 bp, Glycine max
  unsure (1)..(366): unsure at all n locations
ataaacaccactacactccttttttagggttagggtattgcactgcggctgctacttcggctccatcttctccgatctcctcaaactctatcagcgcagaaccaagcctctatcaccatggggaagacacatggaatgggagctgcccgcaagctgaagtctcaccgtaggagacaaaggtgggctgacaagtcatacaaaaagtctcatctgggaaatgaatggaagaagccttttgctggttcatcccatgccaagggtattgntctttgaaagattggtattgaggctaagcagcccaactctggcattcgaaaatgtgccagggttcaactcatcaaaaatgggatgaagattgctgcattt

SEQ ID NO: 252365 - DNA, 400 bp, Glycine max
  unsure (1)..(400): unsure at all n locations
ctggattggctcctttcagaggtttcttgcaggaaagattagctctgaaagaaggaggagctgaactcggcccctcagttttattctttggatgcaggaaccgtcaaatggactacatctatgaagacgagttgagtcacttcgttaatactggcgcacttgatgagctcattcttgccttctctcgagagggacccaccaaggagtatgtacaacataaaatgatggagaaggcttcagaaatttggagcatgatatcacaaggagcttacatttatgtgtgtggtgatgccaaaggcatggccagngatgtacaacggngccctgcacacaattttgcaagagcagggttctctcgatagttccaaggctgaaagcatggtaaagaatctacaaacta

SEQ ID NO: 252366 - DNA, 394 bp, Glycine max
ctggcaactgtgctagcagcagatagtatcccagcacttttgtcttagttgttgttgctgaatggggcgacaagtcatttttctccacaattgcccttgcagcagcttcttctccccttggagtcatagctggagcactggctggtcatggtgttgcaactttgctagctgtacttgggggttctttacttgggacgtatttgtcagagaaggttattgcctacatcggaggtgttctctatctcgtctttgccgcaataaccttatttgaaattgtgcaataggggttaaaagaaatgcagtataatctccgtgcaaagggttcaataacgtaatgacctataaagttgcatgattctgcactctccatgtatggcggctacagaatgaaaac

SEQ ID NO: 252367 - DNA, 327 bp, Glycine max
  unsure (1)..(327): unsure at all n locations
tcggggaattccaattccacattttcaagaaataaggaggcaaaaatgttcatatatgaattggaattatttgttttcttattaggcctatcctgaagccaaaggaaatgagatcggaattcctcggggaattccaattccacattttcaagaaataaggaggcaaaaatgttcatatatgaattggaattatttgttttcttattaggcctatcctgaagccaaaggaaatgagatcggaattcctcggggaattccaattccacattttcaagaaataaggaggcaaaaatgttcatatatganatggaattatttgntttctta

SEQ ID NO: 252368 - DNA, 426 bp, Glycine max
ttgatcataactcttcctttcctttatcgtttcatttagaagacatggacaccgtgacactgtcactcctttctctccctccggttccggtccgtacagtgtccgcgtctgcatcaacctcgtcctctgtccctctcactcactcctactcctgctcggccaggcagaggctctcctctcacagaacaagactcagtttccggaatcattcctctgcggttccaaaacttacggtgacatgcggtgcggctgtgacggagatcaacgagacccaattcaaagacacggtgctgaaggctaaccgtccggttcttggtgagttcgtcgctacttggtgcggtccttgccgtctcatctcttccgccatggaatccctcgctaaggaatatgaagacagattaacggttgtaaagaatgatcatgatg

SEQ ID NO: 252369 - DNA, 428 bp, Glycine max
  unsure (1)..(428): unsure at all n locations
ctcagccgcattcnccaccactctctctctcctcactccggcacggttcctcctcctccaccgccacctccgcctccccctccccctcgcgcgtgcagctcacctcctgcctccgcgcccgcccgctgcgccgcctgngcttcgccgcggcggacccgctgctcgcggcgagtgtagcggcgcgcgtggcggctgtgagaggaggaggaaagggcgcgaggggggtggtgtcgatggcgaagaagagcgtgggggacctgagcgcggcggacctgaaagggaagaaggtcttcgtcagggccgacctcaacgtcccgctcgacgacaaccagaacatcaccgacgacaccagaatccgagccggcattcccaccatcaaacatctcatccaaaacggcgccaaagtcattctctccagccacttgggg

SEQ ID NO: 252370 - DNA, 535 bp, Glycine max
  unsure (1)..(535): unsure at all n locations
ggttaggaggtgtctgctcatggacgcctacagctattncnannagcatataagagctatgacgtcgcatgcacgcgtactgtgagagctcggctcgagttttttttttttaaaaagaacactgatcatcgagcatttagatggatgaaacatttagagcttcaaataatagcagttttatattgtcttccctaccaacaggttatacataaaaacggaaacaaaccagaatcagttttatagaacagtaatagaaactagatctagccggaacaaaaccatcccctcaaaagagacaatcatcaaccggcaacaggaagttgcagcttgttatccatcttcttgtctaaagccaccgcaatacaccacacccaagttcaaattcacatatcatgttgggcaaactcctnctnctnctcttcctcttcatactcatcctcatcagcagtggcatcctccttacgtttaccactcttcttcttcaccccctaaagaagcctacaagtacccttcaaccccaccaccaggttcaccc

SEQ ID NO: 252371 - DNA, 324 bp, Glycine max
atcatggcagctgcttccccaatggcaagccaactcaagtccaccttcactaggactcttgtagctcccaagggcctctctgcctcttcaccacttcacctcgtgccttctagaaggcaatttagcttcactgttaaggccatccaatcagagaagccaacctatcaagtgattcagccaatcaacggtgacccattcattggaagcctggaaaccccagttacatccagccctttgatcgcatggtacttgtccaacctggccgcatacagaaccgcagtgagcccactactaaaaaggaatcgaaggtggcctggccccacg

SEQ ID NO: 252372 - DNA, 262 bp, Glycine max
ctcgagccgaatcggctcgagatttgcaaaaaaaaaaaaaagaaaaaaaaaaaaaataaaaaaaaaaaaaaaaaaaaaaaaaataaaaaaaaataaaaaaaaaaaaataataaataaaaaaaaaaaaaaaaaataaaattaaaaaaaaaaaaaataaaacgtagcttgacctttagaatatataggccactatattattattgggccctgataactgctggcaaaatcattttactttacatgctcaaatataaaatattag

SEQ ID NO: 252373 - DNA, 414 bp, Glycine max
ggcaagagtggtggcactccaacagaaccaactatctttctgtaccttagcttcctctctttctgacttcagtggaaccagacttcaaactcaacttcagttcaagagaaagcaatgccatccaaaagggtctttctacgtctccgcatcgagcaccaagaaaatcctaataatgggaggcaccaggtttattggtgtgtttttgtctaggctccttgtcaaagagggtcaccaggtgactttattcacaagaggtaaagcgcctgtcactcaacagttgccaggtgaatcagacagtgattatgctgatttttcttccaagatcttgcatttgaaaggagaccggaaggacttcgactttggaaaatccaatctctcagcagagggatttgatgttgttatgacataaatgga

SEQ ID NO: 252374 - DNA, 356 bp, Glycine max
gtgagagtacatggcctgctcgtaagcatgtggttgcatgtgctgctgtgtgcaagtcctggagagaaatgtgcaaagaaattgttaccagtcctgagttctgtgggaagattactttccctgtctccctgaagcagcctggttcaagggatggaaccatccagtgtttcatcaagagagacaaatctaatctgacataccacctattcctttgtcttagtcctgcattgctagttgaaaatggaaagtttcttctttctgcaaaacggaccagaagaactacatgcacagagtatattatatcaatggatgcagataacatatcaagatctaatagcacttacattggaaaactg

SEQ ID NO: 252375 - DNA, 417 bp, Glycine max
agcacactgtcagagcccttcagagaaccgtgcctgctgcagttcctgctgtcgttttcttgtctggtggccagagtgaggaggaggcatccgtcaacctcaacgccattaaccaggtcaatgggaagaagccatggtcactctctttctcctttggaagggcacttcaacagagcacccttaaggcatggggcggaaaagaagagaatgtgaagaaggctcaggaagcccttttggtaagagccaaggctaactcagaggcaactctgggaacctacaagggtaactcacagcttgctgatggtgcctcagagagcctccatgtttcgaactacagctactgatcaatcgaagttggtgttgtttgaagagactagtgcgagtaggaaatcgtattatgggtacaacaaccgaatt

SEQ ID NO: 252376 - DNA, 416 bp, Glycine max
cgcaagcaaaaagaaagaatcccaggcgaggagaaagatggaggggaaggagcaggatgtgtcgttgggagcgaacaagttccccgagagacagccaattgggacggcggcgcagagccaagacgacggcaaggactaccaggagccggcgccggcgccgctggttgacccgacggagtttacgtcatggtcgttttacagagcaaggatagcagagtttgtggccacttttctggttctctacatcactgtcttaaccgttatgggagtcgccggggctaagtctaagtgtagtaccgttgggattcaaggaatcgcttgggccttccgtggcatgatcttcggcctcggttactgcaccggttgcatcttcaggggacacataaacccggcggtgacatttgggctggtttttg

SEQ ID NO: 252377 - DNA, 429 bp, Glycine max
agaataccccctcttttgctgcatcagaggagttgtaaattaagagcatggctgcacaagctcttgtatcatcatcttctcttaccttctcagcggaggctgcaagacaaagtcttggaccaagatcactccaatctccatttggcttctccagaaaagcctcctttcttgttaaggcagctgctaccccccctgtcaagcaaggatcagacaggcctttgtggtttgcatcaaagcaaagtctttcttacttggatggcagccttccgggtgactatggatttgaccctctgggactttcagaccctgaaggaacaagagggttcattgagccgaaatggctagcatatggtgagataatcaatggtcgttatgcaatgttgggtgcagttggtgcaatagcacctgaaattctaggcaaggctggtc

SEQ ID NO: 252378 - DNA, 422 bp, Glycine max
gttccatcagtaccttatagttgaagagttgggcattaaggagcttctgccagcatatttgaaacccaatctccaatctagtgatttgatcacaggggtctgttttgcttcaggtggctcaggctacgaccctttgacatcaatattagagtcatcgatgccattaactgggcaagtggatttgttgaaagaatacatagggaaactaaaagggctggttggagaggacagagcaaagtttatcttagccaacagtctattcattgtagtagcaggcagcagtgacatttctaatacctatcgcactagatccctcctctatgatcttcctgcttacactgatcttttggtcaactcagcttctaatttcttgacggaaataaatgagctgggtgcacggaggattgcagtattcagtgcac

SEQ ID NO: 252379 - DNA, 425 bp, Glycine max
ctgatgttatttcagaacttcacaaactctatcactccccagaattagttgctcttcatgagattcttgaagaatgtggaattggagttgacaattctggttctgagggtgcggttaacgttgggcagcatagggtcttgatattcgctcaacataaggctttcctggatataattgaaagagatttgtttcacacacacatgaaaagtgtcacatatttgcggttggatggatcagttgagccagaaaagcgttttgaaattgtcaaagctttcaattcaaaccctaacattgatgtcttgctgcttacaacacatgtcggtgggcttggtttgaacctgacatctgcagatacccttgtttttgtggagcatgactggaatccgatgcgagaccatcaggctatggatagagcacacaggtta

SEQ ID NO: 252380 - DNA, 429 bp, Glycine max
  unsure (1)..(429): unsure at all n locations
gattaattatagtttaggcagcaaattatggaatcccatgatgaggagcatgctgccaaactacttagagctcaaacccacatatggaatcacatatttagcttcataaactccatgtcccttaaatgtgtggttgacttaggcataccagatatcatacacaactatggccaacccatgccactctcaaacctcattgcttcactaccaatccacccatccaaaacttgcttcgtccattgcttgatgcgaatcatgatccattctggcttcttctctcaacaaaaccatgacttgnagaatgagctagaagccaagtatgtgctaaccgatgcatctgtactattgcttaagaaccatccgctgagtgtgacacctttcttgcatgccatgcttgatccagttttgacaaatccatggaatcaattt

SEQ ID NO: 252381 - DNA, 332 bp, Glycine max
caacattccacctagctccccaatcacatcttcaccacaccgtaaaccttcttaatttctctcttcattttctcctctattgtcataatcatggggaccttccctcgcttcgacccaatcaccacccaagaccggtccaaccagaccgtggcctccgaccttgacggcaccctcctcgtctcccggagcgccttcccctactacctcctcgttgccctcgaagccggcagcgtcctccgcgccctcctcctcctaacctccgccccctttgtctactttacctacctcgtcctctccgaaaccctcgccatcaagacgttaatcttcataac

SEQ ID NO: 252382 - DNA, 420 bp, Glycine max
gtgttaaaactagggaattatttttgaagaacaaggctgcagagcttgatagagaaatgggcctgattcgcacacaagaagaaactggtcgacatgttaggatgttgactcatgagattagaagcactcttgatagacacacaatattgaaaacgactcttgttgaactgggtagaactttggcactagaggaatgtgcgttatggatgccaacacgaactggtttggagcttcaactctcttacacattgcgacagcagaacccagttggatacacagtacccattcatcttcctgttatcaatcaagtatttagtagcaacagggcagtaaaaatttcacctaattgtccagttgctagattacgaccttatgctggaaaatacatgcctggggcagtagtagctgttcgagttcctc

SEQ ID NO: 252383 - DNA, 429 bp, Glycine max
atcttcttcttctccttttgtactctcattcacattcttataggctaattaacatacactctcttccaaagttgagtactttgccaaaaaaaaaaaaaaaagttttccctttgagaaagaaaacccaaagacagtcttttgatcattttgagcagttgcattccttgttttcttccattttgggtcccctcaaaagtagtttcaaaagggttcctcttcctccacagatatcatggcagatcataccccgggttcaagaaccgtttctgttgaagcttcttcacaagaaagaaggaaacttccaaactttctcctatccgtgagacttaagtatgtgaagcttggttaccactacttgatctccaatgctatgtaccttttactcataccccttcttggggtagcttctgctcatctttcaacaatctc

SEQ ID NO: 252384 - DNA, 397 bp, Glycine max
cgcgtatggggttgtaattaatccacataatggatgcaacagctgctacggcatcagtgctccatgtgccatcatcggacgctgaaaaagggaaacccaaaggagtgggaagctgatgcatatcggtgaacctaccgatgactcaaagagaagcagggattgtgcgaacactcagcaggtcaaggcatacgcaaaagcccattcgaagaccatggatatagatgagaatgactctgcatagaaggcgacgacggctatcttacacgccccgaggacttttataaatcagctacctgactggagcatgcttctggccatcatcaccacacgcgttactcgcaggcgaaaagcattggatgatgctgagattggaagacgctccgccccgacatgctca

SEQ ID NO: 252385 - DNA, 397 bp, Glycine max
atctgtttcccgccatatatccaataagctttaaccatgtctgcctttgttggaaagtacgcagatgagcttatcaagaatgccaagtacatagccacacctgggaagggcatcttggcagcagatgagagcactggcaccattgggaagcgcctatcgagcattaacgttgagaacattgaggccaaccgccaagctcttcgcgagcttctcttcaccgctccagatgccctccaatacctctctggtgtcatcctctttgaggaaactctttaccagaaaacctccgatgggaagccttttgttgaggtccttcaagagaacaatgtcatcccaggcatcaaagtggacaagggtgttgttgagttggctggcacaaatggtgaaaccaccactc

SEQ ID NO: 252386 - DNA, 422 bp, Glycine max
ttgcaatcaaattagttcattctctttgcgcagttccctacgtctcctttcaagatgcagatcttcgacaagaccctcaccggaaagaccatcacccttgaggtggaaagctctgacaccatcgacaacgtcaaggccaagatccaggacaaggaaggaattcccccggatcagcaacgtctcatcttcgccggaaagcagctcgaggacggccgtaccctcgccgactacaacatccagaaggagtcaacccttcaccttgtccttcgtctccgtggtggcatgcagatcttcgtcaagactctcactggcaaaaccataaccctagaggtcgaaagctctgacaccattgacaacgtcaaagccaagatccatgacaaggagggaatcccaccagaccagcaacgtctcatcttcgccgg

SEQ ID NO: 252387 - DNA, 391 bp, Glycine max
accaaaccctcttgaccttgtgatatctctctcttttaatggctaggatcaaaccaaaaaatggtcttagaagagagtgtagtgcatgatgtgaggctatcctcagttgggccgggccgggccaccgggtcggacgtattccacaacccgggtggcttggacttggccatgaagcttcactaccttagagtggtgtacttctttgatagtgaggctgcacaagacctaaccatcatgaaaattaaggatggcatgttcactttgttcaaccattacttcatcacctgtggccggttccggcgatcggattccggtcgacccttaatcaagtgcaatgattgtggagcaaggttcattgaggccaagtgcaacaaaaccctagatgagtggc

SEQ ID NO: 252388 - DNA, 407 bp, Glycine max
  unsure (1)..(407): unsure at all n locations
gagagagagatagagagagatctatctatctatcaagatggcgttgttggttgagaaaacaagcagtggaagggagtacaaggtgaaggacatgacgcaagccgatttcggaagattggaaatcgagctggcggaggttgaaatgcccggcctcatgtcctcccgcaccgagttcggcccctctcaacccttcaagggcgctaggatcaccggctccctccacatgaccatccaaaccgccgtcctcatcgagaccctcaccgccctcggcgccgaggtccgctggtgctcctgcaacatcttctccacccaggaccatgccgccgccgncatcgcccgcgacagcgccttcgtcttcgcctggaagggtgagaccctccaggaatactggtggtgcaccgagcgcg

SEQ ID NO: 252389 - DNA, 388 bp, Glycine max
cccaactcaatttttctctcaaccggcccaatttagcataagcccagcatggccaccgcaacagcagcagccacctcgtccttcatggggacgcgcctcctggaggcccattccggggcggggcgggtgcaggcccggttcgggtttggcaagaagaaagccgccgccccgaagaaagtttccagggggtcgggctctagctccgataggcccctgtggtatccgggcgccaaggcgcccgagtacctggatgggagccttgtcggagactacgggttcgacccatttgggctagggaagcccgccgagtacctgcagttcgagttggactcgctggaccagaaccttgcgaagaacgtggctggggacatcattgggaccaggaccg

SEQ ID NO: 252390 - DNA, 422 bp, Glycine max
  unsure (1)..(422): unsure at all n locations
gtgcaattacgtagtgtgtgggagacaaagagagatggctaagtggtgtatgttggtgttggttcttgctctagctctggctgtggccacaagtgccagagatgcacccgaagatgttggtctcaaggaccagaagaacttcatcagctatgctggagttggtggctattcaggaattggaagcaatggactaccttttggaggtgccggaataggtggtggcaccaccgggataggtggattgggaagattcggaggtcccattggcggtggtactggtggcagtgttggaggtggcgttggcggtggtagcatacctcatnccaccccttgagtgaatgaacatgcatgcatgcatgcatatggaaatttctctttccgcttctttaatttggattatcttagtcgagctagcttttctt

SEQ ID NO: 252391 - DNA, 410 bp, Glycine max
ggcattatggctacattaaagaagtatgagtttgatgttcatgacaaggttccaatcaactggctcctcagtttaggcccctctctaggcattgtcagggtcaagggaattggcctcatacacaccgagctcgtatctgggatcccagctattttctcccactttgttaccaatctccctgccttccaccaagttgttatcttcctttgcattaaatcagtccaagtgccacatgttagacctgaagaaaggttcttggtgggaagagttggcccaaaggagtatagactttaccggtgcatagcgcggtatggctaccatgacattcacaaggatgacattgagtttgaaagggatcttatttgcagcatagctgaattcatcagatcagatgcatctgaatatggctt

SEQ ID NO: 252392 - DNA, 403 bp, Glycine max
  unsure (1)..(403): unsure at all n locations
atgcacacgtacgcaagctcggacattcggctcgaggcgttggccattgcaatcatgattgtggcttccaccaaacctctggtgccagtctgcaccagttcccgttcccccacacccaaagtccccattctccaaatttcactccccaaagccccaaccttgaaactgaaactcccgatttcaaagccccagatgctgtccctccttggagggatagcaccactggtcttggccagaccctccctcgcagaagaaattgagaaagcagcactctntgacttcaacctcacccttcccataataatggtggagtttctgctgctgatggttgccttggacaagatatggttcaccccgcttgggaaattcatggacgagagggacgcggcgatcagggagaaac

SEQ ID NO: 252393 - DNA, 417 bp, Glycine max
cgacagatccatctcctgctacgaccaaggcctccagatccagatccaagccctcggcgactccgatccccgcgtcggtgaaacttgccgatacttagcggaggcaaatgtgcaagcaatgcagtttgataaagcagaggatctgtgtaagaagacgttggagattcatcgcgcacatagtgaaccagcttcgcttgaggaagctgcagataggaggctgatggcactgatttgtgaggcaaagggagattatgaatcggcgttggagcatcttgtgcttgctagcatggccatgattgcaaatggtcaagataatgaggttgcatcaattgatgttagcattgggaacatttacatgtcgctttgtccgtttgacgaggcgattttctcataccagaaagcgcttacggtgtttaa

SEQ ID NO: 252394 - DNA, 395 bp, Glycine max
ggaaaatgttccacatttatatgaacttgaagggaatgaaacgttaggttcttatttgcaaattcaaccttgctctgataatgcccctgaagtttcaaaatgttcaattcagtggtatcgtgtatcatctgatggtgccaaaaaagaacttatctcaggagcaacaaaatcagtttatgcccctgaaccttttgatgttggacgcatattgcaagttgatattatttcagaaagcgagcatgtcacactttcaaccgctggtccaatagatccagctgctggtttgggaacctatgtagaggcactagtgcgcaaacatgacactgaattcaacgtggtagtaacacagatgaatggttcacatcatccaactgaatctattcatgtgcttcatg

SEQ ID NO: 252395 - DNA, 403 bp, Glycine max
aagtagttgagaactaagaaggagaagcaaatggcttcctgagtgatctcttccccagctgttaccactgtcaaccgtgccggtgccggcatggttgctccattcactggcctcaagtccatggctggcttccccaccaggaagaccaacaatgacattacctccattgctagcaacggtggaagagtgcaatgcatgcaggtgtggccaccagttggcaagaagaagtttgagactctttcctacctgccagaccttgatgatgcacaattggcaaaggaagtagaataccttcttaggaagggatggattccttgcttggaattcgagttggagcacgggttcgtgtaccgtgagcacaacaggtcaccaggatactacgatggacgctactggaccatgt

SEQ ID NO: 252396 - DNA, 406 bp, Glycine max
cctcttttagcgttcgaacaaaattagggttttctcaacccgagggtttaccttctcttcccctgttcgaaattaggcaaatcaaaacagaaacacgactacaaaaagaagaaaagaagaaaaagaatcaatcattcattgatcgctgaaacgatacgatgacagggaaggcgaagccgaagaagcacacggcgaaggagatcgcggcgaaggtggacgcggcgaccacgaaccgcggcggcgggaaggcgggtatgaaggaccgaaccgggttggagaagggcgggcacgcgaaatacgagtgccctcactgcaaggtgacggcgccggacgtgaaatcgatgcagatccaccacgacgcgcgtcaccccaagatccccttcgaggaagacaaagttgtcaatct

SEQ ID NO: 252397 - DNA, 413 bp, Glycine max
gctgtgttgcatattctggatcctatcatcttgtggctttgatgtctagagcattggaacatgattacatagggttggcagagaatccgtcaatggacggaagctctgacaaactgtcttctgaggatggtaaaacctcatcactgaacttgaaggagacagagctgaggcttggcctccctggttgcgagtctccagagagaaaatcaggttctgcactctgtctttttggcaaagagttgcagaacaataacaatgtttgctcagttgtaagccctttgaaggctggggccaagaggggcttctctgatgtcactgagggatctcaaggagctgctttgttctctccaagaggggccaatgttgggaaacctattattggtttagacaactcaaactaacacccaacaaca

SEQ ID NO: 252398 - DNA, 405 bp, Glycine max
gcagaaagcatgctcatcctagagttttaaaaatggcagcagcctccgccatggctctctcttccccatccttggctggcaaggccgtgaagctgggcccatcagcccccgaagtcgggagggtcagcatgaggaagaccgtcaccaagcaggccttcttcggaagcccatggtacggcccagaccgcgtcaagtacttgggcccattctctggcgagcccccgtcctacctcactggcgagttcccaggtgactacggctgggacactgctgggctttcggccgacccagaaaccttcgccagaaaccgtgagctcgaaatgatccactccaggtgggccatgctcggggccctgggctgcgtcttcccccgactattgtcccgcaacggggtcaaagttggag

SEQ ID NO: 252399 - DNA, 424 bp, Glycine max
gttagaagtagagaagaaaatgaaagtcattgttttcttcggtgctataataattctaggtgcagaatggcaatgcaatgggtcagagcatgagcatgagcatgagcatgagcatggccacagctaccaaattttccctctgcgaatgaaaaccggtcccggtggccactacattccggaggtatcgtgcaaaagttggaggcttggtgtggaagcacacaacgtcattgactggagaaccattcctcaagattgcgagggatatataggaaactacatgcttggccaccaatatagatcagactccaaaacagtttgccgtgaagcttatttttatgctaaaaccatcaacatcactgccaaaaccacatgggtgtttgatgtaaatgagactacgctctctaatctcccttactttgctgat

SEQ ID NO: 252400 - DNA, 305 bp, Glycine max
cccaaacccacagcacaatatgctatgctatgctctctaaggcgcattcgtcgtcacgctcctttccaccacactctccgctctatcttgccgattaaccgtttatcctgctcctgctcctacttagcctacgtcgccgccgccgacgacatggttgctcacgcgaaggacgaggcgtaccttatcgcggcgattccgaagcgcgtccgtctcttcgagaccatccatgcggagcagcgcacgcagcgactatcgctatcgccagatcctatcatggttactctgcccgacggcaacgtcaagga

SEQ ID NO: 252401 - DNA, 375 bp, Glycine max
  unsure (1)..(375): unsure at all n locations
gccgcgttgactcggttccgtttttcattctcgcggatctaatattaaggaatagcttaagggcacattacaatgaaggcattgattctggttgggggatttggaacaaggctgaggccactgacactcagtttccctaagcctcttgttgattttgctaacaagcctatgattttgcatcagatagaagcccttaaggccattggagtgactgaggtagtgctagccatcaattaccaaccagaggttatgttgaatttcttgaaggattttgaatcaaagctcggcatcaagatcacatgttctcaggaaactgaaccactgggaacagcangtccnctggctcttgctagggataagctgatagatgattct

SEQ ID NO: 252402 - DNA, 426 bp, Glycine max
ctcgagtttggctgcctaactctgatttccctggtcttgctatggctcgggcatttggagatttttgccttaaggactttggattgattgctgttccagatatctcatatcaccgtcttaccgagaaggatgaatttgtcgtgttagcaacagatgggatttgggatgttttatcaaatgaagaagttgtggacattgtagcacctgctccacggtctagtgctgctagagcactggttgagtcagctgttcaggcatggaagacaaaatttcctttttgtaaggttgatgattgtgctgccgtatgcctcttctttgattctgattcagatttcaagtcaacagataccaaagacaagttgataccggaggcatctattgaccaatctgagaagttatctttacttgtgaaaagggagttggaat

SEQ ID NO: 252403 - DNA, 403 bp, Glycine max
atttcctagatctcccaaacaaattgtagcataagtcccatggccaaagagactagtgttgtttatctatatcccagcaaatcacaagtttggggtgagaattttgatcataaaaaacttgtaataacaacactagctgctaatggaaagaaggaggagagtaatggagcacctaatgacacatatcctgcgtttcccgggtggtatgctgatgtttcctggccaggagaagcacacacatataaaatagaaaagattctattccacgggaaatcagaattccaagagcttcttgtatttgagtcttctagacaaggcaaggttgcaattcttgatgggcatatccagctgacagaaaacgatgaatttgcttaccaagagatgctcactcaccttgcactct

SEQ ID NO: 252404 - DNA, 383 bp, Glycine max
  unsure (1)..(383): unsure at all n locations
ttggtgaatttctgagcagtgagcagcatgttgtcattattccctaacttgttcctcttcctatcactgttaattggtctatgcaattgcagggtgcaaaccctaaacactaacccaactcacttcaacccacaggtcccacccctccgaaccctctcgtcctcgaagcgcttcgaggggtcctcggagttcgtcaagctgaaataccacatggggccggtgctttcatctccgatcaatatctacctcatctggtacggcaagtggccccaatcccagaagctcctcatcaaggacttcctcaactcaatctccgaccaccgcgccgncccctccccctccgtctccgactggtggcgcaccgtctccctctacaccgacca

SEQ ID NO: 252405 - DNA, 407 bp, Glycine max
cattattactatacacaccctctttctcctcctcctccttcgtcttcgtctccttctttctctttttcattctttctttcaacatgggtggcatcagcctcgaagaaataaaaaacgagaacgtcgatctggaacggattccaatagaggaagtgtttgagcagctgaaatgttcaagagcaggtctaacatcagaggaaggggccaatcggctccaagtctttggaccaaacaaattggaagagaaaaaagagagcaagtttttgaagttcttgggctttatgtggaaccccttgtcttgggtcatggaagctgctgccataatggccattgctttggcaaacggaggaggaaagccaccggattggcaggactttgtcggaattattgcactgctagtgatcaac

SEQ ID NO: 252406 - DNA, 366 bp, Glycine max
cgaaacaaaattgtttggagttcctccaaatgcaccgtagggtgcagcagctatggatacgtcatccaatctcggtggcaagactgacatagcccacgttctctctgccgttcagaagtatgagaagcatcatgttcgctatcgacgtcaagacgaagagagaaaagctcattataccgatatggttaataatatactatgatcttgctaccagcttttatgagtttggctggccggaatctttgcattttgcacccacatggaaaggagaatctcttcgagagagcatcatacgacatgaacacttgctagcttcacaactaggactgaatccagagcacaatgctttggatgttggatgtggaa

SEQ ID NO: 252407 - DNA, 253 bp, Glycine max
aagatgggttcccttttgcaagaagtatacatagagccaagggctcctgagtgttactgtttcagaaaattgattacttgaagccaaggtgcagtctacatttgtgaaggaaagaatggcaatgaagcgggaatatgaagaatttaaggtgaaaattgattctttggtggtaaaggttcagatgatacctgatgagggctgggtgatgcatgatgtgactctatgtccagggaacatcactattgggcatcca

SEQ ID NO: 252408 - DNA, 179 bp, Glycine max
aagcatactacaacaggtatggaggtggtgccaactctggtgctgatggctacaacaacggtactggtttgggtgctgcgattataggcaccttcgatcgtgtatacactgagttctctgacattgactctaagaggaacgctaggtataccaatgacattggactgatgctataatct

SEQ ID NO: 252409 - DNA, 383 bp, Glycine max
cgaaatttgatcgcagcgtcgagaagaatgggaagtttgggagcgattctgaaacatccagatgacttttaccctctgctgaagctgaaaatggcggcgaggaacgccgagaagcagatcccgccggagccgcactgggcgttctgctacacaatgctccacaaggtttctcgaagtttcgccctcgtcattcagcaactcggcatcgagcttcgcaacgccgtttgcatattttatttggttctgcgagctctcgacaccgttgaggatgatactagcatagaaacagatgtcaaggtgccaatactgatagcctttcaccgtcatatttatgatcgtgattggcacttttcatgtggcacaaaggagtacaaagttctaat

SEQ ID NO: 252410 - DNA, 414 bp, Glycine max
  unsure (1)..(414): unsure at all n locations
gcaacttgaagtaccttgaacttctcccttatgaagctgtggcagtgaacttcgccataagtctgcaccatgtgccagatgaaagtgtgaacagtcacaatcatcgtgaccaattgttgagattggcaaagcgattatctcctaaagtggtgactctggttgagcaggaatttaacaccaacaatgcgccattcttgcagcgctttgatgagacaatgaagtactacttggctgtttttgaatcgattgatactgttcttccaagggagcacaaagagaggattaatgtggagcagcattgtttggctcgcgaagttgtcaacttaatagcatgtgaaggagaagaaagagttgaacgccacgagcttctgaataaggtggaaaatgcgtntcacaaaagctggatttacacct

SEQ ID NO: 252411 - DNA, 506 bp, Glycine max
  unsure (1)..(506): unsure at all n locations
tatgactgtcgcatgcaccgcgttnacgtaagctctnggaattcggcttcgagcggattcgcttgtcttggatatttcgagtatggagccacggttgtcgtggtgaccgtgagtcacaacgaggtcaccagtgatacctacgatggacgcttactggaccatgtcggaagctgcactatgttatggttgcacctgatgcattctcaaggtgttgaagagagccttcaaagaggcttaagactggcatactcccaacgtgcttcattccgtatcatcnggattcgacaacggttcgccaagtgcagtgcatcagcttcatcgtctacaagcccccaggcttctaagtgtgaaaaatttgcaaagcattagtagccgncaccccactttgtttgtttgtacttaaactacattcccatttgtatttgctttctgagatttcatcatcctgtatttttggattctggaatcggactttaatggacattaatggatgagaactaatgaat

SEQ ID NO: 252412 - DNA, 402 bp, Glycine max
ccaactactttgactcctttaccataccattacaataattatcaaacctaaccagtaaaaatggtgaccgtggaggaaatccgcaacgctcagcgttcccatggacccgccaccatcttggccttcggcaccgccacgccgtccaactgcgtctcccaagccgattaccctgactactacttccgcattaccaacagcgaacacatgactgatctcaaagaaaagttcaagcgcatgtgtgaaaagtccatgataaagaagcgatacatgcacctgacggaggagtttctgaaagagaacccgaacatgtgcgagtacatggcgccatcgctggacgtgagacaagacgtagtggtgatggaggtgccgaagctgggaaaacaagccgcatcgaatgcgatt

SEQ ID NO: 252413 - DNA, 410 bp, Glycine max
gctgttcaattcgggccgtggatctgccctgacagaaaaaggaacggtggagatggaggctagcatcatggatggtccaaaacgacgatgcggcgccgtttcgggtcttaccaccgttaagaacccgatctcgcttgctcgtttggttatggacaaatccccgcattcctacctcgccttctccggcgccgaagaatttgctaggcaacagggtgtggaggttgtggacaacgagtactttatcacacctgacaacgttggcatgctcaagctggcaaaggaagcaaacacaatcctgtttgattaccgaatcccaacatcggggtacgagacgtgcggatccggtgtggagagtccactgcaaatgaatggactcccaataagcgtgtacgcgcccgaaaccgttgggt

SEQ ID NO: 252414 - DNA, 413 bp, Glycine max
ttgaacactgtctgggctcagcatttgagtgaggaattgaaacgtaggttctacaagaactggtgcaagtccaagaagaaggccttcaccaagtactctaagcagtatgaaactgaggagggaaagaaaaacattgaggcgcagctggagaaactgaagaagtatgctactgtggttcgtgttttggctcacactcagatcaggaaaatgaaagggttgaagcagaagaaagcccatatcatggaaattcaggttaatggtggtagtattgcacaaaaggtggactttgcatacagtttctttgagaaacaggttcctattgatgcagtgttccagaaggatgagatgattgacatcattggtgtgaccaagggtaaaggttatgagggtgttgtcactcgttggggtgttac

SEQ ID NO: 252415 - DNA, 431 bp, Glycine max
  unsure (1)..(431): unsure at all n locations
ttccttttcttcttctccttcatattttctctctcaccattctcttcttcttctccctttcttagattctccctcttttctctctgccctccgccatgactgaggataaggagatgtcttcctctgtcaccaatggcgatgattccctcactggtcacatcatatctacaactattggaggcaaaaatggggaacccaaacagactattagttacatggcagaacgggttgtaggaactggatcatttggaattgttttccaggcaaaatgcttggaaactggggaagcagtggctattaaaaaggttttacaggacagaagatacaagaatcgcgaactacagttaatgcgtgttttggatcatccaaatgtgatctctttgaagcattgnttcttttcaactacaagtacagatgagccttttcttaaa

SEQ ID NO: 252416 - DNA, 404 bp, Glycine max
tgcttgaaatgcttaaggacaaaatcaaggaggaggcattgaggacatacctctttaccttctcttcatcttatgaatccttgagcctggatcagctcacaaaattttttgatctccctgtttcttgcactcatagcattgtcagtaggatgatgatcaatgaggagcttcatgcaagctgggaccagccaactgggtgcattcttttccaagatgttgaacactctaggctgcaggccttggcattccagttgacagagaaattatctatccttgcagagagtaatgaaagagcaacagaggcaaggataggtggtggtggattggatctgcctctaaggcgcagagatggccaggactatgccgctgccgctgctggtagtggaacagcctcgtcaggtggt

SEQ ID NO: 252417 - DNA, 378 bp, Glycine max
  unsure (1)..(378): unsure at all n locations
gcaaaaagaaagaatcccaggcgaggagaaagatggaggggaaggagcaggatgtgtcgttgggagcgaacaagttccccgagagacagccaattgggacggcggcgcagagccaagacgacggcaaggactaccaggagccggcgccggcgccgctggttgacccgacggagtttacgtcatggtcgttttacagagcagggatagcagagtttgtggccacttttctgtttctctacatcactgtcttaaccgttatgggagtcgccggggctaagtctaagtgtagtaccgttgggattcaaggaatcgcttgggccttcggtggcatgatcnttcgcctcgtttactgcaccggttgcatctcaaggggacaca

SEQ ID NO: 252418 - DNA, 386 bp, Glycine max
ggactagccttaactcaactaccgctactgcactctattattggaagtgcagccacgcatcatgtctacagatcatgggcaaggtcaagatcggaatcaacggattcggaagaattggccgcttggttgccagagtcgatctgcaaagagacgacgtggagctcgttgccgatgacgactctatcattaccaccgattacatgacatacatgtttaaatacgacagtgttcacggacactggaagcatcacgatgtcaccggtaaggacgagaagacccatctctcatgagacaagccagtcactggcattggacacaagaaccctgaagagatcccatggaggtcaactggagctgatatcatggacgagtccaccggagttttc

SEQ ID NO: 252419 - DNA, 347 bp, Glycine max
cacgcacgcatacgtaggctcggaattcttctctaggctgtttaatttgcgccgaggatctgccctgacagagaaaagttctattgagatggaggctagcatcatggatggtccaaaacgacgatgcggcaccgattcgggtcttaccaccgttaagaacccgatctcgcttgctcgtttggttatggacaaatccctgcattcctacctcgcctacttcgtctcctaataatttgctaggcaacaagatgtggaattagttgacaacgagtactttatcacacctgataacattagcatgctcaatctttcaaatgaagcatacacaatcctatttgaataccaaa

SEQ ID NO: 252420 - DNA, 405 bp, Glycine max
atgaagccagcgttagtatctctcgtgtcttctttaaccctgagtcagcaacgtgcgccctcctcgggtcaagctcagtcagcactgcaccgcaaatttttctttgcccctttcgatgagtaacgccacagactccgccggcgagatcccaccggagacgaggtccgccgagagtgacggtggtgggccccggcccacgattaagatcaatgttacgcacggttcctctcaccacgatttacacctcccggcccaatcaacttttggggatgttaagaaactccttgtcaataaaactggtttagagcctgcagagcaacgacttttcttcagagggatagaaaagggtgataaccagcgtttgcaggctgaaggtgtaaaggataagtcaaaactttttctttt

SEQ ID NO: 252421 - DNA, 531 bp, Glycine max
  unsure (1)..(531): unsure at all n locations
ngaggttaaggagctgtttttgaaaatatgacgcatcantgntatcatgctagaactcctatgacgtcgcatgcacgcgtacgtaagctcggattcggtcgagcagattctcaactcaagttcacagaatgagaatgatccgaataatacaactatttttgttggtaatttggatcctaatgtcactgatgatcatctgaggcaagttttcagccagtatggagaattagtgcatgtgaagattccagcaggcaagcgatgtgggtttgtccaattcgcagacaggagctgtgctgaagaggcacttcgggtgttgaatgggaccctgttgggtggtcaaaatgttcgtctttcatggggccgcagtccttcaaacaaacaggctcaggcagatccaaaccagtggaatggtggtgctggttctggtggtggatactatgggtatgctgcacaaggttatgaaaattatgggtatgctcctgctgctggacaggatcccaacatgtatggcagttatccggggtatcctgn

SEQ ID NO: 252422 - DNA, 526 bp, Glycine max
  unsure (1)..(526): unsure at all n locations
tgagttaggtagggctgnagatagcctacgtcactcgctacacttataagagtctatgacgtcgcatgcacgcgtacgtaagctcggaattcggctcgagctcttaccgtttgataacagataattactatttatgctggagcgaatggttatcttgattcattataaattggaccggtaaggaaatttcctgttgagttacgtgcttacttaaacacgaataaacctcaattcaaagaaatcatatcttctaccaagacattcactgtggaagcagaagtccttacgaatgaagctattcacgatcagatggaactctcagtactacaggaacaggtataaaaaatattgattaatcatataataactttataacttcactatctaatacttataattagcatctactaatatctcattatttcattagaatatcttttcattatctagatcaaatgaattcttaatgaaaataggattaatcaatgaattttaatggcaggccgttatctattgaacttattaa

SEQ ID NO: 252423 - DNA, 533 bp, Glycine max
gaggttagaacgtgatctgattattgacatagaaagtaacatgctagaacagctatgacgtcgcatgcacgcgtacgtaagctcggaattcggctcgagatcatggccacctctgctattcagcaatcagcattcgcaggtgaaactgctctgaagcagctcaatgagttggtccgcaagaccggtggcgccggcaaaggtcgcaccaacatgcgccgtaccgtcaagagtgctcctcagagcatttggtatggccctgatcgtcccaagtacctgggtccattctcagagcagattccgtcatacctgaccggagaattccccggtgactacggatgggacactgctggactatcagctgacccggaaaccttcgccaggaaccgggagctggaggtgattcacagcagatgggccatgcttggtgcacttggctgcaccttcccagagatccttgagaagaatggtgtgaaattcggcgaagccgtgtggttcaaggctggttcacagatcttctcggagggaggacttga

SEQ ID NO: 252424 - DNA, 549 bp, Glycine max
  unsure (1)..(549): unsure at all n locations
tgtatggttaggatgaggtgnagtatgtatgcttagcccactacgtgactccatagaagagctatgacgtcgcatgcacgcgtacgtaagctcggaattcggctcgaggaaggccagcatggaagtattcaacatctcgggagataagtatgtcacatttgatggattagcaagagcatgtgctaaggctggtgggttcccagagccagagatcattcactacaaccctaaagattttgattttgggaaaaagaaatcatttccattccgtgaccagtatttctttgcatcagttgatgaagcaaatatcgtgcttggattggaacctgaatatggacttgtagagggtctagcanactcgtacaacctggactttggtagaggaacttattggaatgaggctgatttttaaccagaggctttaattctgatcaggagtcttgttagcgtataatcttttttagtttgaatttgagtattttgctgtgagatttgtttgctgtgttgtagttttacattgttttgtatttattgagtttaaatttacta

SEQ ID NO: 252425 - DNA, 537 bp, Glycine max
ttatgatatagtaagtgtttctaactatgtaaaagattatttgctacaacactatgacgtcgcatgcacgcgtacgtaagctcggaattcggctcgagcactaccctcaacatagtaaagcagctggtgcaagtgaagcaatggctcaaaccatgttgctcatgtctagtgtctctagcagttattccgtggatttgaagaaagaccttttcctccaattgcagagtcaaagtttaaggcctaagttctctcaactctcattcaacccacttccaccatcaacttcttccttttcttcaccccgtacattcacaaccctggctctcttcaaatctaagacaaaagccgctcctgctaagactaaggttacaaagccaaagcaaaaggttgaagatggtatttttggcacttctggaagatttgggtttactaaacagaacgagctctttgtgggtcgtgttgctatgcttggttttgcagcatcattgttgggtgaaggaataactggggaaaggaatctctaccacaatttaaccc

SEQ ID NO: 252426 - DNA, 549 bp, Glycine max
tggatggatatcgtggagtggtttctgaatcacgagataacgaactgaattagcaacactcatctaagagctatgacgctcgctgcactcgtacgtaagctcggaattcggctcgagctcgagccgctcgagccgattcggctcgaggcaaactttatcgactggaaggttcagcaggtgtacaaaaagacttactttctcagtctctaaatgaaacaaatctaaagatttggaatttatcttatggaacagaactggcatggaggaggctacacaatgcaaaggcacttatagttcttgacaatgttgaagaagataaacagcttaatatgtttactgcgaatagaaagaatctgttacgtgaacgccttggtagaggaagcatagtcattataatttctagggatcaacaaatattgaaggcacgtggagcaaaacttatttaccagtgaagccctttggaggaccccgatccccttccaaggtttggcaaaaatccttttaaaaataatttttttatgggggatgttaaaacgtgacttttcaagt

SEQ ID NO: 252427 - DNA, 543 bp, Glycine max
tattattatatagttggatggggtttgtttttatttagtattgtatactctagaacagctatgacgtcgcatgcacgcgtacgtaagctcggaattcggctcgagattgctcccagtagccaggaaccaaagaatatggtgaacttaccagtaatcatcaaaaggcttatttgagaacaattacaggaaagactgaggcccttgtggacctaacagtgatagagatattgtcaaggcatgcttctgatgaggtctaccttggacagagggacaattcaaattggactgatgacacaaaggcaattcaagcctttaagaagtttggaaacaagctgaaggaaattgaggacaaaatctcagggaggaacaagaattcaagccttaggaaccgtaatggaccggcgcatatgccctacactgtgctttttcctaccagtgggaaggccttactttcagaggaaattccaacagcatctctatctaaagagagtgtgttggggtgtggagtgtggtttctttcctttcaacggacctgtaattgac

SEQ ID NO: 252428 - DNA, 544 bp, Glycine max
  unsure (1)..(544): unsure at all n locations
tagatgtttattggaggaggggcttgnagtattgagtaagtaggctcatagctgacaccatagaagagctatgacgtcgcatgcacgcgtacgtaagctcggaattcggctcgaggtaattttcttcactgctatttaccattgccacactctcattctcgatggcggcgaagatttcattggcaattggtttgagaactctcttcactgttttgggacttctcatgcttgctgtctttctttacactgccttcaccgatggtctaggtgttcgctttctcaaagaacttgtcagaccgtggatggtagcaactttggtttgtttctatatcaacattgtagcttttgctgtctggattgcttacaaggaatcanacttgatcagctcaattctgtggattgttttgaatgccttgttagggagtattcttccttcttgctatattgttgtggcattttctggagttggcatctcaagaatttttacaggatcctattgattatggtctggtgcggcattcaaaccagaatggcacaacaccac

SEQ ID NO: 252429 - DNA, 546 bp, Glycine max
  unsure (1)..(546): unsure at all n locations
tggtatgtatagagttnaggaggggttgataaagagagggatagtgattgtctagaccagctatgacgtcgcatgcacgcgtacgtaagctcggaattcggctcgaggcaattgaagttgaagtcttgcccttctctcttcaactccaaacacaagacatcatcatccatggctgcctccgtctccactgtcggagctgtcaacagagctcttttgaacctgaatgggtctggacctggggtttcagctcccagttcatccttctttgggagcagcttgaagaaggttattggctcaagggtccccaacacaaagatttcctctggaagcttcaagattgttgctgtagaagagaagaaagagattgaagagacccagcagaccgacaaggacagatggaagggtcttgcctatgatatctcagacgacccacaggacatcacangaagaaaagggttgggtgactcctttttcaagcttcacaggatgcttgaaactactattgctgcatgagcttctacgaggtcccttaacattggactttgc

SEQ ID NO: 252430 - DNA, 532 bp, Glycine max
  unsure (1)..(532): unsure at all n locations
nagttaggtgatttgtccatgcctatgacgcatacgnattactctgaagagttatgacgtcgcatgcacgcgtacgtaagctcggaattcggctcgagtcaaaatcagcctctaatatttttctcactgtctgtccagagaacttgatagagagatggcagctgcaacatctggtgctgtgttaaatgggttgggatcttccttcttgagtggaggaaacaggagccaaacccttctggcctctgctattggaggcaaagttggtgctgctgttactgttaatcccagaagactcattgtggtagctgctgctgcaccaaagaagtcatggctccctggtgttagaggtggtggcaatctcgtcgacccagaatggcttgatggatcgctaccaggtgactatggttttgatccactaggccttgggaaggacccagcattcctcaaatggtacagagaagctgagctcattcatgggaagtgggcaatggctgcagttctaggaatctttgtggtgcatgcctggaatggt

SEQ ID NO: 252431 - DNA, 535 bp, Glycine max
  unsure (1)..(535): unsure at all n locations
gagttagggaggggttgtcgcatgcatctcagccagatagcnatcaccatagaagagctatgacgtcgcatgcacgcgtacgtaagctcggaattcggctcgagacttctctcttcaccatgcaccaagccatttcccaggagaagcttcatccccataggagcacgtggcatgccacacgcaggaggaatcaaagaatccaatggcaccgatccatccaaagctgccacaatggtatcggagaacgcggtggtaatcattggaaaacggggatgctgcatgtgccacgtggtaaaaagattgttacaaggtctgggagtgaaccctcccgtgtacgaggtggacgaggaccacgaagccgccgttgctctccacctgtccccgcagggcgccgaaacggtgcagtttccggcggtgttcctggccggcaagttgttcggagggttggaaagagttatggccactcatatctcaagtgaattggttcccatcttgaaggatgctggtgccttgtggctctgacttttactctagc

SEQ ID NO: 252432 - DNA, 537 bp, Glycine max
  unsure (1)..(537): unsure at all n locations
agtaagggtgatctgcgtattgacataaagaataatttgcatactctnaagagttatgacgtcgcatgcacgcgtacgtaagctcggaattcggctcgagccacaattcacaaccgaaacagtttccatctctcgcacaaagtgacaacaatatcaaattgctcccttctcttcctcttcctcttcctctccaccctccacatagcttccaccctctcaacccccaccaacttcatcaagtcctcctgcagcaccacccagtacccagccctctgcatccagtccctctccgtctacgcctccaccatccagcaagacccccacgagctcgtccagacagccctctccctcttcctcaaccacaccgaggccaccaaaaccttcgtcgcaaaatgcaacaaattcaaaagccctaaaccgagagaatacgctgcccttaaaggacgcgcctgaaaaatcaatgacagcctcgacccggctcacccngtcgctgaaggaactcaaatgggtaaggtgaacggtgaggacttcacgtgn

SEQ ID NO: 252433 - DNA, 535 bp, Glycine max
  unsure (1)..(535): unsure at all n locations
tgaggtaagggaggggttgccgcatgcagtaaagaangatcagtgacactatagaagagctatgacgtcgcatgcacgcgtacgtaagctcggaattcggctcgagcaaaaatggctacagaattggcatcatctcccaattgggttccaagcgcagccacatgtttggcagcctttgccgccctccttctcctcttcctccgcggtctccgccgccgccgatacaacctccccccaggcccaaagccctggcccatcataggcaacctaaacttaattgggtcccttccacatcggtcgatccacacgcttggcaaaaaatacgggcccatcatgcacgtatggttcgggtcgagctccgtggtggtgggctcgtccgttgaaattgccaaggccgtcctcaaaacccacgacgccaccctcgccggcaggccgaagttcgcggcgggcaaatacacaacctacaactactcggacatcacttggtcccagtacggcccatactggcgccaggcccgtagaatgtgcctaatgn

SEQ ID NO: 252434 - DNA, 543 bp, Glycine max
tggaggatattagtgaaggctctagtcactgcatcgtagccttagctgacaccatagaagagctatgacgtcgcatgcacgcgtacgtaagctcggaattcggctcgagcaaggctctactctactgcttcaccttctgctctagaaaattcagtggtgatacatggcttcggctactctctctgtagccaaaccagcccttcaggcaaatgggaaaggcttctctgaattctctggcctccgcagctcatcaggcttccttcccttttctagaagatcttcagaggatttccattctgtcattgccttccagacctatgcagttggaagcagtggaggatacaagaagggtgtgacagatgcataactgaaggttgccataaacgtattttgaagggttggaaggaacttattgaggtgctggcacaggcgcatgaacttcacgcttgaggcattggcaataacgactccggttttgaggaacatggcctttaacttttttagtacgattcgacccttggacctgtgaagctatttgaggag

SEQ ID NO: 252435 - DNA, 551 bp, Glycine max
  unsure (1)..(551): unsure at all n locations
tttatttaattgttagagagtgttgactcagctnagtaagtagttgcagcactgctatgacgtcgcatgcacgcgtacgtaagctcggaattcggctcgagttcctaaaaaatatcattacaaatacgtcaccgtatttgtccggtttccacgcgattttgattcaaaagaaaagaagcaccaagcgaagccagcgaagctgtctttcgattccttcgtgcgtgcgattctcctgatatccaaggtgaagcaccgacaccggacctattttcggcgaatccccagtccttactttcttgcttcgaaatgaatcccgagtatgattatctgttcaagctccttcttattggagactctggtgttggtaaatcatgccttcttcttagattttctgatgattcgtacatcgaaaggctcataatcaccatttggaattgagtttgagaattcgtacccgttgagccaggattggaaggaccattgtaactacagattttgggacacaatctgtgcaggaaccgatttaggaccattaactagtgtgttatacc

SEQ ID NO: 252436 - DNA, 543 bp, Glycine max
  unsure (1)..(543): unsure at all n locations
gagttntagtagtggtttgncnctacgtagataaagcatatatatgcatcactctagaagagctatgacgtcgcatgcacgcgtacgtaagctcggaattcggctcgaggtttcgagatttgggattctgaacaagaatgctagagaccccaatgggatgaaatggatcgatgctcctgaatgtttctgcttccatctctggaacgcttgggaggaacccgaaaacgacgagattgttgtgatcggttcctgcatgacccccgcagactccattttcaacgaatgcgatgagagtttgaagagcgtcttgtctgagataaggctgaatttgaagaccggaaagtctacaagaaaacccattatctccgaatcccaacaagtcaacttggaagccggcatggtcaacagatacaagctcggacgaaagacccagtttgcgtacttagcacttgccgagccatggcctaaggtttcaggtttcgctaaagttgatttgttcagtggggaagtgaacaagtacatgtatggngaagagaggttcgg

SEQ ID NO: 252437 - DNA, 551 bp, Glycine max
  unsure (1)..(551): unsure at all n locations
ttgtatgtttatggtataggagagggtcaagaatagaattaagacgagtanagctacantatagaagagctatgacgtcgcatgcacgcgtacgtaagctcggaattcggctcgagaagccctcagaacacctttgtcccaggactcattgatctggccatcaaaaggaatagtttgattggaggagatgactttaagagtggtcagaccaaaatgaaatcggtgttggtggatttcctagtaggggccggcatcaagccaacatctatagtgagttacaaccatttgggaaacaatgatggcatgaatctctcagcccctcaaaccttccgctcgaaggaaatttccaagagcaatgttgttgacgatatggtcaacagcaacgccatcctctatgagcctggtgaacattcggaccatgttgttgtcattaaatatgtgccttactttggggacaggaagaaggccatggatgagtactcttctgagatattcatgggcgggaagaacaccattgtgttgcacaacacttgttaggattcactgttagc

SEQ ID NO: 252438 - DNA, 552 bp, Glycine max
  unsure (1)..(552): unsure at all n locations
tagatttatatatgtgtaagatggttttnagtctccgtatcgtagtnatancgctacaccatataagagctatgacgtcgcatgcacgcgtacgtaagctcggaattcggctcgagggcaacaaaggagttgtaaattaagagcatggctgcacaagctcttgtatcatcatcatctcttaccttctcagccgaggctacaagacaaagtcttggaccaagatcactccaatctccatttggcttctcaagaaaagcctcctttcttgttaaggcagctgctactccccctgtcaagcaaggatcagacagacctttgtggtttgcatcaaagcaaagtctttcctacttggatggcagccttccgggtgactatggatttgaccctctgggactttcggaccctgaaagaacaggatggttcatttgagccaaatggcttacatatggtgagataatcaaatggtcgtatgcaaaggtggagtcctgtggggcaattgcacctggaagtctaggcaaagctggtcttgatccttaagatacagggactccc

SEQ ID NO: 252439 - DNA, 551 bp, Glycine max
  unsure (1)..(551): unsure at all n locations
agagagtgattatagagtnagagtgtgtctgagtattagaaggggaagttattgtctagaccagctatgacgtcgcatgcacgcgtacgtaagctcggaattcggctcgaggcctgctcctgttcccggtccccctggcgccgttgaccaaaaatactccactgcactcaaaaccgcaatgcaattcttcgatgttcagaaatctgggaggttagttgacaataaaatatcttggagagggaattcggctcttaaggatgggagccaagcgaagttggatctatcaaaagggatgtatgatgctggggataacatgaagtttggttttccgatggcttttacggccacggtgctgtcttggtccattctggaatatggagatcaaatggatcacgttggccagttagacgccgctcaagattcgctcaagtggatcactgattgtctcatcaatgctcacccttctgagaatggtctttatattcaggtgggtgatcctggtgcagatcacaaatgttgggaaaaaccagaagccatgactgaagaacgtt

SEQ ID NO: 252440 - DNA, 553 bp, Glycine max
  unsure (1)..(553): unsure at all n locations
tgtatatgtataatagtataggatgcgggtctgagtaatagacataagaaagttatnatgcagcactcgctatgacgtcgcatgcacgcgtacgtaagctcggaattcggctcgagggccacagcaacaataacaatggcagcctcactacaagctgcagctaccttcatgcaacccaccaaggtgggcatggccactcgcaacctcaaatctacacaatgcatttctaaggcttttggcttggaacccgctgcagctaaactcatttgctcccttaagcccgatctcaaagattttgctcaaaaatgtgtcgactccaccaaaattgcaggattcgcccttgccacctcagctctcgttgtttctggagcgagtgcagaaggtgttccaaagaggcttaccttcgacgaaatccagaggcagacatacttggaagtgaaaggaacttgaactgctaatcagtgcccaaccattgaaagtggagtggactcaattgccttaagggcaggaaattccaaggccaaaatttgtgcctgaaccaacttccttaacg

SEQ ID NO: 252441 - DNA, 539 bp, Glycine max
  unsure (1)..(539): unsure at all n locations
gagttnaggagaggtcnccgtacgataccacgacatgatctgtatcactctagaagagctatgacgtcgcatgcacgcgtacgtaagctcggaattcggctcgaggtggaaatcactgtcaactaccttcatcctggatgaattatgacaaatattctgcgataccatgattatattaatgcccttgctaacatggtgggcaagtacttccttaaaaatgtgcaacagggagctgcaactcaatgttatgtggcattgcatccacaagtcaagggaatatctggtgaatactttatggatagcaataagggaaacccggcctctctggctaaagattcagagctggcaaaaaaactatgggaattcagcttaagcctgactaatccaaagtagcttaaaagtttgactagaggaagcttcataaatgccaacattattgtattggaaaacaagtttcaccgaattagaaatttatagtggtgtaagcttacaacttgaaggtttctattaattattacagctcagactactatccatta

SEQ ID NO: 252442 - DNA, 527 bp, Glycine max
gaggaagaaagctgtatatgtaagggggggaatagtacactatagaagagctatgacgtcgcatgcacgcgtacgtaagctcggaattcggctcgaggagatgaagttgagttcattaaataaagacgaaaaatgacaaaaaagaaaacattcattccccttctatatcttacatctatagtctttttgccctggtgtatctctttcacatttaagaaaagtctcgaatcttggtttattgattggtggaatactaggcaatccgaaattttcttgaatgatattaaagaaaagagtattctaaaaaaattcatagaatttgaagaactgtttttcttagatgacatgttaaaggaatgtccggaaacacatctacaaaacctgcgtactggaatctataaagaaacaatccaattaatcaaaacgcacaacgaagatcgtatgaatacgattttgcacttctcgacaaatataatttgtttctttattctaagcggttattctattcttggtaatcaagaacttgt

SEQ ID NO: 252443 - DNA, 538 bp, Glycine max
  unsure (1)..(538): unsure at all n locations
gagttnttgagtggtcncggtatgagataaagaataattctgcaacactctagaagagctatgacgtcgcatgcacgcgtacgtaagctcggaattcggctcgagcaatttgccctcccatttcactaacgcacacatcacatcataccagagactccatctccctctcgcacgcgacgagggagtcccgcttcggaatctcaccccctctttctgctaattcgcaagatggttgctcagaaattcgttgtcgacttgaacaagccccttgtattccaggttgggtatcttggggaagcctacgatgattgggttcacgatcctatcgtaagcaaagaaggtcctcggtttttccaaagcggtttcctcgagttgttcacacgcactgcatggtgggtgattccaaccgtttgggtgccggttgcgagttggttcatttccaactctgtcaaatcaggcctgccttctcttgatgtagctctgctcgtctntctcggcatctgtggttggactttggctgaatacaccttgcaccgtt

SEQ ID NO: 252444 - DNA, 530 bp, Glycine max
  unsure (1)..(530): unsure at all n locations
gggtnagggaggggtgtgtatgtattgggggatatagtcacactatagaagagctatgacgtcgcatgcacgcgtacgtaagctcggaattcggctcgagatcagatctaccacctcgcgtgtcccgcgtcgccggtgcactacaaatacaaccccgtcaagaccatcaagacgaatgtgatgggcacgcttaacatgcttggccttgcgaagagaattggggctaggtttctgcttactagtactagtgaggtttacggtgatccgttggagcatcctcagaaagagacttactggggaaatgtgaatccaattggtgagaggagctgttacgatgaagggaaaaggactgcggagacgttggccatggattatcatcggngtgctggtgttgaggttcgtattgctcgaattttcaacacatatggaccccgcatgtgtttggatgatgggcgtgttgttagcaattttgttgcacaggctattcgtaaacaaccattgactgtatatggtgatgggaaagcaacaat

SEQ ID NO: 252445 - DNA, 547 bp, Glycine max
tagagtttttagtgggatagtgcttttataattgtatagatgagttattgtcacactctagaagagctatgacgtcgcatgcacgcgtacgtaagctcggaattcggctcgaggtgttgagtatcgacactgattttgatggttgcatgcagttgatcagagaggtcactgctgagttgcctatttatttggctaactctctcaacagtttgaggttggaagggcagaagactgctgctattgagattctgcagcagtttgattggcaggttcctgattgggtcattgtgcctggaggcaaccttggcaacatttatgccttttacaaagggtttaagatgtgtcaagagcttgggcttgtggataagattccaaggcttgtttgtgctcaagctgccaatgctgatcctttgtatttgtactttaaattacggttgaaagagtttaaagccttgaagtcgagcactacattttcctgtgccattcaaaatggtgaatcttgtttcattgacaaggccgtttaagcccataagaattccgatgggat

SEQ ID NO: 252446 - DNA, 545 bp, Glycine max
tgtagtatatagtggagaggctttgatattagaaggaaaagtgattgtctagaccagctatgacgtcgcatgcacgcgtacgtaagctcggaattcggctcgagtcaacacaggaaccaggtcaaacaggtggaggcactggaccgatgaacaacttggggctggagatgttatcaagcatgtttggtggactcggagctggtagcctggctgttcctaacagatcaaatgagccgccggagcaattgtatgccacccaactttctcagcttcaggagatggggttctttgacacgcaagagaacataagggctcttattgctacatcagggaatgttcatgcagcagttgagcggcttttggggaactccggacagtaacaagtggtaagaagggacacaagactagcaattaaatcccaaacactagaatctggtgtgagatatttgtccatttagctttgaatttcatcatgggattatggtcaaacaaatctaatgatttttttttcatttacatgatatccaaaagttaatattatatcc

SEQ ID NO: 252447 - DNA, 538 bp, Glycine max
  unsure (1)..(538): unsure at all n locations
tgttatgtatatagtatagatagagtttnggtttgtagaagggggtatattgtcacaactagcttgnagctatgacgcacgcattccctcagccctgaattcggcttgagcactgaggagcacactgaacgaatcccaggcgaggagaaagatcgaggggaaggagcacgatgtgtcgttgggagcgaacaagttccccgagagacagccaattgggacggcggcgcagagccaagacgactgccaggactaccaagagccggcgccggcgccgctggttgacccgacggagtttacgtcatggtcgttttacagagcatggatagcacagtttgtggccacttttctgtttctctacatcactgtcttaaccgttatgggagtcgccggggctaagtctaagtgtagtaccgttgggattcaaggaatcgcttgggccttcggtggcatgatctttggcctgggttactgtaccgttggcatctcagggggacacataaacccggcggtgacattagggctgtttttgcgaggaaaa

SEQ ID NO: 252448 - DNA, 550 bp, Glycine max
tgtatgttattggatgtaggaggtctctgattaatagaaaagaatagtaattgtctagaacagctatgacgtcgcatgcacgcgtacgtaagctcggaattcggctcgagatttttcttcctcagtagtgtcatttacgcttctcttctctgcagcaactatgcctaaccctaaggtcttcttcgacatgaccatcggcggtcaatctgctggccgcatcgtgatggagctctacgccgacgtcactccccgcaccgccgagaacttccgcgcgctttgcaccggcgagaagggcgtaaggcggagcggcaagcccctccactacaagggctcgtccttccaccgcgtgatcccgagtttcatgtgtcaaggtggcgacttcatccgcggaaacggaaccggcggcgagtcgatttatggcgccaagttcgccgactagaacttcgtgaagaagcacaccggtcccggcatcctctccatggcgaacgccggtcccggaaccaacggatctcaattcttcatttgcacggagaagacagaatggctcgac

SEQ ID NO: 252449 - DNA, 538 bp, Glycine max
  unsure (1)..(538): unsure at all n locations
gagtnaaggcggcttatcttaagtatcgagggggtatattgttatcactctagaagagctatgacgtcgcatgcacgcgtacgtaagctcggaattcggctcgaggtttgtggggtcccttgccttccaagattgacaggttctggtcccttgaagtgatgaactttagctcaaacttcatttatggggaaatttcaccatcagtttcctctttgaagaatctaaaaagtcttgttttggctaataatcttttcaatgggagtgtgcctgatcttggaaaactagcttctcttgaagagctcaatttgagtggcaacaaattaggccctgagttcccttcattgagcaagaatcttgtgagggttatcttgagaaacaactcattgagatgtagaatccctcctcaactcattcatgtttataaacttgagctgtttgatatctcttccaatgtgatatttggaaatatcccatcatttattttctctcttccttccctaaagtacctaaacttggcttcaaaccaattaagtggctn

SEQ ID NO: 252450 - DNA, 532 bp, Glycine max
  unsure (1)..(532): unsure at all n locations
ggtaagtnnagaaggcttgtttaagataaagaatatattgcatcactctagaagagctatgacgtcgcatgcacgcgtacgtaagctcggaattcggctcgagaaacactcttcttcatattcttcttcttcttcttgttcttgttctatctgtgacgagcatcatggcctcgagagcagtgctattgttggctatgtgtgtgcttccggccatggttgtggccattcgcccagcaaagaaccctttttgcgtgaagggtcgcgtctactgtgacccttgccgtgctggttttgagacctcagcaaccacctacattgccggtgctgagattatgttgcaatgcaagagcagggttagcaacgaggttgtgtacaccaagaaggggtacactgactcaactggagcatacacaatgtacgtggacgaggatcacgcagatcaaatatgcagtgccaagcttgtaagcagccctcaccctcaatgcaaggaagtcacccagggccgcgacgaacccgtcgttattctaacccc

SEQ ID NO: 252451 - DNA, 539 bp, Glycine max
  unsure (1)..(539): unsure at all n locations
ggttgagtnnagaagtgctgncgtatgtcaaggggagttaatgtgacactatagaagagctatgacgtcgcatgcacgcgtacgtaagctcggaattcggctcgagcaaatcttttctaagtgtagtagaggagaggaaccgcgccaaccctctcttcttcttcttcttcttcaatccttttataacctttatagtttcattcttaatcgttgggaaaaatgttcatcgagaattttaaggtagagagtcctaatgtgaagtacaccgagactgagattcagtccgtgtacaactacgaaaccaccgaacttgttcacgagaacaggaatggcacctatcagtggattgtcaaacccaaatccgtcaactaccaatttaaaaccaacacccatgttccaaaatttgggggtgaatcctggtggtttggggtggaaccaccngctctacacctaaccggtggtggtattgctaccagaaaggcctttcaatgggcttcaaaggaccagtatcaccaggccaataactttggcttccttac

SEQ ID NO: 252452 - DNA, 548 bp, Glycine max
  unsure (1)..(548): unsure at all n locations
tgtatgttattatgtaaaaggctcntgttcatgaataaagacattattagcgacancatataagagctatgacgtcgcatgcacgcgtacgtaagctcggaattcggctcttggaaatgctaacgaggatgctattcagaggggaactgtcttgcagtcttgaattggaggcaaagcaaacttggcaagtaaatatttctgttcgtgaaggttgttgtactaatccaagtgctagaagttgtgatggaacttgcgtgtaacattcttagcattcttaatgtcttaagtgcaaagagaagatgctaagtttgagatgatcttactatatttttcatattggaccgtcttcctctataattttgagttacagtgtccacttaaaaaaataaaaaaagggcggccgccgactattgagctcgtctacccgggaattaattccttaccggtactctgcagcgtaccagctttccctatagtgagtcatattatagcttggcgtaatcatggtcatagctggttcctgtgtgaaattgtgattcggtcacaaa

SEQ ID NO: 252453 - DNA, 556 bp, Glycine max
  unsure (1)..(556): unsure at all n locations
tgttatgtatttttaggggggatatgtgctanagtcatagtaaagtaggagtanagctacactcatagaagagctatgacgtcgcatgcacgcgtacgtaagctcggaattcggctcgagaaaatcttctagaacactttttgttagaaacatcaatagcaatgtagaagattccgagctaaaggctctctttgagcaatatggagatatccgaaccatatatactgcctgcaagtatcgtggatttgttatgatttcttattatgatctaagggcagcacaaaatgcaatgaaagcacttcaaaataggtcattgagatctaggaaacttgatatacattattcaattccaaagggcaatgctccagagaaggatattggtcatggtacactgatgatatctgatcttgattcatctgttctgaatgatgaactaaaacagatttttgggttttatggagaaattagagaaatctatgaatatccacaactgaatcatgtcaaatttattgaattttatgatgtccgggctgcagaagcttctcttcgtgcattg

SEQ ID NO: 252454 - DNA, 544 bp, Glycine max
ttaatgaaatagtttgggcgagttgttttatgtataaagactatttgcacaactgctatgacgtcgcatgcacgcgtacgtaagctcggaattcggctcgagaataattttcatctaaaaaaaaaccaccgttgaatttgacagtcccggcgaggcatgttcttgctccgagtccactcagtggaagaggagcaccctctggatccccgaaccatcttccaatcccaaaccaacaaccctaaattcagccaacgcagaggcgcgcttcacttgttccgaaactctttccacttctgttcctcttgtcttctcttcatactcggcggccccaaatatactttctttacaagactacattccctttaaaacagcaaatttgacacgattgtggatgaacacaaccgtcttcttacatctcagttggagacacaaagacaatattatgaatcgttactagtggagacaaaaagtaaaatggaaagttccatgtctgaaacagtggagaaagcttcagcttctgaaatgctggatattcaaaatgaac

SEQ ID NO: 252455 - DNA, 555 bp, Glycine max
ctagatgtattatagtgggatggagttctgctgcttcattagtataagatagtaattgtctagaccagctatgacgtcgcatgcacgcgtacgtaagctcggaattcggctcgaggaggtccaaagggctttgctccttaactccaaaggaagttgggatttttcttaccgctctcggatacccatcaacaactccaatatatattgctgctggagagatatatgggggcgagtcccacatggctgaactgcattcccgatatccattgttgatgagcaaggaaaagttggcatccatagaagagcttgaacctttttctaatcatgcatcccaaatggctgctcttgactatattgtatctattgaaagtgatgtatttataccttcttattccggaaatatggcaaaagctggtgaaggtcatcggcggtttcttcgacgtggaagaacagtatcttcagacaagaaagcccttgttcatctgttcgataaactggatcagggaataataactgaggggaagaaactattcaataggattattgaatctcaca

SEQ ID NO: 252456 - DNA, 554 bp, Glycine max
ttggagtatatagtatggaagagtgtgagtatagagacgaggagtatatgtcacactctagaagagctatgacgtcgcatgcacgcgtacgtaagctcggaattcggctcgaggaccatgcaaatgcaaatgcaatgttctctctgctctcattcttcttgtcacattcctttttattgcttcttccgtccactgtgaagacccatatcggtacctcacttggaaggtcacctatggtgacatctatcctcttggtgtcaagcaacaagggatcttaattaatgggcagtttccagggcctcaaatagatgctgttacaaatgacaacttgattatcaatgtctataactacctcagagaaccgttcctcatttcatggaatggcttacagcataggaggaactcatggcaggatggagtgtatggcacaaacgtgcaattccacctgtgaaggaccctcatatacgctatcacgttaaaaacccatttggggcgatatctacacttcatatctttggaatgcgcacaaagtcttgtagcactttgtgggcgta

SEQ ID NO: 252457 - DNA, 542 bp, Glycine max
gaggtaagatacgggttgtcggatcgcatcaacgaatatatatgtatcactctagaagagctatgacgtcgcatgcacgcgtacgtaagctcggaattcggctcgagtgcggtgcggcgatcctagcactctcttctgcaggtttcgcggacagcttcattcaccatggctgagcaaaccgagaaggcttttttgaaacaaccaaaagtgtttctcagctcgaagaaaactgggaagggaaagagacccggaaagggtgggaaccgcttttggaaatccattgggcttggatttaagactcccagggaagccatcgaaggaacctacattgacaagaagtgccccttcactggcaatgtttccatccgtggccgtatcttggctggaacatgtcacagtgctaagatgaacaggactattattgttaggaggaattatctccattttatcaagaagtaccagaggtacgagaaaaggcactccaacattcctgctcatatatcacctgctttccgtgtgaaggaaaggagatcacgttatta

SEQ ID NO: 252458 - DNA, 540 bp, Glycine max
  unsure (1)..(540): unsure at all n locations
aggtaaaggagaggttgntgtcatgtagtgggggagtatattagtatcactctagaagagctatgacgtcgcatgcacgcgtacgtaagctcggaattcggctcgagcggaataagttgtctctacgatttgagccatggcagacaacaacaccctcaaaccgatcatcagaggcgtttgctctcatggcaatcctcagcactctgctttgcacggcggtggcggcgaaggagagcgtgtacgagatactccccaagtacggcctcccgagcggtctgttaccggacaccgtcaccgactacacgctcgacgaggacgggcaattcgtcgtcgttttggcgaagccctgctacatacagttcgattacttagtttactacgagaccaagatctccggcaagctcagctatggctccatcaccaacctcaaaggcattcaggtccagcgcctcttcatcttgttcaacgtcgatgagatcaaagtcgatttgccttccttcaaccagatttaacttcaagtccgcattaataaacaggaaa

SEQ ID NO: 252459 - DNA, 535 bp, Glycine max
  unsure (1)..(535): unsure at all n locations
gggggaggaaaggtnnttttgtataggggggataatagcatcactctagaagagctatgacgtcgcatgcacgcgtacgtaagctcggaattcggctcgagtttgctattacctctttttccaaactctaaaaatttttagttccacaaaaccaaaccaaaatggcagcagcctcggcctcatccaccatgatatcaacaccagccttatctccaagcacaagcatccaaaagcaccatcatttgaagccatccaacgtgtgctttcaaggccttagacccctcacaaggttcacaaccaaagtgagcagcaccaccaaaagggttattccaaagggtggtgtcggtgttagagctgaactcaactcagcacttgtcataagcctcagcactgggctctccctcttcttggggaggtttgtgttcttcaacttccaaagggagaacgtggcaaagcaagtgcctgagcagaacggactcacacactttgaggctggtgacacacgtgccaaggagtatgtcagcctnctcaaatc

SEQ ID NO: 252460 - DNA, 538 bp, Glycine max
gagtttaaggcgatgcttgtatatcagtaagggggggtaaatgatgacactatagaagagctatgacgtcgcatgcacgcgtacgtaagctcggaattcggctcgaggttctgtgttctatgcttttgttgtgctttttggtgctgtgtactacttaaaaggtcttgaattcaacttcaaagtcaaaaagcatgaggaaacatgggtggcagttaccttaccatcctcttcaggtggtggctgctgctgtgtttctggctctggggtttgccttctatgtgttctttgctccttttgttggagagaagatgtatcagtacattgttattggcctttactcaccactgattattagtgtctttggactgtacatatggtgtgctgcagcagatccaggagatccaggggtttttaagtcaaaaaagtatcttaaaaatccagccagttaaaaagctggcttgactaaaggattcttaaatagggtgaggattcaggttaatcattgcatgaagtaaatgcttcaatagttggagctaaa

SEQ ID NO: 252461 - DNA, 552 bp, Glycine max
  unsure (1)..(552): unsure at all n locations
tggatttttataagaggatggaggctctnatttctggatcaagcatgngttcagtcacaccatagaagagctatgacgtcgcatgcacgcgtacgtaagctcggaattcggctcgagcccttctccttctctctctctttttcgcctcattccattttcatctatcaatggctccagtagcagcagcatcttcagattcaatcaagccaagagatgtttgcatcgttggtgttgcacgtacaccaatgggtggatttcttggtactctgtcatctctatctgccaccaagctaggctctatagctattgaagctgctcttaaaagggccaatgttgatccatcccttgtggaagaagtattttttgggaatgttcttagtgctaatttggggcaagctcctgcaagacaagctgctcttggagcaggaatatccaattcagttatctgcactaccgttaacaaagtttgtgcatcaggaatgaaagctgcaatgcttgctgcacagagtattcaattaggcacaaacgatgttgttgtggctggtggtatgg

SEQ ID NO: 252462 - DNA, 552 bp, Glycine max
  unsure (1)..(552): unsure at all n locations
attagaggnatataggatagggaagcgttgtttatatgcacagatagttattcgtcataacactatgacgtcgcatgcacgcgtacgtaagctcggaattcggctcgagcaacatgtctttattaggagatataagatggatccagtggttgaaatatattttcattatataatgagtttcatttatgaataacctatgttcaaaatatatcatagattttggatctgttacgatttgtgtgccactgatgatttcgttgtgtaacacagttcattgatgttggaaccatggtttctccaacgatttatgcacgtcgtagtctatgttatctgatgagcaatatgcccgatgaagcacttaatgatgcgatgcaagcacaagtaatatcccccgtttggtacattgcgttttatttacaagctgttgctcttttagcactgggcaaggagaatgatgcccaggtgccacttaaagagggttcttcgcttgaaaataanaagaacacaaattaattgagttcgttgaccaaaccttgctttctttttcctgaa

SEQ ID NO: 252463 - DNA, 535 bp, Glycine max
taaatgtaatgttaggagagttggttatgcaggagataactgcacaactactatgacgtcgcatgcacgcgtacgtaagctcggaattcggctcgaggccactttgctcttcctctacattactgtgctcacagttatagggtacaagcaccagacggatcatgctgatgcgtgtggtggggttggcattcttggcattgcatgggcctttggtggcatgatcttcatccttgtctactgcactgctgggatttcaggaggtcacattaacccagcagtgacatttgggctgtttttggctcgcaaggtgtctttgatccgagccatcatgtacatggtggctcagtgcttgggtgctatctgtggagttggtttagttaaggcttttcaaaagtcttacttcaacaagtatggtggtggggctaattccctcgctgatgggtacagcacaggtactggattgggtgcttagatcattggcacctttgttttgggtacactggctttttggcactgaccctaaaagaatgctgaa

SEQ ID NO: 252464 - DNA, 544 bp, Glycine max
tggatgtatataatagatggagtttctgattatagagaggaagagtattgtaaagaccagctatgacgtcgcatgcacgcgtacgtaagctcggaattcggctcgagttcgccagaaaccgtgagctcgaagtgatccactccaggtgggccatgctcggggccttgggctgcgtcttccccgaactattgtcccgcaacggggtcaagtttggagaagctgtgtggttcaaggccgggtcccagatcttcagcgagggtgggctggactacttgggcaacccaagccttgtccacgcccagagcatcctcgccatctgggccacccaagttatcctaatgggtgctgttgagggttatcgtattgctggtgggcccctcggtgaggtcactgacccaatctaccctggtggcagctttgacccattgggccttgctgatgacccaaaggcttttgctgagcttaaggtgaaggaactcaggaccggagattggccatgttctctatgtttgggttctttggttaggccattggcaaccgtgaa

SEQ ID NO: 252465 - DNA, 555 bp, Glycine max
  unsure (1)..(555): unsure at all n locations
tattgatgtatagtgatncgggagaggtcanatgtctgcagtaggngagtatntagtcacactctagaagagctatgacgtcgcatgcacgcgtacgtaagctcggaattcggctcgagcacagctggatcatgcagcaaaaattaagagcagcccagaagcagagaagtactatgctgctactgtatcttctctgaacgatgtccttgccaaacttggttaatgtgattaatttcttgctttcttgtgtaagctttgtgcatcattttctcagacactttgttgactgatattttaagaaaatcaaatgatgagggaaaattttctataaataagatcaatatatctagacgacttctctcctgcatgtccaaaactgaaaggtaattaaggggtaatgtaattgtagaagttagaagtttaattataatttcctgagcacaaaactagaatagttataatgatactataatcttagtacacagtatttggatcatatggtcctatagtcttaatttttaattgaaagaacacaatgtgcaacatgaaggatga

SEQ ID NO: 252466 - DNA, 537 bp, Glycine max
  unsure (1)..(537): unsure at all n locations
gaggggnaggaggctgncgttatgtaatcaagatattatctgcatcactctagaagagctatgacgtcgcatgcacgcgtacgtaagctcggaattcggctcgagtgcaattgaagttgaagtcttgcccttctctcttcaactccaaacacaagacatcatcatccatggctgcctccgtctccactgtcggagctgtcaacagagctcttttgaacctgaatgggtctggacctggggtttcagctcccagttcatccttctttgggagcagcttgaagaaggttattggctcaagggtccccaacacaaagatttcctctggaagcttcaagattgttgctgtagaagagaagaacgagattgaagagacccagcagaccgaccaggacagatggaaaggtcttgcctatgatatctcagacgaccaaacagacatcacaagagggaaggggtttggttgactccctttttcaaagctcacaagatgcttggacctaatatgctggcataagctctacacagtcccttacacct

SEQ ID NO: 252467 - DNA, 562 bp, Glycine max
  unsure (1)..(562): unsure at all n locations
tatagatgagttgtgtatnagggagatgtttgattattgagtgggagggggattatcatcactcgctatgacgtcgcatgcacgcgtacgtaagctcggaattcggctcgagctctctctcaccaaagccttcctagaacgaataataaaagaagagcaattttccctcaccaaagaagaagaagcaaacaatggccgatcaacttaccgatgaacagatctccgagttcaaggaagccttcagcttgttcgacaaggacggcgatggttgcatcacaaccaatgagcttggaactgttatgcgttcattgtggcaaaacccaactgaggcagagctccaggacatgatcaatgaagtggatgctgatgggaatggtaccattgactttccctgagttcccaaatcttaatgccaggaaagatgaaaggcacttgattctgaggaggagcttaaaagaagcatttctggtttttgacaaaggaccataattggttcatttctggtggctaacttccgcatgtgattaccaaacttggggagaacctaaccgttaaaaagttt

SEQ ID NO: 252468 - DNA, 557 bp, Glycine max
ttggatgatgaggttaggagagctctgattatgatgatggggagtgattagtatcactagctatgacgtcgcatgcacgcgtacgtaagctcggaattcggctcgagggaatcaaaccttaataaaaagtcccccaaaatggctccaacaagaaaccaccttcttcacattgccatgttcccatggtttgcaacaggtcacatgactccattcctccacctttcaaacgagttagccaaaaggggtcacaaaatcacgttcttgctacctaaaaaagccaaactacaactccaacaccttaacaaccatcctcacctcatcacattccataccctcacaattcctcatgtaaaaggccttcctcatggcaccgaaacagcctcagagatccccatttccttgaaccatttactagtcatagccatggacaaaacccgtgaccaagtggagcacacacttagtgcaacaaaccctgattttgtgctctatgataacgcttattgggtgccccagatagcaaaaaagctgggcatcataaccctttgttacaatgtggt

SEQ ID NO: 252469 - DNA, 540 bp, Glycine max
tattattaaatagaggatggggggtagagtttatgtaaagacagtattgtctataacagctatgacgtcgcatgcacgcgtacgtaagctcggaattcggctcgaggtgccaaacagccaatggtgcttcgatccttctatccacacgtgataaaaccatcaaattttggaaggtgcaagaaaagaaggtcaagaaagtttcagacatgaatgttgatcctaaattaatgggaaacggctctattgctagttcaagtaattcgggtagctctaaatcatatcttgcatatggagtatcttcagatggaccatataatcatttaaacaacgatttctcatttccaccaggcggtgtaccttcactaaaattaccattggtaggaaccagccatgagaccattttgatggctccaaaccgtagagtatatgcccatgctcaatgatatcatattaattctatttcaaataaccaccatggccaaaacttcatatcagctgatggatttagaaatgaatctttggaaccctggaaattagcca

SEQ ID NO: 252470 - DNA, 558 bp, Glycine max
  unsure (1)..(558): unsure at all n locations
tatagaggatgtggttaggagagctcgtagttacgtagtaaaganttagcatgcacactctctaagagctatgacgtcgcatgcacgcgtacgtaagctcggaattcggctcgagcaccccttcaatccactccactctagcacacaaaacttgctgtagcagtaagctataactcatttgaggctctgtgagaattgagaaatggctaaagatgttgaggttcaagagcaaggaggagagtactctgccaaagactaccatgaccctcctacagcaccttagttcgacccagaggagctcacacagtggtccttctatagagccctcatcgctgagttcatagcaacccttctcttcctttatgtcactgtgctcaccattattggctacaaaaggcagactgatacaacggtaggtggcaccgactgtgatggggttggcattttaagcatcgcttgggcctttggtggcatgatctttatccttgattactgcaccgtctgtatttcaggaggacacataaacccggcggtgacattcgggttgttactaggacc

SEQ ID NO: 252471 - DNA, 535 bp, Glycine max
  unsure (1)..(535): unsure at all n locations
tattatattataggtntagagggttttgttttagcctagtagttattcgtcagaacagctatgacgtcgcatgcacgcgtacgtaagctcggaattcggctcgagcgctccacaacatggatacggttacgcgccacaagcggcttatgggtgcgcgccacaagcggcttatgggtacgcgccacaacccgggtacggttacgctcctnctnctcctgctgctgcagcagttcaaagaccggtgaagaacaatttgggaatgggattgggtgctgggttgcttggaagagccttgggtggaattctaattggggacatgatttctgatgccggttcttacgacgcttgttntggagaattcggtggatttgattttaaaatctttggtagttttctttggttggggggagttttttatgttcaaatgtgaacttaaattaggaaatggtttttgcagtagatactggttttgtacttctaanttcttggccgggggatagaatgtggggtgggattatgtggagctactttttta

SEQ ID NO: 252472 - DNA, 560 bp, Glycine max
  unsure (1)..(560): unsure at all n locations
tagtgtagtagggtatagtggaggtcaaatttctgtattagtatgctaatagtcacaccatataagagctatgacgtcgcatgcacgcgtacgtaagctcggaattcggctcgaggacagagtgagaaatatagaaatggcgtcgtggtgcggtgctcggagcttccagattccggcgatggaagacagcgcactgcgcaaccgtgcttcattggccgccggagtagggtgtttgtcggtggccggcacctccttctggcgctcctcttcgtcaccgaagcgctctttgccattcacatgcttgagcatttcttccgatactcgtattaaggaaagtgttcaaactgaaggtgcacctgcggctttgggaccatattctcaagcaatcaaatccaacaaccttatttttgtgtctggtgttcttggccttgttcccgagacaaggaagttcgtatctgatgatgttgaagaccanactgaacagcttcttaaaaacatgggggaaattcttaaagccggtggtgctagctactcgtacgatggtaagacaacaattttgg

SEQ ID NO: 252473 - DNA, 543 bp, Glycine max
  unsure (1)..(543): unsure at all n locations
ngaggggnaaggagaggtcnncgtatgcgtgataggggagtaaacgagaacactatagaagagctatgacgtcgcatgcacgcgtacgtaagctcggaattcggctcgagcgcagagcaaagcaaagcagagccaacaacaagaagaacaagaaccaacatcaacaaccacaagaagaagaagcttgcaaattagaagaatcttcagttgaaagggaagaacacacaagaacaaagagaggaagaaacgcgaatgaagggagaattagagttgccaccagggttcagatttcaccccactgatgaagaattggtgaatcactacttgtgtaggaagtgcgcgggtcaaccaatcgcggttcccatcatcaaagaggtcgatttgtacaagtttgatccatggcagcttccagaaattggctactacggcgagaaagaatggtacttcttttctcctcgggatcggaaatacccgaacggttcacggccgaaccgtgccgccggaagcggctattggaaagccacctgcgccgataaggcgatc

SEQ ID NO: 252474 - DNA, 526 bp, Glycine max
  unsure (1)..(526): unsure at all n locations
gagtnnagaaagcttgtgtacgtaaacttgacaaatagtatcactctagaagagctatgacgtcgcatgcacgcgtacgtaagctcggaattcggctcgaggcaaaaatcatgggtccgatggtgctgagccaactggccaccggtcttagcgttctagccggagcggttctggtgaaatcggttatggaccagaagcccatggcaggcccattcactcgctgccctacgtgcaacggaaccggtcgagtcacgtgcctctgctcgcgttggtccgacggcgacgtccgatgctccacgtgctccgggtcgggtcgcatggcctgcagcagttgcggcggctccggtaccggtcgacccttgccggcgtaaatcgcgattcgaccgccgaaccgtccaattaatagtttaccattccgtgggctcgcttgctggcttgctactactcctttaatttaccgtaggtataccttttaaatttaatatcccttggcatttaatggaaaatcaatcaatgatgaggtata

SEQ ID NO: 252475 - DNA, 531 bp, Glycine max
  unsure (1)..(531): unsure at all n locations
gggtnaggcggattgngtatgggaaaggggtataatgtatcactctagaagagctatgacgtcgcatgcacgcgtacgtaagctcggaattcggctcgagctttgttggcggcaaggcaaatctgcattgcgatggcgcctccgaagctcttcgtctttgcgctttctgtaaccctaattttcgccatcgttggggccgaagccgatatttccatcgaaggaagcactccagagcctgatacctccgccatcaggatccaattagatcaactcaattccaagatccaaattctcgagtctcaaatcagcgaaaagttggaagaagtgaagaagaaggacgaaattatagcagaaaaagaaaagtccattgaagataaatcaattaccatacaatccttgcagaatgagattgcttctctccagaaaaaagggtcactggatgctgaggagcangttggaaggcctaatgcacgtgctggtgaactacagaagcaggtggacaagcttaaaagggaactagaaacacanaac

SEQ ID NO: 252476 - DNA, 540 bp, Glycine max
  unsure (1)..(540): unsure at all n locations
tattattattttgttnagaaagggtgagttatgatcaagcagtttatagcacactctagaagagctatgacgtcgcatgcacgcgtacgtaagctcggaattcggctcgaggataaagttgcctatgcacttcaacaaggtctaaaagttattgcatgcattggggagactctcgaacagcgtgaagctggtacaacaacggctgttgtttctgagcaaacaaaagcaattgcagctaaaatatcaaattgggacaatgtcgttttggcctacgagccagtttgggccattggaacaggaaaggttgctactcctgctcaggctcaagaggtccatgctgatttgaggaaatgggttcatgacaatgtgagtgctgaaattgctgcatctggaagaattatcaatggaggttctgtaaatggaggaaactgcaaagaattggccggacagcccaattgtgatgaatttttggtggttgttcccttcttaaacccgaattcttgaccttataatgcttgcactgtgaaaaaaatttgaatt

SEQ ID NO: 252477 - DNA, 559 bp, Glycine max
  unsure (1)..(559): unsure at all n locations
ttagattagagataaggagggttaananccatgagcatgacgctcttcgctacaacatctaagagctatgacgtcgcatgcacgcgtacgtaagctcggaattcggctcgagcttttttgcaattgtcatttgtcaccaaacaattgttgttagctctcacaagcaagcttcagcaacgacaatgaagaaagtagtcttacagttggacttacatggtgatagaatcaagcaaaaagctatgaaaacagcatctggcctttcaggggttgaatcagtttctgttgatatgaaagacatgaaaatgatcgtgttgggggacattgatccagtgagtgcagtgtccaagctacgaaagtgttgtcacactgaaatagtttcagttggaccagcaaaagaggagaagaaggagaatgtggagccagcaaaagtacctgttcctctaaagctccatgaagcctatcccctttattatcagatgacaccacattatagtcaaagtcactatgtcacaaggtacgaagaggattctaatggcgtgagtatctgctaagattgaaa

SEQ ID NO: 252478 - DNA, 535 bp, Glycine max
  unsure (1)..(535): unsure at all n locations
aggttncggagtgtttgactcatgaaaacgaattagtttgcagtactgtttgacatcttgacgtcgcatgcacgcgtacgtaagctcggaattcggctcgagctcacattcacgaccagcataattgtacatttttgcattgcgccggcaacgttggtgacgagtgacgaccctttgagtagcttgggcaaatattttggtcaacaaatatttttctgcaatatcagtgttttccattccatatcaaatttcaatcctttaggagtttccttccactcagatgtagctactagaatggacaatcagaagggaatgagtattagttttgagacattcacgtggaaaattgaaaatttctcaaaacagaacaccaagaaactacaatccaagactttccgaatccgaggttataaatggcggattcgtttgtatccattaatgaagaatgttgaccatttttcattgtatttgatggttgcggattctttacctccgtatggatggaacagaaatacgcatttcaagttggctctag

SEQ ID NO: 252479 - DNA, 531 bp, Glycine max
  unsure (1)..(531): unsure at all n locations
gagatagaaggcttgtgtatgtagtggggggggaatagtatcactctagaagagctatgacgtcgcatgcacgcgtacgtaagctcggaattcggctcgagagaagagcaaggttacaggcacaattttcacagatgaggcctgttgcaataacgccttctgttgcgccccgtatgcctctctaccctcctggtgctcctggtcttggacaacaatttttgtatgggcaaggacccccagccatgatgcctccacaagctggatttggttaccagcagcaactagttccgggaatgagacctggtggtggtcccatgccaagcttctttgttcccatggttcagcagggccaacaagggcagcgcccagtgggccgtcgaggaacaggtcctgtgcaacaaccccagcagccaatgccaatgatgcagcagcagatgcttccaaggggacgtgtctatcgntacccttctggccgcaacatgcaagatgtcccacttcaagttgcagcttgtggaatgctgtcggtccccc

SEQ ID NO: 252480 - DNA, 534 bp, Glycine max
  unsure (1)..(534): unsure at all n locations
naggggatggttattnaaattgatacggcagtatatgtaacactctagaagagctatgacgtcgcatgcacgcgtacgtaagctcggaattcggctcgagcgtcgtggtctttagcatttctcaccgactgcgaagggagagcgaataaaaaaaggcaaatcaaattcgagagaaggagagaatttagagagggaaaggatgaagatcacggcgttgttggtgcttaaatgcacgggcgagggatccgatccggtgattctggcaaacgcttccgatgtcagccacttcggctacttccagcgttccagcgttaaggaattcatcgttttcgttggtcgtacagtcgccagtcgcactcctcagggccaacgccaatccgtacaacacgaagagtacaaggtgcacacatacaacaggaatggtctttgcgcgttgggatttatggatgatcattacccgattcggagtgcgttttctcttctcaatcaggtaatagaaggattatcaaaaaacctttgccaagtcattgaaaa

SEQ ID NO: 252481 - DNA, 519 bp, Glycine max
  unsure (1)..(519): unsure at all n locations
gtaggggntntnccaatcgagtctcatagctaacactatagaagagctatgacgtcgcatgcacgcgtacgtaagctcggaattcggctcgagacaaagagaagcattagcactaggagcagcaacaactagtctcagctgaaatggcctcttcagtgatggcatctgtggccctcaaacctgcccctttcactgttgagaagtcctcagtgagaggccttccctctctctcaaggaactcttcttcattcagagttgtggccagtggcaagaagatcaagactgacaaaccttatggaattaatggtggcatggctttgagggatggaactgatgcatctggcaggaaaggaaagggaaagggtgtttaccagtttgtagacaaatacggtgctaatgtcgatggttacagtcctatctacgacaccaaggactggtctccaaccggtgatgtctacgctggcggtacgactggcttggatatacaggctggacctctacttgaacttttaagctgtg

SEQ ID NO: 252482 - DNA, 514 bp, Glycine max
gcaggttctgcaatagagtcgattgttatgctacactctagaagagctatgacgtgcgcatgctcccttagctcggaattcggctcgagtcttgttctatctgtgacgagcatcatggcctcaagagcagtgttattgttggctatgtgtgtgcttccggcgatggttgtggccattcgcccagcaaagaaccctttttgcgtgaagggtcgtgtctactgtgacccttgccgtgctggttttgagacctcagctaccacctacattgctggtgctgagattatgttgcaatgcaagagcagggttagcaacgaggttgtgtacacgaagaaggggtacaccgactcaaccggagcatacacaatgtacgtggatgaggatcacgcagatcagatctgcagtgccaagcttgtaagcagccctcaccctcaatgcaaggaagtcaccccaggccgcgacgaagccgtcgtgattctcacccgctacaacggcattgccttcgacgataggttcg

SEQ ID NO: 252483 - DNA, 523 bp, Glycine max
  unsure (1)..(523): unsure at all n locations
ggaagggtgtctgcctataagaacactacgcnatcgccannncngatctatagctatgacgtcgcatgcacgcgtacgtaagctcggaattcggctcgagggtgtgcagaagagcgtcgcagttgtaaccctaatcagaagaagcgcagcttcaagcgagtgacagccaccagccatgggtcgtatgcacagccgcggtaagggtatatcctcttctgctttgccctacaaaaggacacctcctagctggctcaagatctcttcgcaagatgtcgaagaaaatatctgcaagtttgcgaagaaaggtttgaccccgtctcagattggtgtcattctcagagattctcacggtattgctcaggtcaatagcgtcactggcagcaaaatccttcgcatcctcaaagctcacggacttgcgcctgaaattccataggatctgtaccatttgattaagaaggcagtttcaattaggaagcatcttgagaggaacaggaaggacaaggacttccagttcagggttgtt

SEQ ID NO: 252484 - DNA, 509 bp, Glycine max
  unsure (1)..(509): unsure at all n locations
aggtgtagtctacgtaaagcagtatactgtacacactctagaagagctatgacgtcgcatgcacgcgtacgtaagctcggaattcggctcgaggttttctgcttccttaaaatcttcactagcaatgaagattgagtttgtccagtttttcactttacattaccaaaagaaagaactaggaagaatgggagttcagcaaaagctcatttctttcctctttcatacttgtcttgttttcattatgttttcccttgtaagctcatcacaagagcaccaccaaattacaagcagcccttcaaaaaccaaagatagcaaccacattaagatgagtcctggacttcagtttcagattacattacatggctttctcctgtgggcttcaatggggttcttgatgcctgttggtatacttgcaattagattgtcaaacagagaggagagtccaaaaaggcatagagttttgttctatgttcattcaattttgcaggcaactatatcttagtccatan

SEQ ID NO: 252485 - DNA, 518 bp, Glycine max
  unsure (1)..(518): unsure at all n locations
ngggaggggtctgtttatgaaaggagatgtaatgcaccactctagaagagctatgacgtcgcatgcacgcgtacgtaagctcggaattcggctcgaggtgatgcaatgctcaagctatggcacttgtatttctatttgtatctctcatcgtttcccccaaacctctctatcttttcacgttccagctcaccactggaaccgattcaagagtgcacgaaggaatcagaggatgatggttctttgtagcgtggacgaccgaagctacaacctagattccccgaggaaaataaaaattgtggaacacgtttgtctcctcaaagcaaagcatgatttatctgaagaggaagagaacgacatgcttggctatttgtacacaacgcagtaccaaatgggcggtgttgttgcaatttcattagggcgcatttcttctccaaatcctgagcgctacacgcatgctctctatatgcggtttcagaagaaggaaaatcttgaaaagttttacgagaatcccttttaca

SEQ ID NO: 252486 - DNA, 511 bp, Glycine max
  unsure (1)..(511): unsure at all n locations
agaggttcngtccatgtacgacggagtanagntaacancatagaagagctatgacgtcgcatgcacgcgtacgtaagctcggaattcggctcgagctgaaagcgttgaagtagagaacaactagcgagagagagagttgaatgtgaatggggaatcagacgcagatgtggacgcaggacgaagatgatgctctcatcgccggcgttgaaaagcacggtcccggatagtggaagaacattctcaaggatccccaattcgcccctttcctcacttcccgttccaacatcgacctcaaggataaatggcgcaatttgagcgtcagctacggagctcagggctccaaagaaaaatctagggttcccaagcttaaagccctccctgctcctactgctcctaccggcactcctcagaacgccgctcctgctctgcaaaacgcatcatctgatgtcactcgctcagatgcttctcagaatgaccaagatgccaaaaaccctccatggtataatgcaat

SEQ ID NO: 252487 - DNA, 509 bp, Glycine max
aggtgtctgcaatagaagtgtactgacgcattcctataaacgagctatgacgtcgcatgcacgcgtacagtcatgctagttcggctcgagcttcatctttactcttccttcaaatttccaacaagaaagtgtgttcaactgtccctttattggcgttagctatgctacctactggagcaaaagagacccaattacgtgagaacaacagtcagaaggttcatcctcaaccaatggaagaggccatgaatcagaatccagaagcaatggaaaccctaatatctaaagtttttacaaatatctcttccttgaagtcagcttatatccagcttcaagctgctcatactccctacgaccctgataaaatccacactgctgataaacttggtattagtgagctgaaaaatctgtctgaactcaagcatttctacagggagaacaacccgaaaccagtgtgtgtttctccccaagactcacgtttagcttgcagaattcaagaacaacagagcctt

SEQ ID NO: 252488 - DNA, 502 bp, Glycine max
aggtttttaataaagattattagtatcgctctaccagagctatgacgtcgcatgcacgcgtacgtaagctcggaattcggctcgagctctttgatacccttttgttctttttggtgctttaatttgcactagcaagggggttggttttatttctgtttgcttgcaacaatggctgtggctaataagttactttctgttttgatcattgccctcattgccatttccatgcttcaaacagtggttatggcatctcatggacatggaggccaccactacaatgacaagaaaaaatatggacctggcagtctcaaaagcttccaatgcccatcacaatgctcaaggaggtgtggcaagacccagtaccacaagccctgcatgtttttctgtcagaagtgttgtaggaagtgcctatgtgtgccaccggggtattatgggaacaaagcagtgtgcccttgctacaacaactggaagaccaaggaaggaggacccaaatgcccttaat

SEQ ID NO: 252489 - DNA, 505 bp, Glycine max
  unsure (1)..(505): unsure at all n locations
tagtgttgtctaaaagatagatagtatgactctaccagagctatgacgtcgcatgcacgcgtacgtaagctcggaattcggctcgagcccttctaaaaccttatctctttcagttatcctcggccatggcgtctctactgctagcatcaccttctccactctccgttcaattgcacaattccacctgtcacctttccttctctcactcccaaactctttcctcaccgctctccacttcctttccttctctctcagcctctgcaaccaccactctctccccaaccccttctgtgtactgtggcagaggggacaggaaaactgcaaagggaaagcgcttcgctcattcatttggaaatgccaagccaaaggacaagaagaagggtagagggccactgaggccttatgctccaccggcaccttccaaaaaagacaggttcgaagataatgaagtggtgaagattgaaattgacgagtctctctnttctggttgattntggtggtgaat

SEQ ID NO: 252490 - DNA, 504 bp, Glycine max
atgttcgtcttatgaagggggtatatagtaccactctagaagagctatgacgtcgcatgcacgcgtacgtaagctcggaattcggctcgagggaatgttctctcagatttctttgtgtcagttggattgtcagaaaacttgtcagttgcaatctttgcaatggactctctgcgacaacttgcaatgaaatttttggagcgtgaggagctggctaattataacttccagaatgaatttctgagaccatttgtgattgttatgcagaaaagcaacaccacagaaattagagaattaatagttcgttgtatttcacagatggtccttagccgtgtcagtaatgtgaaatctggctggaaaagtgtttttatggtttttacagctgctgcagccgatgagcggaagaatattgtattattagcatttgagaccatggagaaaatagtgcgtgaattttttccttatattactgagacagagacaatgaccttcaccgattgtgtccga

SEQ ID NO: 252491 - DNA, 517 bp, Glycine max
gggagaaggttcagtctacgaaagcagtttgtatgcaacactctagaagagctatgacgtcgcatgcacgcgtacgtaagctcggaattcggctcgagtttgagacgtggctggttcaactgaggtgatggctttgaatttgccttctcccgcccaagtgaagcccttatttttctcttcaaataactccacaaaacttccaggtagcttttctttgaagagaaaagatagtgacacaacagtagagagacgagtttattgctctgccgctgctcaatcaccaccaccagcatggccaggaacagctattcccgagccttctgatttcaagacatgggatgggcaaaaacctatttctgtcttaggatctacgggttcaattggaactcagacactgagtatagtggctgagttcccagaaagatttaaagttgtgagccttgctgctggctctaatattactcttcttgctgaccagattaaaacatttaagcctgaagttgttggtcttagaaat

SEQ ID NO: 252492 - DNA, 508 bp, Glycine max
  unsure (1)..(508): unsure at all n locations
aaggtgtcatcttaagggggaggatgaggagattcctcatgagctatgacgtcgcatgcacgcgtacgtaagctcggaattcggctcgagatttgatggcttgtgcgcagactggttccggaaagactgcagcattctgtttcccaatcatcaatgggattatgagaagccaagcccaacccctccagaggccccctcgcggcgtccgcatagtctacccacttgcccttgttctctcaccaactagggagctatccatgcagatacatgaagaggctagaaagttttcataccagacaggggttagggtcgttgttgcttatggtggagctccaattaatcagcagctccgggaacttgagaagaggggtggatatcctttgtgcaactccaggaagattggtagatttactggagagagctagagtttcattgcagatgatcagatatttggccttagatgangcagatagaatgctggatatgggttttgagccacaaaataaga

SEQ ID NO: 252493 - DNA, 498 bp, Glycine max
agacgttgagttcattcgttacgtgcatacataagagttatgacgtcgcacgcacgcgtacgtaagctcggaattcggctcgagatttgatggtttgtgcgcagactggttccggaaagactgcgggggtctgttatccaatcatgaatgggattatgagaggccaagcccaacccctccagaggccccctcgcggcgtccgcatagtctacccacttgcccttgttctctcaccaactagggagctatccatgcagatacatgaagaggctagaaagttttcataccagacaggggttagggtcgttgatgcttatggtggagctccaattaatcagcagctccgggaacttgagagaggcgtggatatccttggtgcaactccaggaagattggtagatttactggagagagctagagtttcattgcagatgatcagatatttggccttagatgatgcagatggaatgctggatatgggttctgagccacaaatat

SEQ ID NO: 252494 - DNA, 506 bp, Glycine max
  unsure (1)..(506): unsure at all n locations
gagtgtcttcngataagaagggatagaaggtattcctcagagctatgacgtcgcatgcacgcgtacgtaagctcggaattcggctcgagacaaagccttttcctcttaccaagcactcggaggacacaaggccagccaccggaagctcgccggagaaaaccacccgacctcctccgccgtgacgacgagttcggcgtcgaacggtggtggtaggacccacgagtgctccatctgccacaagacgttttcgacaggacaggccttgggaggacacaaacgttgtcactacgaaggcggtaacagcgccgtaaccgcctctgagggagtggggtccactcacacaggaagccaccgcgatttcgatctcaacctcccggcttttccggacttctcagcaaggttcttcgtcgatgacgaggttaccagtcctcatccatccaagaagtcccgtttcaatttgaccatacccaagattgaaatccctcaatactgatccatagatccaa

SEQ ID NO: 252495 - DNA, 517 bp, Glycine max
  unsure (1)..(517): unsure at all n locations
ngggggaatggtttgtctatgaacagacatgtatagcactactcagagctatgacgtcgcatgcacgcgtacgtaagctcggaattcggctcgaggaaaaggctggtttatctgcatggtgctatatgtgaagcgttgcgtctctttcctcctataccctttgagcgcaagcaagcaataagctctgacatgcttcctagtggtcatcgtgttaattccggtacaatgatattattttctttgtatgcaatgggaagatttgaagaaacatggggaaaagattgttttgagttcaaaccagagaggtggatctcagagaaaggaggtattgtttatgtaccatcttataaattcatagcttttaacgcaggacctaggacttgcttgggcaaagactcatccttcattcaaatgaagatggtggcaactgctattttgcacaagtatcgtgtccaaatggtggaaggttttggtgctactccaagcctttcaattgttcttcttatgaaagatggtn

SEQ ID NO: 252496 - DNA, 504 bp, Glycine max
ttgtgttgtttaagaagtagtatgtatgactctaccagagctatgacgtcgcatgcacgcgtacgtaagctcggaattcggctcgagtgaaattatcaaggttttaggtaccccaacaagggaagaaatcaagtgcatgaatcctaattataccgagtccaaatttccacaaattaaagctcacccatggcacaagatctttcacaagcgcttacctcctgaggctgtggatctcgtctcaaggctactgcaatactctccaaatcttcgatgcacagctctggaagccttggttcatccattctttgatgaactgcgtgatccaaatacccgcctaccaaatgggcgttaccttcccccactctttaacttcagagccaatgagcttaaaaggatgccttcaggcatgctggtgaaactgattccatctcatgcaagaaagcagtgtgccttggttgcgtcatagtgtagcctcgtgtaaatattatctactctggctgtaga

SEQ ID NO: 252497 - DNA, 516 bp, Glycine max
  unsure (1)..(516): unsure at all n locations
gtgaagaagttgtgtcctcttagctctnagctangacagtaccagagctatgacgtcgcatgcacgcgtacgtaagctcggaattcggctcgagcacttccccactctctcacatattgcctctctctttcctgtttccattgtccatggcgtccctcatcgaatctggctggcagtacttgatcacacatttcagtgactttcaactggcgtgtttgggaagtttctttctacatgaaggcgttttcttcttgtctggacttccctttatatggcttgagagggcagggtggatgagcaagtacaaaattcaggccaaaaataacacccctgcagctcaggagaaatgtattgttcgtctgttgctttaccattctggtgtcaatctacctgttatgattttttcatatcctgtcttcacatacatgggcatgcggagtagtcttcccctaccgtcctggatagtagttctaattcacataatcttttacttcattctggaggactntatattcn

SEQ ID NO: 252498 - DNA, 505 bp, Glycine max
atgttcgtcaatgaaagagctagtatgtaccactctagaagagctatgacgtcgcatgcacgcgtacgtaagctcggaattcggctcgagtgcttatactggagaggttagtgctgaaatgcttgttaatttgggaattccttgggttattattggtcactctgaacggaggcagcttttgaatgaatcaaatgagtttgtgggagataaagttgcctatgcacttcaacaaggtctgaaagttatagcatgcattggggaaactcttgaacagcgtgaagctggtacaacaacggctgttgttgctgagcaaacaaaagcaattgcagctaaaatatcaaattgggacaatgtcgttttggcctatgagccagtttggccattggaaccaggaaaggtggcaactcctgcttcagctcaagaggttcatgctgatttaagggaaatgggttcatgacaatgtgagtgctgaagttgctgcatctgtaagaattatctatggagg

SEQ ID NO: 252499 - DNA, 516 bp, Glycine max
  unsure (1)..(516): unsure at all n locations
ggggggagggtttgtctatgaaagacantgtattgcataactctagaagagctatgacgtcgcatgcacgcgtacgtaagctcggaattcggctcgagggcgctgacaaggcttttggccgtgacattgttgacgcacactacaaagcctgtatttatgctggcatcaacatcagtggaattaatggagaagtgatgcccggtcagtgggaattccaagttggaccttcagttggaatctcagctggtgatgagatttgggcagctcgttacatcttggagaggatcactgagattgctggtgtggtggtttcctttgaccccaagccaattaagggtgattggaatggtgctggtgctcacacaaactacagcaccaagtccatgagagaagatggtggctatgaagtgatcaaagcagcaattgacaagttggggaagaagcacaaggagcacattgctgcttatggagaaggcaacgaacgtcgtttgacaggacgccacgaaaccgctgact

SEQ ID NO: 252500 - DNA, 509 bp, Glycine max
atgggtcttctgactatgcaagtattgatagcactctccaagagctatgacgtcgcatgcacgcgtacgtaagctcggaattcggctcgagaactgaaccaaatcatcacacacacatactaagaagcaacaattcttctacaatggatctcctccttctggaaaagaccctcataggtctcttcctcgctgcggtggtcgccatcgccgtctccaccctccgcggccggaaattcaagctcccaccgggcccactccccgtcccaatcttcggcaactggctccaagtcggcgacgacctcaaccaccgcaacctcaccgatttggccaaaaaattcggtgacatcttcctcctccgcatggggcagcgcaacctcgtcgtggtttcttcccctgagctcgccaaagaggttctccacacgcagggcgtggagttcggctcccgcacccgcaacgtcgtcttcgacatcttcaccggaaagggccaagacatggtcttcaccgtctcc

SEQ ID NO: 252501 - DNA, 504 bp, Glycine max
  unsure (1)..(504): unsure at all n locations
agagtctggaaatgtcaatatagtaacactctcgaagagctatgacgtcgcatgcacgcgtacgtaagctcggaattcggctcgagaggcagattgttgtaatactgattcatgttaactcacaggtaagtgtagaacacactgctgaaacacctaccattgatgtgagctcagatgaatctcatggtgatggatatgatgacagtgacaagagaatccatgacatgaccataattaacatgcagctaggatggaatcctaagacttcactttgggacctgcttgaatccactctgacatatcagcacaggacatatgctgaagccgataacaaagtcattgcaaaacccctcgtaggttaagctattacagtgatggtgatgtgctactcttcgaaaaangtgaggtcttgccccaagtgttgtgacatattctactgcttgggcttatataaaatcgtacatttttcttccttagagggcgttagccaggacgcaatataac

SEQ ID NO: 252502 - DNA, 510 bp, Glycine max
  unsure (1)..(510): unsure at all n locations
nagangtcntggaaaacgacaaagtacagtagacactcatccaagagctatgacgtcgcatgcacgcgtacgtaagctcggaattcggctcgaggcttttttggtggcaaaggagttgtggaaaatgtgcctacaaatagctccctgaaagcacatccacgctttcaagccgagaacttagacaagaacaagaatatatatgaacgaattgaaggccttgctaagaagcatcaggccactcctgcccagttggcattagcatgggtacttcagcaaggcgaggatgttgtacctatccctggaacaactaagattaagaacctggatcaaaacataggtgccttagcagtgaaactgtcagaaaaagacctgagagaaatttctgaagcggttcccattggtgatgtagcaggtggtagatactacaatggattggatcacttttcatggaagtatgctaacacacctncaaaagattcanaaatctcaacctgacgcacccaaccaacc

SEQ ID NO: 252503 - DNA, 505 bp, Glycine max
  unsure (1)..(505): unsure at all n locations
agtgtcgtctaagaaggaaatggtatcgctctagcagagctatgacgtcgcatgcacgcgtacgtaagctcggaattcggctcgagctctctctctctctcaactcccaattactttgttgcatttcacacaccaacttcccatagaagagagaagagagaagagactcttccttccatcctgcaactcaaatcatcatgcaagactccagctcaatgaagatctcccctctggatctcatgtccgccatcttcaagggcaagctcgacccctccaacgtctcctcctccaccaacgccgccgccgccgccttcctcctcgagaaccgcgacttcctcatgctcctcaccacctccgtcgccgtcctcatcggctgcgtcgtcgtcttcatctggcgcagatcatcctnccccaaggccaagcctctcgagcctnctaaacgcgtcgtcgagaagcttcccgaaatcgaagtcgacgacggcaccaagaaggtcaccatcctctn

SEQ ID NO: 252504 - DNA, 516 bp, Glycine max
  unsure (1)..(516): unsure at all n locations
ggggggagggatctgtttaagaagggagatgtatagctctagcagagctatgacgtcgcatgcacgcgtacgtaagctcggaattcggctcgagacacaacgcgcactctctcttttctctcttaacacaaaaaccctatcgttcttcgcggtttcgccgattctcgccatgccgaaagccaaatccgacgccaaagccgccgatagccggttgaagcgcaagggcgctggtgctggaaggaagcaatcgaagaaagctgctaaggatcctaacaagccaaagagacctccaagcgctttcttcgttttcatgtccgagttcagagagcagtttaagaaggagcatcctaacaacaaatccgtcgctgttgtcggtaaagctggtggtgacaaatggaaatcgctgtctgatgctgaaaaagcccccttcgttgccacggccgaaaagaagaaacaagagtatgagaaaactatnntggcttacaataagaaattggaggggaagaattcagagga

SEQ ID NO: 252505 - DNA, 507 bp, Glycine max
  unsure (1)..(507): unsure at all n locations
ggaggttctgtttaaagaagattatggttcgctctacaagagctatgacgtcgcatgcacgcgtacgtaagctcggaattcggctcgagcccaatctttgcctggctaaggaaaaacaaaaccggaagcgctcactaggcagccatgccaatttggcagttgtgtccaaacatccattccgttcctcaaatcgtagcgtgcacccgcaacgacaaaacgggatcgaaatccgtttcagggagacccaaggtgagccctcaactgaaccggtggttcagagcccgagccgtgcggtccggtcagaaattggaccggtccagtctccgaacccaacccccggagcccaaccctcctgtacgtccacttcctctcccggtggacccagacggcgccgtcaatttggacggcgcagatgtcatgaccgtcaagtccatctatatagtctccgacggaaccggctggaccgncgaacactgcgttaacgccgctttgggtcagttcgattac

SEQ ID NO: 252506 - DNA, 510 bp, Glycine max
aggtgtcagtcttttgtaaagcagatgattagtaccactctagaagagctatgacgtcgcatgcacgcgtacgtaagctcggaattcggctcgaggttctatctgtgacgagcatcatggcctcaagagcagtgttattgttggctatgtgtgtgcttccggcgatggttgtggccattcgcccagcaaagaaccctttttgcgtgaagggtcgtgtctactgtgacccttgccgtgctggttttgagacctcagctaccacctacattgctggtgctgagattatgttgcaatgcaagagcagggttagcaacgaggttgtgtacacgaagaaggggtacaccgactcaaccggagcatacacaatgtacgtggatgaggatcacgcagatcagatctgcagtgccaagcttgtaagcagccctcaccctcaatgcaaggaagtcaccccaggccgcgacgaagccgtcgtgattctcacccgctacaacggcattgccttcgacgata

SEQ ID NO: 252507 - DNA, 522 bp, Glycine max
  unsure (1)..(522): unsure at all n locations
ngggggagaaggttnngtcaatctgaaaggcgntagtatagtaaacactctagaagagctatgacgtcgcatgcacgcgtacgtaagctcggaattcggctcgagcttcaagattcaggtactgcgtttcggaagcagacacagatggctcgtacgaagcaaaccgctcgtaagtccacaggaggaaaggctcctaggaagcagcttgcaaccaaggctgcacgtaagtctgcaccaactactggtggtgtgaagaagccccaccgttatcgtcctggtaccgttgctcttcgtgaaattaggaaataccagaagagtaccgagcttttgatccggaagctcccctttcagaagctggttcgtgaaattgctcaggacttcaagactgatctgcgtttccagagccacgccgtgcttgcattgcaagaagctgctgaggcataccttgttgggctctttgaggacactaacctgtgtgccattcacgccaagcgtgtaaccattatgcccaaggatattcag

SEQ ID NO: 252508 - DNA, 503 bp, Glycine max
  unsure (1)..(503): unsure at all n locations
agatttttggataagaaagataaagtgacactctcgaagagctatgacgtcgcatgcacgcgtacgtaagctcggaattcggctcgagattagtttggagaacagtgtttgttatcataaccacttttgtagcaatgttgattccattcttcaatgacgttatgggacttcttggagcactggggttttggcctttaagtgttattctcccagtgcagatgagtatcaaacaaaagaggaccccaaggtggagtggtagatggattggtatgcaaatcttaagtgttgcttgtttcatagtatcagttgcggctgctgttggctcagttgccagtatcgtgcttgacctacagaaatacaaaccgtttcatgtagactattaaactccatccaccctctcctagcaaaggctaanaactgatgtgggcagtgattgggggttggataatctttggtttagatctgagattgtacccaaaggtactctcacaactaggaaccat

SEQ ID NO: 252509 - DNA, 518 bp, Glycine max
  unsure (1)..(518): unsure at all n locations
gtgtggaaggtttgtattatgaagggtagtttgtatagactatagcagagctatgacgtcgcatgcacgcgtacgtaagctcggaattcggctcgagattgaatgtggtggaggttacatcaagcttctctctggatttgttaatcaaaagaagtttggtggggatacaccatatattttaatgtttggaccagatttatgtggcacggatacaaagaagctccatgtgatactctcctaccacggtcaaaattaccccataaagaaggacctgcaatgtgaaactgacaggttaactcacttctacacattcattctcaggccagatgccacatacagtgtcctggttgacaatagaaagagagattccggaagcatgtatacagattgggatattcttcctccacgaaaaatcaaagatgtcaaggccaaaaagcctaaagactgggaagaaagagaatacattgaagaccctaatgatgtcaaacctgagggatatgattcgatcccaagagaan

SEQ ID NO: 252510 - DNA, 511 bp, Glycine max
ggggagggtctgtaaaagagagagtatgaaacgctctacaagagctatgacgtcgcatgcacgcgtacgtaagctcggaattcggctcgagctcgagccgattcggctcgagctttcttcaccgttcgctctttctttctcccctacacaaaacatggctttgcccaatcagcaaaccgtcgattaccccagcttcaagcttgtcatcgtcggcgacggtggcacaggaaagacaaccttcgtgaagaggcatctcactggtgaattcgagaagaaatatgaaccgaccattggtgtggaggttcatccgttggattttttcacgaactgtggaaagattcgcttctattgttgggatactgctgggcaagagaagtttggtggcctcagagatggatattatatccatgggcaatgtgccaataatcaaggttgatgttactgcccgtctaacatacaaaaatgtccctacctggcaccgtgatctttgccgggtctgtgaaaacatccc

SEQ ID NO: 252511 - DNA, 511 bp, Glycine max
  unsure (1)..(511): unsure at all n locations
ggaagagttgtttacctccgaataancagtaacgctctagcagagctatgacgtcgcatgcacgcgtacgtaagctcggaattcggctcgagctcaagcattgcatccctcttgatttgtagtttgttttgtgctttagataaaagttctgccaaatcaagaggggttttaagatcatagtgtgtgttttgcaacaatggctaagttctttgctgctatgatcttggcactctttgccatttccatacttcaaacagtggtaatggctgctaatgaacaaggaggccacttgtatgacaacaagagcaaatatggaagtggaagtgtcaagagttaccaatgcccatcacaatgctcgaggaggtgtaacccggaccaataccaccaggcctggatggttttctgtcagaagtgctggcagacatgcctgtgtgtgcccccggggtattatggtaataaagctgtgtgcccttgctacaacaactggaagaccaaggaaggaggacccaat

SEQ ID NO: 252512 - DNA, 509 bp, Glycine max
  unsure (1)..(509): unsure at all n locations
gaagtatcngtctaagaaagtagtttgcaagnctctaccagagctatgacgtcgcatgcacgcgtacgtaagctcggaattcggctcgagttgagaactattaaggagaagcaaatggcttcctcaatgatctcttccccagctgttaccactgtcaaccgtgccggtgccggcatggttgctccattcactggcctcaagtccatggctggcttccccaccagaaagaccaacaatgacattacctccattgctagcaacggtggaagagtgcaatgcatgcaggtgtggccaccagttggcaagaagaagtttgagactctttcctacctgccagaccttgatgatgcacaattggcaaaggaagtagaataccttcttaggaagggatggattccttgcttggaattcgagttggagcacggtttcgtgtaccgtgagcacaacaggtcaccaggatactacgatggacgctactggaccatgtggaagctgcctatgtttggttg

SEQ ID NO: 252513 - DNA, 515 bp, Glycine max
gggaaagaggttttgtctaagacaagaagatgattgcaccactctagaagagctatgacgtcgcatgcacgcgtacgtaagctcggaattcggctcgaggttcttcgacccgaaggcaacgaactcttcacagacgttggcatcgcattcgacatgatgcttctcgctcacaacgccggtggcaaagagaggaccgaagagaactggaagtggctgttcaaggaaaccggtttcgcgcgttacaacatcatcaagatcaacgctctcccttccatcattgaggcgtttccaatctgaagaagatgccactaccacaactgcatgtggtttttatgttgcatgtgttgttgttattattaacagctatatgatcttcgttttaattttgtggttttccttcctgcccttgttatgtttgtgcattaaataaaagtaagaaatgccccaccactaagtaatgctatatggattatgtatgtgttccatatatgtcaagtgagtggtgtgtggttgta

SEQ ID NO: 252514 - DNA, 509 bp, Glycine max
aggttcagtccatagaaggagatagatagtcacactctagaagagctatgacgtcgcatgcacgcgtacgtaagctcggaattcggctcgaggcagcagagacggcagctgcatccgaacctgggtttgtagctgaagatatggacactccacgcaacgtgtataaagtatcagctacaaacccaggttcggatgtagcagcagagacggcagctgcattggctgcttcttcaatagtattcagagattcagatccaagctattcctccaaattgcttcaagcagccatcaaagtattcaattttgcagaccgttacaggggttcttatagtgattctcttaattcggttgtctgtccattctactgctcttactctggataccatgatgagcttctgtggggtgcatcatggatttataaagcatcaggaattaacacttatatacaatatatacaatccaatggccacatattaggggctgatgatgatggttacacattcagttgg

SEQ ID NO: 252515 - DNA, 515 bp, Glycine max
gaggggagcttttgtctacgacaagcagatgattgtagacactctagaagagctatgacgtcgcatgcacgcgtacgtaagctcggaattcggctcgagtgattaacacagagaatggaaaacctgaaacaaaagctgaagacttgaaggtacctgaatctaaaaaagctgttgccaaggctagtggatcagcaaaacaagtcaaggttgttgaaccaaaaaaagataacgaggaggactctgatgatgattctgatgatgatgattttggatcttctgatgaagagatggaggatgctgatagtgacagtgatgatgagagtggtgatgaagatgatgatgaagagacccctcccaagaaggtggatctgggaaagaagagacccaatgagtctgcatcaaaaactccagtttcttccaagaaagccaaaaatgctactcctgaaaagactgatggtaagaaaggtggacatacagcaactcctcaccctgcaaagaaaggcggaaagactccc

SEQ ID NO: 252516 - DNA, 507 bp, Glycine max
  unsure (1)..(507): unsure at all n locations
aggttcagtctcagtaaagatatgtatagtatcactctagaagagctatgacgtcgcatgcacgcgtacgtaagctcggaattcggctcgagcctcccactgcttctttcttccttgcagcgcgattgctgcatcctcctccaataagagctcgctgctagcgaaccctaacacggcggcaacgtgaggtgttcggttgaagttcagatcagccatggccgcagcaacccccacttctctgcggttcctcctctccgtttccgtaaccctaaccctaaccctgcttaacctcgccgcctcaaattccgaaggcgacgctctctacacgctgaaacggagcctctcggaccctgacaacgtcctccagagctgggatcccactctcgttagtccctgtacttggttccacgtcacctgcaaccaggacaaccgagtcactcgagtggatcctggtaactctaacctatctggacatttggtacctgaacttgngaagctggagcatct

SEQ ID NO: 252517 - DNA, 499 bp, Glycine max
ggggttggtacagaaatacagtacactctacaagagctatgacgtcgcatgcacgcgtacgtaagctcggaattcggctcgagaaaatggaccgcagaagcctcctctgcctcgcaatcatcggcattgtcgtcgccgccgtcggaggtcagtctccagcggcggctcccaccacttcctcggcatccccagccacagccccttctaaacctaaaccaaaatcacctgcgccagttgcttctcccacttcatctcctccagcttcatcccccaatgctgcaaccgcaacccctcccgtttcgtctcccacggtagcatctcctccgtctaaagctgctgctccagctccagcaaccactcctccggtggccacacctcccgcggccactcctcctgcggctacacctcctgctgtgacaccagtgagctcgccgccagcgccagttccggtgagttctccaccagcgcctgttccggtgagctctccccctgcactggg

SEQ ID NO: 252518 - DNA, 502 bp, Glycine max
  unsure (1)..(502): unsure at all n locations
aggagttgcgctagctcactacgtagcacatcgaagagctatgacgtcgcatgcacgcgtacgtaagctcggaattcggctcgagagttcattctctttgcgcagttccctacctctcctttcaagatgcagatcttcgtcaagaccctcaccggaaagaccatcacccttgaggtggaaagctctgacaccatcgacaacgtcaaggccaagatccaggacaaggaaggaattcccccggatcagcaacgtctcatcttcgccggaaagcagctcgaggacggccgtaccctcgccgactacaacatccagaaggagtcaacccttcaccttgtccttcgtctccgtggtggcatgcagatcttcgtcaagactctcactggcaaaaccataaccctagaggtcgaaagctctgacaccattgacaacgtcaaggccaagatccaggacaaggagggaatccccccagaccagcaacgtctcatcttcggcggaaagcaan

SEQ ID NO: 252519 - DNA, 502 bp, Glycine max
  unsure (1)..(502): unsure at all n locations
aggatttggtaatgcaagtattggagcactctcgaagagctatgacgtcgcatgcacgcgtacgtaagctcggaattcggctcgaggaaaaaccaatacccttggcgagtgaagccctagactcactagactacacacttcgcaatggcggttgttgctcaaacccctgacatcgccggcgagcggcagtccggccaagacgttcgcacccaaaacgttgtggcatgccaagccgttgccaacatcgtcaaaagctctttaggccccgttggcctcgacaagatgctcgtcgacgacattggcgacgtcaccatcaccaacgacggcgccacgattctcaagatgctggaagtggagcatcctgctgccaaggttttggttgaactcgccgagccttcaggatcgagaagtcggagacggcactacttctgtcgtcattgtagctgctgagcttctcanaagggcaaatgaccttgtcaggaacaagattcatcctacctcg

SEQ ID NO: 252520 - DNA, 513 bp, Glycine max
  unsure (1)..(513): unsure at all n locations
ngaggaggctctgtctataggagagtagttgttatgctctagcagagctatgacgtcgcatgcacgcgtacgtaagctcggaattcggctcgagcacgattcagagatttggttcgctgcctgaaacctaatggctccgaagcccaaaccggcgccgtcgcagcctgctcctcctcctgccctcgaagatctctttaccacgctcaaccgccacatccaggcttccgcatacgacaatgccgtcaggctcacggatcagattctcgccattgctcccggcgacgaggacgcgctccgatgcaaggtcgtcgcgctgaataaaaatgaccgcgtcgaggacacactctccgncattcggtcctctaagaagcagctcgatgattntcatttcctcaaggcatactgcttatacagacaaaacaagttggatgaagctntggagtctttgaaaagacaagagagcaatgatgaaacaatgcttttggaatgtcagatatgggatcgtcttgggaa

SEQ ID NO: 252521 - DNA, 505 bp, Glycine max
gaagttctgtttaaaagataatttgtatgctctaccagagctatgacgtcgcatgcacgcgtacgtaagctcggaattcggctcgagcatagtagctattatactctctagagtaattgcggaatctgctagaattttctaataatggcgaaagacgttgagcaggtcacagagcaaggtgaatactccgcgaaggactaccatgaccctcctccggcaccgttgatcgacccagatgagctcacaaagtggtccttgtacagagccgccatagctgagttcatagcaacactcctttttctttacatcaccgtgttgaccattattggctacaagagacagagtgacaccaaaattcccggtaacaccgaatgtgacggcgttggcattttgggcatcgctagcgccttcggtggcatgatcttcatccttgattactgcactgccggaatctctgggggacacatcaaccctgcggtgacattcgggttgatccttggacgca

SEQ ID NO: 252522 - DNA, 512 bp, Glycine max
gtgagacggctctgtaataaagaaatgattgtatcgctctagcagagctatgacgtcgcatgcacgcgtacgtaagctcggaattcggctcgagagaatccacacaaactcagggtagggcagagagagagagagagagagagagagagagagagaatgggagggtgggctatcgcggtgcatggtggcgctggtgtcgaccctaatctcccactcgagcgccaagaagaagcgaaacaacttctcacgcgctgtctcaatcttggaatctctgctctaaattctaatcttcccgccatagatgtcgtcgaacttgtggtgagggaattggaaacggatccgctgttcaattcgggccgtggatctgccctgacagaaaaaggaacggtggagatggaagctagcatcatggatggtcccaaacgacgatgcggcgccgtttcgggtcttaccaccgttaagaacccgatctcgcttgctcgtttggttatggacaaatccccgcattccta

SEQ ID NO: 252523 - DNA, 510 bp, Glycine max
tgaagttctgtcattgatgggagatgtatagtatcactctagaagagctatgacgtcgcatgcacgcgtacgtaagctcggaattcggctcgagctggcgtggtgaagggtttcgaggggaaaacaaaatacggtgcgttgaatggtggtgccaactttgttgcccctggttacaccaagggtgatggtcttggtgctgagattgttggcactttcatccttgtttacaccgttttctccgccaccgatgccaaacgtagcgccagagactcccacgtccccattttggcacccttgccaattgggttcgctgtgttcttggttcacttggcaaccatcccccatcaccggaactggtatcaaccctgctcgtagtcttggtgctgctatcatcttcaacaaggaccttggttgggatgaacactggatcttctgggtgggaccattcatcggtgcagctcttgcagcactctaccaccaggtcgtaatcagggccattcccttcaagtc

SEQ ID NO: 252524 - DNA, 512 bp, Glycine max
  unsure (1)..(512): unsure at all n locations
nggtggatgctttgtccatgacaagaactgtattgcatcactctagaagagctatgacgtcgcatgcacgcgtacgtaagctcggaattcggctcgagcttacagttgctgcgtcgcaaggtaccggcggcgacggagaactatcttctcaattttcgatcactgcattggttctgttgtcaagggttttgttcttcctgacttgcatacttgatggcttcaaagttgcagaagttgcaggccacagcatctcaagcgtctcaatttgtatgcagtcgtggaactaactactacaagcaattgctggaacagaacaagcaacacattcaggagcctcctacagtagagaaatgcaacctgttggcaaagcaattgttttacactcgccttgctagtattccgagtcgtaatgagtccttttggaaggaacttgattatgccaagaatttgtggaagaacaggaaagagctaaaggttgaagatgcaggaattgctgctttgtttggcctcga

SEQ ID NO: 252525 - DNA, 512 bp, Glycine max
  unsure (1)..(512): unsure at all n locations
ngaagttgtgtttaagaaggaggatgtatancatacactctagaagagctatgacgtcgcatgcacgcgtacgtaagctcggaattcggctcgaggtcacaccaaaaaattcttgcttagctctcacaaacaatctttaacaacaatgaagaaagtagtattaaaggtggacttaaataatgatagaatcaagaaaaaagctatgaagacagcatctggcctttcaggggttgaatcgatttctgttgacgttaaggacatgaaactagtcttattgggtgagattgatccagtgagtgcagtgtcaaagctacgaaagtggtgtcacactgaactaatttcatttggaccagcaaaagaggagaaggagaaggaccccgctatttcttttttacgaagcctatccccttaatatcacatgaaaaccaacattgtatggttcaaattactaggttagaggttttgaagagagtcttaaggctgcgtgatcatctgctaaattctagaatatt

SEQ ID NO: 252526 - DNA, 503 bp, Glycine max
agcttctgcaatgggagagtattgtaacactcatccaagagctatgacgtcgcatgcacgcgtacgtaagctcggaattcggctcgagtcttcatccatagacatggccaccgtcacttctgcagccgttgctattccctcattcactggcctcaaagcaagcgcaggcaaagtgagtgccgcagttaaagtctcagctccccaagccacaaggttgggcatcaaggcttcgctgaaagacgttggagtcgctgttgtggccactgccgcgagtgcagtgctggctagcaacgccatggccattgaagtgttgctgggtggtgaatgacgggtctctggctttcgttcccaacaatttctccgtggcctctggggagaagatcgtgttcaagaacaacgcaggtttcccccacaacgttgtgttcgacgaggacgagattcctagcggcgtggatgcagggaaaatctccatgagcgatgaagaccttctcaatgcgcctggg

SEQ ID NO: 252527 - DNA, 503 bp, Glycine max
  unsure (1)..(503): unsure at all n locations
agggtttctgtaaagataatacagtagcactctcgaagagctatgacgtcgcatgcacgcgtacgtaagctcggaattcggctcgagcttcaacccctctctctctctccaaaacgccaaaccaaaaaatggctcagaaggccgagaaaaacgacaccgactttaaggtccccgaaaccatcatcaccccctgcaccaccaccaccgccacctcgattaccgaaccttctagattcttcgacgcaaccacccccgccacgtcatcgcgctcccccaagcgatccctccccctcgacgacgaatctcagacggaccaaacggcgtcgtcggagcccaaacgcgtcgtgagccgctgctcctgctgtcggcggcgcgtggggctcactggattccggtgccgctgtggcgacctcttctgcgccgagcaccgctactccgaccgncacgactgctcctacgactacaaggccgcanggagagaggccatagcgagagaaaacccc

SEQ ID NO: 252528 - DNA, 508 bp, Glycine max
  unsure (1)..(508): unsure at all n locations
gaggaggctctgtttctacgtctagctgntccgctctagcagagctatgacgtcgcatgcacgcgtacgtaagctcggaattcggctcgaggtttgtttgtacttaaactacattcccatttgtttttgctttttgagatttcatcatcctgtatttttggtttctgttttcggacttcaatggaaattaatggatgagaactaatgaataagctaaaaaaaaaaaaaaaaaaagggcggccgccgactagtgagctcgtcgacccgggaattaattccggaccggtacctgcaggcgtaccagctttccctatagtgagtcgtattagagcttggcgtaatcatggtcatagctgtttcctgtgtgaaattgttatccgctcacaattccacacaacatacgagccggaagcataaagtgtaaagccctgggtgcctaatgagtgagctaactcacattaattgcgttgcgctcactgcccgctttccagtcgggaaacctgtcgtg

SEQ ID NO: 252529 - DNA, 510 bp, Glycine max
ggaaggttttcttaatagaagggagatgtaatgctctaccagagctatgacgtcgcatgcacgcgtacgtaagctcggaattcggctcgagggggaggcaagggacaaggaaaatctttccaatgtgagcttgtctttgccaagatgggaatcaaccccatcatgatgagtgctggagagttggaaagtggaaatgcaggagagccagcaaaactgatcaggcagagataccgtgaagctgcagacatgatcaagaagggaaagatgtgcgctctcttcatcaacgatcttgatgcaggagctggtcgtcttggtggaaccacacaatacactgtgaacaaccagatggtgaatgccactctcatgaacattgctgataaccccaccaatgtgcagcttccaggtatgtacaacaaggaagagaacccccgtgttcccatcattgtcaccggtaacgatttctcaacactctatgcacctctcatccgtgatgggcgtatggagaagttc

SEQ ID NO: 252530 - DNA, 510 bp, Glycine max
gaggaggctttgtctatgaaacgaagtgtataggcaccactctagaagagctatgacgtcgcatgcacgcgtacgtaagctcggaattcggctcgagatcagtctctaatatttttctcactgtcttgtctctccagagaactgtatagagagagatggcagctgcaacatctggtgctgtgttaaatgggttgggatcttccttcttgagtggaggaaacaggagccaaacccttctggccactgctattggaggcaaagttggtgctgctgctgttactgttagtcctagaagactcattgtggtagctgctgctgcaccaaagaagtcatggctccctggtgtcagaggtggtggcaacctcgtcgacccagaatggcttgatggatcgctaccaggtgactatggctttgacccactaggccttgggaaggacccagcattcctcaaatggtacagagaagctgagctgattcatgggagatgggcaatggctgcagttctaggaa

SEQ ID NO: 252531 - DNA, 510 bp, Glycine max
tgtgagcctttgtctatgaaagaagtgtattgcacacactctagaagagctatgacgtcgcatgcacgcgtacgtaagctcggaattcggctcgagcacaaacagatactaaagcaagtgttgggttcaaagctggtgttaaagattataaattgacttattatactcctgactatgaaaccaaagatactgatatcttggcagcattccgagtaactcctcaaccaggagttccgcctgaagaagcaggtgccgcggtagccgccgaatcttctactggtacatggacaactgtgtggaccgatgggcttaccagtcttgatcgttacaaagggcgatgctacggccttgaacctgttgctggggaagaaaatcaatatattgcttatgtagcttatcccttagacctttttgaagaaggttctgttactaacatgtttacttccattgtcggtaatgtatttgggttcaaggccctgcgtgctctacgtctggaggatttgcgaatcc

SEQ ID NO: 252532 - DNA, 511 bp, Glycine max
  unsure (1)..(511): unsure at all n locations
agggtgtgtgtcagtgaaggaccgtanagncancactatagaagagtctatgacgtcgcatgcacgcgtacgtaagctcggaattcggctcgagataggttcaatgttgtgctgatgatagaaccattttggttacaacatatgaaggcacgcataaccatccactgccacctgctgctatggccatggcatcaaccactacagctgctgctagcatgttgctttctggatcaatgtccagagcagatggaataatgaacccaaatttgctagctagagcaattctcccttgctctacaagcatggctacactctcagcttcagcaccattctccactgtgactttgtacctcacacacaaccctaacccattgcaatatcaaaggcctggttcatcattctaagtacccttacttcaagcacagtcttagaactttgactcaggagccgncccatttgcacaagcacaagcactttataatcaatcaaaatgctctagtcttcagtcgtc

SEQ ID NO: 252533 - DNA, 502 bp, Glycine max
aggctctggattagacagtattgtatcactctcgaagagctatgacgtcgcatgcacgcgtacgtaagctcggaattcggctcgagggcagcacttggtgggaatcgtgatgtgacaggaagccagaacagcgttgagatcgatgctctagctcgctttgctgttgaagaacacaacaaaaaacagaatgcccttttggagtttgaaaaggtggtaactgcgaaacagcaagtggtttctggtaccttgtacaccatcactttggaggcaaaagatggtgggcaaaagaaggtttatgaagccaaagtttgggagaagtcatggttgaacttcaaggaggtgcaagagttcaagcttgttggagatgcacctgcatagtctagtgcttaattaggttgctgaagagtgaagaatgagacagcctggttcgaaggggaaaagcctaaggatatatcaaaggattctatatgtataaaataaatgttgcttttttacccttcgg

SEQ ID NO: 252534 - DNA, 504 bp, Glycine max
  unsure (1)..(504): unsure at all n locations
agtctatctgtaaagaacgtattgtagcactctcgaagagctatgacgtcgcatgcacgcgtacgtaagctcggaattcggctcgagcaaagcctttctagaacgaaaaaaaaaagaagagcaattgtccctcaccaaagaagaagaagcaaacaatggccgatcaacttaccgatgaacagatctccgagttcaaggaagccttcagcttgttcgacaaggacggcgatggttgcatcacaaccaaggagcttggaactgttatgcgttcattggggcaaaacccaactgaggcagagctccaggacatgatcaatgaagtggatgctgatgggaatggtaccattgacttccctgagttcctaaatctcatggccaggaagatgaaggacactgattctgaggaggagctgaaagaggcattccgggttttcgacaaggaccagaatgggttcatctctgctgctgagctccgncatgggatgaccaacctcngggagaagt

SEQ ID NO: 252535 - DNA, 500 bp, Glycine max
aggctttgcaaagacgatacagtagcactcatcaagagctatgacgtcgcatgcacgcgtacgtaagctcggaattcggctcgaggaacaagtagttgagaactaagaaggagaagcaaatggcttcctcaatgatctcttccccagctgttaccactgtcaaccgtgccggtgccggcatggttgctccattcactggcctcaagtccatggctggcttccccaccagaaagaccaacaatgacattacctccattgctagcaacggtggaagagtgcaatgcatgcaggtgtggccaccagttggcaagaagaagtttgagactctttcctacctgccagaccttgatgatgcacaattggcaaaggaagtagaataccttcttaggaagggatggattccttgcttggaattcgagttggagcacggtttcgtgtaccgtgagcacaacaggtcaccaggatactacgatggacgctactggaccatgtggaaactg

SEQ ID NO: 252536 - DNA, 505 bp, Glycine max
atgcgtctgcctaagagggggtaaggagcactcctcaagagctatgacgtcgcatgcacgcgtacgtaagcttggaattccggctgaggctctaagtttttaagagcttttgcttttctttctgcgcgcttttcccaattaagtagttctttcttttctcaaagcaaaaaaaatggtcatcgagaggttcaagggtgagaggcctaacgtgaagtacaccgagactgggaatcaatccgtgtaccactattaaacccctgaacttggtcacgagaacaagaatggcacttatcagtgggttggcaagccccaaacttgcaaatatgaatttaaaacccacaaccaatgtcctaaacttagggtaatgcttgtggggtgggggggaaacaatggctcaaccctcactggtggtgttattgctaaccgagagggtatttcatgggcaacaaaggacaagattcaacaagccaattactttgggtcgctgacccaagcattaactatc

SEQ ID NO: 252537 - DNA, 513 bp, Glycine max
tggagtttttccgtaattgtaagggaacatcattgctaacactctagctatgacgtcgcatgcacgcgtacgtaagctcggaattcggctcgagaactcactcactggaagccttgttgtgagtaagggaaaggcttcctgcactgagcaccaagttgaaacctcttgattctttgcttagaattccacagaatatggagactgttcttttcaatgactccccacctttggagttcaagggtatgagcaaggaggaggaagactcattgctagggcaagttgaaatatggaggtacatgacatgcttcacggactccgtggccttgaaatccgtcatagagctgcgcatagccgacataatagaccgttatgggaaaccactatccttgtcacaaatcgtggagaacatagatgatgcacccttcccagatgcctctcttctacagagagtgatgagagtgatgggacgtaaaaagatcttcagtgcagaacaatcagagactggggagaccc

SEQ ID NO: 252538 - DNA, 512 bp, Glycine max
  unsure (1)..(512): unsure at all n locations
gggaggnnntnnttnattgattgcaatccgatcgtcannccgcngnagactagctagcatgcctgcaggtcgactctagaagatccctcgaggcaattgaagttgaagtcttgcccttctctcttcaactccgaacacaagacatcatcatccatggctgcctccgtctccactgtcggagctgtcaacagagctcttttgaacctgaatgggtctggacctggggtttcagctcccagttcatccttctttgggagcagcttgaagaaggttattggctcaagggtccccaacacaaagatttcctctggaagcttcaagattgttgctgtagaagagaagaaagagattgaagagacccagcagaccgacaaggacagatggaagggtcttgcctatgatatctcagacgaccaacaggacatcacaagaggaaagggtttggttgactcccttttccagctccacaggatgctggaactcactatgctgtcatgagcctctacgagtac

SEQ ID NO: 252539 - DNA, 510 bp, Glycine max
ggggagctgtgtcaatgtaaagcagatcattgtaacactctagaagagctatgacgtcgcatgcacgcgtacgtaagctcggaattcggctcgagctagaactggttgcattgggatctcatggcgaaggaagcggtactgctacgcatgcgggttcgataccgagggcacttagatggtggtcctcgagaaacggctttgtaactttcggctgactcacatattgcgctaaagcctacctcgcaaggctcaacaggtatgctcggtaagaacctttatctatcttgcgatccatacatgcgcggtcacatgcgtgaatagcacggatcttatatccctccatgtcttccagcccatgcacttgaaggatttgcagtatctatagctgtacagtctgcatagccagattacacgcctggtgatagcattaccgacttaactggttgggaagaacatagtctcatgcaattgacgagacagctctcgcaccatgcagcccgatgatgtcat

SEQ ID NO: 252540 - DNA, 513 bp, Glycine max
  unsure (1)..(513): unsure at all n locations
aggnnntnnntccatcgatntgagtgtattgcactagctgagctatgatcgncgcatgcacgcgcacgcgtacgtaagctcggaattcggctcgagctagaacggacttgccaaatggagcatatcatccttccttgaagtgcaatggtacggtccttacatttggaactgatacacccttgtgtgagtcaatggcatctgttttgaaccttgctgataaaaccatgcacaattacacaagaaatggatttcataaacctgaggaactaagaattcctgtttcccatgccagtggagaaaaaggggatgatcaatctaataaatcttcggttacctccacaacatctgtagaaggtgcaagcaccaatagacccaaagaacaggttatgcagaattgtcagagctttccgtcacaggttccctactttcctgcgaccccttggcccatcccttggaatccagtgcagtggagttctcccgtaccaccgcctgctttttgtccacccggattta

SEQ ID NO: 252541 - DNA, 511 bp, Glycine max
  unsure (1)..(511): unsure at all n locations
gggagccttcgtcaactgacacgaagtatatatgtaacactctagaagagctatgacgtcgcatgcacgcgtacgtaagctcggaattcggctcgagctgtatagagagagatggcagctgcaacatctggtgctgtgttaaatgggttgggatcttccttcttgagtggaggaaacaggagccaaacccttctggccactgctattggaggcaaagttggtgctgctgctgttactgttagtcctagaagactcattgtggtagctgctgctgcaccaaagaagtcatggctccctggtgtcagaggtggtggcaacctcgtcgacccagaatggcttgatggatcgctaccaggtgactatggctttgacccactaggccttgggaaggacccagcattcctcaaatggtacagagaagctgagctgattcatgggagatgggcaatggctgcagttctaggaatctntgtgggccaggcatggaatggagttccatggtttgaagctg

SEQ ID NO: 252542 - DNA, 509 bp, Glycine max
  unsure (1)..(509): unsure at all n locations
tggaggggntnntnatgatacantcgttgnacanncnnagagcatgnnnngatgcctgcaggtcgactctagaggatcccctcggggaattccaattccatattttcaagaaataaggaggcaaaaatgtgcatatatgaattggaattatttgttttcttattaggcctatcctgaagccaaaggaaatgagatcggaattcctcggggaattccaattccacattttcaagaaataaggaggcaaaaatgttcatatatgaattggaattatttgttttcttattaggcctatcctgaagccaaaggaaatgagatcggaattcctcggggaattccaattccacattttcaagaaataaggaggcaaaaatgttcatatatgaattggaattatttgttttcttattaggcctatcctgaagccaaaggaaaatgagatcggaattcctcggtggtaccgagctcgaattccctatagtgagtcgtattaaattcgtaatcatgtc

SEQ ID NO: 252543 - DNA, 503 bp, Glycine max
  unsure (1)..(503): unsure at all n locations
atggatctgcggttcagtcccatcgcagcnacatcgaagagctatgacgtcgcatgcacgcgtacgtaagctcggaattcggctcgagtgaccatgctttcccatattgagagaattctatggagcgaggggcaaatttctcgccgtgttttcgagctcgccgccgaaatctgtgacgacttcggcggccattcttcggcgcccgtggtcgtcggcgtggtcactggcgcgtgcctcttcttggctgaccttgttcgcaaaatagatctctccatcgccgttgatttcgtacgagtcgaatcctacggttccggaaccgtgtccaatggcgcacccaccatttacttcgatttgaaggtcgacgtcaactcccgccatgtcatcgtggtcgaagacattgtagatactggacataccttatcaaaagtcattgagcacttgaaatcaaaaggagcgtgctctgcttctgtttgcactatccttgataaacctgcaaggagaaa

SEQ ID NO: 252544 - DNA, 608 bp, Glycine max
  unsure (1)..(608): unsure at all n locations
taagaagagaggaagagagntnnnagagnnngntaaggaggtttagagagatgaaagagataagtgtagtgagnagaggaggagagaaggtagagtancaagagggntctnagcttgaaatcctttagcannactatagaagagctatgacgtcgcatgcacgcgtacgtaagctcggaattcggctcgagccaagagggacttgtcactcatttttgacactggcagtgatctcacttggactcagtgtgaaccttgtgctcgttcttgctacaagcagcaagatgtaatatttgatccatccaagtctacatcatattccaatattacatgtacatctgccctctgcactcagctctctactgctacaggaaacgatccaggatgttccgcatccaccaaggcatgcatatacggcatccagtacggcgacagttccttctcagttggctacttcagccgcgagcgcctcaccgtgaccgtcaccgacgtcgtcgacaacttcctcttcggctgcggccagaacaaccagggcctcttcggcggatccgccggcctcattggcctcgggcgacaacccatcttctttgggcaacagactgccggca

SEQ ID NO: 252545 - DNA, 600 bp, Glycine max
  unsure (1)..(600): unsure at all n locations
atgaaggtgaggagggggnagaggggnnaagaataggatgatgagagaggagagagagtgagggagaggaggggagtaggaagaggtgntggaggaaggtgtgttagaaggatatatgggaaaactctagaagagctatgacgtcgcatgcacgcgtacgtaagctcggaattcggctcgaggctcaaagacttatatgggaaggacctttccttttggcttaaggagaaactaactttgaagttgttgactgcaaatccgcaaaatggattggcaatgtaagctttgttgatgagcgacatcggcatagatatgaggttaatcctgacatgatatcaccgctagagaatgctggtctatcttttgttggcaaagatgaaactgggaggcgtatggagatagttgagttgcctagccatcctttttttattggcgttcagtttcaccctgagttcaagtccagaccagggaaaccttctccgctcttctcaggattaatagcagcagcaagtgaatctaggaagacaatcatggtgccaagtaatggtcacgccaagttaactaatggaaatggaatgtgcaatggacactcaccaaaac

SEQ ID NO: 252546 - DNA, 599 bp, Glycine max
  unsure (1)..(599): unsure at all n locations
taattagtgngaggaaggannagaggggngatgtgtacaaaggtatannagtgaaagttgattggnagaggaggagagaagatagggtnagagaggggtnnntctatgaatctatatgtgaaactctcatagagcttgacgtcgcatgcacgcgtacgtaagctcggaattcggctcgagggcttcatgttccgcacctccctccctcatgctcgtccactctcaagacctttctccctctcttcgctccttctctcacaggcccatttctagaaccaccttctctctctatcctctccttttgaagccctccaaatggctccacatagagcccaaatccaggacttgccatgccctcgtcgccgctttgtctgcagaggtccaagtgcccgaaactttcgacgacacggaggaggacgacggtgctgatggctccaccgtcaccaacaccgtccccaccaccaagcctaagaaaggcaaggccgcattgcctctcaagaaggacaggacgagatctaagaagttcttggaaattcaacaattgaaggaacgtaagaaagaatatgacttgaagacagcaatatctttggttaaaaaaa

SEQ ID NO: 252547 - DNA, 600 bp, Glycine max
  unsure (1)..(600): unsure at all n locations
taaggaatggaaagagggggnnagaggggnaaagtagtaagaggataagaagtgaggaggtagatggagaggagtatagaatgaagagganagagaggntntnattaaggaaatgataagcagantctntanaanagctatgacgtcgcatgcacgcgtacgtaagctcggaattcggctcgagaagtagttgagaactaagaaggagaagcaaatggcttcctcaatgatctcttccccagctgttaccactgtcaaccgtgccggtgccggcatggttgctccattcactggcctcaagtccatggctggcttccccaccagaaagaccaacaatgacattacctccattgctagcaacggtggaagagtgcaatgcatgcaggtgtggccaccagttggcaagaagaagtttgagactctttcctacctgccagaccttgatgatgcacaattggcaaaggaagtagaataccttcttaggaagggatggattccttgcttggaattcgagttggagcacggattcgtgtaccgtgagcacaacaggtcaccaggatactacgatggacgctactggaccatgtggaagctggctat

SEQ ID NO: 252548 - DNA, 508 bp, Glycine max
aggcatctgagtatagaaaggaagatagtatcactctagaagagctatgacgtcgcatgcacgcgtacgtaagctcggaattcggctgagctcgttttttctcagaaccttctgaggttaaagcaaaaaacaaagagagagagagagagaaaatgatgaagccatcgatgctcagatctctccactccgccgccacccgcggcgcctctcatctcttccgccgtgggtacgcctccgagccggtgccggagcgcaaggtagccgttctcggcgccgccggcgggatcgggcagcctctctcccttctcatgaagctcaatcccctcgtttcgagcctctccctttacgatatcgccggaactcccggcgtcgccgccgatatcagccacataaacaccagatctgaagtagtggggtaccaaggtgatgaagagcttggaaaagctttggagggtgccgatgttgttataattcctgctggtgtgcccagaaagcctggaatgactcg

SEQ ID NO: 252549 - DNA, 630 bp, Glycine max
  unsure (1)..(630): unsure at all n locations
gaagatagagagaatagagaggggnnnagagagnnnntagtggtgggtgtgtggtaggagagagtagtggatagtaagaggatgatggatggaaagatagcatagattattatagaggaagtgtcntgataaagaggatatataaggaacactctagaagagctatgacgtcgcatgcacgcgtacgtaagctcggaattcggcttgagcctgcctttaagggtaacaattcttcatttccattttcttggttaattttcaaggattcgtaggctatggaaaagtcttacccaactgtaagtgctgattaccagaaggccgttgagaaggcgaagaagaagctcagaggcttcatcgctgagaagagatgcgctcctctaatgctccgtttggcatggcactctgctggaacctttgacaagggcacgaagaccggtggacccttcggaaccatcaagcaccctgccgaactggctcacagcgctaacaacggtcttgacatcgctgttaggcttttggagccactcaaggcggaattccctattttgagctacgccgatttctaccagttggctggcgttgttgccgttgaggtcacgggtggacctggagttccattccaccctggaa

SEQ ID NO: 252550 - DNA, 605 bp, Glycine max
  unsure (1)..(605): unsure at all n locations
gatagggaatggaaagagggggnnagagnnnntaaagatggttagtataatataagataattttgaaagggagagtaggagatggataagaggagagaggaagtgtgctgttagggggatttagaggagactctagaagagctatgacgtcgcatgcacgcgtacgtaagctcggaattcggctcgaggaaaccagtgactggcttttccaagaaagaaaaccaaaaaggagtttccgtcattccatcatgaacgctcttccaattctcctcttcttcctcttcgtttctgcattagtttctgcgaagaaaactggtgatgtgacggagctgcaaattggcgtgaagcataaaccagtatcatgtgaagttcaggcacacaaaggtgacagagtcaaagtacactatcggggaaaactcactgatggaactgttttcgattctagctttgaaagaaataatccaattgaatttgagcttggtactggtcaagtgatcaaaggttgggaccagggattattgggaatgtgtcttggtgagaagcggaagctgaaaataccatcaaaacttggctatggagagcaaggttccccacccactattgca

SEQ ID NO: 252551 - DNA, 635 bp, Glycine max
  unsure (1)..(635): unsure at all n locations
tatagagagatgagaatggagagggtnnnnagatgtgnnnanaatggactatagagataggatgtgagagagaagagaagaagagtagnagagaatggagatgaagagagaggagtatagtgaagtgtgtgataagagggatatataaggaacactccnagaagagctatgacgtcgcatgcacgcgtacgtaagctcggaattcggctcgaggaagttctacttggcaccaaccagggaagaacggattggtggttggaccggaaattttccgaactgagggaattcctgaccaggacattgtcaacctggttgacaccttccttggccaatccatggattcctttggggcactgagggccaaagtatatgatgatgaagtgaggaagtgaatttctggtgttggtgttgacagtgttggaaagaagcttgtgaactcaaaagatggacctncaacctttgagcaagcccagatgactctggagaagctcttggctgatggtaacatgcttgtccaagaacaagagaatgtcaaaagagtccaattggctgacaagtacttgaacgaggctggtcttggaaatgctaacgaggatgctattcaaaggggaactttctttcagtcttgaattgga

SEQ ID NO: 252552 - DNA, 620 bp, Glycine max
  unsure (1)..(620): unsure at all n locations
gaggtagagatnagtatgggggnnagatggnnnnatgtggatggatgattttngtagagaagaggaaataaagtnnatagaatgtagagagtgaaagaggatnagagttatgtgtctgattatgaatactttaagagagaccctctagaagagctatgacgtcgcatgcacgcgtacgtaagctcggaattcggctcgagcaaagtggtgtcctatttgtttgtaaccaccgcacagttttagaccctgtggttactgcagttgcacttggaagaaaaattagctgtgtcacatatagcataagcaaattcactgaaataatttcaccaattaaagctgtggcactctcaagggaaagagagaaagatgctgccaatatcaagagactacttgaggaaggggacttggtgatttgccctgaaggcacaacttgtagagagcctttcctcttgaggttcagtgcactatttgctgaactcactgataggattgtcccagttgctattaacacaaagcaaagtgtgttctacggaaccacggtttgcggacacaagttgttggacccgtactttgtgttcatgaatccaatgccaacatatgagatcactttcttgaaccag

SEQ ID NO: 252553 - DNA, 594 bp, Glycine max
  unsure (1)..(594): unsure at all n locations
gaaaggaagagaggagggggnagaggnaaaaatagaataaggtggaataaaggttgttgaaggagaggaaatagaatgaagagggtaagtaagttttgataacgcacttatatggatacatctagaagagctatgacgtcgcatgcacgcgtacgtaagctcggaattcggctcgagggtcattccaccacccttctctccaagcacagttcggcggtgactcatacccactgggccccaccgagtttcctgcctcaaatcaatgcgatgaagacaatgcacgggagagtggtgtgctccaccagcgacaagacggtggcagtggaggtggtgcggctggcccctcacccaaagttcaagaggctcgtgaggaagaagaagaagtaccaggcccacgaccgcgataaccaattcaaagtcggcgacatcgtgcagctccagaagaccaggcccatcagcaagaccaaggcctttctcgcactccccgttcccaaaaggccctccagcaggcccgaggcccagcccgaggaactttccattcccttcgagtcccagccctaaaagacttcagaggcacccctaaatttacttgtt

SEQ ID NO: 252554 - DNA, 498 bp, Glycine max
agtgtgtctgtaatcgaagtttgacgtagccctctagaagagctatgacgtcgcatgcacgcgtacgtaagctcggaattcggctcgaggttctctttcctttcaatctcatcatggattcttcttctgaccattctcccccatcatcacttcattctcctgacacttcctgcgggttatttagaaattggagagtcggctatggaaggtgctatcagggaaacacgggaggaagccaatgctgacgtggaagtgatttctccctttgctcaattggatattcctttaattggccaaacttatataatcttcttagcaaggttgaagaaacctcacttttcacctggtccagaatcatcagaatgcctgcttttctcactcaatgaaatacctcttcaagtctctatcttttcaataaaggggggtaccttaaggttggtatgttgaggatatgaaaccggaggaaagccccaattccctttatggacccattaccaa

SEQ ID NO: 252555 - DNA, 505 bp, Glycine max
  unsure (1)..(505): unsure at all n locations
atgggtgtctgaaaggggagagtatgagagaactcactatagaagagctatgacgtcgcatgcacgcgtacgtaagctcggaattcggctcgagtgcaaaaatattaagatgataaacattggagcacttgttgtactctttgcatttctcttcctcagttgtgcctatgcacaagacacaacaacccttgtgcctgcaatcataacttttggtgactcagccgtggatgtagggaataatgactatcttcccacccttttcaaggctgattaccctccttatgggagggactttgctaaccaccaacctactgggaggttttgcaatggcaaattagctactgattttactgctgacactttgggttttaagacctatgctccagcatatcttagcccacaggcatcagggaaaaacctccttattggagcaaactttgcttctgctgcatctggttatgatgaaaatgctgctactntgaatcatgcgattncgttgtcccac

SEQ ID NO: 252556 - DNA, 594 bp, Glycine max
  unsure (1)..(594): unsure at all n locations
gaatgagagagaggaggnnnnagagnnnnaaaggtataggaatggagaggagggtggatggagagaggagtggagaggaggagaggagaaggtctgttagaggatgaagggaaccatcatagaagatctgaacgtcgtgtgcacgcgtccgtaagctgggaatcggggttggagcagatcttgtatgggattaaacaaggacgccttgtgatatgcgctttggcattcccttcagtgatggaaccacctcaaaatataggagcttatcaaagtcgctggtaatataaagaggttcattccatcaggatttgccgcggaagaagattcagtaaaacctcttcctccattccaagctgttcttgataagaaaagaaaaattagaagggaaattgaagcagctgggatcccttacacttctatatctgcaaattggtttggggcatactttggcaattattttactctaccctatgaaaaatggtgaagatattactggctatggcaaacggggaaacaaaaagctgtgcttaaatacgaaagagaccattgtaaggatactggttaaagcggcaaatgatccaaagaacatgccac

SEQ ID NO: 252557 - DNA, 586 bp, Glycine max
  unsure (1)..(586): unsure at all n locations
gaaagatagagaataagnnnnagagnnttgagttgaaaagatatgtaagaaggataaagaaagagaggagtggaaagaatgaagggggtcttgttttacgcatcatgtaanatctntnnaagancnatgacgtcgcatgcacgcgtacgtaagctcggaattcggctcgagggtgaatctagttcttgtgcttcagacgtttatcgattgggggttctcctttttgagctattttgtccgctcagctcaagagaagaaaagagtagaaccatgtctagccttagacacagagttcttcctccacagttacttctaaagtggcctaaagaagcttcattttgcttatggttactgcatcctgaccctaagagtcgtccaacacttggggagttgttgcagagcgagttccttaatgaacagagagatgatacggaagaacgtgaagcagcgatagagctgaggcaaaggatagaggatcaggagttgttgttagagttccttttgttacttcaacagagaaaacaggaagttgctgagaagttgcaacatactgtctcttttctgggttcagattttgaaaaaatga

SEQ ID NO: 252558 - DNA, 591 bp, Glycine max
  unsure (1)..(591): unsure at all n locations
aaggaagagaggaaggtnnaaggnnnaaaggagggagaatgaagaaaagaagaagaaatagaggagaggagaggaggataagtagtgttgttatgacagtatatgaaatacatctagaagagctatgacgtcgcatgcacgcgtacgtaagctcggaattcggctcgagaagagatctatttgcaagggcaaaaagggaagctccgtgcataatctttattgatgagatagatgctgtggctaaaagtcgtgatggaaaatttcgcattgtcagcaatgatgaacgagagcaaaccttgaatcagttgctcactgaaatggatgggtttgacagcaattctgcggtgattgttcttggagctactaataggtcagatgtcttagatcctgcacttcgccggccaggaagatttgatcgtgtagttatggtagaagcacctgatagaattggaagagaagccatcctaaaagttcatgtttccaagaaggaacttcctttagccaagaatgttgacctcagtgacattgcttgtatgaccactggttttactggagcagatcttgcaaacctaataaatgaagctggctttc

SEQ ID NO: 252559 - DNA, 606 bp, Glycine max
  unsure (1)..(606): unsure at all n locations
gataagaatgatggaagaggggtnnatagnnnnnaaggagtaagagaataagtaaagagatgattgttgggagaggaggagagagataagaggagtaagataagtgtctgatagggggatttaagtgaaactctctanaagagctatgacgtcgcatgcacgcgtacgtaagctcggaattcggctcgagcatggctccagtgccaaccttgtgtcatatactgccacgtccaagttgaccctatattcaccccttcagtatccaagacctacaaggccttgtcctgctcatcctctcagtgttcctctctcaagagctccacactgaatgctccaggttgctcaaatgcaactggtgcttgtgtctacaaagcaagctatggtgacacttccttctcaattggctatttgagtcaagatgtgctaaccttaaccccttcagcggcaccatcatcaggttttgtatatggctgtggtcaagacaatcaaggcttgtttggaaggtcagcaggtatcataggtctagccaacgacaaactctccatgcttggtcaattgtccaacaaatatggcaatgccttctcctattgtctaccctcatctttt

SEQ ID NO: 252560 - DNA, 505 bp, Glycine max
  unsure (1)..(505): unsure at all n locations
aggctcttcccacgaagatgcatgactgtaccactctagaagagctatgacgtcgcatgcacgcgtacgtaagctcggaattcggctcgagcaagtagttgagaactaagaaggagaagcaaatggcttcctcaatgatctcttccccagctgttaccactgtcaaccgtgccggtgccggcatggttgctccattcactggcctcaagtccatggctggcttccccaccagaaagaccaacaatgacattacctccattgctagcaacggtggaagagtgcaatgcatgcaggtgtggccaccagttggcaagaagaagtttgagactctttcctacctgccagaccttgatgatgcacaattggcaaaggaagtagaataccttcttaggaagggatggattccttgcttggaattcgagttggagcacggtttcgtgtaccgtgagcacaacaggtcaccaggatactacgatggacgctactggaccatgtggaagctgcn

SEQ ID NO: 252561 - DNA, 500 bp, Glycine max
atggttctcgataagaacatgactgtagcactctagaagagctatgacgtcgcatgcacgcgtacgtaagctcggaattcggctcgaggttttattggctgagcaagcaacttctgctgtaaatgcatcatctgtcacaagccattcagttaatcataatgaaatgatccagagcaattccactgattctgttttgtctgaagtgttcacctcttctgggtcgacagcttctacaattgccaagacatcagagactgctctccttgatgaaaaatcattattagcttgtattgtacgcactattccagctggtggccgaattcgaattagttcaacgctccctaacaggctgggcaagatgcttgcacctctacattggcatgattacaaaaggaagtatgggaagctggatgactttgtagctagccatcctgaattatttttgattgagggtgactatattcagctccgtgaaggtgcacagaaaatggttgctgcaa

SEQ ID NO: 252562 - DNA, 504 bp, Glycine max
  unsure (1)..(504): unsure at all n locations
agcgtctgcgaagcgggagaatatagtactcactctagaagagctatgacgtcgcatgcacgcgtacgtaagctcggaattcggctcgagcggctcgagggacaaggagggaatccccccagaccagcagaggctgatcttcgccgggaagcagctcgaggacggacgcacccttgctgactacaacatccagaaggagtcaactctccacttggtgttgcgtcttcgtggtggtatgcagattttcgtgaagactcttacgggtaagactattaccctcgaggtggagagctctgacaccattgacaatgtgaaggccaagattcaggacaaggaaggcatcccaccggaccagcagaggctgatttttgctggcaagcagctcgaggatggaaggaccctcgctgactacaacatccagaaggaatcaacccttcaccttgtcctccgtctccgtggggggttntaagctcgttgtgtaatggtggatgtgttcccaaaacc

SEQ ID NO: 252563 - DNA, 508 bp, Glycine max
  unsure (1)..(508): unsure at all n locations
ttggatttatgaagggcggagtatgatggactcactatagaagagctatgacgtcgcatgcacgcgtacgtaagctcggaattcggctcgagcacaaggccatcatcatggcagctgcttctcctatggcaagccaactcaagtccaccttcactaaaactcttgtagctcccaagggcctctctgcctcttcaccactccacctcctgccttctaagaggcaatttagcttcactgttagggccatccaatcagaaaagccaacctatcaagtgattcaaccaatcaacggtgatcccttcattggaagccttgaaaccccagttacatccagccccttgattgcatggtacttatcgaacctccccgcatacaggaccgcagtgagcccactactaaaaaggaatcgaggtgncccctgccccattgcttaccttctggtggccccattcgtgaaggccgggcctctgaggaacaccgagatcgccgggcaagcggggctctcttc

SEQ ID NO: 252564 - DNA, 605 bp, Glycine max
  unsure (1)..(605): unsure at all n locations
gaaaaggaagagaggagggggnnagagtnnnnaaactgaagttggggatggaggaagaggtaagagagnagaggaggagagagagggagaagtgagagagaagtgtctgttagaaggatttatagtaacactctagaagagctatgacgtcgcatgcacgcgtacgtaagctcggaattcggctcgaggagtcaacgaaatcgcgaacagaacagcaacgttaacaatgggttctcgctacgaggtggaactgaagctctcatcggcacgcgctctcaagaacgtgaactggcgccatggcccgaaccgcccatacgtcgtcgtttgggtcgacccaagcaacaagctctcgacgcgcgtggacgaaagcggcgacactgacgcgaattgggaccaaacgctcacaattccgttgccaccaaagcctctcgaggatcaaacgttgtacatcgacgtggtccacgccggctcggaagaggacaccaagccgcttatcggctcggctcggctcaagctggtggacattctcgacgacgttggaatcggcgagcgcgtgagccgcacgctctcgcttgaacgtacctcggggaggcccgaaccggagg

SEQ ID NO: 252565 - DNA, 619 bp, Glycine max
  unsure (1)..(619): unsure at all n locations
gagaagcagagagaaagagggggnnagagnnnnnaagaatttggaggtgattagatggttttataataagagnagatggaggagatggatagagaggagnagaggaagtgtctgattagaaggatatatgagaaaactctagaagagctatgacgtcgcatgcacgcgtacgtaagctcggaattcggctcgagcaggtatgcctcaaggaaggcctatgcaaagactaaacccggtataaaaggtcgatttgccaagagaccagatgtagaagctgaagtggatcagatgttctccacaacactaattacagaagttggatatggcattgttccctctttctgaatatgctgtgttgaacaaatggccacaagatatcgaagatgctagaggatcatgatcaatagaaatggctaccacttgtgtactaataatgtattttttatgtaatctaattacttgcagttgtactaatcggatgctttattattttggttattgtcttttgaatgaaacttgtaacttgaaatacaagtcatgtattaaattattaaattacagtcaacataatcttgaaaaaaaaaaaaaaaagggcgggcgacgactagtgagcttgtca

SEQ ID NO: 252566 - DNA, 615 bp, Glycine max
  unsure (1)..(615): unsure at all n locations
gatatgtagatagnaggatggggtnnatagtnnnnnaggagtgtgtctgtgtgtttatttgatgtgtttggttgggnagaggaggtgagtgtgtagtgggtattgtgaagtgtctgttatggaggatttaagggaaaacatcatagaagagctatgacgtcgcatgcacgcgtacgtaagctcggaattcggctcgagattcacctgagctttttgtgaggattccaaagcatggcttcccttgcagcatccactgctgctgcttcccttggcatgtcagaaatgcttggaaaccccatcaacctcagtggtgccacaaggccagctccatctgcctctagccctgcctccttcaagactgtggctcttttctccaaaaagaaggctgcacctccaaaaaaagctgcagctgctgctcctgccaatgatgagcttgccaagtggtatggtcctgacagaaggatcttcttgcctgagggtctcttggaccgatctgagatcccagagtacttgaccggagaagtccccggagactatggttatgacctatttggtcttagcaagaagccagaagatttttccaaatatcaggcatttgaattgattcacgccaga

SEQ ID NO: 252567 - DNA, 626 bp, Glycine max
  unsure (1)..(626): unsure at all n locations
gtagtggtagagagnaagagtggggnnagagtnanatagggaggaagagtatgattagagagagggaagaaggatgggatgaggtggagatggagtgagagagtttgaggaaggattnnagttaaagaagcctcatagtagacctcatagaagagctatgacgtcgcatgcacgcgtacgtaagctcggaattcggctcgagcgttctcctacgacggcgagaggctcttggatctggacagcgtgaggagaattatctccggttttgtggagagggagaagagtacgacggtgttcaatgccggcgtcaacttcaacgaggacttctccgccgcgatgcagcgcgtggtgaaaaccgtcgacacgtatctcgccgagatcgccgcgtacggcgaactctccatctcgaaattcaacggcatcgcaatcctcattcccaaaggctcgagaaaatccgacgacgatctataccgcgccgtcgatatctacctcaaggtgcacccgaacctggacgagatagagaaggagaaagtgtgcagcgtattggacccgttaaaattggcctacgaggcgcgtgtgcacgcgtcaaagaacaagcgcttgcccgtgcaaatcgtgccttacgc

SEQ ID NO: 252568 - DNA, 607 bp, Glycine max
  unsure (1)..(607): unsure at all n locations
gaaagggagagtnaagaattttnnagagnnnnnaaatagacatagttattngtaggatgtttaaggtagagnatagttggagataagtaagagaagtaagtgggagatctgaaatggaaactataatgctatcatcatacaagagctatgacgtcgcatgcacgcgtacgtaagctcggaattcggctcgagcaaagttttttcctttctctgctctttgccttctctgacacatttggtgccttgtagagcgtgttttggcaggaaggtggtatggcgaaggacgttgaggttgctgagcgtggctccttctctgggaaggactaccaggaccctgcaccagcaccactcattgatgctgaggagctcacaaagtggtccttttacagggctctcattgctgaattcattgccactttgctcttcctctacattactgtgctcacagtcatagggtacaatcaccagactgacctcaaggaaaatggtgaaatctgtggtggggttggcattcttggcattgcatgggcctttggtggcatgatcttcatccttgtctactgcactgctgggatttcaaggggtcacattaacccaagcggtgaat

SEQ ID NO: 252569 - DNA, 502 bp, Glycine max
tggtgtctgaattagacgttatatagtagccctctagaagagctatgacgtcgcatgcacgcgtacgtaagctcggaattcggctcgagcacaagcaccttcaaataaaattcaagtatcgaagaagaagatggctttaggtgttcctgctcttccgttgacatacgtggctcacgttctggcagttgttgccagcgtcttggtcgtggtctgggtcgtcaatttcaggggtggcttggcttgggattctgataacaagtccctcatcttcaacattcatccagttcttattgttattggcttactagttcatgggggtgaagctattataagttacaaagcttttcccctaaagaaggaagtgaagaaattgatacaccttgttttccatgccatcgcattaatacttggaatagttggaatttatactgccttcaagtttcacaatgaaagtgggattgccaatctctacagcttgcattcatggcttggaattggggtt

SEQ ID NO: 252570 - DNA, 505 bp, Glycine max
atgggtgtgcaatgtggggggtaaggcgtgactcactctagaagagctatgacgtcgcatgcacgcgtacgtaagctcggaattcggctcgagtctggaatcagttttgctagtggtacttctgctttttcaagtgcagtggcagctactgagacttcaagatcttcagaggagagggtctatgaagtggttctgaagcaagcagctttggtaaaagaacacaaaaggggtacaaaaatagctttggatttggacaaagatgttgaggctgatttcaacaatgtggatctgttgaatgcggcttatgatcggtgtggtgaagtttgtgctgagtatgccaagacattttacttaggcacacaattgatgactgcagagcgccgaaaagcaatttgggcaatttatgtgtggtgcagaagaactgatgagctagtggatggcccaaatgcttcacacatcacccctggggccttggacagggtggagcaacgattgagtgatgttt

SEQ ID NO: 252571 - DNA, 610 bp, Glycine max
  unsure (1)..(610): unsure at all n locations
gaattgaatgtgatgtggnnnnagagtnnnaggaaaccagggttacatatgggggtatgttagtggagagtaggagatggagattgtgttgntagtatgtgtctgattagagggatttatgagaatctctagaagagctatgacgtcgcatgcacgcgtacgtaagctcggaattcggcttgagaaccactttttgtactttcttattcaaaccgaacttttgttccgaatttatcatggccaaggtcaagatcggaatcaacggatttggaaaaattgggcgtttggtagccagagtggctctgcagagagacgatgttgaactcgttgccgttaacgaccctttcatcaccaccgattacatgacatacatgtttaaatacgacagtgttcatggacactggaagcatcacgatgtcaccgttaaggacgagaagacccttctcttcggtgacaagccagtcactatttttggacacagaaaccctgaagagatcccatgggggtcaactggagctgacatcattgttgagtccaccggagttttcaccgataaggacaaggccggcgcacatttgaagggtggtgcaaagaaggttattatttctgc

SEQ ID NO: 252572 - DNA, 612 bp, Glycine max
  unsure (1)..(612): unsure at all n locations
gaagagggagatgagaggagggggttagagtnnttaaggagagagaggataggtgtgaaagtgggaggaagtggagatggtggagatgaagnaagaggagttgagaggtaggtctgaatagagtagtatatagtgacactctagaagagctatgacgtcgcatgcacgcgtacgtaagctcggaattcggctcgagcccaggcgaggagaaagatggaggggaaggagcaggatgtgtcgttgggagcgaacaagttccccgagagacagccaattgggacggcggcgcagagccaagacgacggcaaggactaccaagagccggggccggcgccgctggttgacccgacggagtttacgtcatggtcgttttacagagcagggatagcagagtttgtggccacttttctgtttctctacatcactgtcttaaccgttatgggagtcgccggggctaagtctaagtgtagtaccgttgggattcaaggaatcgcttgggccttcggtggcatgatcttcgccctcgtttactgcaccgctggcatctcagggggacacataaacccggcggtgacatttgggctgttgttggcgaagaagttgtcggttgcc

SEQ ID NO: 252573 - DNA, 632 bp, Glycine max
  unsure (1)..(632): unsure at all n locations
ggagatgttgagctgaggataggggnnagagnnnnnnaagatggaacgatgttgatnagagtgtgtttatagttagtgaagagagagtatagataggtatgtgggnaggtaagaagtctgattagagggatttatagtaacactctagaagagctatgacgtcgcatgcacgcgtacgtaagctcggaattcggcttgagccaaagccttttccaaacccttttttggaagccttggattttcctaagggctccggcaaaggcagagaaaaagccggcggaaaaaaagccagcggcggaaaaggcaccggcggaaaaaaagccgaaggcggagaaaaaaatctcgaaggaaggagggagcgagaagaagaagaagcgcacgaagaaaaaccgtggagacctaccagatctacatcttcaaggtcctcaagcagggttcacccccgacattggtatttccagcaaggccatgggcatcatgaacagcttcatcaacgacatcttcgaaaagctcgcccaggaagcgtcgcgtttggctcgctacaacaagaagcccaccatcacctcgagggagatccagaccgncgtgcgtctcgtgctccctggtgaattggccaaacacgccgtttttga

SEQ ID NO: 252574 - DNA, 610 bp, Glycine max
  unsure (1)..(610): unsure at all n locations
gataggaagagttgtggaattttnnagagnnnnnatgaagtgttgtaattttatggatgtgagatttgtagntgtgtatggtaagagtgtgtaggatgagagtgggtggtctgagtaagaagagtatatggtagacctctagaagagctatgacgtcgcatgcacgcgtacgtaagctcggaattcggctcgaggatttgcgataacagtgtattattttgcgttgctaaaaccctgtaacccgacttacgtttgggtttttcactgtgcctatggcggcggcagcggtggcggaggtgaggaaggccccacggccgggcaagggcgggtacgaagcgcacggcctgagcgaggaggaggcgcgagtgcgcgccatcgcggagatcgtcagctccatggtggacctctctcacaaaggccagaacgtggaccttaacgcgctcaagtccgctgagtgccgcaagtacgggctctcacgcgcgcccaagctcgtggagatgatcgcggcgctccccgacgccgagcgcgagacgctcctccccaagctacgagccaagcccgtccgcaccgacttcggaatcgtctgtctcgagggcatttacaatgcgca

SEQ ID NO: 252575 - DNA, 610 bp, Glycine max
  unsure (1)..(610): unsure at all n locations
gaaaagatagagaaggaaggggnnagagnnanaaaggtagtgaggaggtgagagaggggaaagagggggagaggaggagataagggagagganagagaggatctgattctagttcttcatgtagaactatagaagagctatgacgtcgcatgcacgcgtacgtaagctcggaattcggctcgagacctccgcctccactctctctctctctctctctctctctctctctcttcaatcctcacgctagattatttccctttgatgagtgttgaacggccaagatggtgaacgacgacgagtgggtgcgtgcggcgatggaggatgacaccgttgtggtggagcttctgctacgcctcaagcaaggtaccgttttacacaaatctcaccaccagcagcttttacctttctcctggggagtcaaacagctgcgctcaagatcaaggctaacctccgccgccgtctcccgatgcgacgccgccgtttccaccagatgcagccccaccacgcccctctcttggagcgccggcgccgacagttacgaagactccagccgtcaccaccaccatcacgccggcgtatccaagggtactgctacaagtggattcactgg

SEQ ID NO: 252576 - DNA, 605 bp, Glycine max
  unsure (1)..(605): unsure at all n locations
gtagaaggagatgtgtggagggngnnagagnnnnnaacatggtatgagttagttaaggaagagggaagtaaggagaggaggagatgaaaaagaggagcaagnggagagttgntttagtagcctaatgaaagactctagaagagctatgacgtcgcatgcacgcgtacgtaagctcggaattcggctcgagctcgagccgattcggctcgagcggctcgagcggctcgagcttcctggctccatcatagtcactgccacaaatttctgtccacctggtggttggtgtgaccctcccaatcaccactttgatctttctcaacctgttttccagcacattgctcaatatagggctgggattgtgcctgtagtttacagaagggtgaggtgcaggagaaaaggtggaatcaggttcaccatcaatggccactcttacttcaatttagtccttgtaaccaatgttggaggggctggtgatgtgcatgctgtgtccatcaaaggttcaagaactagatggcaagccatgtcaaggaactgggggcaaaactggcaaagcaactcctacttgaatggtcagagtctgtcctttggagtcaccaccagcaatg

SEQ ID NO: 252577 - DNA, 621 bp, Glycine max
  unsure (1)..(621): unsure at all n locations
gataggtatgtgagagtagggantaagaggggaaaaaaaggaataggagatgagagagaggaagttagaaatgnagaggaggagagaatgaagaggagnagtaggaggtgtgagtaacgaaagcttcatagtatactcatagaagagctatgacgtcgcatgcacgcgtacgtaagctcggaattcggctcgagttctcctcctacaccaacaaaaatggcaccttctccacaagaaatcatcttccgatccccactccccgatattcccatccccacacatctcccattgtactcttactgcttccaaaacttgtcaaagttccatgaccgtccatgcctcatcgacggcgacaccggcgagaccctcacctacgccgacgtcgacctcgctgctcgccgcatcgcctccggcctccacaaaatcggcatccgccagggtgacgtcatcatgctcgtcctacgcaactgcccgcagttcgccctcgccttcctcggcgccacccaccgtggcgccgtcgtcaccacagccaaccccttctacacgccggcggagcttgcgaagcaagcgacggccacgaaaaccaggctcgtcataacgcaatccgcgtacgttgaaaaa

SEQ ID NO: 252578 - DNA, 501 bp, Glycine max
agaatttggataagccgatacgatgtactcactcatagaagagctatgacgtcgcatgcacgcgtacgtaagctcggaattcggctcgagaagattttatccaattgaaattttaaaaatgactgggataaacttaagaattcaattattgaaattgaataagtaaacaatttaattggattggtcgaatggtatcaaaaaaatggagtactaactcccatttcttatttattattgaattaaccgatcaacttgctttgttatcgaacatttctttttgatttcaaaaattttccggaaaaaatttgaatctatttttatatgcgaatcaatcctactacttctggtcctgaggtttctgcgcttgaaaaaaaaaatctgggacgtatcgcccaaataatgggtccggtactagatgtagcttttcccccaggtaagatgcctaatatttacaacgctctgatagttaagggtcgagatactgttggtcaacaaattaat

SEQ ID NO: 252579 - DNA, 504 bp, Glycine max
  unsure (1)..(504): unsure at all n locations
agtgtgtctgtacagcgggacantatagcaaccactctagaagagctatgacgtcgcatgcacgcgtacgtaagctcggaattcggctcgagctttgttcgacccagaggagctcacacagtggtccttctatagagccctcatcgctgagttcatagcaacccttctcttcctttatgtcactgtgctcaccattattggctacaaaaggcagactgatacaacggtaggtggcaccgactgtgatggggttggcattttgggcatcgcttgggcctttggtggcatgatcttcatccttgtttactgcaccgccggtatttcaggaggacacataaacccggcggtgacattcgggttgttcctaggacgcaaggtgtcgttgataagggcgttgttgtacatggtggcacagtgtgccggtgctatctgtggtactggattggccaaggggttccaaaaagcatactacaacaggtatggaggtggtgccaactctgttgc

SEQ ID NO: 252580 - DNA, 506 bp, Glycine max
ttgaagttgcaaaggggaggtatgatagtactcctcatagaagagctatgacgtcgcatgcacgcgtacgtaagctcggaattcggctcgaggaaaaacaagtagttgagaactaagaagaaggaaatggcttcctcaatgatctcctccccagctgttaccaccgtcaaccgtgccggtgccggcatggttgctccattcaccggcctcaaatccatggctggcttccccacgaggaagaccaacaatgacattacctccattgctagcaacggtggaagagtacaatgcatgcaggtgtggccaccaattggcaagaagaagttcgagactctttcctacttgccagacctcgatgatgcccaattggcaaaggaagtccaataccttctaaggaaaggatggattccttgcttggaattcgagttggagcacggtttcgtgtaccgtgagcacaacaggtcacctggatactatgatggacgctactggaccctgttgaaact

SEQ ID NO: 252581 - DNA, 656 bp, Glycine max
  unsure (1)..(656): unsure at all n locations
gagaagatatgtaaataagnnnnnatagnnnttaattaggattaggtagtagagaatagttatataaggagaggagagatgagagaatgtnagataggttctgataagaggattatagcacactccagaagaagctatgacgnntcgcatggcacgtnnngtacgtaagncnntcgggaatattcgggttccgagggaagaaggtgggttttcaagtggaagtggaatccgggtggtttcaactttggaacccttgtaataaaggtcggtcaatcaatcaatcaatcaataatcaaccgttggattgaaaaaagatgcccgatcaaaaaccatcgccatcggaaggcctgaaaaggctactaacccggacacgtgaaaggcggggttggctgagttcatctccaccttgatcttcgtgttcgccggttcaagttccggcatcgcctacaacaagctcaccgacaacggcgccgacactcccgccggcctcatctccgcttccatcgcccatgctttcgccctcttcgtcgccgtctccgtcggcgccaacatctccggcggccacgtcaaccccgccgtcaccttcggcgccttcgtgggcggcaacatcaccttactccgcggcaacgtctacgtcatcgtccaacttctgaggt

SEQ ID NO: 252582 - DNA, 605 bp, Glycine max
  unsure (1)..(605): unsure at all n locations
gagtggagagtgaggagggggnnagaggggnnnagaaatgattggattaaaggtaaggtgtaggaggaaaagaggaggagagaagttagtggtgaaagaggagtgtgtgataaagaagtttatagtgacactctagaagagctatgacgtcgcatgcacgcgtacgtaagctcggaattcggctcgagaaaccttgcatgaaaatatggacccataatgtccttgaagctagggcaagtccaagccatagtgggtttcttccctgaaaccgctgaactattcctcaagacccatgacactgtttttgcaagcaggccaaagattcaagcctctgaatatctctctcatggcaccaagggcttggtgttttccgagtatagcgcctactggcgcaaagtgaggaaagtgtgcacccttcaacttctcagtgcttcaaaagttgacatgtttgctcctttgaggagacaagaattgggagtgttagtgaagtcactgagaaattcagcggcatcacgtgaagttgtggacctcagtgaagtgttgggggagcttatggagaacatagtgtataaaatggtattggggcgtgctagggatcataaatt

SEQ ID NO: 252583 - DNA, 624 bp, Glycine max
  unsure (1)..(624): unsure at all n locations
gatatgaatagattaatatagnnnnnataggnanaaatgattaggtgtatattagagataatatgttaagtgtggnataagaatagagtgatagagatgtgnaagagaagtatgaattatgaaaatcatatgaaacatctagaagagctatgacgtcgcatgcacgcgtacgtaagctcggaattcggctcgagggaaaattgttttttaaagggttaccgaaaggttgcattggtggtatactctctaggacttacgccggcggacgtgtgtaggttttccgccgtatcaaagattttccgttcggtcgctgaatcggacgcttctggggaaacgtttcttcctttccatttaccattccatcatttcccagtctccttcgcctctaaactatacttccaagaaggagctctatctcgctctctcggatcgccctatcatcatcgatcagggtaaaaagagctttcaattggagaaaaagagtgagaagaagtgttacatgcttgctgctagagctctcagcattatttggggtgacactgagcaatactggaactggacaaccgataccaattccaaggttccggaaagtgctgaacttagaaaatgtgtgtggcttgaaat

SEQ ID NO: 252584 - DNA, 579 bp, Glycine max
  unsure (1)..(579): unsure at all n locations
ggaaagtaattgaggaagnnncagagnnnnaatgattagttatgatggaatgaagatggagtgagagtgtaaagatatatttgggacttatagagattagtgaaatctctagaagagctatgacgtcgcatgcacgcgtacgtaagctcggaattcggctcgaggatagatagagtgatacacatcacattttctcaaagtaagttattaattaataaataaatggcggcggcggcggcagtgacggtgctactcccacctaggattccgaccgccaccaacgttacccgctgctctgctttgccttctctgcctcctcgcggcaccaacactaaaaccactttgctcttatcttgcctcaaccacttctcagtgtcccgaaaatcttctctgcttcagaccagagcttcttcagaggaatcatcctcagtagatgccaatgaggtgttcacagatttgaaggaaaagtgggatgctcttgaaaacaagtccacagtacttttttatggtggtggggctttagttgctgtttggctatcgtcgattcttgtgagcgccatcaactctggtcccttgctt

SEQ ID NO: 252585 - DNA, 621 bp, Glycine max
  unsure (1)..(621): unsure at all n locations
taagtatatatgaataattttnnnagagnnnnngatatgttgagattttatgatgaggtggatagaaagataggagatgatatgagtatgaagatgagnagttagaattttnnatcttagcgcttcatgttatatctatagaagagctatgacgtcgcatgcacgcgtacgtaagctcggaattcggctcgaggtcgtgtcttcttctctaaaataaaaaaccctaacttctgaacctttcaccgcatcgccaccgattccctatctccactaatcaaagaaaagaaaatgagtagacgctcgagcagaactgtctacgttgggaatctacccggtgatatccgtgaaagagaagttgaagatttgtttctgaagtacggacacataacacacatcgacctaaaggttcccccaagaccacctggttatgcatttgtagagtttgaagatgctcaagatgctgaggatgcaattcgtggtcctgatggctatgaatttgattgccaccggttacgggtggaacctgcccatggtgggcgtggtcattcatcctcaaaagatcggcgcaatagtcacagcaatggcccaagttggcacttgggatctaaggactcttaaatt

SEQ ID NO: 252586 - DNA, 506 bp, Glycine max
agtgatgtctgtattagaaactatatagtaccactatagaagagctatgacgtcgcatgcacgcgtacgtaagctcggaattcggctcgagctcccaattactttgttgcatttcacacaccaacttcccatagaagagagaagagagaagagactcttccttccatcctgcaactcaaatcatcatgcaagactccagctcaatgaagatctcccctctggatctcatgtccgccatcttcaagggcaagctcgacccctccaacgtctcctcctccaccaacgccgccgccgccgccttcctcctcgagaaccgcgacttcctcatgctcctcaccacctccgtcgccgtcctcatcggctgcgtcgtcgtcttcatctggcgcagatcatcctcccccaaggccaagcctctcgagcctcctaaacgcgtcgtcgagaagcttcccgaaatcgaagtcgacgacggcaccaagaaagtcaccatcctcttcggcactcaaacc

SEQ ID NO: 252587 - DNA, 500 bp, Glycine max
atatttctgaagtggggtatgatgtactcactatagaagagctatgacgtcgcatgcacgcgtacgtaagctcggaattcggctcgaggttgaaaccccagtagaggttcctgttgagaagactgaagcttagacctatggacagtgtgagtgagaaaaacaagtttaaaaatggtcctagttgtggggatcaggtctaccattttgcatgccatgttgaaaagcctctttttttttttttctttttatttctttagtttactttattaatattattatatgatgcttaagtctttggttgtattatggagggtacacctacgtgtaagcacaacacttggctccacatcagcgtgcttgccacgtggtgacatgagaaattctgggagttgtgtattgaagtgagcaagctgctggtgctggagtttaggggtgatggtttattggcagggttacatgagtttgtgatggtgtgttactgtgtttctttaagtttgaat

SEQ ID NO: 252588 - DNA, 503 bp, Glycine max
  unsure (1)..(503): unsure at all n locations
aggttctncaatgaagaactatgatgtaccactcatagaagagctatgacgtcgcatgcacgcgtacgtaagctcggaattcggctcgagtcagaatcagaatcagaatcagaatcagagagaaacgatgagggcagtaagtgcgttaatggtggctcggatgttgacgcgggaccactcgctccctgtccttggcaacgaaagcatacccttcggatcggtgtggtggttcgcctatgccggcgtctcctgtttcctcgtcctcttcgctggcatcatgtccggtctcaccctcggactcatgtctctgggcctcgtggacctcgagatcctcgaacgcagtggttctcctgccgagaaaatgcaagctgcgattatacttcctgtggttaaaaaacaacaccagcttcttgtcaccctacttctctgtaatgctgttgccatggaggctctgccgttatacctagataaactattcaatcagtttgttgctatcattctct

SEQ ID NO: 252589 - DNA, 610 bp, Glycine max
  unsure (1)..(610): unsure at all n locations
taagaagagagaaataagnnnnnagatannnntaatggaattatggatgtgtaagagagtaggagaggaaggnnagaggaagagatgaaaagataggatcaatcttaagtgtctgattacgaagtattatagtaacaccatagaagagctatgacgtcgcatgcacgcgtacgtaagctcggaattcggctcgaggaacataccaatctacaataaacgatgattctcattatctgcctcattttatctcttctctctttctcccatgcttctgtcctagatttctgtgttgcagattatgcaggtcctattggacctgcatgatattcctgcaagaagccttcaaaggtcacagcagatgatgttgcttacagtggccttggcattgctggtaacacctcaaacattatcaaagctgcagtgacccctgcatttgatgctcaacttgctggtctcaacggtcttggcatttccgcagcacgtttggacttaacagcaagtggagctataccaactcaaactcattctggagcatcagaattacttgatgaaattgaaaggagcatcacagctggaataagaactatgccgacattggttaactaaaaac

SEQ ID NO: 252590 - DNA, 615 bp, Glycine max
  unsure (1)..(615): unsure at all n locations
tatggaatggcaagaaggggnnagagnnnngaaaggtagtaggaagagagagaaggaagtatgatagtagaggagagagagtagtaagagganataagggtgtgatttaagaaagtgcaatgtatactctagaagagctatgacgtcgcatgcacgcgtacgtaagctcggaattcgggctcgagcaaaaagaacttttcgtaggaaaactaagaaagataagcacgtgggtaaataaatgatctctcgccaatgtggtaccactgacaagagtgccagtgccgacatgattgctacattcaatggactcaagatcatggctggctttattaccacgaataccgactatgacattacctgcattgctagcaactgcagaagagtgcaatgcatgcatgagtggacaccagctgacaagactaaatgcgagactcaatcctacctgacagaccttgatgatgcacaatcggcatatgaagtagaataccatattacgaaggtacgcatatcttgcttggaattctagttgtatcacggataacggtaccgttagcacaacgagcaaccaacatactacgatggacacttctggaacatgtggaaagtttctatgtt

SEQ ID NO: 252591 - DNA, 620 bp, Glycine max
  unsure (1)..(620): unsure at all n locations
gaggaatgagagaagagagaggggnnnagagannnnnnaggagtggatatgtacaatgtagtggagattatagtaagtggagagagaggagatgtagggagaggattagagtaaggattctgatttatgcacgtcatagtagaactctagaagagctatgacgtcgcatgcacgcgtacgtaagctcggaattcggctcgagcgccgtttcagcgtctttcttttgcgtcacaaccactgcgcaggctcatggctcgcgccaccctcggcctcactcttccagccaacaccgaatcccttaaggtttctttcgcggcaaaggagcttgacgtggcggaatggaaaggggaccttctcgccgttggcgtaacggagaaggacgtcgcgagaaacgtggaatcgagattcgagaacgcgattctgagcgcgttggactccaagctgggcgggttgttgggccaggtctcgtccgaagaggacttcagcggcaaacttgggcagtccacggttctaagaatcgctttcggactcggattcaagcgcgtcgccttgcttggcctcggcgccttcgcgtncaccaccttcgcggtcaagtccctcggcgaggccgttgcccgtgc

SEQ ID NO: 252592 - DNA, 613 bp, Glycine max
  unsure (1)..(613): unsure at all n locations
taagtgagtgttagtagtggggntatagtnnnntaatgtgtttaatggttcttatgagtaagtggtagtggatgnattgttgttgtgtatgtattgtacattgaggtgtgtttgnctaaagagacgtcatgcaaaccctcatacaagagctatgacgtcgcatgcacgcgtacgtaagctcggaattcggctcgaggtttcagtgagtgatcggtgttcacttgatccttcataagtcgtcatcatcatcatcatcatcaccgttgattgaagaagatgccgatcagaaacatcgccatcggaaggcctgaagaggctactcaccccgacacgttgaaggcggggttggctgagttcatctccaccttgatcttcgtgttcgccggttcaggttccggcatcgcctacaacaagctcaccgacaacggcgccgccactcccgccggcctcatctccgcttccatcgcccatgctttcgccctcttcgtcgtcgtctccgtcggcgccaacatctccggcggccacgtcaaccccgccgtcaccttcggcgccttcgtgggcggcaacatcaccttactccggggcatcgtctacgtcatcgcccagctccttg

SEQ ID NO: 252593 - DNA, 595 bp, Glycine max
  unsure (1)..(595): unsure at all n locations
aattgagagagaaaggggnagagnntgaagagtttatgtacggatgagtgtaagatatagaggaaagagatagagtgagaaaggttatgatatgaaattatagtatatctctagaagagctatgacgtcgcatgcacgcgtacgtaagctcggaattcggctcgaggccagccactatccacaataataatggctttgagaaaatgaagtaaacttcctcaaacagcactcatcaagcaaatcctcaagaggtgttcgagtttagggaggaaagatgatcaaggcctcttggacgtgccaaagggtcactttgttgtatatgttggagaaaacagaagcagatatattgctcctatttccttcctaagtcgccctgagttccaaacacttctccaccaggctgaagaagagtttggctttgatcacgaaaagggtctcacgattccatgtgaagaggacgtttttgagtctctcacctccacgctcagatgagaaacttgccttaccacgtatcgatcatttttcgttatcttttctttgattttttgaaggagaagagaaaattaatagctcaagatgaagctggtttaatggt

SEQ ID NO: 252594 - DNA, 600 bp, Glycine max
  unsure (1)..(600): unsure at all n locations
aggtagagtagagtgggggnagagnnnnaaagtattaggatatagagagtttaattgagtgagaggatggaggagaagaggtgggganttctggtaggagaatatgtganaacatcatagaagagctatgacgtcgcatgcacgcgtacgtaagctcggaattcggctcgaggtcctgagtgatcttgtcatccgacctttgccatgacaggtgcgcttgcatggcaggtcaaaaaatgttaataaaaaaagttttattggtttggggagagatcgcacgggggttgcccggggtctcttcctcttgtgtggtgtggtgtttgctgtgctctccttttcgttatgccttttattattacctatctgtcgctccactccgtattacgactctggatcagaggatacatcagaggattcgctccaacccctatcgagtaaggtattatctgtcaatttacattcgaaagggttaggctattgaattttaaataattacagataaaataatcgatagctttgattttaaaaattaatcataatcatcggttaggttgcaacataatacttaattcgcttaattttttaactgggccttaaagt

SEQ ID NO: 252595 - DNA, 509 bp, Glycine max
tagtgtctgaaacagagggatactgacagtactcactcatagaagagctatgacgtcgcatgcacgcgtacgtaagctcggaattcggctcgagtgttattgcacccaacattccagctctttatgaagctcactttgggattccaatgtcaggggctgtgttgaaccctgttaatattaggctaaatgcatccacggtagcttttcttcttggtcattgcacagctgcagcagtaatagttgatcaagagtttttttctttggcagaagaagctttgaaaatatggtctgagaaggccaaaaccttcagccctccacttttaatagtcatcagtgatgaaaattgcgaccctaaggcacttaaatatgctctgggcaaaggagccattgaatatgaggattttcttcaaagtggtgatcctgagtatgcatggaaacccccagaggatgagtggcagagcattgcattgggttacacatccggtaccactgctagtccgaagggtgtg

SEQ ID NO: 252596 - DNA, 617 bp, Glycine max
  unsure (1)..(617): unsure at all n locations
taagaatagagaagtagaggggnnatagagnnnnaaggatgttgatgaggagtagagaaagaggagaggaaatnnagaggaggagatgaagagagtgaagtatagagaaagtctctgaattacgaacatcatagtanaactcctanaagagctatgacgtcgcatgcacgcgtacgtaagctcggaattcggctcgagcagtcttaggcgtcgaaggtttctcggcacttccccaccactgcttgcagctctgttacgggttcttcgctttcgcggtggctgtgaacatggtcagagacctctcccccaagaagattgggaaatggatgcctttgcccatggtaatggcgatacccttccttgttggtgcttactttgccattgatatggcccttgggactttggttgtttacgtgtggcacaagcttaactccaagaaggctgaggccatgattccagcaactgcctctggactcatttgtggggaaagcctctgggctctccctgcttccattctcgcccttttcaaaattaaaccttctatctgcatgaatnttcttgcttcctagaacttgatcatcaactacatcaaaccaataaatgccatggatagttaa

SEQ ID NO: 252597 - DNA, 616 bp, Glycine max
  unsure (1)..(616): unsure at all n locations
tagggagaggaaggaaggggnnagagcnnnnaagtataagtagatgaggagagtgagaataatagaggagagaggaggtgtggaggaagagtagaaaggngtcngcttatcagaaactccatgaaagacatataggagctatgacgtcgcatgcacgcgtacgtaagctcggaattcggctcgagctcgagccgctcgagccgaatcggctcgagcttgttttcatgacataaactatcatcaactgttgctttccattttggctataattccacaaaatgtgccattcattgcaagtgtaatattactagcatttccatatatcagtccatggcctccttaatgctcaatggagctcatcaaaatccaaacctcattagtggcatagctccaaatggccttaactttcacagcaagtgtttattccaaaagggtgtgctgtctcatggtaacaagttaagggtggtcagaaaaaacttcactcccaaaggcagcatgtcagcatcatcatcatcatcatctaggcctggttctcagccaaggttcatccagcacaagaaggaagcattttggttctacagggttctctctattgggtatgaccacattataaacc

SEQ ID NO: 252598 - DNA, 604 bp, Glycine max
  unsure (1)..(604): unsure at all n locations
tatgaagagagatagagggggnnagagnnnngaaagtgttgatggaagggagaggatgggattggagggagaggaggagagaaggaagaggtgcgagaggtgtctctgatttacctccctcagtagaatcatagaagagctatgacgtcgcatgcacgcgtacgtaagctcggaattcggctcgaggccatggaaacaggcatagcatgctacactcgcgggcctttcttgcctagtgtttcttccaagcactctccaccttccatttctccatcttttggcttgaggagtctgaaatcaagctctttatttggagaatcgctaagagtggcctccaaatcaacaataaaggtttcaaagacaaagaatacttcactcgtgaccagatgtgaaattggtgacagtctcgaagaattcctcacaaaagcaacaccagataaggggttgatcaggttgttggtgtccatgggagaagcattgagaacaatttccttcaaagtgaagacggcttcatgtggtggaacacaatgtgttaatacttttggggatgagcaacttgcaatggatttgctagctaatcagcttctttttgaggcctaaatta

SEQ ID NO: 252599 - DNA, 604 bp, Glycine max
  unsure (1)..(604): unsure at all n locations
aggagaggaaagagggttgaagtnntaataagaggtaagtgatagaagaagtataaagggagtggaggagaggaggaagaggagaagggtntctnnctatgcaccatagtgnanntctatnagagctatgacgtcgcatgcacgcgtacgtaagctcggaattcggctcgaggaagaacaagttgttgagaactaagaaggagaagcaaatggcttgctcaatgatctctttcccagctgttaccactgtcaaccgtgccggtgccggcatggttgctccattcactggcctcaagtccatggctggcttacccaccagaaagaccaacaatgacattacctgcattgctagcaactggggaagagtgcaatgcatgcaagtgtggccaccagttggcaagaagaagtttgagactctttactacctggcagaccttgatgatgcacaatcggcataggaagtagaataccttcttaggaagggatggattccttgcttggaattcgagttggaacacggtttcgtgtaccgtgagcacaacaagtcaccaggatactacgatggacgctactggaccaatgggaaactggctaaggttgagtg

SEQ ID NO: 252600 - DNA, 587 bp, Glycine max
  unsure (1)..(587): unsure at all n locations
aagagtggaggaaggggngaggggnaaggtgttaggtaggaaggagatgaggagggagtgaggagaggaggagggtgatagatagtgtttgataagagatttatgtagacatctagaagagctatgacgtcgcatgcacgcgtacgtaagctcggaattcggctcgaggttcagcagctccatagtgtcgccgccggacgagctcgtggccgccggcagccgtactccgtcgccgaagatgacggcggcggcgctgcggaagcggttcgaggagaagaacccctccgccgtgtcggtggaggtcggagagcatgtccagctcgcttatacccaccacaacgagtcgccgtttcagcccagatcctttgctgtcaaggatgaggtgttctgcttgtttgagggagcccttgacaatttgggaaacttgagacaacaatatggactggccaagtcagtcaatgaagtattgttggtcattgaggcttacaaagctttgcgtgaccgagcaccctaccctgctaatcatgttgttggccatctcaaggggaactttggttttatagtttttggacaaatctacttgtacc

SEQ ID NO: 252601 - DNA, 622 bp, Glycine max
  unsure (1)..(622): unsure at all n locations
gagaggtagaggagaggataggggnnagaggggtattaggattagtagaggagtagatgaggataaatgttgggagaggaggagaggaggaagaagtgaaggggttctcttaaagacagatatgatgaaaccatcatagaagagctatgacgtcgcatgcacgcgtacgtaagctcggaattcggctcgaggatcaaagaacagaagatggcacaaacgctggcaatgcccgtggcaccttcgctcgctatcatctccaattctcgcctctccaagacactctccgttcccgttctcaacaacccaaagtttcaagggttaagcatcaagtgcgttcgtgttggaggtgtggagattccgaacaacaagcgaatcgagtactcgctgcagtacattcatggagttggcaggaccagagcaaaacagattctgtgtgatatccaaatggataacaaaatcacgaaggaactcactgaggaggagctcatcactctcagggacgaagtctccaaatatatgattgaaggcgacctgagacggttcaatgcggttaatataaagagactgaaggacattcagtgctacagaggaataagggaccattaagggcttactttgaaag

SEQ ID NO: 252602 - DNA, 605 bp, Glycine max
  unsure (1)..(605): unsure at all n locations
taataatagatgaagaggggcnagaggnngaaagactgtggagaattgagaggttaggaagaaaagggagagtaggagagtatgaagtggataaagaggagagtgtgtttatgcacatcactgcaanatcnatacaagatctatgacgtcgcatgcacgcgtacgtaagctcggaattcggctcgagggctttgaatttgccttctcccgcccaagtgaagcccttattgttctcttcaaataactccacaaaacttccaggtagcttttctttgaagagaaaagatagtgacacaacagtagagagacgagtttattgctctgccgctgctcaatcaccaccaccagcatggccaggaacagctattcccgagccttctgatttcaagacatgggatgggcaaaaacctatttctgtcttaggatctacgggttcaattggaactcagacactgagtatagtggctgagttcccagaaagatttaaagttgtgagccttgctgctggctctaatattactcttcttgctgaccagattaaaacatttaagcctgaagttgttggtcttagaaatgagtctttaattgatgaactcaaagaggct

SEQ ID NO: 252603 - DNA, 640 bp, Glycine max
  unsure (1)..(640): unsure at all n locations
atggtatgaggaggagagaggggaagagagggtagagaagaatagttgagagttatgagaagagaggtagatagtagtgagncagagagagagagagagaggatagataactagagannaatagtgnctactagaaacactnctagtaatncaccctcnaantattatgacgtcgcctgcacgcgtacgtaagctcggaattcggctcgagagaagttcttttgggcacctacaagggatgaccgagttggtgtctgcaagggaattttccgcactgacaatgttcctgaggatgaaattgtcaagcttgttgacaccttccctggccaatctattgatttctttggtgcactcagggctagagtatatgacgatgaagtgaggaagtggatttctggtgttggtgttgacttgattgggaagaagcttgtgaactccaaggaaggacctgcaacctgtgaccaaccgaagatgactttgagcaagctcttggagtatggtaacatgcttgttcaagaacaagagaatgtgaagagagtacaactgggagacaagtacttgaaccaggctgctcttggtgatgctgatcaagattgccataaaagagtgactaggtatggcaaaacaggccagataggaa

SEQ ID NO: 252604 - DNA, 507 bp, Glycine max
  unsure (1)..(507): unsure at all n locations
agggtgtgtcctgtcatcgaatcatgatagtagcactatagaagagctatgacgtcgcatgcacgcgtacgtaagctcggaattcggctcgaggggaaagagaagccacttccaatttcacacacacacagcaacacactgcactgtgtggaaagtaagcatggcaagagtggtggcactccaacagaaccaactatctttctctcccttagcttcctctctttttgacttcagtggaaccagacttcaaactcaacttcagttcaagagaaaactatgccatccaaaagggtctttctacgtctcggcatcgagcaccaagaaaatcctaataatgggaggcaccaggtttattggtgtgtttttatctaggctccttgttaaagagggtcaccaggtgactttattcacaagaggtaaagcgcctgtcactcaacagttgccaggtgaatcagacaatgattatgctgatttttcttccaggatcttgcatttgaaaggagacan

SEQ ID NO: 252605 - DNA, 511 bp, Glycine max
  unsure (1)..(511): unsure at all n locations
agtnnnntnntatgcattcagaatatagtacgnatctncatnntagagctatgacgtcgcatgcacgcgtacgtaagctcggaattcggctcgagctctcttctctgtttcatttattgcttctttgttgtcaactatgaacgctcttgcagctaccaaccgcaactttcaacgtgcagctcgcattctcggtttggattccaagcttgagaagagtctcctcatacccttcagagaaatcaaagttgaatgcacgatccccaaggatgatggaactctggtttcctatgtgggattcaggatccaacatgataatgcccgtggtcctatgaagggagggattcgttatcatcctgaggttgaccctgatgaagtgaatgctctagctcagctgatgacatggaagactgctgtagcagacattccttatggaggagcaaagggtgggatcggctgcaacccaagggatctgagtatcagtgagttagaacgtctaactcgggttttcacc

SEQ ID NO: 252606 - DNA, 505 bp, Glycine max
  unsure (1)..(505): unsure at all n locations
naggctcttccgttattgtaccattgatagtagcactcatagaagagctatgacgtcgcatgcacgcgtacgtaagctcggaattcggctcgaggtgttggagcagatcttgctttcttggttccaatgccaaatgttggaggtggaacaacctgtcttattctactataacaaggaaaacaggtgcaaaagctggcgttttccctcatacaacttcagtatgtcacttatttggtcaccattccttgtggaagctgctatttttgaagacgaaaatggtgtttcaagttctaatgttgagctacatctcgacaaactggatagtaaatggactgatcagtaccttgactttgattacattattttttcaactgggaaatggtttctcaaatctgcaatctactatgagaatgacaccatattgggctgccacttctgtcctaagaggaacctgacagagctggggtttaacctggcttatcgganagccttgaaattagtgatg

SEQ ID NO: 252607 - DNA, 505 bp, Glycine max
  unsure (1)..(505): unsure at all n locations
gaggnnntnntcaatcgatccctccgtatcaccatagaagagctatgacgtcgcatgcacgcgtacgtaagctcggaattcggctcgaggctacttactactatagtgtctgattcacaggccatagggcatagattttgagcacattggcctcgacacaatgctttttgcaccaccacgctctcaccactccagcttgagcttcaacacagcgcctatttgtgagcaccaaaccataccacattgcttgcaaggcagtacagaagcaagttactgtccaagacggtgaggacactactactggccttgtctctcgcaggttggccctcactgtgctcattggagctgctgttggaggctctaaggtgtcaccttcttatgcaatctattgagaagctgtctatgggtttggaaaaccaaagaccaacgcagacttactgtcatacaatgggataggatgcatactctgaattccatgaaagtggaacctagcatagatgttgtg

SEQ ID NO: 252608 - DNA, 502 bp, Glycine max
  unsure (1)..(502): unsure at all n locations
tgaggtgtcttaaaagggaaggaaaatggatagactctccaagagctatgacgtcgcatgcacgcgtacgtaagctcggaattcggctcgaggaaggggcataagagaaagaagcgcttatcgaactcggacggaagcactgagttgactcggagggagtggaaagtgttgttgcgtaatgtctggtggtatcgctcgtggacgcctcaccgaggagcgcaagtcgtggcggaagaaccatccccatggttttgttgcgaagccggagacgctgcccgatggaaccgtgaatttgatggtgtggcattgcactattcccgggaagactgggactgattgggagggtggctacttcccacttacgctgcactttagtgaagactaccctagcaagcctncaaagtgtaaattcccacaaggtttcttccaacctaatgtgtatccttctgggactggttgcttggctatacttaacgaggataatggttgaaggccaacatta

SEQ ID NO: 252609 - DNA, 508 bp, Glycine max
  unsure (1)..(508): unsure at all n locations
aggggntctntccatagtatatattgtatacactctagcagagttangnnnnnnnnnnnnntgcacgcgtacgtaagctcggaattcggctcgagcagagaaacgtcaatccagcaaaaaccaaggtcttcttcttaggaatttctcctgtgcattaccaggggaaagattggaatcgaccaacaaagtcatgtatgggcgagacacaaccattctttggactgaagtaccctgcagggacaccaatggcttggagggtggtgagcaaggtgttgaacaagataactaagccagtgtatttcttggatgtgaccacactctcacagtacagaaaagatgcacaccctgaagggtatagtggtgttatggcagtagattgcagccactggtgtcttccagggcttcctgacacttggaatgagcttttgagtgcagttctttctggttgaaaacaatcaaatcagagatgacaactttgattattaggttcaacttgntagaggaaaac

SEQ ID NO: 252610 - DNA, 503 bp, Glycine max
ggaagcttcgtcttatgaggaggtagatagtagtcactctagaagagctatgacgtcgcatgcacgcgtacgtaagctcggaattcggctcgagtccaatatattccattctctctgtgtatttccctacctctcccttcaagatgcagatcttcgtcaagaccctcaccggcaagaccatcacccttgaggtggaaagctctgacaccatcgacaacgtcaaggccaagatccaggacaaggaaggaatccccccggaccagcaacgtctcattttcgccggaaagcaacttgaggacggccgtacccttgctgactacaacattcagaaggagagtactcttcacctcgtcctccgtctccgtggtggcatgcagatcttcgttaagacactcaccggcaagaccataaccctagaagttgaaagctccgacaccatcgataacgtcaaggccaagatccaggacaagggaggtatccccccggaccagcaacgtctcatt

SEQ ID NO: 252611 - DNA, 518 bp, Glycine max
  unsure (1)..(518): unsure at all n locations
agctntttctaaaatgtgcgattaacggagacactctagaagagctatgacgtcgcatgcacgcgtacgtaagctcggaattcggctcgagtgagaactaagaaggagaagcaaatggcttcctcaatgatctcttccccagctgttaccactgtcaaccgtgccggtgccggcatggttgctccattcactggcctcaagtccatggctggcttccccaccaggaagaccaacaatgacattacctccattgctagcaacggtggaagagtgcaatgcatgcaggtgtggccaccagttggcaagaagaagtttgagactctttcctacctgccagaccttgatgatgcacaattggcaaaggaagtagaataccttcttaggaagggatggattccttgcttggaattcgagttggagcacggtttcgtgtaccgtgagcacaacaggtcaccaagatactacgatggacgctactggaccatgtggaagctggctatagttgggtgcactcggtc

SEQ ID NO: 252612 - DNA, 510 bp, Glycine max
  unsure (1)..(510): unsure at all n locations
agtggtcgtgttgttgggcgtatggttgcactactcaagagctatgacgtcgcatgcacgcgtacgtaagctcggaattcggctcgagagccatgatgtgttctaaaggactcaccgatgcatcaaagatagccattttgaatgcaaactacatggcaaaacgattggagaattattacccggttcttttccgtggagtcaatggaacagttgctcatgaattcatcattgacttgagagggctntaagaatactgctggaaattgagcctgaagatgttgcanagcgcctcatggactacggttttcatgcaccaacaatgtcatggcctgtgcctggcacactcatgattgagcctactgagagtgaaagcaaggccgagttagacaggttctgtgatgctcttatttncattagacaagaaattgctgagaatggaaaagggaagggtggcctttaccaccattgtcctaaaggcggcccttaatccaccatcactgctcatggctg

SEQ ID NO: 252613 - DNA, 510 bp, Glycine max
  unsure (1)..(510): unsure at all n locations
atgggtttgngaagttggaggaagagtgacactcctcaagagctatgacgtcgcatgcacgcgtacgtaagctcggaattcggctcgagaaagcacaaagcaaagctcatccttgagttaaaaaatggcagcagcttcttccatggctctctcatccccatccttggctggcaaggccgtgaagctgggcccatcagccccagaagtgggaagggtgagcatgaagaagaccgtcaccaagcaggtctcctcaggaagcccatggtacggcccagaccgagtcaagtacttgggcccattctctggcgagcccccgtcctacctaaccggtgagttcccaggcgactacggctgggacactgctgggctttccgcagacccagaaaccttcgccaagaaccgtgaactcgaaatgatccactccaggtgggccatgctcggagcctttggctgcgtcttcccggagttgctgtcccgcaacggngttgaagttcggagaagcccgtgtgt

SEQ ID NO: 252614 - DNA, 504 bp, Glycine max
ggaaggtgtctgaaaatcgaagactattagtatcactctacaagagctatgacgtcgcatgcacgcgtacgtaagctcggaattcggctcgagggcactggggtgagttcatcacacccggaatactattcctgtacatctcgggatggatcggctgggtgggtcggagctacctgattgcgatcagggacgagaagaaacccaccatgaaggagatcatcatcgatgttcctctggcttctcgcttgctcttcaggggtttcagctggcccgttgctgcctacagagaactcatcaacggcgacctcattgccaaggatgtctagataagagagggtggatggctacattggaggaaagcctggagaatttgtatgtggatgggatctttacgcgctctttttgtaaatactttttttaataatggtacatgatatgatgtaatctaatgcatgtgaaccacaatcaacctcatctttcaattcaattaatggtaaaagagtc

SEQ ID NO: 252615 - DNA, 509 bp, Glycine max
  unsure (1)..(509): unsure at all n locations
gtaattgtttcngtcaatgtagggagggatgagtgagaattactcagagctatgacgtcgcatgcacgcgtacgtaagctcggaattcggctcgagggagggtttagtttccctggttgattcctccacaatcaagaaaacccaggcaacaagcacaaccaaacaggcagggatgtcgtcgcagggcacaggttcagtagtggatttcgacctccctgacgagattctatcggttataccgacggacccataccagcagcttgatctcgctcgcaagataacctccatggccatcgcctctcgtgtctcttctctcgagtccgacgcctctcgcctccgccagaagcttctcgaaaaggaccgaatcatcctcgacctcgaagaccgcctctcctccctcacccgcgcctcccaccaaaccgactccaccctcaacaccgncctcaacgaaaacattaagctttccaaggagagggatcaatttgccgncaccgtcaagaaagtaaatc

SEQ ID NO: 252616 - DNA, 504 bp, Glycine max
  unsure (1)..(504): unsure at all n locations
ggtaaggtgttntaaatagtggggtgatagtaagtaatctctaagagctatgacgtcgcatgcacgcgtacgtaagctcggaattcggctcgagtgggaacgtacaaggagtgggattgttcataaatgttgaaccaagaacaggacatttggttgtcttgtcatgtgtagatggcagtccagctgctcgtgctggtatacatcaaggggatgaattgattgagataaatggtgagaggcttgatggcattgatagtgaaactgcagcacaaaggcttagagggaatgctggaacaactgttacagtaaaggtcaaagactcaggaacaagatcttttatncgagaggtcnaaacttcctagggggtttttaaactctctccaatattaaggtggcatcatcccttataagatcccagatggtcatttcacaaaaactggctatgtgaaaatgtcagccttttctcagactgctgctgaggacatgangaatggcattcaggaa

SEQ ID NO: 252617 - DNA, 510 bp, Glycine max
  unsure (1)..(510): unsure at all n locations
ngaatggtttctgttttaagaagagaaantgttatggcaccactctagaagagctatgacgtcgcatgcacgcgtacgtaagctcggaattcggctcgagcaataacaatgtcaacaacactaataatgtgtgcaactgcaagcactctccctccgccaccttagaccttctcatcctcctcctagtcctcttctccggcgcgttcctcctctcctcctacctctgctacatcttcaactccctctccctcctcctcccctcggtgccgctctcctacctcctccccttcctcctcttcttcgccctctccctcgccaccgccgacttctgctgcggcgcccgatcccgccgctgccagcgccagggctgcaagggcctcaagaaggccatggagttcgatttgcagattcagcgcttcggctcctccgtgccttcctccgccgaaatcgataagctcccctggaagggcggcactgaagccaaccccgattacgactggctcaggttcg

SEQ ID NO: 252618 - DNA, 505 bp, Glycine max
tagctgtctttcattgagagggaggatggactgcataactctagaagagctatgacgtcgcatgcacgcgtacgtaagctcggaattcggctcgagtcgtgaacatgctctgctttcattcacccttggtgtgaaacagatgatttgctgctgtaacaaaatggatgctactacacccaagtattccaaggccaggtatgatgaaattgtgaaggaagtctcttcctacttgaagaaagtaggatacaaccctgacaagattccttttgttcctatctctggttttgagggagacaacatgattgagaggtccacaaaccttgactggtacaagggtccaactctgcttgatgcacttgaccagattagtgagcccaagaggccctctgacaagcccctcaggcttccccttcaggatgtgtacaagattggaggtattggaactgtgccagtgggacgtgttgagaccggtgtcttgaagcctggaatggtggtgacttttgca

SEQ ID NO: 252619 - DNA, 507 bp, Glycine max
  unsure (1)..(507): unsure at all n locations
nggatatggtgttgtcttacgaggaaggtagaaaagaatacactctagaagagctatgacgtcgcatgcacgcgtacgtaagctcggaattcggctcgaggaagaatcttcagctttctactgaacacgttgaggcttctagaatgacccttcacaggtttgggaacacttcgtcttcttcgctgtggtatgagctcaactacattgagtccaaggggaggatgaagaagggtgatagggtgtggcagatagcgtttgggagtggctttaaatgcaacagtgctgtgtggaagtgcaacagaagcattaagacaccggttgatgggccttgggctgattgcattgatcgttacccggtcgatattcctgagatcgttaagctctaggatggagaattgttcaagaacaagaagataattgcttattttatgaaaaaaaaaaatagatgagttctcataacccttctctatctgctcaccgtaaccgtaccacaaatctctctcattt

SEQ ID NO: 252620 - DNA, 509 bp, Glycine max
  unsure (1)..(509): unsure at all n locations
agtggtttcgtctgatgttgggggatgagggaatctctcaagagctatgacgtcgcatgcacgcgtacgtaagctcggaattcggctcgagagcatggccatggtaggcggaaccatgatggctgcgtatttgcgtgtatccatgcccacttccccacagtcccccaccactacgaggaggagatgcagaaatctgaaaacttcttgctccgttaacagacccaaaattccaatgccccctctcaaccctaaagacccctttctctccaagctcgcttccgtcgctgcttcttcccctgaaacgctcctcaacactcccaaaaactccgacacccttccttatctcgacatcttcgactcccccaaactcatggcaacntccgctcaaagtgaaaggtctngttcatacaacgaacaccggcccaggagggccgcacctgacctgcctcgctgcttctcatggagaaatgttacattgcattgctttgtgcagctgtcacggacttgtc

SEQ ID NO: 252621 - DNA, 505 bp, Glycine max
ggaagtatcttcaatgtgggggggagggaagagtattctagagctatgacgtcgcatgcacgcgtacgtaagctcggaattcggctcgaggcaggatgtgtcgttgggagcgaacaagttccccgagaggacagccaattgggacggcggcggcagagccaaaaacgacggcaaggactaccaagagccggcgccggcgccgctggttgacccgacggagtttacgtcatggtcgttttacagagcagggatagcagagtttgtggccacttttctgtttctctacatcactgtcttaaccgttatgggagtcgccggggctaagtctaagtgtagtaccgttgggattcaaggaatcgcttgggccttcggtggcatgatcttcgccctcgtttactgcaccgctggcatctcagggggacacataaacccggcggtgacatttgggctggttttggccaagaaagtggcggtggccaagggcaatttttatcatgtgaaggca

SEQ ID NO: 252622 - DNA, 497 bp, Glycine max
ggaatgttttttcatatgataaatagtatgcctctacaagagctatgacgtcgcatgcacgcgtacgtaagctcggaattcggctcgagggctcaaagacatgcctgctttggcgtaaaatagatcattgatcaagtacactgcaataccagtcaaatgttgaggcagtcagtttaattctttattattttttgtaagagtttttcttttcctgcttaactttctcataatagttggtgacataaatggggtataaattgtgggaaatgggagggtttatgttctatgttactttgtactccaatcttttatgaatgtactagggaaacttgttttgtttgattaatcttctgaatcttctcttaaaaaaaaaaaaaaaaaaaaaaagggcggtcggcgactagtgagctcgtcgacccgggaattaattccggaccggtaccttgaagcctaccaacttttcctattgtgagtcgtattaaaacttggccgtataa

SEQ ID NO: 252623 - DNA, 504 bp, Glycine max
  unsure (1)..(504): unsure at all n locations
atgtgtcgtctacgaagcaaggaagagatggacatctctcagagctatgacgtcgcatgcacgcgtacgtaagctcggaattcggctcgagcatggatcatcgcaaaccattgctacccacttcctctgatgctgctccaaatccacacactcgcaaggaccttcttctagttatttgcggcttgctattactctcttcccttgttgcctttggagggtacagggcctccaacgcgccgcatgccgacgtggcatcggcaacatcgaacgatgagcaacgtagtccgacatcggtgccttctccgaaatggtacccggtttcgcgaggtgtttcttccggggtgtcagagaagtcattcaagcatgttgtttgcggttaaagatggagcttcgaaggcatttccatgggacaacagcatggtggcttggcagagaactgcttttcatttccaaccagagaaaaactggatgaacgatcccaaatgtcctatgtactancaggga

SEQ ID NO: 252624 - DNA, 499 bp, Glycine max
gtaggttccttccatcgcaatacgtacgtatcactatagaagagctatgacgtcgcatgcacgcgtacgtaagctcggaattcggctcgagctttaatcactcactatcagcacaacaactcactcactaagctaaacaatttcatcaagcctgccatggcttcctcgtgtgcttcctctgccattgcagctgttgccatctccacaccaagttcccagaagaatggatcactcttgggaagcacaaaagcttcttttcttagtgggaggaaactgaaggtgaacagttttacagcaccagttggagcacgatccagcactacagtgtgtgcagttgctgagcctgataggcctctgtggttccaaggcagaacccttcctccgtggctagatggcaatttgccaggagattttgcttttgatcctctaggtctaggttctgatcctgatagcctggaaatgaatgttctagcttatcctatgccttttttatttcctt

SEQ ID NO: 252625 - DNA, 502 bp, Glycine max
cattcttggtagttggggatggtgaactatcgaagagctatgacgtcgcatgcacgcgtacgtaagctcggaattcggctcgagggatgctgatgatgcctggtggattggagagacattttgatggatctgatgaagaaaaacctgcatcatatgtctcaactaatactcgaatggtggttccaacatccaagaatgttaactcctctcagaaacctgctctcaagttcttgatctatggcagaacaggttggattgggggtttgctgggaagttgtgtgaaaagcaaggaattccctatgaatatggaaaaggacgcctggaggaccgatcatcacttgtggctgatattcagaatgtgaagccaacacacatttttaatgcagctggagtaactggcagacccaatgtcgattggtgtgaatctcataagacggaaaccattcgcaccaacgttgctgggactttaacattggctgatgtcagcagagagcatggactc

SEQ ID NO: 252626 - DNA, 519 bp, Glycine max
  unsure (1)..(519): unsure at all n locations
taatgtgactcngtgtaggcagggaggatgggtggcactatcatcaagagctatgacgtcgcatgcacgcgtacgtaagctcggaattcggctcgagcaaacatggcggcaattttctcttcttcgctcttcgtttcttcgcctcttcccaaaccactttcttcctcctattcccgaatccataaagctccacaacttttcagggctcgctcctcgctccttcaggataaagaggaaaaagtgatcgtgcaggattcattcccctccaaaacctctcctcttcactccgctgataaatcaactagtggaaactcgattaacacctctgcgttcgagaaacggattatcaaggtcgaacaatcggtgaatatctttctcacggattccgtcataaagatacttgatactctgtaccatgatagacactatgcaaggttttttgggccttgaaccattggccagggttcctacctttgccttatggcaagtcttcatatgtattgaaagtttggctggtgg

SEQ ID NO: 252627 - DNA, 498 bp, Glycine max
aaggtttgtcccactgaatgacagtagcctctacaagagctatgacgtcgcatgcacgcgtacgtaagctcggaattcggctcgagctctcagccatccattgcaccaattcgtcagaattatggagttgacacacagagttacaacttactacaaatggaataacttgttttcctctgtggcttctctctttctctcacctgaaatcaacttgtaatctccatgagcttctattgaattgatactttgatcaagatggatgggaaaaactctcttcaaataactagaagtggtattggtgcttatgatgatgatggacatgccaaaaggactgggaatttgcagagtgctgtagctcatatcattactgctgttattggttctggtgttctatctcttgcatggagcactttccacttaggaatggatggaaggcccattttccttgctttgttgtgcaattgtcacctatatttgttcattcctcctggctgattg

SEQ ID NO: 252628 - DNA, 498 bp, Glycine max
agggttttataactgacgacctgattgtatcactctacaagagtctatgacgtcgcatgcacgcgtacgtaagctcggaattcggctcgagatcaattgcttcggttgaattttgactgaagacaaagttggaaaacaaacacatgtctcgctccgtcgcggtttccaattcgccggtgttctctccttcttcttccctcttctgctcgaagccctccatcatctcttcttcgccggaatccctctccctctctctgtcgcatctcaaaccttcgaactcttctacgtcctcgccttgttcttcgccttctgctgctgctgcttcttcttctccttcttctccgtctcgacttcgccttcccaagcctaccaccgcgttctccgcgtcttctgctgctcctgcttcgtctacctctccgaactgcaccgttttgaagcggaagcgacctcgctacgctggacatacccgttacctaccttacctttgcgggtcccgcc

SEQ ID NO: 252629 - DNA, 518 bp, Glycine max
aattgtatgtggaaaaggataggagaaaggtgtacactatccaagagctatgacgtcgcatgcacgcgtacgtaagctcggaattcggctcgagcccttctcctgaatcacttaagaagagaattattatatcaaccaaaccacctaaggagtaccttgaggcaaaagaaaaggaaaaaggggatgattcacagcacgaaaaggagaaaggggatgattcagagcatggaaaggcatcaggtgaagatgaagcttgggggaaggaagtcccaagcttgaaaggtggtactatagaggattacaaggacaacaacgtggatgaagatcttaatgatgaggaagaatttgatgaatcagacaagtcacatcataatgaagctccagaatatagacacctaattgccattcatgctgggaagcctaaaggtggattagtggaatgcctcaaagtggatcctgaaaaagtgagacgtctaagtttaagtgagcaacagctttgaaaagctgctataaattat

SEQ ID NO: 252630 - DNA, 504 bp, Glycine max
ttgtgtttgaatacgaaagattgatgcactactactagagctatgacgtcgcatgcacgcgtacgtaagctcggaattcggctcgagctagagcggatatagcaatctcatctcattcatttcaatggcaactcaaggtcaagtcattacctgcaaagctgcggtggcctgggaacccaacaagcccttaactgtccaagacgttcaggtggctccgcctcaggccggcgaggtccgtgtccaaatcctcttcaccgctctctgccacaccgatgcttacacttggggcggcaaggatcccgaaggtctcttcccctgtattcttggccatgaagctgcagggattgtggagagtgttggagaaggtgttactaatgttcagcctggggatcatgtcattccctgttatcaagctgagtgtggggagtgcaagacttgcaaatcatggaagacaaacctatgctgcaaggttcgttccggcactggagttgggtcatgctcaat

SEQ ID NO: 252631 - DNA, 498 bp, Glycine max
caggtgtcgtctatgggggaaggaagaggggaatctctaagagctatgacgtcgcatgcacgcgtacgtaagctcggaattcggctcgagttgtaatttctgccagcctcaaaaaatacttgctctacctctgccactttctgagtacaatacaacactgccatggctgcctcagtctccactattggagctgtcaacagagctccactgagcttgaacagctctgaagctggagattcggttcccagttcagccttctttggcacaagcttgaagaaggttactgcctcaagggtccctaacgtcaagatttcttctggaagtttcaaaatcgttgcggcggagaaagagattgatgagcaacaacagacaaacaaggacagatggaaaggtcttgcctatgatatttcagatgaccagcaagacatcacaagaggaaagggtatggttgattccctcttcaagctccacaagagactggaactcactatgcagtca

SEQ ID NO: 252632 - DNA, 501 bp, Glycine max
  unsure (1)..(501): unsure at all n locations
aggtgtctatctacttgaaaaatgatagtatcactcatagaagagctatgacgtcgcatgcacgcgtacgtaagctcggaattcggctcgagtgagtcccttatcaaagatttcagcacacatagctgccaatgttgctgctaaggcttatgagcttggcttggccactcgccttcctcaacctaaagatttggtgaagtttgcagagagctgtatgtataccccatcctaccgaagctaccggtgaagcgataataaatagcctatttttctttttccttttcgttttatcattttattgtcaattatttaatttttttaccttctttatgttgctgttctgttcttgtaagttatttgttgggttagtaggttaggacggtggtagttggactaaaaaggtagcttgaaaatttgtgttctgctataaatgttatgtgacagtaatctaaattagaaaaggaagcatttctaaaaaaaaaaaanaaaaaaaaaaaaaaa

SEQ ID NO: 252633 - DNA, 500 bp, Glycine max
  unsure (1)..(500): unsure at all n locations
taggtgtcgtacgacagtagtacttgatagtacnaccatnnaagatctatgacgtcgcatgcacgcgtacgtaagctcggaattcggctcgagaactgtttttcttagatgacatgttaaaggaatgtccggaaacacatctacaaaacctgcgtactggaatctataaagaaacaatccaattaatcaaaacgcacaacgaagatcgtatgaatacgattttgcacttctcgacaaatataatttgtttctttattctaagcggttattctattcttggtaatcaagaacttgttcttattaactctttggttcgagaatttatatataatttaagtgacacaataaaagctttttctattcttctattaactgatttatgtataggattccattcaacccatggttgggaactagtgattggtttcgtctataaagaattttggatttgctcaaaatgatcnaaatataatctgtcttgttttcacttttccagtcat

SEQ ID NO: 252634 - DNA, 504 bp, Glycine max
ggaagctttatctcatgacgaacatgattgcagcactctagaagagtctatgacgtcgcatgcacgcgtacgtaagctcggaattcggctcgagaaccagtcctgctgattagtctgctgtttctagctccattctatagtaatggccaagtctgttgctaatcctcctttccttcgtcctctgcatcaactagaatttctgagatgccctcgcctttcttctaaatctcagtttcaccctcgccgcttccgctctcaaacccaaagcatcattcgtgctatatccgcagttgccgcagaatcggagttaggtacacagcaggatcaagcaattgaagcagacatcttcgcttgccctgtatgttatgaaccattgataagaaaaggtccttctggccttaacttaccagcaatctacaggtctggtttcatgtgtaagagatgtaagaagtcatattctaaccaagaacaggtatctggatctaactgtaactgctggaatgg

SEQ ID NO: 252635 - DNA, 497 bp, Glycine max
  unsure (1)..(497): unsure at all n locations
tatgtatcttatacccttgaaaacnctacgcacnancatacatgagttatgacatcgcacgcacgcgtacgtaagctcggaattcggctcgaggccatttcatctccacccgaggaacatgttgttagagctggtcatggttgtgtctcagttgctgtgtatggggaccaggacaagccagcgcttatcacgtatcctgatttggctttaaattatgtctcctgctttcaggggttattattttgtccagaagcctgttcattgctgctccacaatttctgcatatatcatattagtccacctgtgcatgatgtctctaactatatgtcttgaaactttgagagctgctgccattgatcctgatgatccaattctttcttgcttatgaccttgttgatcaaatagctgaagttctttaacttttttgtcatatcctagtatgtgtctaggagttattgttagagcttcattatcacctcaattactatttataaaat

SEQ ID NO: 252636 - DNA, 512 bp, Glycine max
  unsure (1)..(512): unsure at all n locations
tctgaagtggagnncccgcctcgncgncgcatcttgaagagttatgacgtcgcacgcacgcgtacgtaagctcggaattcggctcgagccttcttacttttctttgtgttatccttcacacacctattgcgggtcaagccactcaactcacactaacataaaaacatggaactaagcaccatgtttttcctgtgtgcttctcttctcttcattgttctcttcttcaggacactcatcaaaccttactatgtcttcaaacgccgtgaccttgccactcccacctggctccatgggttggccttacataggagaaacctttcatatgtattctcaagacccaaatgtcttctttgcctcaaaaataaaaaggtttggctctatgtttaagttccacattctaggttgtccctgcgtgatgatttccagcccctaggctttcaagtttgtgcttgaacaaagctcaactctttaagccaacattttcagtatgcttagagaggattttggtgaat

SEQ ID NO: 252637 - DNA, 509 bp, Glycine max
  unsure (1)..(509): unsure at all n locations
agtgtgttagagnccaaactcnacgnagcantctataagagttatgacgtcgcacgcacgcgtacgtaagctcggaattcggctcgaggtggacactttgtgtgagcggtgttcacttgatccttctgggtcgtcatcatcatcatcatcatcaccgtcgattgaagaagatgccgatcagaaacatcgccatcggaaggcctgaagaggctactcaccccgacacgttgaaggcggggttggctgagttcatctccaccttgatcttcgagttcgccggatcaggctccggcatcgcctacaacaagctcaccgacaacggcgccgacactcccgccggcctcatctccgcttccatcgcccatgctttcgccctcttcgtcgccgtatccgtcggcgccaacatctccggcggccacgtcaaccccgacgtcaccttcggcgccttaacgggcggccacatcaccttacttcggggcataggctacgtcattggccagttccttggt

SEQ ID NO: 252638 - DNA, 501 bp, Glycine max
  unsure (1)..(501): unsure at all n locations
tatagttgagcctagcttcatgcatcantctgaagattatgacgtcgcatgcacgcgtacgtaagctcggaattcggctcgagcacacacactctttacaacactctgaaactaacaacaacagggaaagaccatgtcggtgaaggagtgcgagcaccacaaggggaagaagaggaagatcttccggcaagtgttctggtgcttagtggtgttccttttcatcgtgctggtcacaattcttttgatatgggcaatccttagacccaccaaacccaccttcacgctccaagacgtcaccgtctacgccttcaacgccaccgtggcgaacttcctcacttcgaattttcaggtcacgctcatctcgcgtaacccgaacgaccgcatcggtgtttactatgatcgcctcgaaaccttcgtgacctaccggagccagcaggtcacgtaccgaaccgncatcccttcgacatatcaaggccataaagagatcaatgtttggtctcn

SEQ ID NO: 252639 - DNA, 502 bp, Glycine max
aatgtatcttaaaagagggggagatgataagactctccaagagctatgacgtcgcatgcacgcgtacgtaagctcggaattcggctcgagaaaatattgcaggaacacttggctcctagtggatatcttaaattaccgaacgccatacctgattatttggagaactgtagatttcttccagtgcttaacaatgaaataccagataagagaaattccacttacaaggaaagatttagtagcttgcagaatttggtacttatcatgttagagcacgacactgttttaataccaagggaaacttcctggtttggatattacccagatggctacttcaagcccgttttaccaccacaatcgatatgatccccaattcgactcgggtagatcttttcctgtgataaaacttttcttactccggcttttcctttgcatttattaaatgatatcaatggagttgcctccttaagcttctattacctattaaggtcataaatatgaaaaa

SEQ ID NO: 252640 - DNA, 502 bp, Glycine max
gaggtgtcttaaatgaggggaaaatggtaacactatacaagagctatgacgtcgcatgcacgcgtacgtaagctcggaattcggctcgaggctggaatgatggattgcaaaaaagcactatcagagaccggtggggacattattaaagcacaagagtaccttagaaaaaaaggcttatcaagtgcagacaagaaagcaagcagggtcactgctgaaggaaggataggttcttacatccatgacagcaggataggtgttttggtagaagtaaactgtgagacagattttgtctcacgaaggtgaaattttaaaagagcttgtcgatgatatagccctgcaagtggcttgatggccctaagtagaagatcttgttactgaagatgttcccgaagaaattgtgaacaaagaaaaagaaatagaaatgcagaaagaagatcttttgtcaaaaccagagcagataagatcaaagattgttgaagggcggataagaaaaagacttgag

SEQ ID NO: 252641 - DNA, 502 bp, Glycine max
  unsure (1)..(502): unsure at all n locations
gatggtgtcttattattgaatatataggtgcactctacaagagctatgacgtcgcatgcacgcgtacgtaagctcggaattcggctcgagaatccctaatctctatttctctctctctctttttctctgcaaaacaaaaatgtctcacttcggacgttcgggtcccccagacatttccgacacttactctcttctcgttctgaacatcaccttccgtaccaccgccgacgacctattccctctcttcgacaagtatgggaaggtcgtcgacatcttcatccccaaggatcgaaggactggtgaatccaaggggttttgcgttcgtgcgttacaagtatgctgatgaggctcaaaaaggccgtgaaaggctcgacgggagaatgggtgatggtcgcgaaataacggtccagtttgcgaaatatgggcctaatgcttgaaggattttttcaaattgcagtcacaaaaggagggatattggaacatncncaagatcaaggcgatc

SEQ ID NO: 252642 - DNA, 495 bp, Glycine max
  unsure (1)..(495): unsure at all n locations
agttcttgagaggggatagaagtgatacactatagaagagctatgacgtcgcatgcacgcgtacgtaagctcggaattcggctcgaggtttgttgttgtaactcgttcttcttcttttgttgttctgtgtttgtgtttgttttttctctcacctgaaaatgtcttgctgcggtggtaactgtggttgcggaagctcctgcaagtgcggcaacggctgcggaggctgcaagatgtacccagacttgagctacactgagtcaaccaccaccgagaccttggtcatgggagtggcacctgttaaggctcaatttgagggtgctgaaatgggtgtgcccgctgagaacgatggctgcaaatgtggaccaaactgctcctgcaacccctgcacttgcaagtgaggtgttgggagagcaagcttcaagcagagatagcccttaattaggaataatgataaactattaatgtgtagctaanaacttatgtattatgtctgtg

SEQ ID NO: 252643 - DNA, 503 bp, Glycine max
agatggtgtttctgctacgtcacactgaagtactaacatagaagagctatgacgtcgcatgcacgcgtacgtaagctcggaattcggctcgagcttcgatccacggagttgatgaggaaggtatggacgggggtggcaatattattcatgataatggccgccaagtgtatatggatggtgccaacatgaatgctcaggtgggactcacaagcccgggttggataggagcagatgtttgtcatctcaatctccacatgacattatgcatccatcatggaggaggtggccctggcatgggacctattggtgtaaagaaacacttggcaccatatttacctgcacaccctgtgatagaaactggtgggattgctgcccctgacaaacctcacccacttggtcacatcgcttgttgaccaaggggcttacaacttatattgccaatctattaacactacataagcatgattggttcttaaaggactaaccgatgcataaaagattgc

SEQ ID NO: 252644 - DNA, 499 bp, Glycine max
aggaggttcatccatgatcgaagtgatagctacactctagaagagctatgacgtcgcatgcacgcgtacgtaagctcggaattcggctcgagacgaatggctatatagcataaacatatgagtcttcattgcacaatgtcgacctcttgcattaacgggtggtgcctctcttgcatctgcccagccaaaacctctctcaagaaagccacattaggcccttctgtcttcgcaaccgttagcactccttcttctccttctacttcttcttcttcatccttcccttctctcattcaagacaggcctgtcttttgctgaccctgcccccatcattaccccaactgtgagagaggatatggccaaggaatactagcaagctattgaagaactccagaaattgttgagggagaagagtgaactcaaagtcacaactgctgataaagtggagctgataacagactttctggggacattattaactgattgccttccaatattagaa

SEQ ID NO: 252645 - DNA, 512 bp, Glycine max
  unsure (1)..(512): unsure at all n locations
agtgtatctgaattgttaggagatgtgttcactactccaagagctatgacgtcgcatgcacgcgtacgtaagctcggaattcggctcgagggaagctagtgaatctgagggttcttgctcttcataacaacaacttctatgggtcaattccaccagagttgggaaattgcactgaattggagggaatatttttacagggtaattaccttagtggagcgattccaagtgaaataggaaacctttcacagcttcaaaatttggatatatcaagcaattccctcagtgggaatattcctgcatcacttgggaagttgtataatctcaaaaatttcaatgtatcaaccaattttctggtcggacctataccttctgatggtgtccttgccaactttactggaagctcctttgttgggaatcgtggtttgtgtggagtgaaaattaattcaacatgtanagatgatggtttgccggataccaatggtcaatctactaactcagaccaaaatcaaata

SEQ ID NO: 252646 - DNA, 503 bp, Glycine max
aagtagtatgtcattgtataccatgctagtctatagaagagctatgacgtcgcatgcacgcgtacgtttgggcgttctgctcctcgagtgaaactttttgaagaagagatatggtattgaacacagtggatacttatggattttagaaagggagatgggccagcaaccaatcttcaaggcaaaaagctcttgcagatctacaccagatgcaaactgttcatattgagaagctaagtgatacactgtgccagcctgaatcatagccaaggttaatagcttatgaggggcgcttgataatccaagctcttgactgtcttgtcacccacttcattgtcagaatacagcatcaaccaacctgaggaggctgagccagaatttgaaagtcatgcagagaaatttgactggtactctcacttgtaccctttgatgcaatttgtgaccttgacaagaggaagcctattgggagaaagttttttggaaatgtatgtgttgtttgtggatac

SEQ ID NO: 252647 - DNA, 503 bp, Glycine max
  unsure (1)..(503): unsure at all n locations
naatgtatctgtaaagagagagtgacggtaaagcatatacacagagctatgacgtcgcatgcacgcgtacgtaagctcggaattcggctcgagcacgatctcaacggagcacctctcttcaggtcgccatctagactgcaatcatggctgatggaccacagcatccatcagttgttcagaagctagctggacagtcttacctggtgtccaggctaagccccaactttaactctgggaattattcctcgactggttcttacttcaatggaggactgcactcttctgggttggctgttgtgtcgcctggatctcaagttactgtgcatgctccagcagagaaaggagtgagtgggtttctagtggattttctgatgggtggagtgtctgctgctgtgtcaaagacagctgctgctccaattgaacgagtcaaattgcttatccaaaatcaggatgaaatgatcaaaagtggtcggttatctgagccatacaagggaattggggat

SEQ ID NO: 252648 - DNA, 505 bp, Glycine max
  unsure (1)..(505): unsure at all n locations
ngggtaggtgttntaaaaggtggggagatagtatgcctctacaagagctatgacgtcgcatgcacgcgtacgtaagctcggaattcggctcgaggccaaacgacagcgttctgagtcttttcttcttcgttaccctcttcacatgccttctctctgctaattcccacgatgaccatattttcctaccgagtcaactccatgacgatgactcagtgagttgcactgctaccgacccaaaccttaactacaagccggtgatcggaatcctgacccaccccggcgacggtgcctctggccggctcagcaacgccaccggggtttcttacatcgccgcctcctacgttaaattcgtggagtccggtggtgctagagttattccccttatctacaatgagtcacctgagaaccttaacaagaagctcgatttggtcaatggagtgctcttcactggtgggtggggctgttctggtccatatttggatactcttggaaacattnttaagaa

SEQ ID NO: 252649 - DNA, 498 bp, Glycine max
  unsure (1)..(498): unsure at all n locations
aggtntttctttncatgagattgggaggataagttctactatagctatgacgtcgcatgcacgcgtacgtaagctcggaattcggctcgaggtgatcactacataaacaacagcaaggccttgagggaagctatgtgctttatgatggatccaaaccttggtaaacatgtttgctatgtccagtttccacagaggtttgatggtattgataggaatgatcgatatgccaatcgtaatacagttttctttgatataaacttgagaggtttggatggcattcaaggtcctgtttatgtgggtactggatgtgtcttcaataggacagctttatatgggtattgaaccttctcttaaacccaagcacaaaaaagcctgggtggtatcatcactctggggtgggaaatcgtaggaggggtcaaaatttgccaggaagggacctgccagtaaaaatctaaccaggcttttggcccaacttgggctatttttgaatctagaggt

SEQ ID NO: 252650 - DNA, 506 bp, Glycine max
ttgctgttatctgattgagggggagtagatgagatacactatagaagagctatgacgtcgcatgcacgcgtacgtaagctcggaattcggctcgagactttttgctatagggatcaaaaacacatatgggaggcaccatgcgccttggatctaggaggacatatttccagaccaaggaatgcaaatctgcaaaattgtaagtattattactgcattgaattttttttaagatatattttgtgtttatgtaggacaatatgaatgagagtaatgtgtgtgcaagtatgactgcactataaaggacttgctatatagtttggctaaactggtgagatttattaggtttctaaccctttgacccttcttagatatggctgcaaaagcttcattgatgagagacatcggcatagatatgaggtattgtattgtgatttaaaaattatcttgtgaatgtgagtagaaacagaaaatgatcttgtcatatgcaggttgaatccggatttagt

SEQ ID NO: 252651 - DNA, 505 bp, Glycine max
acaggctgtgtctcacgaagagggatagaagagagacactctagaagagctatgacgtcgcatgcacgcgtacgtaagctcggaattcggctcgaggatggggctcatgacatcgccaaatgtgctgctgttactgaaactgtgcttgcagctgtttacaaggcactcaatgagcagcatgtccttcttgaaggaactcttctcaagcccaacatggttactcccggctctgatagcccaaaggtaccaccagaggtgattgctgagtacacagttcaagcactccgcaggactgtcccagctgcggtgccaggggttgtgtttctgtctggtgggcaaagtgaagaagaagctaccctcaacctgaatgcaatgaacaagttggaggtgttgaagccatggactctctcattctcattcgggcgagcactgcaacaaagcacactcaagacatggggtggaaagaaagagaatgtcgccaaagcttaaggggcatttctggcaa

SEQ ID NO: 252652 - DNA, 513 bp, Glycine max
  unsure (1)..(513): unsure at all n locations
aagtgtgtggtgcatagaataactgngattatatagagagctatgacgtcgcatgcacgcgtacgtaagctcggaattcggctcgaggttgtggtgatgtgaggtttgtgccgtgtgggaactgcagtgggagtaggaaagtgtttgatgaggatgaaggggtgttggagaggtgtttggagtgcaatgagaatggcttgattcgatgtnctaattgttggtcttgaaattggcaaaacaaataaaaaaagaagaaaaaatttgaaaccttggtgtgtgtagttggttttttttttgttgcatgaaacatagatgcggtttcttacatgattctggggtggttgtccgttaagagttgaagttaaagtgcggatagttaatattactaatgtgaaacacttcaattttaacttttttttttttggttattgttggaaaattaatgttgtatttttaatgtttggttgtatatgctttttttgatatatttataatggattattgttatttatt

SEQ ID NO: 252653 - DNA, 507 bp, Glycine max
agaaatcgtgcctacgcaacactcagcatgcatatacatgatttatgacgcatgcacgcgtacgtaagctcggaattcggctcgagcagtcaaatagtactaagaagagagccgtcgctgaattcaggggacatatacacacattattatgagcggagggccagcagccaatcgtcaagggataaagctcttgcagatgtacaccagatgcaaactgttcatattgagaagcttagtgatacacagtgccagcctgaatcacagcttaagttcataacagaggcctggttacagatagttgaatgcaggaaggtgctgaaatggacatattcatatgggtactatttaccggagcatgaacatgctaaaaaacagttctttgagtacttaacaagtgaggcagaatctggtttggagagacttcatcaatgtgctgaaaaggaacctccgcttatccctgaatgctgatggcccatcttaagaatttaaatgactttcgcactaaac

SEQ ID NO: 252654 - DNA, 499 bp, Glycine max
attttgtgtatgatcgagtatgatgcattcctctaaacgatgacgtcgcatgcacgcgtacgtaagctcggaattcggctcgaggaacagggtctctaatctttgcttaatgtcttgttatcgtgcatatttcattggcttctgtacaatgagataatcaccaagcctttcaactaccatgttgcattgacctggtgattatctcattgaacagggtctctaatctttgcttaatgtcttgttatcgtgcatatttcattggcttctgtacaagtttttgcatcgacctggactggaatgctttgattgcagtgtaataatcttgtgagtatgaaaagtcacgggatctgcgtgttgcgaagaaagtgtttgatgcttgagaaatgatgactataatctctatctttgtacttttttagtggggtacctgtatacattacacttgttttaaatttttaattgccatggtataatggtggcatattaaaaaaaaaaaaaa

SEQ ID NO: 252655 - DNA, 501 bp, Glycine max
cagtgcttctgtgctttagctcttattcgtatcactctagaagagctatgacgtcgcatgcacgcgtacgtaagctcggaattcggctcgaggacatcagatgcagcacttgatcctgctgggttactggcagttgctatttgccacggttttgcactctttgttgcagtttctgttggtgccaacatctctggtggccatgtcaaccctgctgtgacttttggattggctcttggtggccacatcaccatcctcactggcttcttctactggattgcacagcttcttggctccatcgtggcatgttttcttctcaactatgtcacaggaggcttgccaactccaatccacagtgtggcttctggggttggagctgttgaaggagttgtgaccgagatcatcatcacatttggtttggtgtacacagtgtatgccacagcagcagaccctaagaagggatcattgggaaccattgcaccaatttgcatttgtttcaatggt

SEQ ID NO: 252656 - DNA, 502 bp, Glycine max
  unsure (1)..(502): unsure at all n locations
gggagttgtttactattgattagtagttaggctcggcgagacaagcttgcatgcctgcaggtcgactctagaggatcccctcggggaattccaattccacattttcaagaaataaggaggcaaaaatgttcatatatgaattggaattatttgttttcttattaggcctatcctgaagccaaaggaaatgagatcggaattcctcggggaattccaattccacattttcaagaaataaggaggcaaaaatgttcatatatgaattggaattatttgttttcttattaggcctatcctgaagccaaaggaaatgagatcggaattcctcggggaattccaattccacattttcaagaaataaggaggcaaaaatgttcatatatgaattggaattatttgttttcttattaggcctatcctgaaacccaaaggaattgaaatcggaattcctcgggggtaccgagctcgaattccctatagtgagtcgtattaaattcgtaan

SEQ ID NO: 252657 - DNA, 498 bp, Glycine max
agtgttagtttattaggaggtggatagtatcactctagaagagctatgacgtcgcatgcacgcgtacgtaagctcggaattcggctcgagcatcgcctttcaccacgcacgcagatcctttattcctatgatccttccttcgctctctccaaatttcgactctttcgatcagatccgcgacacccaccccaccaaaaccttgcgcaacccatccatgacgcttggctcaggaggatccagtgtcgttgttcctaggaacttcagattgctggaggagcttgaacgtggtgaaaaaggaattggagatggcacagttagctatggaatggatgatggtgatgacatttacatgcgctcttggactggcacgattattggcccccataatactgtacatgaaggaagaatttatcaactgaagctgttttgtgataaagactacccagaaaagccccctagtgttcggtttcattcacggatcaacatgacttgtgttaa

SEQ ID NO: 252658 - DNA, 498 bp, Glycine max
gatgtttgtctcatgcacgcactcgatagctagcactcatagagatctatgacgtcgcatgcacgcgtacgtaagctcggaattcggctcgagggagaagagtgaactcaaagccacagctgctgagaaagtggagcagataacagcttctctgggaacatcatcatctgatggcatcccatcatcagaagcctcagacaggatcaaagctggtttcattcacttcaagaaggagaaatatgacaagaatccagctttgtatggtgaacttgccaaaggccagagccccaagtttatggtgtttgcttgctcagactcaagggtgtgcccatctcatgtgctagatttccaaccaggagaggcctttgtggtcagaaatgttgctaacattgtcccaccatatgaccagtcaaaatacgctggaactgtggcagcatgtgaatatgctgtattggatctaaaggttctgagaatgctgtattgacacaattcttgtgt

SEQ ID NO: 252659 - DNA, 515 bp, Glycine max
  unsure (1)..(515): unsure at all n locations
agtgaagtcagtgnccccgattcgcnccgcacnntcntgaagagttatgacgtcgcatgcacgcgtacgtaagctcggaattcggctcgagcgattacctttttaagaacttcaacagcaccgccgacaccgtgacccagctgggcatgcaggttggatcaggggacacctcccaaggtagcaccactcccaacgaccactactgctggatgcgtcccgaggacatcgactacgaccgccccacccagacctgcaccacatgctccgatctggccgccgagatggccgcggcgttggcggcggcatcgattgtgttcaaggacaacagggcctattcgcagaagctggttcacggggcgaccacgctctttaagttctctagggattcgagaggtaggtacagtccaaatgggagggaggcttctgtattctacaattccatcagctattgggattgagttgtttgggtgagggtcatgggttttcataggctactggtttttctttctttcttg

SEQ ID NO: 252660 - DNA, 512 bp, Glycine max
  unsure (1)..(512): unsure at all n locations
naggtttatcnaaaatgggaggtagatggatggatacactatagaagagctatgacgtcgcatgcacgcgtacgtaagctcggaattcggctcgagaaaaactttcaaagaggtgaaagcaaaagagttcttcttttccttttttatatatacttgggtgctaagctgtgtgagttcattgacaagcctgaaatggcaactatgctgacaaaggagcatggtctgaacctcaaggagaccgagctttgcctcggtttgcctggtgggggaggcngcttgccgcggngcggcgaagttggaaactccaagggccactggaaagagagggttctctgagactgttgatctgaaacttaatcttcattccaaggaagatctgaatgagaatctgaagaatgtctcaaaggagaagaccctcctttaggatcctgccaagccaccggctaaggctcaagtggttggttggccaccagtgaggtcatacangaagaacatgatngcagtacaaaagg

SEQ ID NO: 252661 - DNA, 515 bp, Glycine max
  unsure (1)..(515): unsure at all n locations
agtgttttgtggcctgggcacatgncagtacnancatacatagattatgacgtcgcatgcacgcgtacgtaagctcggaattcggctcgagcctttctcatgttttttctcagaaccttctgaggttaaagcaaaaaacaaagagagagagagagagaaaatgatgaagccatcgatgctcagatctctccactccgccgccacccgcggcgcctctcatctcttccgccgtgggtacgcctccgagccgttgccggagcgcacggtagccgttctcggcgccccctgcaatatctggcatgctatttcactattacgaagcatactgccactgatttgaacctttgctacttccaacttacgctgacctttagcgtagactaccctatcatgcctattaactgtaaatttccacaaggtttcttccaccctaatgtttatccttctaggacctgtttattgtctattcttaactatggatactgtgtggaagcctacctttacagtttaccatt

SEQ ID NO: 252662 - DNA, 519 bp, Glycine max
aagtgtgtctgatccacccgaaatacgtacgtatcactctagaagagtctatgacgtcgcatgcacgcgtacgtaagctcggaattcggctcgagggcaatcatttcatcgagcattcaatggccaccacagcggctctatccggaaccatggtgagcacctacttcatgaggaggcaacctatgaccaccacacgcctaatgacattccccaacgttggtgaagctcttgtgggtctgaaaagtggacgaggtggtcgtgtcacttgcatggcctcgtacaaggtgaagctcataaccccagaaggagatgtggagtgtgaatgcccagatgatgtattcattgttgacaaggcagaggacgaaggcattgaacttgcctactcgtgcatgtccggttcttgcagttacagtgttggcaaaattgcggaaggtaacgtggaccactcagatggtagctatcttgatgatgagcatatagatagcggctgggatctcacctgtagtgctcaacctacgt

SEQ ID NO: 252663 - DNA, 509 bp, Glycine max
  unsure (1)..(509): unsure at all n locations
caggattttgcctcagaaatatgaagaatccctctagaagatctatgacgtcgcatgcacgcgtacgtaagctcggaattcggctcgagaatcccttttatatccacagatcaacatttttttttttttggtgggtagcagtgaggataaaaaatggctatggccacagctgtcgtgtgtcctcagaacatcaccggagccatcgtgagctcacctagcaagaccaagaagagagtggtacacgtgagaggcataaattcatttgggggactgaaggctagcaatggtgttgtctctttggggattcctatgagcactgagaagtgctttgctaaggttgtgagctcagtgaaagcagctacatcaaatgggaaaggaaaaggaggggctctttcttccacgtgcaacgctgctggtgagatattcacgattgctgctatcatcaatggacttgttcttgtcggagttgctgttggctttgtgctcttgcgagttgaaacatgggtccn

SEQ ID NO: 252664 - DNA, 519 bp, Glycine max
  unsure (1)..(519): unsure at all n locations
attatctggatgggaggagatggggagatttacaagagctatgacgtcgcatgcacgcgtacgtaagctcggaattcggctcgagtcatgatggtcataatcaactgagaatagtttacaaaggggaaccacatgaatcaatcnctaaaacnctcaattcaaagctggccattactctactggtactggtatttatattcaaggagagaaatctggataaggcttcttttggctggccgagatgacaaagcatccactatgtatggtcaggtgtctcatgctgctgagcccaacagtactccagagtcatcacctgtaagccacaaatgatgatggtttagagggtgctgggtttgtgtcaaacaggaattaatgaagaggttgatgatgacgatcccttctcaaagcgaagaanaatggaacttggaaatgttgacatcactccagtagttaagcctatccgggaaccacgttgtgttgtacaaactttgagtgangttgacatatngnatgatgggt

SEQ ID NO: 252665 - DNA, 508 bp, Glycine max
  unsure (1)..(508): unsure at all n locations
aagtatctgaaatgttggaggaaaggtgacactactctaagagctatgacgtcgcatgcacgcgtacgtaagctcggaattcggctcgaggttccatcttcaagaaaccacagcgtctaagaactccaaccggggcctccaatttcaatacccttgctgggacacgcgccatatctccgttaactgctccaccaagcattgtacaagctatcactgcgctatggacccttgatccacgtcatgatcggttcgaagcacgtggtggtggcgtcgtcggcggagacgggcaagcagattcttaaaacctcggaggaggcattctgcaaccgtnccttaatgatagccagccagagcctaacctacggcgcggcggactacttcttcatcccctacggcacatactgggcggtccttgaaaagctcttgatgacngagcttctgaagcgggaagacccttgaacattttgtgagaatncgcgagagcnanngtgaggcgttcctcaagagn

SEQ ID NO: 252666 - DNA, 507 bp, Glycine max
  unsure (1)..(507): unsure at all n locations
atgctgtcatctctacagaaacgaactatagtatcactctagaagagctatgacgtcgcatgcacgcgtacgtaagctcggaattcggctcgaggaaactgcgaatggctcattaaatcagttatagtttgtttgatggtatctactactcggataaccgtagtaattctagagctaatacgtgcaacaaaccccgacttctggaagggatgcatttattagataaaaggtcaacacaggctctgcctgttgctttgatgattcatgataactcgtcggatcgcacggcctttgtgccggcgacgcatcattcaaatttctgccctatcaactttcgatggtaggatagtggcctaccatggtggtgacgggtgacggagaattagggttcgattccggagagggagcctgagaaacggctaccacatccaaggaaggcagcaagcgcgcaaattacccaattctcagatctcactcgctccattatctccgncaccaaccaccacc

SEQ ID NO: 252667 - DNA, 505 bp, Glycine max
  unsure (1)..(505): unsure at all n locations
ctgtgtgtagtaggagggaataaggtaggnatcactctagaagagctatgacgtcgcatgcacgcgtacgtaagctcggaattcggctcgagctggcagccatgagattaccagaagacgtggaaggacttgggtgttgtgagtacacgatggataggggagtggttcacgcgtgccatgcatgaggagtggtacatagccttgaaggttggtctcatcacgaagttggtgccatagatgttaacagaatcgatcttgtgtgggaagcagcactcaaacatggcctaagaccagtgtcaagtttcacacataaagaaaattaaaatcagctttagtcaaagtattgttctcaagttgtttcttatttgttttggtgtattgcatgcacatcacagtgaccttataagtgtgattatattctttcaagtctgtgtattacatctctaatgtatcctcttgtatgttcatatgatcacattgacagtgattcattcatggtataaat

SEQ ID NO: 252668 - DNA, 518 bp, Glycine max
  unsure (1)..(518): unsure at all n locations
aaggtactggtgccttcactccnttgcagtatccactatagagagtctatgacgtcgcatgcacgcgtacgtaagctcggaattcggctcgagagaaagcatgctcatcctagagttttaaaaatggcagcaggctcctccatggctctctcttccccatccttggctggcaaggccgtgaagctgggcccatcagcccccgaagtcgggagggtcagcatgaggaagaccgtcaccaagcaggcctactccggaagcccacggtacggcccagaccgcgtcaagtacttgggcccattctctggcgagccctcgacctacctcactgacgagctcctaggcgactactgctggtacacagctggtctttcggccgatccacaaaccctcttcagtcaccgcgagcatatagtcgactggtcattttgcaaaaacctgtctatgcctaaacttgcttctttttcttagaactttttctcgtatcattgctaattccattaaccaattggaaaattgtt

SEQ ID NO: 252669 - DNA, 504 bp, Glycine max
  unsure (1)..(504): unsure at all n locations
agaatctgctattgaaaatgatgaagcctctagaagatctatgacgtcgcatgcacgcgtacgtaagctcggaattcggctcgagtttgcaggttttgaatcgatttctgttgacgttaaggacatgaaactagtcttattgggtgagattgatccagtgagtgcagtgtcaaagctacgaaagtggtgtcacactgaactaatttcatttggaccagcaaaagaggagaaggagaaggaccccgctattcctctctacgaagcctatcccctttattatcacatgacaccaacattgtatggttcaaattactaggttagaggttttgaagagagtcttagggctgcgtgatcatctgctaaattctagaatattagaaagtttgataaaaaaaagacttcatagtcatttttgttggttntagttatatttttcattatctagttgaagaccattgtgtgcccaattaagggagtaaacatgcttcttgtatatataaacca

SEQ ID NO: 252670 - DNA, 516 bp, Glycine max
  unsure (1)..(516): unsure at all n locations
attgtnctctgngcatagataagtatatatgaatcctctagaagagtctatgacgtcgcatgcacgcgtacgtaagctcggaattcggctcgagctcgagccgtgtgcgattccttctggattagttaggaagagcccttatctgacacactctatctttaacatgtaccaaactgagcatgagttgcttaggtacttgtataagctacaatcaaaagatctctcactatgccacagtatgattccacttggatcttgtacaatgaagctgaatgcaacaactgaaatgatgcctgtgacatggcccagctttactgatattcacccttttgcaccagttgaccaggctcaaggttatcaggaaatgttcaataatttgggtgaactgttgtgcaccatcactgggtttgactccttctccttgcaaccaaatgctggtgctgctggagaatatgccggacttatggttattcgtgcatatcatttggcaaggggagaccaccaccgcaatgtttg

SEQ ID NO: 252671 - DNA, 501 bp, Glycine max
  unsure (1)..(501): unsure at all n locations
attatctgaatgaggggggatggggagatttctaagagctatgacgtcgcatgcacgcgtacgtaagctcggaattcggctcgaggtcggtgtttgcactgtaactgatgtaaaagttaacctcaaaggtttcatgtgtgcctgtatagcaggttttgtaaacatctttccggcaaatttcaataggttctcttcaaaggaaatattcaatggaatcttttgaatggctgagtaaaactgctccaatccaaccgctttttcttctaattcttggtccatttgttgattactacctcagtggcaaattgataaccaactataaaatgtcttctggtgccatttaattaattcttctttcatcctcgctagctgtattttgcaatgtgagccaatacctttgcattgngcgcttttcagctgtttccttccaggttttaggccacatgaaaacagtatgtgttctgactctgggatggctgctatttgattcggagctaactt

SEQ ID NO: 252672 - DNA, 504 bp, Glycine max
  unsure (1)..(504): unsure at all n locations
agtatctgagcccgcactggnncgcagcacnacnagagctatgacgtcgcatgcacgcgtacgtaagctcggaattcggctcgaggacaggcaaattctgttggctgatatatcttgtatggttgggggggcacttttaaggaaccttctcgtgaagctgaagaggatcactccccacatcaatcaaatgatgaagtaaacaatgcacttgagaaaggcttaaaacaaccattactgattagttcagagaataaggtagatgaagatgctgaccaagattgtgatgatagtgaagaagcaccagaggaatctcgccagccagtgaattcaattagaatggcatacagactccttacaccttcttgaaaggttcaattaataatatatttcatgctcaaatatgtaatggagaatttgctatcggaatctaagggcatttccaccttactacttcaactggtcaacaagcacagtttcagtttttcttggtttccttggcttgta

SEQ ID NO: 252673 - DNA, 500 bp, Glycine max
  unsure (1)..(500): unsure at all n locations
agtgtatctgnnnccagttcccgacgtatcactatagagagttatgacgtcgcatgcacgcgtacgtaagctcggaattcggctcgagctctatttatatggcggtgcctatactctcgaagaggatgatgaattagagggtgaagaagttcaagaggcctcagagtgacaggaaaatttctgtcaagacaaactggcgcagaccaaagggtatcgattcccgtgttaggagaaagttcaagggatgcactttgatgccaaacattggttatggttcagacaagaagacccgccactatctccctaatggttttaagaaatttgttgttcacaatgtgaaggacttggaactgctcatgatgcacaacaggacttactgtgctgagattgcccacaatatatccacaagaaagaggaaagatatagttgagagagccgcgcaacttgatgttgttgtgacaaacaaaacagccagattactcaatcaagaagatgaatcg

SEQ ID NO: 252674 - DNA, 507 bp, Glycine max
  unsure (1)..(507): unsure at all n locations
agtgtagtctgcctacgtacacgtacgtatcancatagtagagtctatgacgtcgcatgcacgcgtacgtaagctcggaattcggctcgagctcagatccatgcttgggagacagagaaagagaaagagaagggacgccattgattctgtgttcgatccgctgagagaattcgcaaaggacagcgtgaggctcgtgaagcgctgccacaaacccgatcgcaaagaattctccaaggttgccgtccgtactgcaattggtttcgtcgtgatgggattcgtcggacattatgacacctcattatcatcctaatggatctcagtaatttgtgtttagatttggatttactagttactgttcatgattctcttcatgacttactgtttttagattgtccactttttatttatattttatatgattgattttatttttatagtttttcattttaatttttttgtgatcttattattctttaatatttcttattttagtatgattattatttg

SEQ ID NO: 252675 - DNA, 507 bp, Glycine max
  unsure (1)..(507): unsure at all n locations
agttatctgaagncccgattttcngnangtacgantattcaatagttatgacgtcgcacgcacgcgtacgtaagctcggaattcggctctagctcatatcctactacggagacagaaatcgagaaagggaagagactcaatagaatcaagaagctcaacactcctaaaattgtcaccaaaatttctgtcaagacaaactgactctgaccaactggtatcgattccattgttactacaaagtttaacgggatgcacttcgatgccaaacattgtttatggctcatacaacaagactctccactatttccctaatggtcataataaattcgcttatcacaatataaaagacttataactgctaataatgcactacaggacttactaagctgatattgaccacaatatatccacaagacacatcaactatataattgagagagccgctcacttctatgttaacatccacaatcataacattcagattactcatccaaaacgttgaatatt

SEQ ID NO: 252676 - DNA, 500 bp, Glycine max
aggatctgcatcgatatatgatgtatcctctagaagagctatgacgtcgcatgcacgcgtacgtaagctcggaattcggctcgagctctaaagataatggcggtgcctctactctcgaagaagatcgtgaagaagagggtgaagaagttcaagaggcctcagagtgacaggaaaatttctgtcaagacaaactggcgcagaccaaagggtatcgattcccgtgttaggagaaagttcaagggatgcactttgatgccaaacattggttatggttcagacaagaagacccgccactatctccctaatggttttaagaaatttgttgttcacaatgtgaaggacttggaactgctcatgatgcacaacaggacttactgtgctgagattgcccacaatatatccacaagaaagaggaaagatatagttgagagagccgcgcagcttgatgttgttgtgacaaacaaaacagccagatacgcaggcggaggatgatagtctaa

SEQ ID NO: 252677 - DNA, 504 bp, Glycine max
  unsure (1)..(504): unsure at all n locations
cattgtgtgtacgaggcggggatggggggatattctcagagctatgacgtcgcatgcacgcgtacgtaagctcggaattcggctcgaggggctatatagcataaacatttgagtcttcattgcacaatgtcgacctcttccattaacgggtggtgcctctcttccatctccccagccaaaacctctctcaagaaagccaccttaagcccttctggcttcgcaacccgtagcactcctttcttttctttcttcttcttcttcttcttctttcccttctctcattcaagacaggcctgtctttgctgcccctggccccatcatcaccccaactgtgagagaggatatggcaaaggaatacgagcaagctattgaagaactccagaaattgttgagggagaagagtgaactcaaagccacagctgctgagaaagtggagcagataacagcttctctgggaacatcatcatctgatggcatcccatcatcagaagcctcagacaggan

SEQ ID NO: 252678 - DNA, 500 bp, Glycine max
agtgtatgttatatgaatgatagtgtgaatctccaagagctatgacgtcgcatgcacgcgtacgtaagctcggaattcggctcgagcgatattgatattgttactcatcctgaatctatcatacatgtccaggttgaaacgcacgattcatctgctatcgcacagttggggatacctgacatgcgcttacagctctctaatacattatcttggccagaaagaatctattgctctgaaataactaggccacgcattgatcttagcacgtatggttctctaacatactatgcaccggatgacaagacatgtccatcggtgaatctatgctatgctcgaggacgagctgtaggcaccatgacatgagttgtcagtgcatcaaacgagaaagctgtaaactcgctagctgaacacacgtatagctatatgcgcagatgcaagacatgtggtctaacttgtgagtaacatcagaactaattactatccatgtcagtactcgaaga

SEQ ID NO: 252679 - DNA, 501 bp, Glycine max
tattgtatgatatagcgaggatagtagcactatctaagagctatgacgtcgcatgcacgcgtacgtaagctcggaattcggctcgagctagttctagatcgcgagcgaccgcccttttttttttttggggggtttttttttttttttttttttttttttttttttttttttttttttttttgaatgaccaaatttttaggcaatgaagttttaaacttttaacaatttgatgtccattgtccaaagctttggttaaacaaacacttaaatggagagacaatatcggttatttatttcctaacttttttcaacgaactgaagcaaaaatggactgttggttgtacaattttgggactccatttgggatcttttgcctgtttttcctcctttttgagacaacttttaaacctttaacaatttcaattctaattttaataacttcttattttttttggcttaaaggttttactggaatgaggcacttgcttaatctttttttaa

SEQ ID NO: 252680 - DNA, 503 bp, Glycine max
  unsure (1)..(503): unsure at all n locations
ngaagtgtcttcaatgtgggggtacgatggaatcctctagaagagctatgacgtcgcatgcacgcgtacgtaagctcggaattcggctcgagggcaaaggaagttgtatcattcgaaaatgtgctgctggaggaagttccagcttcttcaattttaaaatctctgacaacttttattcaaaaccaaggattttattcttttcctcagtattatctgatggctggtgctgcccttttggatattgttcaatctaaaccttcctgctttcctatatcttcccaggagttgttcagcatccttgatgatgctagtgaaaatacttgtttatgtgggacagcagaatcaatgcaaagatatgtatttgatggagaggctggaaaaattggtcttgaaccaaaaaacctagttgcttgcacaagtttcttgctagaacagaaattggtgaaggcatggcttgctgacaaggatgctgaagcactaaggtgccaaaagcaattggtgga

SEQ ID NO: 252681 - DNA, 507 bp, Glycine max
  unsure (1)..(507): unsure at all n locations
atgtgttttcttatgagggaggtatatgagaaacactatagaagagctatgacgtcgcatgcacgcgtacgtaagctcggaattcggctcgagcgagaattaattattggagacagacaaacgggtaaaacagcagtagccacagatactattctcaatcaacagggacaaaatgtaatatgtgtttatgtagctattggtcaaaaagcatcttctgtggctcaagtggtgaataccttacaagaaagaggagcaatggaatacactattgtagtagctgaaacagcggattctccagctacattacaatacctcgccccttatacaggagcagctctggctgaatattttatgtaccgtgaacgtcacactttaatcatttatgacgatctctccaaacaagcacaggcttatcgccaaatgtctcttctattacgaagaccacctggtcgcgaagcttatccaggggatgttntttatttacattcacgtcttttggaaagagcc

SEQ ID NO: 252682 - DNA, 507 bp, Glycine max
  unsure (1)..(507): unsure at all n locations
agttgtatctgttaatcgaaattgatgcatcgacatagaagagtctatgacgtcgcatgcacgcgtacgtaagctcggaattcggctcgagcgagaattatttattggagacagacaaacgggtaaaacaggggtagccacagatactattctcaatcaacagggacaaaatgtaatatgtgtttatgtagctattggtcaaaaagcatcttctgtggctcaagtggtgaataccttacaagaaagaggagcaatggaatacactattgtagtagctgaaacagcggattctccagctacattacaatacctcgccccttatacaggagcagctctggctgaatattttatgtaccgtgaacgtcacactttaatcatttatgacgatctctccaaacaagcacaggcttatcgccaaatgtctcttctattacgaagaccacctggtcgcgaagcttatccaagggaatgtttttatttacattcacgtcttttggaaaagagccn

SEQ ID NO: 252683 - DNA, 512 bp, Glycine max
  unsure (1)..(512): unsure at all n locations
agttgtatctggnaaaagatangcancgtagtcactatagagatctatgacgtcgcatgcacgcgtacgtaagctcggaattcggctcgagggattctcttctttattccttttgtaatttcattcattcggaatctttgtgaaaaataatgttcatcgagaattttaaggttgagtgtcctaatgtgaagtacaccgagactgagattcagtccgtgtacaactacgaaaccaccgaacttgttcacgagaacaggaatggcacctatcagtggattgtcaaacccaaatctgtcacaatactaatttaaaaccaacatccatgttcctatattagtggttatgcttgtttttcttgttcttatcttctgatttttcatgttcttttctcctttttttctttactttttgtattcttatatgtttattttctggtatttttttaatttggttcctgttatgggaaccatgcttccttgaagttcttttctgtttgttatgtttattatctg

SEQ ID NO: 252684 - DNA, 502 bp, Glycine max
aggtgttgcatacgtataagaagtaccctctagaagagtctatgacgtcgcatgcacgcgtacgtaagctcggaattcggctcgagtgcaattttattatggcagccaacctatcaagtgattcaaccaatcaacggtgatcccttcattggaagccttgaaaccccagttacatccagccccttgattgcatggtacttatcgaacctccccgcatacaggaccgcagtgagcccactactaagagggatcgaggtgggcctggcccatggctaccttctggtgggcccattcgtgaaggccgggcctctgaggaacaccgagatcgccgggcaagcaggctctctcgccgctggtgggcttgtggtgatcctcagcctttgcctcacaatctatgggatttcatcttttaacgaaggagacccatccactgccccgtcactgaccttgacgggccgcaagaaggagcccgatcagctccaaactgcttgatggtgggcca

SEQ ID NO: 252685 - DNA, 514 bp, Glycine max
  unsure (1)..(514): unsure at all n locations
aaattgactactgncccagctcccgacgtactactatagagagtctatgacgtcgcatgcacgcgtacgtaagctcggaattcggctcgagtgcaatngtantatggcagccaacctatcaagtgatggaagcaatcaacggtgatcccttcattggaagccttgaaaccccagttacatccagccccttgattgcatggtacttatcgaacctccccgcatacaggaccgcagtgagcccactactaaaaaggaatcgaggtgggcctggcccatggctaccttctggtgggcccattcgtgaaggccgggcctctgaggaacaccgagatcgccgggcaagcaggctctctcgccgctggtgggcttgtggtgatcctcagcctttgcctcacaatctatgggatttcatcttttaacgaatgagacccatccactgcctcgtcacttgaccttgactggccgcaagaatgagctccgtcagcttcaaacttttgatttggttgtcccagct

SEQ ID NO: 252686 - DNA, 504 bp, Glycine max
  unsure (1)..(504): unsure at all n locations
aggatctgcatacgatttattaganatctctctagaagagctatgacgtcgcatgcacgcgtacgtaagctcggaattcggctcgagtgtgaatattttagacggcaaacccaaggttcaggcctacgtgtaccgcgtgacctcggattcagataaaagacatgcggcgtttacaatagaaggttcctatgcacataggacatgtaaagtgttggatgagtacaagaaagccgtagctgaaatcaagagaaaggaggccaataccaaagacgtctctttcgggatagagatttttcagttagttgttcaccctgggtttgatactagctttgctatggcactagttttactactggatcaaatgttttcataatactcttcatatagagtagtaacacatttctagtttctatatcacaatgacactgtaaatcagctggagagatctatataaaaagaataagaaaacaattgaaacagtcaaaaaataatattattaaactt

SEQ ID NO: 252687 - DNA, 509 bp, Glycine max
  unsure (1)..(509): unsure at all n locations
tagtgtctgataagacgaggaacggttacactctccaagagctatgacgtcgcatgcacgcgtacgtaagctcggaattcggctcgaggaagaaagagattgaagagacccagcagaccgacagggacagatggaaagggtcttggcctataatatcttcagacgaccaacaggacaatacaggatgaaagggtttgggttggactcctttttccaagctccacaggatgctggaactcactatgctgtcatgagctcctacgagtaccttagcactggacttcgccagtacttggacaacaacatggatggattttacattgctccagcttttatggacaaacttgttgttcacattaccaagaacttcatgaccctgcccaacatcaaggttcctctcattcttggtatctggggaggcaagggacaaggaaaatctttccaatgtgagctngtctatgccaagatgggaatcaaccccatcatgatgagtgctggaaagttggaaa

SEQ ID NO: 252688 - DNA, 503 bp, Glycine max
  unsure (1)..(503): unsure at all n locations
aggtgtctgagnttcaactgcactgcagcactactagagtctatgacgtcgatgcacgcgtacgtaagctcggaattcggctcgaggtagaaagagtttgtagagacccagcagaccgacaaggacggatggaatggtcttgcctatgatatctcagacgaccaacaggacatcacaagaggaaagggtttggttgactcccttttccaagctccacaggatgctggaactcactatgctgtcatgagctcctacgagtaccttagcactggacttcgccagtacttggacaacaacatggatggattttaacatgctccagcttttatggacaaacgttgtggtcacattaccaagaacttcatgacccttgccaacatcaaggtttcttttaatcctggtattcggggaagccagggaccaggaaaatctttcccattggagcctggcttttcccaaattgggatcaaccccatcaatattaatgcttgaaaggtggaaan

SEQ ID NO: 252689 - DNA, 506 bp, Glycine max
  unsure (1)..(506): unsure at all n locations
cagtgtatgtgttttcgtacnttcncgcattactagagttatgacgtagcacgcacgcgtacgtacgctcggaggtaatttcgatctagcgaggagatacaccttcaccagcagcagccatggttggcgggaccgtactatgcctattcagcggtgccaagatctacccagtgaaaggcatcaaatttgttcgtggtgattctcaggttttcctgtttgctaactcgaaatgtatgaggtatttccacaacatgttgaagccatcaaagcttacctggactgcaatgtacagaaagcaacacaagaaggacattgctcaagaagctgtgaagaaaagaatacttgctgcctaaaagccttacttcaggtccattgtcagagccacttttgaagttattccaaaaaagagagcttgtaagccataagttcgagattccaaaagggaaacttgcctttgtgaaaattaagataggtacccatatacataagtttagaataatggttat

SEQ ID NO: 252690 - DNA, 505 bp, Glycine max
ggaagtgtgtccatgggcgggaagatggaatcactctagaagagctatgacgtcgcatgcacgcgtacgtaagctcggaattcggctcgaggtaaccatggcatccaccactctatcccctacaaccccttctcagctatgctcaggaaagagtgggattttcagtccctcacaggcacttcttgtgaagccagtgaagaggcagatgatggggaagagcaagggaatgagaattgcatgccaagccaccagcattcctgctgatagagtccctgacatgggcaaaagacagctcatgaatctgcttcttcttggtgccatttcactcccctctgctggaatgcttattccctacacctacttttttgtccctccaggttcaggttcttcagctggtggtactgttgccaaggatgctgttggaaatgatgtaattgcagagaattggctcaaggcacatggacctggtgaccgaacccttgcacaaggatttgaagggagatcc

SEQ ID NO: 252691 - DNA, 514 bp, Glycine max
  unsure (1)..(514): unsure at all n locations
tagtngttttctgtatgtggggggtatagatgtgagacacctatagaagagctatgacgtcgcatgcacgcgtacgtaagctcggaattcggctcgagcgaggagacacaccttcagcagcagcagccatggttctcaaaaccgaactatgccgattcagcggtgccaagatctacccagggaaaggcatcagatttgttcgtggtgattctcaggttttcctgtttgctaactcgaaatgtaagaggtatttccacaacaggttgaagccatcaaagctcacctggactgcaatgtacagaaagcatcacaagaaggacattgctcaagaagctgtgaagaaaagaagacgtgctgccaaaaagccttactccaggtccattgtcggtgccactttggaagttatccagaaaaagagagctgagaagccagaagttcgagatgcaaatagggaagctgcccttcgtgaaattaaggagaggaacaagaaaacaaaagatgagaagagtgctaa

SEQ ID NO: 252692 - DNA, 506 bp, Glycine max
  unsure (1)..(506): unsure at all n locations
tatgtgtgtctgatgtgcgaggtataaagagagacactatagaagagctatgacgtcgcatgcacgcgtacgtaagctcggaattcggctcgagaagaaaagaaaatcctcacccattttcttcgtagccaaacactctgaaattctcagttatgtcgtggcaagcgtatgtggatgatcacctactgtgtgaaatcgaaggtaaccacctcactcacgccgctatcatcggccaagacggaagcgtttgggctcagagcaccaacttccctcagttcaaacctgaggaaataactgccatcaataatgactttaatgagcctggatcacttgctccaactggattgtatatcggtggcaccaaatacatggtcatncagggtgagcctggtgctgtcattcgagggaagaagggtcctggtggtgttactgtgaagaagaccggtgcggccttgatcattggcatttatgatgaaccaatgactccaggtcaatgcaacatggta

SEQ ID NO: 252693 - DNA, 504 bp, Glycine max
  unsure (1)..(504): unsure at all n locations
agtatatcncctcatgttatttgatatgaacactctagnagagctatgacgtcgcatgcacgcgtacgtaagctcggaattcggctcgaggctttgtgtttatatcaaggaaggtgtccttaacagcaaggtcacagtgccctccattagggaagccatgtctaatctcctaaaacctgaccctgagctggccaacttgatccacatcaattgcatgggtcttatcaactggtatggcctaataccagatcttttccccaatgttaattatgttcatggtatcatgactgcttcaatggatccttatttgagaaagcctaggcattatgctggactgtagtctttgtcgactgctgactatgcatcttcatacaggttgatcgtaacgctggcgtatccagcaagaccagttgtattggccttactgacaagactaccgtagatagccttctcattggcattattatgagccagctactgcatgtcaatgcagatttctttttg

SEQ ID NO: 252694 - DNA, 503 bp, Glycine max
atatgtctgttaggggggtataagtgtatcctctagaagagctatgacgtcgcatgcacgcgtacgtaagctcggaattcggctcgagactgaaggatgcgacatcagaggctataagggactgggtaactaatgtggagacaactcattatattttgggttctgttgctgggccgcatccatatccaatgatggtaagagagtttcatgctgtgattggcaaggagaccagaaagcaagctttggaaaagtggggagggaaaccagatattctgattgcatgtgttggtggaggttcaaacgccatgggacttttcaatgaatttgttgatgacaaagatgttaggctaattggcgtggaggctgctggatttggcctggacagtggcaagcacgcggcaacgttaacgaagggagaagttggggttttacatggagctatgagctacctgctgcaggatgatgatggacaaatagttgagcctcactcaattagtgcaggc

SEQ ID NO: 252695 - DNA, 504 bp, Glycine max
cagggtctgcatgaggggagaacgggtagacttccaagagctatgacgtcgcatgcacgcgtacgtaagctcggaattcggctcgagattctaaagaaatataactaatattctttagaataatcaaaaagaatattaaattcaaataaattttagatagaaaaaagacttaaaaaggaggatttgaaatgcgagatctaaaaacatatctttccgtggcaccagtagtaagtactctatggttcggggcttttggcgggtctcttgatagagatcaatcgtttttttccagatgcattgatattcccttttttttcattctagttattgacacggaaaggggtgaagaagattatagatccaattaagtattaaatatatggaaataattaggtaataaatctcctctctttaattcgtcttttatttcttcttttttttacaattgtaataaaataagttaagaaagagaaagaataagggttaatttggcctaattgaaat

SEQ ID NO: 252696 - DNA, 511 bp, Glycine max
  unsure (1)..(511): unsure at all n locations
nggaatgtgtatctgaaagggggggacggtgagaaacacatatagaagagctatgacgtcgcatgcacgcgtacgtaagctcggaattcggctcgagtgttaagaaatttaagtgaggagctagagaatgatgatgaagtctgctatgtgtgcagtggtggttgtagcacttcttcttctggcggaggtggggcccatggctgaggctgtgacatgcaccccaacagagttgagtccgtgtcttccagcaatcacttccggtgctaaaccttccaatgcttgttgcacgaagctgaagcagcaaaaaccatgcttatgtggctacctcaaaaacgctagcttgaagcagtatgttaactctcctaatgcccgaaaaaccgttgcttcttgtgggattcccttttccaacttgttaataaattaagccttcttttaattaaagtgtggaatatatatatatatatatatatatatatatttttttaaccagttaaattaatccccactttga

SEQ ID NO: 252697 - DNA, 509 bp, Glycine max
agtgtctccatttgtatgtactgattggactcctctagaagagctatgacgtcgcatgcacgcgtacgtaagctcggaattcggctcgagctcgagccgatatcggctcgagccaaaccgggcctactcccgtgcagctccccgctctatggtccgggcgcttctggggccgccacggctgttccttcgacgccggcggccgggggcgctgcgccaccggggactgcggcgggtccctgttctgcaacggcatcggcggaagcccaccggcgaccctggcggagttcaccctgggcaacgagcaggacttctacgacgtgagcctggtggacgggtacaacctacccatctccatcactcccttcaagggatccggaaaatgcagctacgccgggtgcctgagccgacctcaacaccatgtgccccgatggcctacaagtgcggtcacgcgacatcaagcgcgtggtgtctctgcatgaccgcttgctccgttttcaactccccaggtc

SEQ ID NO: 252698 - DNA, 505 bp, Glycine max
agtgtatctgtcgtagggggttggatagatacactatagaagagctatgacgtcgcatgcacgcgtacgtaagctcggaattcggctcgagctcaagtaggctatactaaggtgaaaaaggagagatggcagctgcaacatctagtgctgtgttaaacgggtttggatctcacttcttgtgtggaggaaagaggagccatgcccttcttgctgctagcattggagggaaagttggtgcttctgttagtcctaaaagagttattgtggcagttgctgctgcaccaaagaagtcatggatccccgctgtaaaaggtggtgggagtttcatagacccagaatggcttgatggctcgctaccaggtgactatggttttgacccactaggactaggaaaggacccggcattcctgaaatggtatagagaagctgaactcattcatgggaggtgggcaatggctgcagttgtaggcatcttcattgggcaggcatggagtggagttccatg

SEQ ID NO: 252699 - DNA, 511 bp, Glycine max
agtgagttgtgcaatagaatgtatgaagtcattcactcaagagctatgacgtcgcatgcacgcgtacgtaagctcggaattcttctgcaggagtgaaactgattgaagaagagaaatggcaaagaattcattggagagatacacacattattatgagcggtgggccagcaaccaatcttcaaggcaaaaagctcttgcagatctacaccagatgcaaactgttcatattgagaagcttagtgatacacagtgccagcctgaatcacagcttaagttcataacagaggcctggttacagatagttgaatgcaggagggtgctgaaatggacatattcatatgggtactatttaccggagcatgaacatgctaaaaaacagttctttgagtacttacaaggtgaggcagaatctggtttggagagacttcatcaatgtgctgaaaaggaactacagctattcctgaatgctgatggcccatctaaagaattcaatgactttcgcactaaacta

SEQ ID NO: 252700 - DNA, 504 bp, Glycine max
  unsure (1)..(504): unsure at all n locations
attatctggatgggggagatggtatacatttacaagagctatgacgtcgcatgcacgcgtacgtaagctcggaattcggctcgaggaaactagtcactataccacagttcctaattatctggaacagaaaaagactcagaagcttcttcttcttggaattcaaggatctggcactagcactatatttaagcaggccaagtttttgtatgggaacagattttctgatgaagagcttcaggatgtcaaattgatgatccagagtaacatgtataaatatcttagtattttacttgatggaagagagcgctttgaagaggaggctgtttctagaatgaatggacaaggttctcccggtcaaactatggaaacaggtagcaatggtgaaaccaggtaatactagtgaatgcatctaatcccttaacccaagggctaaaacaattctctgactggctcctggacaatatacccactgnggatttagatgccttcttccctgcagccacg

SEQ ID NO: 252701 - DNA, 506 bp, Glycine max
tgttgtcatctgttcaagcacatagtagtcatcactagagctattacgtcgcatgcacgcgtacgtaagctcggaattcggctcgagcgatgctaactcttcaagcttcgtctcgtaaagaaaatgcgaaggctcaatagagagaactcaattgaatcatcaaatgaggacagtgatttcgcgcttgatccattccacgccttacattttcaggctcaatgccacggcagcatccatcacccatacttatatgtgacccttttctatcttactaaatacccaattccttctctaattcacagtctacaggtctgatctctatggctgttgcaattaatgtatctcggtttgaaagcatacctattgctcctcctgatccaatttttagagtttacaattcgtttaatgcatacaatttttatgtcaaacttaaatttataaattgggcttactatacttattaattcctaccattattctttaagtttttttaaaattcactaatg

SEQ ID NO: 252702 - DNA, 523 bp, Glycine max
  unsure (1)..(523): unsure at all n locations
aaaattgtatctgnnttagnttnnaatttgtatcatctatacagagtcatgacgtcgcacgcacgcgtacgtaagctcgtaattcggctctagccttctttattatccacttcttcttctgtttcattctggtgcgtcacttaaaagataatgacgtctctaaatcacaacaatcaaacttattctatcctaaacattatatccttatcttactttgtttattaatttactatccaacattttttttttttttttttttcttaaatttattacaatttatttttcttatatttaattctacattattaatatatattcttttatattaatcctttattttttatatctttttaatttattttttttttaatttattattttattctatataatttttatcacatatcttttattttcttattttattatttcttttatatttatctttatttctttcttacttaattattatacaatcttttttccttattttataattttctttaatttatttaaatttttt

SEQ ID NO: 252703 - DNA, 508 bp, Glycine max
atctttttctacgcgacgagggaagagggggatcactctagaagagctatgacgtcgcatgcacgcgtacgtaagctcggaattcggctcgagcttttgtgttctgttctgttctgttacatctcgtgaatcgtttacaacttcttaaccgttttctgttgcagatggcttcttcgtttctatccgcagcttcgcacgctgtctcaccctcttgttctctgtccaccacgcacaagggaaagcccatgcttggaggcaacactttgagatttcacaaaggacccaattccttctctagttcaaggtctagaggtcggatctctatggctgttgcagttaatgtatctcggtttgaaggcatacctatggctcctcctgatccaattctcggagtttccgaggcgtttaaggcagacaatagtgatgtcaagctcaatcttggagttggggcatacagaacagaagaactacagccatatgtgcttaatgttgttaagaaggcagagat

SEQ ID NO: 252704 - DNA, 501 bp, Glycine max
agtgtgtctgttcaggtccactacgtatcacatagcagagtctatgacgtcgcacgcacgcgtacgtaagctcggaattcggctcgagcttttgtgtatcgttctgttctgttacatctcgtgaatcggttacaacttcttaaccgttttctgttgcagatggcttcttcgtttctatccgcagcttcgcacgctgtctcaccctcttgttctctgtccaccacgcacaagggaaagcccatgcttggaggcaacactttgagatttcacaaaggacccaattccttctctagttcaaggtctagaggtcggatctctatggctgttgcagttaatgtatctcggtttgaaggcatacctatggctcctcctgatccaattctcggagtttccgaggcgtttaaggcagacaatagtgatgtcaagctcaatcttggagttggggcatacagaacagaagaactacagccatatgtgcttaatgttgttaagtaggcagag

SEQ ID NO: 252705 - DNA, 499 bp, Glycine max
  unsure (1)..(499): unsure at all n locations
cttatctgtannnccgttaaccncgcnagtcatagagttctacggacaaccacgcacgcgtacgtaagctcggaattcggctcgagcttttttgatcagttctgttctgttacatctcgtgaatgatttacaactaattaaccggtgtctgttgcagatggcttcttcgtttctatccgcagcttcgcacgctgtctcaccctcttgatctctgtccaccacgcacaagggaaagcccatgcttggaggcaacactttgagatttcacaaaggacccaattccttctctagttcaaggtctagaggtcggatctctatggctgttgcagataatgtatctcggtttgaaggcatacctatggctcctcctgatccaattctcggagtttccgaagcgtttaagcatacaatattgatgtcaagctcaatcttggagttggggcattcataacccaataacttctgccttttttgcctaagtttgttaaaaagcataaat

SEQ ID NO: 252706 - DNA, 497 bp, Glycine max
  unsure (1)..(497): unsure at all n locations
cgtgtgttgnnaagcctagagatcatcatacagatcatgacgtcgcactgccgctacgtaagctcggaattcggctcgagggactctcataaacaacacaggccttgaggaggggttttgctttatgatggatccgaaccttggtaaacatgttagctatgtccagtttccacagaggtttgatggtattgataggaatgatcgatatgccaatcgtaatacagcttcctttgatataaacttgagaggtctggatggcattcaaggtcctgtttatgtgggtactgcatgcgtcttcaatatgacagtcttatatggttatgaaccttcttttaaactcaagcacataaagcctgggttgttatcatcactgcttcgatggaaattctttgaagtagttcaaaatttagcaagattggatcattctatattaaatgctacttgcattgttgaccctactgggactttttttaatatatatggtttttaattttttt

SEQ ID NO: 252707 - DNA, 503 bp, Glycine max
  unsure (1)..(503): unsure at all n locations
atgtagtgctaannnccggttaacngcncnatcttgagagttatgacgtacaacgcatgcacgcgtacgtaagctgggaattcggctcgaggtgaatactacataaacaacagcaaggccttgagggaagctattttctaaatgatggatccgcaccttgataaacatgccagctatgtccagtttccacacaggtttgatagtattgattggaatgatctatatgccaatcgtaatacatcttcctttgatataaactagataggattctatggcattcaaggtcctgtttatgtctctactgcatgtctcttcaatatgacatcttcatatagtaatataactcctattaaacctaagcacataaagcctggcatattatcatcacattgatacttaaatcttataaaattatctaaatctagctatatagattcatattactattatcttaatagtttttaattctatttatttaattttgaaacatattattctaaacg

SEQ ID NO: 252708 - DNA, 505 bp, Glycine max
  unsure (1)..(505): unsure at all n locations
cgtgggttttntttgagggtatatgggagggatattctaagagctatgacgtaccatgcacgcgtacgtacgctcggaattcggctcgaggtattcacctatgtaaatcaactgtccaaaagcttgccaggtccaaatggagagtcagtagtagactgtaatagcatttatggattgccaaacatcacgtttactgttggagacaaactttaaccttaccctgagcagtattttctgaaaactggagaaggcattgcaaaagtttgccttagggggttaattgcttttgacattcctcctcctcgaggtcctctctggattcttggcgatgttttcatgagggtatatcacaccgtctttgactatgggaacctccgagttggtttcgccaaaactgcctaacaagacatctaggagattatatagggcatgttttaataagcttggtaaaggggtggaaaataaccttcttgtacttccattggcccaggttaccatttttaaa

SEQ ID NO: 252709 - DNA, 506 bp, Glycine max
  unsure (1)..(506): unsure at all n locations
aggtgtctgagccatcagaataagattgnatcactactcatgatttatgacgtcgcatgcacgcgtacgtaagctcggaattcggctcgagtatttttcttactgtcttgtctctccagagaactgtatagagagagatggcagctgcaacatctggtgctgtgttaaatgggttgggatcttccttcttgagtggaggaaacaggagccaaacccttctggccactgctattggaggcaaagttggtgctgctgctgttactgttagtcctagaagactcattgtggtagctgctgctgcaccaaagaagtcatggctccctggtgtcagaggtggtggcaacctcgtcgacccagaatggcttgatggatcgctaccaggtgactatggctttgacccactaggccttgggaaggacccagcattcctcatatggtacagagaagctgagctgattcatgggagatgggcaatggctgcagttctaggaatctttgtgggcctg

SEQ ID NO: 252710 - DNA, 511 bp, Glycine max
  unsure (1)..(511): unsure at all n locations
agtgntttctgagcatcgaatatattgatagtnatcancatccntnantnatgacgtcgnncgcncncgtacgtaagctcggaattcggctcgagagttcatcatatcatcaaagacattaaggagtttaaggaaagcactaaggttgacaaggtggttgtcctgtggacagccaacacagagaggtacagcaacctagttgtgggactaaacgacaccatggaaaacctctttgcttccttggacaggaacgaggctgagatttccccttccaccttgtatgccattgcttgtgttatggaaaatgttcctttcatcaatggaagccctcagaacacctttgtcccagggctgattgatctggccatcaagaggaacagtttgattggaggagatgactttaagagtggtcagaccaaaatgaaatctgtgttggtggatttccttgtggnggccggcatcaagccaacatctatagtgagttacaaccatctgggcaacaatgatggcn

SEQ ID NO: 252711 - DNA, 493 bp, Glycine max
  unsure (1)..(493): unsure at all n locations
aggggntnncctttgagcatacgtacctctgaagacttgacgtgatgccgcgtacgtagctcgaattcgctcggaaaggtgctgaaacatggtgacctggttgtgtgccccggaggaccacgtgcagagagccctatttattaagggtaaccctttgtttcggaactgtgcgttgaaataatccctgtggcaattgatgtcatgtgacaatgttccatgcacaaccgcagaagtcttaagtgcttggacccatttttcttcttgatgaatcccacaccttcttactcttgtcagttgctagagaaagtgtcacctttcattaccgctagtaatgttatcaatgacgattatgcgagatttgaagtggctaatcacgtgcaaacgcatattgggaaagccctgggttttgaatgcactcaacttaatagaaaagacaagtacttgattctggccggtaatgaaggtatagtatcgaccacaaagagtggtangg

SEQ ID NO: 252712 - DNA, 512 bp, Glycine max
  unsure (1)..(512): unsure at all n locations
aaggtttctgcaaatggagggaatatagtaaacactatcgaagagctatgacgtcgcatgcacgcgtacgtaagctcggaattcggctcgagggtcttaaggctctgggagtcagagacctcaactatcgtgtagcttttatcgccaactctgttcagatttgtgatggtagaagagaaatagacatcaggaacagaaagaaggatgctgatgatgacaatcaacagtttactgatcaggaactggaagaaattaaacgaatgaggagcactccagattttttcaccaaacttgtcgaaagcattgctccaactggttttggtcatccagatattaagagagctatccttcttatgcctttgggtggtgttcacaaatttactcatgaaggcttaaacctcagaagagacttaaacgtttgtgttgttggagatcccagctgtgcanaatctcaatttcttaagtatacttcaggcatagttccaagatctgtgtatacatctgggaaaatc

SEQ ID NO: 252713 - DNA, 513 bp, Glycine max
  unsure (1)..(513): unsure at all n locations
aggtgtctnnttaagacgaagatgagtgtatcactctagaacagtctacgtcgcatgcacgcgtacgtaagctcggaattcggctcgagggaaagaggctgcagagagtactttgcttgcttacaaatgcggtcatgatattgctcttgctgacttggcccccactcaccccattaagttgggacttgctctcaacttttctgtgttctattatgaaatccttaactcgccagatcgtgcttgtaatcttgccaagcaggcatttgatgaggcaatttccgagcttgacacattgggtgaagagtcataccaagatagtacattgatcatgcaacttctccgtgacaatctgactttgtggacatcagaacatacggacgatgctggagatgagatcaaagaaacatctaagcaacaaccaggcgaataggcgatggcagttgcgatgtggtagttgattggatatgtattaccgataatatggatcccaatgtgcttgccatagtgggatat

SEQ ID NO: 252714 - DNA, 507 bp, Glycine max
  unsure (1)..(507): unsure at all n locations
aggttgtgcaatatgacaatatagtgacactctccgaagagctatgacgtcgcatgcacgcgtacgtaagctcggaattcggctcgagcagtcattactttgactcanaccccgactaatctggntcagaatctaaggaaagatgggaagaagcctagtgcatacattgctgatacaaccacagccaatgctcaggtacgtacactntctgagacggttagacttgacgcaagaaccaagctgttgaatccaaagtggtatgaaggcatgttgtctactggatatgagggtgtacgcgagatcgagaagagactcaccaatacagtggggtggagtgcaacttcaggccaagttgataactgggtgtatgaagaagccaacacaactttcattcaagatgagcaaatgctgaacaagctcatgagcactaatccaaactccttcaggaaactggtgcagacattcttggaagccaatggacgtggttattgggaaacttcagaagat

SEQ ID NO: 252715 - DNA, 515 bp, Glycine max
  unsure (1)..(515): unsure at all n locations
agctatctaaaatagacgcttactcgtaggnacnactccnnaagatctatgacgtcgcatgcacgcgtacgtaagctcggaattcggctcgagccattggagaatctcccagtagggtttccattggacgcattgcccctgacttcatctctgaggcctttggcattaagcaatcagttcctgcatacttggatccagcttataacatatctgattttgcctctggggtgtgctttgcttctgctggaactggatttgacaatgctactgcaagggttgctgatgtgatacctctatggaaagaaattgagtactacaaggagtaccaaaagaaactgagggcacatcttggggatgagaaggccaatgaaataataagagaggctttatatttggtcagcatagggaccaatgacttccttgagaactactacacactccctgaaagaaggtgtgaattccctattgttcagcaatatgaggacttcctcctagggcttgctgagagcttctta

SEQ ID NO: 252716 - DNA, 519 bp, Glycine max
  unsure (1)..(519): unsure at all n locations
agtggntttctgccaattgaggggggaatgatagtaccactctagaagagctatgacgtcgcatgcacgcgtacgtaagctcggaattcggctcgagctcccttttcttttgtttctttcttcttctacatccactgcacaattgccacatgaatcattagttagggtttattctccaagaaaagcaatgagtgcgtccaggttcatcaagtgtgtcactgtgggtgacggtgccgttggcaagacttgcatgctcatctcctacaccagcaacacttttcctacggactacgtgccaactgtctttgacaatttcagtgcaaatgtagttgtggatggaagcactgtgaatcttgggttgtgggatactgctggccaagaagattacaatagattaagacccttaagctatcgtggagcagatgtattcctgcttgctttctctctcataagcagggctagctatgaaaatgttgccaagaaatggattcctgagttgaggcattatgctcctggtgt

SEQ ID NO: 252717 - DNA, 500 bp, Glycine max
agtgtttctgctctactgcactcagtacactatagaaagctatgacgtcgcatgcacgcgtacgtaagctcggaattcggctcgagcggtgttactgagatagcattcaacaccttctcctttgaaaacattacacaagggaagttcaatcactaattagaagtatggtatgtttaattttgttccccgtcacctttgggtgcggcttctttaatttcatctgcaccatcatcctgcatgtcagaggtcccttctttacctctcccttgtgtgttcccttccccacattgcattgtcatcccattgcaccgtggaaaccgccacgaaaacctttgaaaaatgcatgaacctcccaacccaacaagcctccatagcatggacattccaccctcacaacttaaccttagaactagtcttttttggaagcttcatatcaccttcagggtgggttggatggggcattaatcccacatcgaccgaaatgaccggaacacgtgcct

SEQ ID NO: 252718 - DNA, 492 bp, Glycine max
gggaagttctttaataggggggcatcggaggagaattccaagagctatgacgtcgcatgcacgcgtacgtaagctcggaattcggctcgagcttcattccatagacatggccaccgtcacttctgcagccgttgctattccctcattcactggcctcaaggcaagcgcaggcaaagtgagtgccgcagttaaagtctcagctccccaagccacaaggttgggcatcaaggcttcgctgaaagacgttggagtcgctgttgtggccactgccgcgagtgcagtgctggctagcaacgccatggccattgaagtgttgctgggtggtgatgacgggtctctggctttcgttcccaacaatttctccgtggcctctggggagaagatcgggttcaagaacaacgcaggtttcccccacaacgtttgggtcgacgaggacgagaattcctagccgcgttgattgcaggggaaaatttcattgaacgatgaagaccc

SEQ ID NO: 252719 - DNA, 485 bp, Glycine max
  unsure (1)..(485): unsure at all n locations
agtntttttnnaaacgcggatgnaacggaaaggaaatactcatagctgagacgtcgcatgcacgcgtacgtaagctcggaattcggctcgaggtagagagcttcaactccaacactcctcgggatttggtccacataatctaccagggactcaccattctccaagaccaataccaacaactcttccatgacttgcagcctgatttcttgttcaccgacatgttctacccctggactgtggatgctgctgctaagttgggaattccacggctcatttatgttggtggaggttaccttgctcactcttctcagaacacaattgaacaattcttacctcacaccaaggtagattcggatactgagagttttctgcttcctggattgccccatgaattgaagatgacgcgtttgcagttacccgattggcttagagcaccgaccggttatacttatttgatgaacatgattgaagaactcgaaggaaaa

SEQ ID NO: 252720 - DNA, 488 bp, Glycine max
  unsure (1)..(488): unsure at all n locations
gataagtctctgcaaggggggaaaacggtaacacttctcaagagctatgacgtcgcatgcacgcgtacgtaagctcggaattcggctcgaggtgctgactgctgaggacacaaggatagctatacaaagtggtgcagctggaattatagtgtccaatcatggagctagacaacttgactatgttccagccaccatatcagccttagaagaggttgtcaaagctgctgaaggtcgccttcctgtatttttggatggtggtgttcgccgtggaactgatgtcttcaaggcattagcactaggtgcctctggcatatttattggacgccctgtggtgttctccttggctgctgaaggagaggctggtgtaagaaacgtgctgcggatgctacgtgaggagtttgagctaaccatggccttgagtggttgcacctnactcaaggatatcactcgtgatcacaatggcacttgattggacccaactttgattc

SEQ ID NO: 252721 - DNA, 514 bp, Glycine max
  unsure (1)..(514): unsure at all n locations
agttttttcttatttgatggaatgtggtatcactcatagagcatgtacgtcgcatgcacggcgtacgtaagctcggaattcggctcgagatcagcttcagatcatttgggtaatggatcccagttggaggtggtcgtggatgaacttcctgacatgcccagaatccttggctattatctttcaaaagggcttccaagatctaagtctttcaagaatggcatggtcaagaagaaatgggaatttcacaagggtcttggctcaacaacaggggtcgcttttgggacaaggcagcacacaagaacagttcctggtccaacgatcgaggccctctatggcgttgacacccacgtgaggtggcaaaatcaccttccttcaaaacacatacttncctgggacccaacaatccccaccgcaatgaccaactcgacacgtggaatccccacagtggtccaccttcacggtgggatccacgcgccagagagcgacngaaacgccaacgcatggntcacatcan

SEQ ID NO: 252722 - DNA, 516 bp, Glycine max
  unsure (1)..(516): unsure at all n locations
agtcgtcttcaaaagggaggggtntgatagtaaccctctagaagagctatgacgtcgcatgcacgcgtacgtaagctcggaattcggctcgagcaaagattttgagcacaatggcctcgacacaatgctttttgcaccaccacgccctcaccactccagctagagcttcaacacagcgcctagttgtgagcaccaaaccaaaccacattgtttgcaaggcagcacagaagcaggttactgtccaagagggtgaggacactactactggccttgtctctcgcaggttggccctcactgtgctcattggtgctgctgctgttggctctaaggtggcacctgctgatgcagcctatggagaagctgccaatgtgtttggaaaaccaaagacaaacacagacttcctttcatacaatgggaatggattcaaactctcaattccctcaaagtggaacccaagcaaagaggttgagtacccaggtcaggttcttagatatgaggaccattttgattcacccc

SEQ ID NO: 252723 - DNA, 485 bp, Glycine max
gcaagcttttatataagagggggggtggggagataatataagagctatgacgtcgcatgcacgcgtacgtaagctcggaattcggctcgaggggtattcaaattgatactaaacaaaactgctgtcaatatgatgtagaagttgaagatagcattaacaaaaaggactgtggaaatgttggtgaagacattcagcaacatcaagacataggtttagatgcttatactgaatcagtatatggaatattggatctgaattctgtacaaaagatgtttcttaagggaatgagtagttttggcagtactgattctgacatagctgagatttaccaatgctcaggtgcgtcaatgcaagcacgatgggagctgttccagaagcaagctgaacttaccaaaaagaatcatggggaagctaacattcggtatgcttggcttgcttcttctaaaggagaactatctacaatgatgaaccattgacctaggcat

SEQ ID NO: 252724 - DNA, 514 bp, Glycine max
atggctctgagcatccgataggaatgcagtaccactcatagaagagctatgacgtcgcatgcacgcgtacgtaagctcggaattcggctcgagagcggttgtgcgttatctgccacgggagccatagaagcagcacatgcaatagcaacaggagaccttgttagcctttctgaacaagaactcgtagactgtgtggaagaaagcgaaggttgttacaatggatggcactatcaatcgtccgaatgggttttagaacatggtggtatagccactgacgatgattatgcttacagagctaaagagggtagatgcacagccaatatgatacaagacacggttacaaatgacggatatgaaactctaataatgtcagatgagagtacagaatctgagacagagcaagcgtccttaagcgccatccttgagcaaccaattagcgtatgcattgatgcagatgattctcatttatacacctgaggaatttatgactggagaaagctgtacaagtcccgat

SEQ ID NO: 252725 - DNA, 490 bp, Glycine max
  unsure (1)..(490): unsure at all n locations
ntaagtgtctgataaacgccacgacggtgagcactctacaagagctatgacgtcgcatgcacgcgtacgtaagctcggaattcggctcgagttttttcttcaattctcttgtatacagttttggtctgtgatttgttgctttggtgagagagtggatatggacgaacggtacgagactttgaaggagcttggttcagggaacttcggagtggcaaggttggccaaagacaaggagacaggagaacttgttgccatcaaatacatagaaaggggaaaaaagattgatgcgaatgttcaaagggagatagttaaccaccgatctttaaggcatccaaatattatcaggttcaaagaggtgaagagtttgtttctatacttaaactgttctttgagtgtgattatttctagatatggaattggtcaatgaattttcttaatagntatctggatttcttgggtattacaggttttaaaaaggcaaactttgccc

SEQ ID NO: 252726 - DNA, 487 bp, Glycine max
gaactcttggacagacagatcgtcgatcactctcgaagagctatgacgtcgcatgcacgcgtacgtaagctcggaattcggctcgagcttataacgtctttaaagttcggcaggctaacgatgggcctcactgaaaaacttggggactctgacctagtaatcaatacatcttcaggaagatgctgactagaagaatgatgccatcaaagccacccccaagaagactcgatccaaatttgttgaacagacttaatacactggagttgggatttgctgcctttctcttcgaatgtggatgctatgattatgttcatgggaaacacaactacttcatctacctcttccttcagaccttaacattctcaattgtaggatttggctacgttggcaccatcgtgtaaacctcgttgagccaaatttctcaagttacttaaagttccatcaaggttgtgtccctatttttctaggttttccctaaaaaaaattt

SEQ ID NO: 252727 - DNA, 512 bp, Glycine max
  unsure (1)..(512): unsure at all n locations
agcgggtttcctgtatatgcaagcactgccatcactcacgaagactatgacgtcgcatgcacgcgtacgtaagctcggaattcggctcgaggtgttgcagtggtatgcctgagtgtaaacttggattaaatgatagaatattattagaagcacaaggtaaaacaaccaaagggaaatcaattgacttggaagacatcaaatttcatcagtgtgtgcgtttggcccgatttgagaatgatcgaacgatttcatttatccctcctgatggatcatttgatttaatgacatataggctcagtacacaggttaagcctttagtttgggtggaagcacaagttgaaaaacattcaaaaagccggatcgagattatggtaaaagctaggagtcaatttaaagaacgcagtactgccacanatgttgagattgagttgcctgttcctgctgatgcaaccaatccaaatgttcggacttcaatgggatctgcatcatatgcacctgaaaaagatgcatta

SEQ ID NO: 252728 - DNA, 504 bp, Glycine max
  unsure (1)..(504): unsure at all n locations
aggcttctgcaaattgatatatatgtgacactctcgaagagctatgacgtcgcatgcacgcgtacgtaagctcggaattcggctcgaggtttgagatacaatgcactaagtttcattttcgttcaagtgcgggaactatcatggctgcagtggcatccattcagtgtttcttctagtcctttggatggaaagaatcaccttgctgttctcataaaggttcttggcaaatggacagaaaagttgagacaaaggattactgatgtcgatgcacaaaaagattcatgtgtcataacaacttcagttgaggggccatatgggcatgaagtaccataccacttaatgtatgaaaatcttatattagtggctggtggtattggactctcacccttccttgctatattgagtgacattctccaccgtgttagggaggggaaaccctgtcaaccgagaaatattttacttgtttgggcggtaaaaaaatcaaacgagcttncacttctctca

SEQ ID NO: 252729 - DNA, 504 bp, Glycine max
  unsure (1)..(504): unsure at all n locations
aggngtctgcaaattgatatatctagtgacactctcgaagagctatgacgtcgcatgcacgcgtacgtaagctcgggaattcggctcgagatcaagaaccggtttggtatgggtggtttggaatacttgggattgcttgctaattcggaccctgggcttttcgaatggtaccattcgctggcggatctggaccagaagaagctctggcaccagctcactctcaagctcgagcagtttgtggctctcggcggctttcaggctggtgatgctttaatacaattatatcacaatttcatcacagactttgagacgaaaattaaccttctcaagcttgcacattttgctgttatagtttctcggcagtattctgaaaaagaagctgcttgtggttatcttggaggggtcattcagaaacttcaagacactanggagcagcgcatagaagaacctattctttacattaagatgcanatagcaatattcaagcttgagcanggtgatcaa

SEQ ID NO: 252730 - DNA, 510 bp, Glycine max
atggtattctgctcatagtactatttagtaatcctctagaagagctatgacgtcgcatgcacgcgtacgtaagctcggaattcggctcgagaaaccatgaaagtagacaactaacgcaggtctatggattgtatgatgaatgccagaggaagtatgggaatgctaatgcttggcgatattgtacagatgtttttgactatcttactctttctgcaattatagatggaactgtgctttgtgttcatggtggcctttctccagacattcgatcaatagatcagataagggtcattgagaggaactgtgaaattcctcatgagggaccattttgtgatctgatgtggagtgatcctgaagatatcgaaacatgggcagtcagtcctcgtggagctggttggctttttggatcccgggtcacttctgagttcaataacataaacaatcttgatctggtttgtcgggcacaccaactcgttcaagaaagtgttaagtatatgtttcacggaaaaa

SEQ ID NO: 252731 - DNA, 507 bp, Glycine max
  unsure (1)..(507): unsure at all n locations
agtgntgtctgctattgaatgagtgatagtaacactcatagaagagctatgacgtcgcatgcacgcgtacgtaagctcggaattcggctcgaggcccagaactcgctctctcttaatttcttgggccccaagcccgttcctatgaagcacgttggtgggccggcgaagcccacgaagctgtaccggggcgtgaggcagaggcattgggggaagtgggtggcggagataaggctaccgaagaaccgaaccaggctttggctcggaaccttcgacacagccgaggaagccgctttggcttacgacaaagccgcgtacaggctccgaggcgacttggcgaggctgaacttcccgaacctgaaaggctcgtgccccggcgaggagtacaagcctatgcaggctgcggtggacgctaagctcgacgcaatctgcgcgaacttggcggaaatgcagaagcaagggaagaacgagaagggtgccaggtcgggggaggaagtcgaagcaaggtcc

SEQ ID NO: 252732 - DNA, 510 bp, Glycine max
  unsure (1)..(510): unsure at all n locations
agtgtgtctgccatccgatagacttcagtgacaccatagnagagctatgacgtcgcatgcacgcgtacgtaagctcggaattcggctcgagcgcccctcctgataaggagatggagaaggaggatctgcggcataatcactgctcatcgacatgtctcgatgctatagcagaaagatcttagacaccaagcgtgctatgactgactgtaggtgtagttatgaagatagctcatgtttgagctgatggaggcttttcttcatacatatgatcactagatcagatcgtggtgatagagacgaactgcgagttatcttattaggaaccattttgcgatgtcttgacgagctatagctgaatatctcagaccatggtcagtattacatcgtgaagctggtctgctattaggatccggtgtaacttctgagttcaatatcatacacaatgttgatctggtttgttagtcacatcaactcgatcaataaggtccttattatttcattcaccaaaaa

SEQ ID NO: 252733 - DNA, 505 bp, Glycine max
agtgtgtctgctatagacggtttatagtgacactcatagaagagctatgacgtcgcatgcacgcgtacgtaagctcggaattcggctcgagaattagttcattctctttgcgcagttccctacctctcctttcaagatgcagatcttcgtcaagaccctcaccggaaagaccatcacccttgaggtggaaagctctgacaccatcgacaacgtcaaggccaagatccaggacaaggaaggaattcccccggatcagcaacgtctcatcttcgccggaaagcagctcgaggacggccgtaccctcgccgactacaacatccagaaggagtcaacccttcaccttgtccttcgtctccgtggtggcatgcagatcttcgtcaagactctcactggcaaaaccataaccctagaggtcgaaagctctgacaccattgacaacgtcaaggccaagatccaggacaaggagggaatccgcccagaccagcaacgtctcatcttcgccggg

SEQ ID NO: 252734 - DNA, 483 bp, Glycine max
tgaagctgtgtgtacacccgccatcgtctgcatctctaagagctatgacgtcgcatgcacgcgtacgtaagctcggaattcggctcgagtgaaatgatgcctgtgacatggcccagctttagtgatatgcacccttttgcaccagttgactcaggctcaaggttatcaggaaatgttcaacaatttgggtgaactgttgtgcaccatcactgggttcgactccttctctttgcaaccaaatgctggtgctgctggtgaatatgctggacttatggctattcgtgcctatgatttcgctaggggagaccatgatcgcaatgattgcatcatacctgtctcagctcaccggacttatcctgctagctccgatatttgcgctatgaaacatgactctgctgctactgattctaatggtgacatcaatatacatgatctgactaacggttgctataccctacacgcctacttggcatgacctatggg

SEQ ID NO: 252735 - DNA, 507 bp, Glycine max
agtctcttgcatatcgaatatatgtgacactcccgaagagctatgacgtcgcatgcacgcgtacgtaagctcggaattcggctcgaggcaatggctcaaaccatgttgctcatgtctagtgtctctagcagttattccggggatttgaagaaaggcctttttctccaattgcaaaatcaaagtttaaggcctaagttctctcagctctcattcaacccacttccatcatcaacttcttccttttcttcaccccgtacattcacaactctggccctcttcaaatctaagaccaaagccgctcctgctaagactaaggttacaaagccaaagcaaaaggttgaagatggtatctttggcacttctggaggatttggttttactaagcagaacgagctctttgtgggtcgtgttgctatgcttggttttgcagcatcactgttgggtgaaggaataactgggaaaggaattctagcacaattgaatctggaaactggaattccctttatg

SEQ ID NO: 252736 - DNA, 503 bp, Glycine max
  unsure (1)..(503): unsure at all n locations
agatttctgcaattatgttaatatagtgacactctcgaagagctatgacgtcgcatgcacgcgtacgtaagctcggaattcggctcgaggcgacgatgtaagcaatgaccgcaacgaccacgtttgatgtctctggcccttgcttccgtgcccctccttcttgttcaccgaatccatgccacaccagtttttcagttataaactccctgaatcctcacaagggacgacggataagcgttgctgttccacctaagtttccaagcttccggagggaagcagctctgcaggggaatttggaggctgttagagtcccaacttcggtgcctgtgcgtgtagcatacgaacttcttctagctggtcatcgatatttggatgtaaggactccagaagagttcaatgctggacacgctcctggcgccattaacataccttatatgttcagagttggatcagggatgactaagaatagcaactntattagacaggtgtcttcaaattttagg

SEQ ID NO: 252737 - DNA, 507 bp, Glycine max
  unsure (1)..(507): unsure at all n locations
agtctctgcaatgagggaatatgtagacactcatccaagagctatgacgtcgcatgcacgcgtacgtaagctcggaattccgctcgaggcgcctaattttgaacaccaaaccaaaccacattggttggaagggaacaccaaaaccaggtacctggcccaaaaggttaaggccactaataactggccctggcttttgaaggtggcccttaactgtgctcatggtgctgtgctgtggctctaaggtgcacctgctgatgcagcctatggagaaactgccaatgtgtttgggaaaaccaaagacaaacacagacttnctttcatacaatgngaatggattcaaactctcaatccctcaagtggaacccaagcaaagaggttgagtacccaggtcaggttcttagatatgaggacaattttgattcaaccagcaatgttgctgtcatggtcactgcaactgacaagaagtccatcactgactatggttcacctgangagttnctaacttag

SEQ ID NO: 252738 - DNA, 504 bp, Glycine max
agggtctgcgattcgaatataatgtgacactctccgaagagctatgacgtcgcatgcacgcgtacgtaagctcggaattcggctcgaggctcagtcttggttccaaatgttgatgctactgtagcttttaatgggagttccttcttctgaagcttgcaaaccctgcccaagccaaggctcctgttcaggcccactttggagagctggataattctgttggcttttctgatgttacggctgccaaggccttagaggagaagttgaaggcatctggtgttccacatgaggtacacatatatcctggcaatggacatgcattcatgaacaggtctccagaaggaatcaagaggaggaagaatatgggaatgcccgacgaagacgaagctgcagttcagcttgcatggtctcgcttccagtcatggatgacacattacttatccagctaaataagttcttagtaatgccacaatggtatgataacatgatatacttctaattctgcat

SEQ ID NO: 252739 - DNA, 504 bp, Glycine max
  unsure (1)..(504): unsure at all n locations
agtgttttctgtataagatgatatgatgttaccactatagaagagctatgacgtcgcatgcacgcgtacgtaagctcggaattcggctcgaggttatctgtttcccgccatatatccaataagctttaaccatgtctgcctttgttggaaagtacgcagatgagcttatcaagaatgccaagtacatagccacacctgggaagggcatcttggcagcagatgagagcactggcaccattgggaagcgcctatcgagcattaacgttgagaacattgaggccaaccgccaagctcttcgcgagcttctcttcaccgctccagatgccctccaatacctctctggtgtcatcctctttgaggaaactctttaccagaaaacctccgatgggaagccttttgttgaggtccttcaagagaacaatgtcatcccaggcatcaaagtggacaagggtgttgttgagttggctggcacaaatggtgaaaccaccactcanggattcgact

SEQ ID NO: 252740 - DNA, 508 bp, Glycine max
agtgtgtctgtattgaacgatatatagtaccactcatagaagagctatgacgtcgcatgcacgcgtacgtaagctcggaattcggctcgaggttttgtatgcagtgcgctcgcaaaccttcctgatatccatccagattgatagttcattgcatgcaaccatagttttattaggttttttcttctttgttttcaattaggtttttgctgctctccttcaaactccgtctttccgaatcctctctttgtgattgtgttctgttctgcttcctaccgcgatagtttctcttctgaagcatggccatggcggtttctgcaattggttttgaaggtttcgagaagaggctggaaatatcctttttccagccgggactttttgctgaccctgagggaatgggtttaagagctcttgcaaagtcccagttggatgagatacttacaccggctgcttgcaccattgtttcatctctcagaaatgatcatgtcgactcctatgttctggctgaatc

SEQ ID NO: 252741 - DNA, 509 bp, Glycine max
aggatctgcgatatagaatgatatgatgtgaccactcatagaagagctatgacgtcgcatgcacgcgtacgtaagctcggaattcggctcgagggtgcagtttggggtgacatagtttggggacacgcagtgtcaagggaccaatggaatcaatggctttaaccttcaattaccattggtggttgatcaatgtattgccttgcagggtgtgtgaccgggttaagccacatcttaacaaaccggggaatcattatggtattcaccggtttccaccaacgagtcagtgcaggttcaaaaccttgcataccctgcagacccttctgaccctctccttgtggattggatcaaataccctggaaaccccgttttggtgccaccaccaggcattggtactaaggactttcgcgacccgacaaccgcgtggctcacctccgaagggaagtggcgaatcaccataggatccaagctcaacaaaacaggcattgcattggtttatgacactgaggact

SEQ ID NO: 252742 - DNA, 481 bp, Glycine max
  unsure (1)..(481): unsure at all n locations
agtcttgattactgaccagtcgtagtcacttacnagagctatgacgtcgcatgcacgcgtacgtaagctcggaattcggctcgagaaaaaagtgtagtgggaaatggcaggtgcgggtgcaggaggagggtatggggacgcgaaccagaggatagactacgtgttcaaggtggtgctgataggggactcggcggtggggaagtaccatattctacctacttttgcgagtgacgacctatttttaaagaagtcacgcactttacccattatcagagctactatactttcttctgaaagagatgcttttaaacatgcattgtcaagatcttccgatgatcttcacgctttacacatgtggcataaagaggaattcatcaatgagtttgatgatcaaataagggcatatcaagatagaacaattgacatgggaaaacctggagatggtctaattgccagtttttttgatgaatgctttaatttt

SEQ ID NO: 252743 - DNA, 490 bp, Glycine max
  unsure (1)..(490): unsure at all n locations
cagtgtctgattacagaacatcgacgcacttacgagagtatgacgtcggcatgcacgcgtacgtaagctcgggatttggctcggagccttggttcaatcaaaggaatcttcctttcggatctgccgggtggatttattaagcaaacgccaaggacagtggcagttgtcttttttgcctaaaaaactgtcgatggccttgacggcaggctagctcttgtcgatgaagagaggtgaattcaccctcggttacaagacggttctcaaatcacttaggagctccaaagggaaattgattatcattgctaacaactgcccccctttgaggaaatcagagattgaatactatgctatgttggccaaggttggagttcatcattacaatgggaacaatgtggatttgggcactgcatgtggaaaatattacagagtgtgcttgcctagcattaatgatcccggggattctggatttatcaagacacttcctggcgan

SEQ ID NO: 252744 - DNA, 488 bp, Glycine max
  unsure (1)..(488): unsure at all n locations
ggggtctgcaaggggggcgatcggtgacacttctcaagagctatgacgtcgcatgcacgcgtacgtaagctcggaattcggctcgaggacaaacttgagggcagaccactaagttgcaggctcacagacaaagcaaatgatcagttacgtagatggtttgaagatgatgaagcactcgagcgtgctattaatggagaatggattttattaccgcatggagatggaacaggtctttcaaagcctatatctttaagtcgaaatgagatgaaacccttcataatcgggagtgcaccaatgcaagataattcaggcagttcagttacaatttcttcaccacaggtttctccaacgcatgctcgaattaactataaggatggtgccttcttcttgattgatttacggagtgagcatggcacctggatcattgacaacgaaggaaagcagtaccgggtacctnctaattatcctggttggattccgtcatctga

SEQ ID NO: 252745 - DNA, 509 bp, Glycine max
aggatgtgaaaatagcaaatattgtgacactctcgaagagctatgacgtcgcatgcacgcgtacgtaagctcggaattcggctcgagcaagaactctccaaggatcctccttcccacgagaatctttggggggtaaaatccaagaggtttgaaatttgaaagcagggaagatggattatttcaatgcaccaggaagaaaccatctctttgttccagggccggttaacattccggaccagatcatccgggccatgaacagaaacaatgaggactaccgttctccagcaattccagctatgacaaaaactttgcttgaggatgtcaagaagattttcaagaccactactggaaccccatttctcatccctacaactggtactggtgcttgggagagtgctctcacaaacacactgtcttctgggggatcgaattgtatcgttcctgattggccaattcagcttgctttggattgatcagcagcaacgcctgaagttcaaatgttgatgtgt

SEQ ID NO: 252746 - DNA, 497 bp, Glycine max
  unsure (1)..(497): unsure at all n locations
agtnttttctgatatgacagaatgtgacactcccagagctatgacgtcgcatgcacgcgtacgtaagctcggaattcggctcgagcaccattcagtacatgtcgttgggtggtgcttgggaaccggaaaaccttcggtttttggtttccccatgatgatgcggcgcaaaacaacccgtttggaggtttcctcttcttacgacaacatttcagcttcaattttggaatctgggaacgttcatgctcctcttgatgaaaagctgattctaaagaatagatcacaagagacccaaccatatttaaatggacgctgtatttatcttggtggaatgatgggctctgggaaaacaacagtggggaagataatgtcgcaagtgcttggttattcattttgtgatagtgatgcattggtggaagaagaagttggtggaaactctgtagccgatatatttgagcaacatggtgagactttctttcgttataaggagactgangtgt

SEQ ID NO: 252747 - DNA, 509 bp, Glycine max
agtcttttggataatgcataaatgtagacactcctcaagagctatgacgtcgcatgcacgcgtacgtaagctcggaattcggctcgagccattaatagcttaaatgctggatatggtctctaaaggttgttctggtatgggccactttttcttggtccaaggtgaaaagtgggttgtgcgtgtggccagatgtgagacaactttgctttagaaaaggcatgctatatggatttatgcggttgttttctacaccgttgaaaacgctccgtggagctagccgctcgctgagagtgactcaattttgcagtgttgccaatatgtcttcctcattgcagattgaattggtaccttgcctgaaggacaattatgcttatctgttacatgatgtggacacgggtacaggtggtggtgttgatccttctgaagctgtgcctatcatagatgccttgagcaggaaaaatcgaaatttgacatacatactcaacactcaccatcatcatgatcacacg

SEQ ID NO: 252748 - DNA, 499 bp, Glycine max
  unsure (1)..(499): unsure at all n locations
agtttgtctgatggggggcgaaaggtgacactctctcaagagctatgacgtcgcatgcacgcgtacgtaagctcggaattcggctcgagagccttgaacattgtttgcaccctggaaccaggcttgatggtaaactgggggccttttctgcctaagggttctttcaaacacctttcaaccttcaactctccatcttttggcttgaggagtctgaaatcgagctctttatttggagaatctctaagagtggcatcccaatcaacactaaaggtttcaaagacaaagaatacttcactcgtgaccagatgtgaaattggtgacagtctggaagaattcctcacaaaagcaacaccagataaggggttgatcaggttgttggtgtccatgggagaagcattaagaacaatttccttcaaagtgaagacggcttcttgtgggtggaccacaatgtgttaatacttttggngacgagcagcttgcagtggatttgctagctaat

SEQ ID NO: 252749 - DNA, 507 bp, Glycine max
  unsure (1)..(507): unsure at all n locations
agttgtgtgcgtaatgacagatatgatagtacatcactcatagaagagctatgacgtcgcatgcacgcgtacgtaagctcggaattcggctcgagacaatattgtagtgctttttcccacaatatttggtgtcacgtattactacaccaatcttctttgtaaacgcggcatacgactcatggcagattaagaacattttggcaccgggtgttgctgatcctgaaggccattggcatagctgcaagcttgatataaacaactgctcacctgatcaactcgatctaatgcaaggcttcaggacagaatttttaagggctataactgtgcttggcaactcttcatctaaaggaatgttcatagactcttgctatgcccactgccaaactgaaatgcangagacatggttgagaagtgactcttcagagcctgaaaagacaacattggcaaaggctgtagcagaatgggtttatggaagaagaccctttcattcaatagattgcccttacc

SEQ ID NO: 252750 - DNA, 510 bp, Glycine max
agtgttttctgataaagatgatatgatgtaaccactcatagaagagctatgacgtcgcatgcacgcgtacgtaagctcggaattcggctcgagcttcactgttagggccatccaatcagaaaagccaacctatcaagtgattcaaccaatcaacggtgatcccttcattggaagccttgaaaccccagttacatccagccccttgattgcatggtacttatcgaacctccccgcatacaggaccgcagtgagcccactactaagagggatcgaggtgggcctggcccatggctaccttctggtgggcccattcgtgaaggccgggcctctgaggaacaccgagatcgccgggcaagcgggctctctcgccgctggtgggcttgtggtgatcctcagcctttgcctcacaatctatgggatttcatcttttaacgaacgagacccatccactgccccgtcactgaccttgacgggccgcatgaaggagcccgatcggctccaactgctgag

SEQ ID NO: 252751 - DNA, 486 bp, Glycine max
tggagtgtctgcacggggggcgatgcgtgagatttccaagagctatgacgtcgcatgcacgcgtacgtaagctcggaattcggctcgagttcttcctcagtagtgtcatttacgcttctcttctctgcagcaactatgcctaaccctaaggtcttcttcgacatgaccatcggcggtcaatctgctggccgcatcgtgatggagctctacgccgacgtcactccccgcaccgccgagaacttccgcgcgctttgcaccggcgagaagggcgtagggcggagcggcaagcccctccactacaagggctcgtccttccaccgcgtgatcccgagtttcatgtgtcagggtggcgacttcaccgccggaaacggaaccggcggcgagtcgatttatggcgccaagttcgccgacgagaacttcgtgaagaagcacaccggtcccggcattctcttcatggcgaacgccggtccccggacccaccggttc

SEQ ID NO: 252752 - DNA, 489 bp, Glycine max
aggtgtatttaaggggggggatggggagatttctcagagctatgacgtcgcatgcacgcgtacgtaagctcggaattcggctcgaggccaaagtggataccttggccaaaaaaaaaaaaaggttttccctttgagaaagaaaacccaaagacagtctttggatcattttgagcagttgcattccttgttttcttccattttgggtcccctcaaaagtagtttcaaaagggttcctcttcctccacagatatcatggcagatcataccccgggttcaggaaccgtttctgttgaagcttcttcacaagaaagaaggaaacttccaaactttctcctatccgtgagacttaagtatgtgaagcttggttaccactacttgatctccaatgctatgtaccttttactcataccccttcttggtgtagcttctgctcatctttcaacaatctctttaccagatggtgtccaattttgggaaaaatctcaggtt

SEQ ID NO: 252753 - DNA, 493 bp, Glycine max
  unsure (1)..(493): unsure at all n locations
taaggtttcttacgggggggcgacgggcgagcattctccaagagctatgacgtcgcatgcacgcgtacgtaagctcggaattcggctcgagcccacctggggcttacccaccaccacctggggcattaccctccacaacaaggatatcctccagctgggtatnctccacaacaagggtatcctccagctgggtaccctccacatcaaggctatcctcctgctggttaccccccagctggttatcctggttcatcacatgcaccaggttctcatgggcacggcggtatgggagcaatgctcgctgggggtgctgctgcggctgctgctgcttatggtgctcaccatgtctctcatggctcccatggctcctatggccaatatgcacatggtgctcacatgccacatggaaaattcaagcagcacgggcacggtaagttcaagcattgaaagcatggcaaggtccgcaagcattgaaaggcatggcaagttcgcc

SEQ ID NO: 252754 - DNA, 511 bp, Glycine max
  unsure (1)..(511): unsure at all n locations
gtgggtctgaaatattgataataatgtgacactctcgaagagctatgacgtcgcatgcacgcgtacgtaagctcggaattcggctcgaggaagtttatgacaagttggcttttgatatggagcacatatcgatggcttctttgcctggaatgttcgaaaggacagtgacattgaactccttggggaagacattctccttaacaggatggaagattggttgggccatagcacccccacacttatcatggggagtgcgacaggcacacgctttcctcactttcgcaactgcccatccttttcagtgtgctgctgcagcggctctgagagcaccagactcttactatgtagagctgaagagggattatatggcaaaagagagctattttgattgaaggattgaaggctgttggcttcaaggtattcccatccagtggaacctactttgtggttgtagatcacaccccttttggactgggaaatgatgttgcattntgtgaatatctaattaagg

SEQ ID NO: 252755 - DNA, 508 bp, Glycine max
  unsure (1)..(508): unsure at all n locations
atgcttattctgatattganagatactgttagcactctcgaagagctatgacgtcgcatgcacgcgtacgtaagctcggaattcggctcgagtgcatgcaaccatagttttattaggattttttcttctttgttttcaattaggtttttttgttgctctccttcaaactccatctttccaaatcctctctttgcgattgtgttttgatctgcttcctactgcgatagtttctctactgttacatggccatggcggtttccgcaattggttttgaaggtttcgagaaaaggttggaaatatcctttttccagccgggactttttgctgaccctgaaggaaggggtctaagggctcttacaaaatcccagttgggtgagattctaacaccagctgcttgcaccattgtttcttcgctcaaaaacgataatgtcgactcctatgttctatctgagtccagcctctttggttatgcctacaagatcatcatcaaaacctgtggtactactaa

SEQ ID NO: 252756 - DNA, 508 bp, Glycine max
agtatgtgcaaaagaagaaaatgtgacactctcgaagagctatgacgtcgcatgcacgcgtacgtaagctcggaattcggctcgagcaaacgcagccaaaacaacaactaacggcaaaaattttttcccaacccaagggaaaaccggggccacaaaaaaagtaacacacacgcacacacgcatcatcgtataacatttgttttattttttttaaagagcgagtgttgtaacaaatggtgaagtcgaagagcgtggagaaacctgcggaggaacaacaacgaggtggtgtttcagcgtacagaggagtacggaagaggaagtgggggaagtacgtgtcggaaattaggctgcccaacagccgtcaaaggatttggttgggttcctacgacagcgccgaaaaggcggcgcgtgcattcgacgcggccatgttctgcttacgtggcagcggtgccaactttaatttcccgagcgaccggcccaacatcgctggcgggaggaacatgacgcc

SEQ ID NO: 252757 - DNA, 510 bp, Glycine max
tagcagtctgccgataatgaacgaaacgatgacactcctcaagagctatgacgtcgcatgcacgcctacgtaagctcggaattcgcttcagtaaaccaacgcaacattggtatacttttcaatccatgggtttggcccattagcaaaccgggggttaccctaagttcaaacctggtaatcgtcggtgatgggggcccaggaaagacaaccttggggaaaaggcttttaaccgaaaaattcaaaaggaattatgagccaaaccatccggtgtggagggttcacccattggaatttttcacaaactgtggaaagattcgattctactgctgggatactgctggacaggagaagtttggtggcctcagagatggatactatatccatgggcaatgtgctattataatgtttgatgttactgcccggctaacatacaaaaatgtttccacctggcaccgtgatctttgcaaggtctgtgaaaacatcccaattgttctttgcggtaacaaggtt

SEQ ID NO: 252758 - DNA, 508 bp, Glycine max
  unsure (1)..(508): unsure at all n locations
ttgcgtagtgtgctattgccatgattgatgtactcctcatagaagagctatgacgtcgcatgcacgcgtacgtaagctcggaattcggctcgagaagaatttctatgacgattcgcaaccccatgcgacgaatccgtctcctccactccttctccgtcgtcttcctctactggttctacgtcttctcatgaactaactccctctcaatcccctaccctaattcctccaatttccccattttttttctaattaatcagatttgcaaaatcctaatttctctatcctaacaaaacccccaaattcaaacaaatccaatggcttcgattccgcgtccggcgagttcgggatcttcggagggaggaggagatccggctgcgatggacgagagaaagaggaagcggatggagtcgaaccgcgagtccgcacggcgatcgcggatgaagaagcagaagctgctcgaagacctatccgacgtancgagtcgccttccaggcgagaacgtgcgctn

SEQ ID NO: 252759 - DNA, 508 bp, Glycine max
taggtgtcttctatatgcaggggaatgatgatatcctctagaagagctatgacgtcgcatgcacgcgtacgtaagctcggaattcggctcgaggtaaattaagagcatggctgcacaagctcttgtatcatcatcttctcttaccttctcagcggaggctgcaagacaaagtcttggaccaagatcactccaatctccatttggcttctccagaaaagcctcctttcttgttaaggcagctgctaccccccctgtcaagcaaggatcagacaggcctttgtggtttgcatcaaagcaaagtctttcttacttggatggcagccttccgggtgactatggatttgaccctctgggactttcagaccctgaaggaacaggagggttcattgagccgaaatggctagcatatggtgagataatcaatggtcgttatgcaatgttgggtgcagttggtgcaatagcacctgaaattctaggcaaggctggtctgatccctcaggagacagca

SEQ ID NO: 252760 - DNA, 490 bp, Glycine max
gatggatgtctcttaaacgcgggggcgatcggagagattctccaagagctatgacgtcgcatgcacgcgtacgtaagctcggaattcggctcgagaggttacatgaagccatttctctttttaaatcttcccaacaccgagttcaattcttcacaagttgattgtaatcactcaatggctcattcttcttatccctacggcgatccaatttttgcttatggaccacaagctattagtcatccccaaatgatacccccgatgctgggactagcatccaccagagtggctttgccacttgatcttgcagaagatggaccaatttatgtcaatgcaaaacaataccatggtatactgagaaggcgtcagtcacgagcaaaacttgaggctcagaacaaacttatcaaaaatcgtaagccatatcttcacgagtcttggcaccggcatgctttgaatagggttaggggatcccgggggcaatttctaacaccaa

SEQ ID NO: 252761 - DNA, 494 bp, Glycine max
  unsure (1)..(494): unsure at all n locations
ggagaggttctcttacggacgggggagggggggagatcttcagagctatgacgtcgcatgcacgcgtacgtaagctcggaattcggctcgagctcattcaagtcgctaatcctagttccttcaactcctcgctggcaacatcagcagtactaccattagccgcgtttttcaaaagtgattttcgagaattagcgatgggaattgaaagaggaggcttcaagggattcaggagcgcctggagcgtgccgcccaagccgtgcgattcctgcaagctggcctcggcggcgcttttctgccgccccgattccgcgtttctctgcatcgcctgcgattccaacattcactgctcgaacaaactcgcgtcgcgccacgagcgcgtgtggatgtgtgaagtgtgcgagcaggcacccgctgctgtcacgtgcaaggccgacgccgnncgcctttgcgtcacgtgtgacttcgacattcaactcggcggaaccccctggcgc

SEQ ID NO: 252762 - DNA, 507 bp, Glycine max
ctggggtctgcttaaacgaatgattgatggtattcactcatgagctatgacgtcgcatgcacgcgtacgtaagctcggaattcggctcgagtgtatgtctcactgtcttggctctacagagaactgtatagagagagatggtagctgcaacatctggtgctgtggtaaacgggttaggatcttccttgttgagtggacgaaacaagagccaaacccttacggccactgatattgtaagcaaagttggtgctgctgctgatactggtagccctagaatactcattgtggtagctgctgctgcaccaacgaagtcatggctgcctggtgtcagatgtggtggcaaccttgacgacccagaatggcttgatggatcgctaccaggtgactatggctctgacccactaggtcttgggaacgacccatcattccttcaatggtacagagaagctgagctgattcatgggagatgggcaatggctgcagttctaggaatctttgtgggccagg

SEQ ID NO: 252763 - DNA, 505 bp, Glycine max
  unsure (1)..(505): unsure at all n locations
aggttgtgcaattagtataatatgtgacactctcgaagagctatgacgtcgcatgcacgcgtacgtaagctcggaattcggctcgagcaccggagatcggtaccggcgggactgcgacgtgatccggaatttgtcggcggcgttcgcgaagagcgtgggattggccggagacggaagagacgcgtgggtgttcgacgtcgacgagacgcttctctccaatgtgccttactaccaaggcgtcggattcggatctgagatcttcaatgagacttcctttgataattgggtggacttagctgctgccccagctttgccagccattttgagtttgtataacgagcttaaggaattgggcttcaagatattcttcttaactgggagaagtgagtttcaaaggaatgccacagaaacaaaccttctgctttcagggtacagagattgggagaggctcatcttaagagggtcttctgatcaagcangcccagcactacatacaagtctgaga

SEQ ID NO: 252764 - DNA, 509 bp, Glycine max
  unsure (1)..(509): unsure at all n locations
aggggnnnnnnncatcgtagtaatatgttggtaatcctctagaactatgtacgtacgatgcacgccgtccgtaagctcggaattcggttcgaggttcactggagggaagggtttgaatttggctttttccggcccagtggaacccttaattttctctttcaattacttcaccaaaatttcaaggtagctttcttttgagaagaaagattagggccccaccagtaaagagacaagtttattggctttggccgctgctcaatcacccaccaccagcatggccaggacagctattccgaaccttctgatttcaagacatgggatgggcaaaaacctattctgtctaggatctacgggttcaattggaactcagacactgagtatagtggctgagttcccagaaagatttaaagttgtgagccttgctgctggctctaatattactcttcttgctgaccagaataaaacatttaagcctggaagttgtggtcttagaaatgagtctttaattg

SEQ ID NO: 252765 - DNA, 511 bp, Glycine max
  unsure (1)..(511): unsure at all n locations
nagtgntttctgctatagacgacttatagtaacactcatagaagagctatgacgtcgcatgcacgcgtacgtaagctcggaattcggctcgaggtgatgttgacatcaggaaagacctgtacggtaacattgtcctttcaggaggtacaaccatgttccctggcatcgctgatagaatgagcaaggaaatctctgctttagccccaagcagcatgaagatcaaggtggtagcacctcctgagagaaagtatagtgtctggattggaggttctatcttggcatccctgagcaccttccaacagatgtggattgcgaaggcagagtacgacgagtctggaccatcaattgttcatagaaagtgcttctaaattgtttgagcaatagggttattgaagaaaaagatagttgttntattcctcgggaagaaatgctgcttgcttgtaaccctttcattctattctaacttttggtactcattcacgttattctctggagtggtgatttggagaag

SEQ ID NO: 252766 - DNA, 512 bp, Glycine max
  unsure (1)..(512): unsure at all n locations
aggggtnntnnccatcgacggacgatgggtagatattcctcaagagcnatctatgacgtcgcatgcacgcgtacgtaagctcggaattcggctcgagctcgagccgccgagtgccgatgttactgcgatacacattccatcaattaatcttcacaaggcagatcttgttgttgatgtgctcatcaagaacccgaatccggtgccgatccctctgattgacatagattacttggttgacagtgatggaaggaagctagtttccggattgatacctgatgcgggtaccatccatgcacatggagagcaaactgtcaaaattcctgtcactttgatttatgatgacatcaagcaaacatatgctgatattaaacctggaagcatcattccttatagggtgaaggttagtctcatttttgatgttcccatcttgggaaggctaactctacctttggagaaaactggagaaattcccataccatacaagcctgatattgatcttgagaagattcatt

SEQ ID NO: 252767 - DNA, 490 bp, Glycine max
  unsure (1)..(490): unsure at all n locations
aggtgtcttcaacgggcgggggagggtgggaatctctatgagctatgacgtcgcatgcacgcgtacgtaagctcggaattcggctcgagctntgttgttcagttccgttgttgtgttgtgtgctgcaacacaatcggtggtctgagaaatcttgtttgtgttgggtttgttatggctcggagagcagaggaagagtacgattacctgttcaaggttgtactgatcggtgattccggtgttggaaaatccaatcttctgtcccgattcactcgcaacgagttttgcctcgaatccaagtccaccattggagtcgaattcgccactcgcactcttcaggtggagggaagaactgtgaaagctcaaatatgggataccgccggacaggaacgatacagagcaattaccagtgcatactacaggggtgcccttggagctcttctagtctacgatgtaacttaacccaaccccttttcaaaaccttagccgatgg

SEQ ID NO: 252768 - DNA, 488 bp, Glycine max
  unsure (1)..(488): unsure at all n locations
aggggtnntcaactgacgaataaggacggaatcctatagacgatctctgacgatgcacgcgtacgtaagctcggaattcggctcgagctcgagccgaaccctttttgcgtgaagggtcgcgtctactgtgacccttgccgtgctggttttgagacctcagcaaccacctacattgccggtgctgagattatgttgcaatgcaagagcagggttagcaacgaggttgtgtacaccaagaaggggtacactgactcaactggagcatacacaatgtacgtggacgaggatcacgcagatcaaatatgcagtgccaagcttgtaagcagccctcaccctcaatgcacggaagtcaccccgggccgcgacgaagccgtcgttattctcacccgctacaacggcattgcatccgatgataggttcgccaatgccatgggcttcatgtctcaagagggtgcttctggctgtgcttaagtccttaagcaatacaa

SEQ ID NO: 252769 - DNA, 524 bp, Glycine max
  unsure (1)..(524): unsure at all n locations
nagggagtagctggtgttcngcctaccgtagncctcactgtaacaccatagaagagctatgacgtcgcatgcacgcgtacgtaagctcggaattcggctcgagggagaagagatgcagctttatcacagccaattcagatcccatctatattgcttatcatgatgaagaatggggagttccagttcatgatgacaagatgttgtttgaacttctagttttaagtggtgctcaagtaggatcagattggacctcaatcttgaagaaacgccaggatttcagggctgcattttctgaatttgatgtagcaactttggccaacttgactgataagcaaatggtgtcgattagtttggaatatgggattgatataagccgagttcgaggtgttgttgacaatgctaaccgaattttagagattaacaaggactttggttcatttgataaatacatttgggggtttgtcaatcacaaacccatcttcactcaatacaagttcggccacaggatcccagttaagacatcn

SEQ ID NO: 252770 - DNA, 522 bp, Glycine max
  unsure (1)..(522): unsure at all n locations
tggagtnacgantgtcnngcctaccgaatcatcgacgcagtactgctaacactatctaaagagctatgacgcacgctgccctcagccgggaactcggctcgaggaacagtttatcaatggcacttctccacccaaatcttcttgccactgtcaattccaacactcttacctttccttccatcaaactcaaaccctcactctcgcacgtgccttctccaacccccacacgcttcagtctctctgtttccgcggcggaaaccaccgcttttgccgcccctcccactccccaacctgagaagcttggagttgtagttaagccaacggagaagccgagacttgtgttgaagttcatatggatggagaagaacattggaattgcgcttgaccagatggtaccgggccatggcaccattcctctgagcccatattacttttggccccgaaaagatgcctgggaagagctcaaggagttgcttgagaacaagccctggatctctcaaaagcagatgattattcttctcc

SEQ ID NO: 252771 - DNA, 516 bp, Glycine max
  unsure (1)..(516): unsure at all n locations
aggagtagtgngtttacctacgaagctcacagcanttcgatanacccgctgaagagctatgacgtcgcatgcacgcgtacgtaagctcggaattcggctcgaggcgttgccattctcatcctcctctgtctctctctctccaccattgccatggatccttacaagctccggccatccagcgccttcaattctcccttctggactacaaattctggtgctcctgtttggaacaacaactcctctttaaccgttggagctagaggtccaattctgcttgaggattatcatcttgtggagaagcttgcaaactttgacagggaacgtatcccagaacgtgttgtccatgccaggggagctagtgcaaagggtttctttgaggtcacacatgacatttctcacctgacatgtgcagatttccttcgagcccctggagttcagacgcctgtaattgttcgtttctcaactgtcattcatgagcgtggtagccctgaaaccttgagggaccctcgaggtttt

SEQ ID NO: 252772 - DNA, 517 bp, Glycine max
  unsure (1)..(517): unsure at all n locations
gagtagtagtggattttactacgattaaagcatcctacagttannaccatagaagagctatgacgtcgcatgcacgcgtacgtaagctcggaattcggctcgagcacaaactaagaagccatactcacatcacacaacacaaccgtcctcaagccaacaacaccttctcagatcttacaatgatatttcaatcgtgttttatgatgactgcaactctgctattatttgttatagcacaatgtgttgtgggagttaattcactttcacaagctgataagataagcactttgccagggcagccaccagtcaaattccagcaatatgctggttacattacagtggacgacaagcagaagagagccttgttttactactttgttgaagctgaagtggaaccagcttcaaagccactagttctatggttaaatggagggcctgggtgntcttctgttggagctgnagcttttggtgaacatgggccctttcaacccaagggaaatgggcctttggagaaatg

SEQ ID NO: 252773 - DNA, 521 bp, Glycine max
  unsure (1)..(521): unsure at all n locations
nagttaggggaggggttatcttactgagacagcgtgttattgctaacactcatagaagagctatgacgtcgcatgcacgcgtacgtaagctcggaattcggctcgagtgcagaagagcgtcgcagttgtaaccctaatcagaagaagcgcagcttcaagcgagtgacagccaccagccatgggtcgtatgcacagccgcggtaagggtatatcctcttctgctttgccctacaaaaggacacctcctagctggctcaagatctcttcgcaagatgtcgaagaaaatatctgcaagtttgcgaagaaaggtttgaccccgtctcagattggtgtcattctcagagattctcacggtattgctcaggtcaatagcgtcactggcagcaaaatccttcgcatcctcaaagctcacggacttgcgcctgaaattccagaggatctgtaccatttgattaagaaggcagtttcaattaggaagcatcttgagaggaacaggaaggacaaggactncaagntcaggt

SEQ ID NO: 252774 - DNA, 511 bp, Glycine max
  unsure (1)..(511): unsure at all n locations
agtnngaggcccctttgtcngaatacacgcactttactgtaacactctagaagagctatgacgtcgcatgcacgcgtacgtaagctcggaattcggctcgaggcgctaaattatatgtcatgtttccaaggattatttttctgtccataggcaacttctttgcttcttcacaacttctgcatctatcatatcagtcctcctgggcatgagttgggagctgctgcaatttgttctgatgatccagtcccttctgctgaagacttagcagatcaaataatcgaggttctcaattattgtcggctcggcgcagtgatgtgtatgggagtatcgtctggtgcttatatcctttcgctatttgcaacgaaatatagggagcgtgctcttggtttaatacttgcatctcccttatgcacatctgcttcttggactgaatggtcctataacatggtgatgtcaaatttgctatacttatatcgtgcgcgtcgcttgttgaaagagtggctgctccacc

SEQ ID NO: 252775 - DNA, 506 bp, Glycine max
  unsure (1)..(506): unsure at all n locations
agggagggtcnttaggtctgattcacgcataaggcgtcactctctagaagagctatgacgtcgcatgcacgcgtacgtaagctcggaattcggctcgagaaaaagaaaggggttctcattctcagcgaatttgctggtgctgcacagtcacttggtgctggggctattctggtcaacccttggaacatcacagaagttgctactgcaattgccaaggctctgaatatgccatcggcagaacgagagaagagacataagcataactatgaacatgtaaaaactcacactgctcaggaatgggcagaaacttttgtaagtgaactaaatgatactgttgtcgaggcacagataaggacaaaacaagttccaccacggctcccaacagagactgcagttgaacgttatttgcagtcaaataatcggttgcttattttgggtttcaatggaactttaactgaaccagttgagagagaaagtgatcggtttaaagaaagggaactcactgt

SEQ ID NO: 252776 - DNA, 508 bp, Glycine max
  unsure (1)..(508): unsure at all n locations
aggggaggggtagggtcnaaaaccgaaacatccgccatataaagtaacactctagaagagctatgacgtcgcatgcacgcgcacgtaagctggctcgagctctcacccacacgtaaacaagaacaattcttcattgaatgaagtacaagcttctcaagcattccactcattaacaaacaagaaacgatggcctacaaatgtatcatatatagcctcattagttattcatctgtagtgtcaaattataaagatttcatgtctaagaagctccttctacttcaatcaattcttagactttagtctccaaatgggatgttataacttgtacgaattccagatgagcttatcaagaatgccaagtacatagccacaccagggaaggggatcctggcagcagatgagagcacgggcaccatcgggaagcgcctagcgagcattaacgttgagaacattgaggccaaccgncaagcccttcgcgagcttctcttcaccgctccaaatgccctcc

SEQ ID NO: 252777 - DNA, 505 bp, Glycine max
  unsure (1)..(505): unsure at all n locations
nagggagttccntaggtctgataccgaggtacgcgncatctctctagaagcgctatgacgtcgcatgcacgcgtacgtaagctcggaattcggctcgagtttccatccatttaattccccacaaccacgctcacctaagtttcaatttcaatcccttttctttttccgttacaaaataattcaaaattccctccctcatttacccttgtttgtgtaaagtagtagcagagtgagactaggtatcatcgatggcagggtacaagggcgatgacgaatacgattacctcttcaagctggttctcatcggcgattccggtgtcggcaagtccaacctgctttcgcgcttcacgaggaacgagttcaatttggagtccaagtccaccataggggttgagttcgccaccaagagcttggacatcgatgctaaggtcatcaaggctcagatttgggacaccgctggccaagaaaggtaccgtgccattactagtgcttactaccgaggagc

SEQ ID NO: 252778 - DNA, 514 bp, Glycine max
gagttaggagagttatctgattaaagcaacgaaagtgattgtatagactagctatgacgtcgcatgcacgcgtacgtaagctcgaattcggctcgagcctcctttttctcgggactagctctgtgcattcgtatctggctctctgcctttcatcacactcggcattatctctcccaagatagtagaagatggcagacactgaggatattcaacctcttgattgtgacaatggaacatgaatggttaaagctggatttgctggagatgatgccccaagtgctgtgtttcccagcattcgtagtcgtcctcgttacactgatgtgatggttggcatgggccataaagatgcatatgttggtgatgaggcacaatctaagaggggtattttgactctcaagtaccgcattgaacatggaattgtgagcaattgcgatgatatgagaaagatttggcattataccttctataatgaggcttgtgttgccccataagagcatccagttctcttaactga

SEQ ID NO: 252779 - DNA, 515 bp, Glycine max
  unsure (1)..(515): unsure at all n locations
naggagggaggttttgngaaagacgacgncggggagaacggaaacactagctatgacgtcgcatgcacgcgtacgtaagctcggaattcggctcgagcaagcccattgatggacaaaagactggaaccagtgggcttcgaaagaaggtgaaagtgtttatgcaagacaattaccttgcaaattggatccaggctctgtttaattcattgccaccggaggactacaagaatggtttgttggtgttgggaggtgatggtcgatactttaatcaggaagctgcacagataataatcaaaattgctgctggaaatggtgttggaaaaattctggttggaaaggaaggtattttgtcaacaccagccgtttctgctgttataagaaagagaaaggcaaatggtggatttattatgagtgcaagccataatcctggcggacctgaatatgattggggtattaagtttaattacagcagtggacaacctgcaccagaatccatcactgacaagatttatggn

SEQ ID NO: 252780 - DNA, 520 bp, Glycine max
  unsure (1)..(520): unsure at all n locations
naggtacggacgtgtctctgaaacaagacaaagaacagaaactactctagaacagctatgacgtcgcatgcacgcgtacgtaagctcggaattcggctcgagctcttcttccccaccatcacaccaaccaaacctcactctcgctgccatggtcatgggagcctttcgccacttcgaaccggtttccaaatgcagcaccgaaaaccggtttaaccaaaccgtggcctcggacttggacggcaccctcctggtgtcccctagcgcctttccttactacatgctcgtcgccatcgaagccggcagcttcctccgtggccttgtcctccttggatccgtccctttcgtgtacttcacgtacatattcttctccgagaccgcggccatcaagtccctgattttcattgccttcgcgggcctgaaggttaaggacattgagatggtcgcgtcctcggtgctgcccaagttctacaccgaagacgtgcaccccgagagctggagagtcttcaactcctttcggaaa

SEQ ID NO: 252781 - DNA, 511 bp, Glycine max
  unsure (1)..(511): unsure at all n locations
aggaggtcgggttgtgtacggaaggggggaaacggaaacactctagaagagctatgacgtcgcatgcacgcgtacgtaagctcggaattcggctcgagcaaggccctcctccagtgctgccgcgaccacggcgtgaacttcttcgacaacgccgaggtctacgccaacggccgcgccgaggaaatcatgggccaggccatccgggagctgggctggaagcgctccgacattgtcgtttccaccaagatattttggggtggacaggggcccaacgacaaggggctctcccgcaagcacgtcgttgagggaaccaaggcctncttgaaacgcctcgacatggaatacgtggatgttctctactgtcaccgcccggattcctctactcccatagaggaaaccgtgagggccatgaaccatgttattgataggggctgggccttctactggggcactagcgagtggtcggctcagcagatcaaccgagcgtgggctgtggctcagagattggacc

SEQ ID NO: 252782 - DNA, 512 bp, Glycine max
  unsure (1)..(512): unsure at all n locations
aggggnnatgcnttagagtcgtgttacagacgactacccgcacagaaaccgagacgctctatgacgtcgcatgcacgcgtacgtaagctcggaattcggctcgaggacagttccaggacttggtcagtacatctctggtgccattctctttgaggaaactctctaccaatccacaactgatggcaggaagattgttgacgtgctcctcgagcaaaacattgttcccggtattaaagtcgacaagggtttggtaccccttgctggttccaacgatgagtcatggtgccaaggtcttgatggtcttgcctctcgctcggctgcatactaccagcaaggtgcccgtttcgccaaatggcgtactgttgtgagcatccccaacggtccctctgctctggcagttaaggaagcagcctgnggtctggctcgctatgccgcaattgctcaggacaatggattggtcccaattgtggagccagagatcttgcttgatggggagcatggtattgaccgaa

SEQ ID NO: 252783 - DNA, 505 bp, Glycine max
  unsure (1)..(505): unsure at all n locations
aggtagttntccctagctctgattacagcattancagctcacactctagaagacctatgacgtcgcatgcacgcgtacgtaagctcggaattcggctcgagattttgcttcagacgtgaaggttgtcagatgggggcggtctgtatatgcaaatattcagaaatttatccagtttcagcttacagtaaatgtggccgctctagtgattaatgctgttgctgcagtttcgtctggtgatgttccattaaatgcagtgcagcttctttgggtgaatcttatcatggatactctgggagcgctggccctggcaactgaaccaccaactgatcacctcatggatcgaactccagtgggtcgaagagaacctctcataacaaatattatgtggaggaatttgctgatacaggcaatgtaccaagtgtctgtcttgcttgtactcaatttccgaggcataagcatactgggtctgagccatgacagaagataccatgcaatcaaagtgaag

SEQ ID NO: 252784 - DNA, 505 bp, Glycine max
gtaaggagggtttgctaccgcatggaagtaaatgttagaccgctatgacgtcgcatgcacgcgtacgtaagctcggaattcggctcgagattcctcacaaagattggtatcctgaacaccccttcatgggacactgctggagagttggagtacttcacagacaccaccacactcttcatagttgagctctttttcatcggttgggccgagggtagaaggtgggctgacatcatcaagccaggctgtgtcaacactgaccccatctttcccaacaacaagctcacaggaactgatgttgggtacccaggtgggctttggtttgacccacttggctggggaagtggttctcctgagaagatcaaggagttgagaacaaaggagatcaagaatgggaggttggccatgttggctgtgatgggggcatggttccagcacatttacactggcactggtcctattgacaacctctttgctcaccttgcagatcctggccatgctactattt

SEQ ID NO: 252785 - DNA, 511 bp, Glycine max
  unsure (1)..(511): unsure at all n locations
gaggagggaggttctggtaaagcatggaagtatctgtaagaccagctatgacgtcgcatgcacgcgtacgtaagctcggaattcgggtcgagctctatctctatctcttctttctctgtctcttttctggttgaagtttgaaagacanatacaccatggcagatatcctgagtgaagaacagattgttgattttaaagaggcctttggcttgtttgacaaagatggagatggttgcattactgtggaagaacttgccactgtcattcggtcattggatcagaaccccactgaagaagagctccaagatatgataagcgaagtcgatgcagatggcaatggaaccattgaatttgacgagttcttgagcttgatggccaagaaagtcaaagacactgatgcagaggaggagctcaaagaagctttcaaggtttttgacaaagatcaaaatggctacatatcagctagtgagttgagacacgtaatgatcaatctatgggaaaaacttaccgg

SEQ ID NO: 252786 - DNA, 511 bp, Glycine max
gaggagaaggggtttcgtacgaaaccgagagtaaaggaagcactctagaagagctatgacgtcgcatgcacgcgtacgtaagctcggaattcggctcgaggctcccgattgtctcaaattgcttgcggctttcgggctggatctgcaaaagcatggagatggcgcgcattgttgaattgcctcacacctacatggatcgacccccaagagagagagcgcgattgagctgtgacatcgctgaggcccccaaagctcaagtaggatcgttttgaggacaagaggttgagaatattgcaagctatgctccttcagaacatacgcctagatctctgtttaagggagttgcccgaaatgggactgccccatggcgagatgatgacaaagatggccattacatgtatgagcttggagatgatttaacttgtcgctatatgatccatagtgaaatgggcgaaggaactcttgggcaggtcttggagtgctgcgacagagaaaggaaggaaatggttgc

SEQ ID NO: 252787 - DNA, 519 bp, Glycine max
  unsure (1)..(519): unsure at all n locations
gagtagtnaagggttntgtacgaaaccgacggtaaatagaatacactcatagaagagctatgacgtcgcatgcacgcgtacgtaagctcggaattcggctcgagggaaaaagaaaaagaaaaagaaaaagcatacaacgatggctatgaatggatcacctcgacggtgggacgtgagattagttttgacattttctctacttttaatctcagcctctgtttctgctcttgaacatgtaaaccacaaaaagattgatcccaccaccgctgaaactagttttcttggcaaagtcatgaactttttgtggagctcatctgggtctggatacgaacatacttggccagaaatagaatttgggtggagaataataacgggtacgataattggattcgtaggatctgcattcggaactgtgggtggtgttggtgggggtggcatctttgtcactatgctctcccttattattggatttgatgcataatcagctactgcaatctccaagtgtatgattaccggtgg

SEQ ID NO: 252788 - DNA, 502 bp, Glycine max
  unsure (1)..(502): unsure at all n locations
gagtaggccntaggtttgatacacgcatanccgctcactctgtaaaagcgctatgacgtcgcatgcacgcgtacgtaagctcggaattcggctcgagcaccaacaagtgtttctgtaaccatggcatccaccactctatcccctacaaccccttctcagctatgctcaggaaaaagtgggattttcagttcctcacaggcacttcttgtgaagccagtgaagaggcagatgatggggaagagcaagggattgagaattgcatgccaagccaccagcatttccgctgatagagtccctgacatgggcaaaagacagctcatgaatcttcttcttcttggtgccatttcactccccactgctggaatgcttattccctacacctacttctttgtccctccaggttcacgttcttcagctggcggtactgttgccaaggatgccctttgaaaatgatgtaattgccgagaattggctcacggcacatggacccggtgcccaaccc

SEQ ID NO: 252789 - DNA, 512 bp, Glycine max
  unsure (1)..(512): unsure at all n locations
agtagggagggcttgtctccggcgacgggcggtaaatgtaaagactcagctatgacgtcgcatgcacgcgtacgtaagctcggaattcggctcgagcgcgtcgctccgcaccagtttcaccgcacgaatatcttgttgtttggagcgatccgagaaaaactctgtaaacatgttggtttaccaggacctccttacaggtgatgagcttctctctgactccttccgttacaaggaaattgagaatggaatgctgtgggaagttgaggggaagtgggttgttaaaggagcagttgatgtagacattggtgcaaacccttctgctgagggtggaggagaagatgagggagttgatgatgcagctgttaaggttgttgacattgttgacacattcagacttcaggagcaacccgcattcgataagaagcagtttgttaccttcatgaagaggtttatcaagaatttgacttccaagctcgatgcanagcaacaggagttgtttaaaaaagcacatt

SEQ ID NO: 252790 - DNA, 511 bp, Glycine max
  unsure (1)..(511): unsure at all n locations
aggagaagggtcnattacggcgacgagggtaaatggcaacactctagaagagctatgacgtcgcatgcacgcgtacgtaagctcggaattcggctcgagctcataacacaaagcacaaagcaaagctcatccttgagttaaaaaatggcagcagcttcttccatggctctctcatccccatccttggctggcaaggccgtgaagctgggcccatcagccccagaagtgggaagggtgagcatgaggaagaccgtcaccaagcaggtctcctcaggaagcccatggtacggcccagaccgagtcaagtacttgggcccattctctggcgagcccccgtcctacctaaccggtgagttcccaggcgactacggctgggacactgctgggctttccgcagacccagaaaccttcgccaagaaccgtgaactcgaagtgatccactccaggtgggccatgctcggagccttgggctgcgtcttcccggagttgctgtcccgcaacggggtgaagt

SEQ ID NO: 252791 - DNA, 510 bp, Glycine max
  unsure (1)..(510): unsure at all n locations
ngaaggaggatgtggtaaggggaagaggggtaaatgtatagactagctatgacgtcgcatgcacgcgtacgtaagctcggaattcggctcgagattttgagtattcagcatcaatggctccaattgcagtgggaaacgtgattccagacggcattttggcttacttggatgaagaaaacaaaccccaaactgtctccattcactctctcgccaccggcaagaaagtcatcatctttggggttcccggtgccttcactcctacttgcagcttgaagcacgttcctggcttcattgagagagcagaagagctgaaagggaagggtgtggacgaaataatctgtatcagtgtgaatgatccatttgtgatgaactcatgggccaaaacattcccagagaacaagcatgttaagttccttgctgatggtgcagccaaatacaccaatgcccttggtcttgagcttgacctcactgacaagggtctcggcgtccgctcaaagaggtttgctctgc

SEQ ID NO: 252792 - DNA, 513 bp, Glycine max
  unsure (1)..(513): unsure at all n locations
gtaggttagggtgttttacgacacgggaagtgattgtaaagactagctatgacgtcgcatgcacgcgtacgtaagctcggaattcggctcgagggacacagtgctacatcaggtggtattctagacagagctattgaagcagaggacagaaagcatggagatttcttgaggctgaatcatgtggaaggataccttgaattgtcagcaaagacaaaaacctactttgccactgctgtgaacttatgggatgctgatttctatgtcaaagttgatgatgatgttcatgtaaatatagcaacactgggacaaactctagttaggcatcgatcaaaaccacggatatacattggatgcatgaaatctgggcctgtcctatcccaaaaaggggtaaggtaccatgaacctgagtactggaagtttggagaggctggaaacagatacttncgtcatgccacaggacagttgtatgccatttcaaacgatttggctacatacatatcaattaacccggaa

SEQ ID NO: 252793 - DNA, 507 bp, Glycine max
  unsure (1)..(507): unsure at all n locations
agtaagaccgtctctgcttacggagacgacagaaatctctagaccagctatgacgtcgcatgcacgcgtacgtaagctcggaattcggctcgagctctacaatggnctcagnccgatccccaacacttctctgtcctcactcggccacctttcttctcctccaccggcacctccgcctccccctccccctcgcgcgtgcagctcacctcctccctccgcgcccgcccgctgcgccgcctgngcttcgccgcggcggacccgctgctcgcggcgagtgtagcggcgcgcgtggcggcggtgagaggaggaggaaagggcgcgagggggntggtgtcgatggcgaagaagagcgtgggggacctgagcgcggcggacctgaaggggaagaaggtcttcgtcagggccgacctcaacgtcccgctcgacgacaaccagaacaccaccgacgacaccagaatccgcgccgccattcccaccatcaaacatctcatccaaaacggcgcccaa

SEQ ID NO: 252794 - DNA, 524 bp, Glycine max
  unsure (1)..(524): unsure at all n locations
gagtaggagcgggtnnnntttcgaagacggcgctntactgcagtcactcatagaagagctatgacgtcgcatgcacgcgtacgtaagctcggaattcggctcgagatcgaattgaatcgaagagtgaagaaagatgcttccctcatttctaagcctggtgtcagtgtacagcctctacctccgacgctgcttcacgggcgcggggctctcatcgcagacgcttagagtggacgacgaatccacgctccacttctgggccccgacaaacccaacggcccagaagccttccctggttctgatccacgggtttgggccggagtccatatggcagtggcgcaaacaggtccaattcttagcccctcacttcaacgtgtacgttccggacctaatattcttcggaggatcgagcaccaagtccagcgaaaggagcgaaacgtttcaggcagcgtcggtggggaagcttttggacaagttggaggttgagaagttccacgtggtggggacgagttatnggggcatggggg

SEQ ID NO: 252795 - DNA, 504 bp, Glycine max
  unsure (1)..(504): unsure at all n locations
agagaggtcntagagtttattaaagaacaacggcgtatctctgtaaaagcgctatgacgtcgcatgcacgcgtacgtaagctcggaattcggctcgaggggactctgttgaaagcaacggggacaccgaacttggtggattattttccagtgttgagggtgtttgatccacaagggatcaggaggcacaccaccaactacattgacaagttgttcgatgtgttcgatcccatgattgatgaacgcatgaggaggaggggagagaagggttatgccactagccatgacatgttggatatcttgctggatatttctgaccagagtagcgagaagattcataggaagcagatcaagcatttgttccttgacctattcgttgcggggacggatacaacagcctacggcttagagagaacaatgacggaactaatgcacaatccagaagccatgagaaaagcgaagaaggagatagcagaaacaataggagtaggaaaaccggtggagg

SEQ ID NO: 252796 - DNA, 497 bp, Glycine max
aggagtcctaggtttataaagcaagcagctaatatgtagaagcacctatgacgtcgcatgcacgcgtacgtaagctcggaattcggctcgaggttcttgcgcattcattttcagcttatgatactagaagaagggtgtgcgaaaatgcagttgtttcaggcatctaacgatagagaagatgagaatgcaaagattgacgaagctggcgtggatctgaaagtgatgattgaagaaatggaatccatggctgagccttcagatggcatatgaccaatctgccttgaaccaatgcaagaccctgtgacccttcgcactggtcaaacctacgacagatacaacatccttaaatggctctcacttggtcactgaacatgtcccacagcaatgctagagctgtgacacgatgttgtcactctcaacagcacactttggcacttgatgttgacttggttctgtcgaatgtacttggacatgaataccaagctcaaggatggtcc

SEQ ID NO: 252797 - DNA, 500 bp, Glycine max
  unsure (1)..(500): unsure at all n locations
aggagtcntaggttngcacacgcagaaggtgtcactctgtagaagcgctatgacgtcgcatgcacgcgtacgtaagctcggaattcggctcgagctcatcttatactcaccggcgagtccatctcgcgccagcgtcgtagccgctccggccaccgcctttggttccctcactttctcgtccttcttcttctcagaaatatgccttctcaaaaagttgaaacgggtcatcaagacacggtccatgatgttgcaatggattactatggtaagaggctggccacggcttcatcagatcacacaattaagataattggggtgagtaatacggcctctcagcatctcgcaacattgactggtcaccaaggacctgtttggcaagtggcgtgggctcaccctaagtttggttctctacttgcatcgtgttcctatgatggtcgtgtcattgtttggaaggagggcaaccaaaatgaatggactcaagctcatgtgtttgatgaccc

SEQ ID NO: 252798 - DNA, 511 bp, Glycine max
agtaggagttttgataaagcaacggagagtaattgtatagactcagctatgacgtcgcatgcacgcgtacgtaagctcggaattcggctcgagcattgagaaagctgagaaacagccaaatctcactattggaattcttgtagcggttgtggttgtcttcgtgtcaattttcttcaggctcatatttggtggcaagaaacctgcaaaggtggagaagaaaccagaacgcacagaagcttccaataaccaaggtggtgcagagaatgaagaaaacaaagagaaagaggaagcatctaatgctccgcgtcggaggccaaggcgagaagattgaaatggttgaatcttttaaatggcgccctgtcaactatcatcaccacagctacagataaattttgggctttagtttcattttaggtgcactctgttttcattcgtttccttttttccctttttttttaagaaaaagaaaagattatttgcttcaggggtgtagatcttctcctggttttgt

SEQ ID NO: 252799 - DNA, 517 bp, Glycine max
gagtaggatcgtcgtgtcaattcccagactatcgtatcactatttaagatctatgacgtcgcatgcacgcgtacgtaagctcggaattcggctcgagagttttcctttaacatacacactaatatcgtgtcagaatagcttcctaaccatatcaccattgccacatatagttcacactcatgaatagtgccactaaaattctattcaattcatcaattcctatctccacttattctatacattatcatcactgtcaaaccctgatatccgcatcatcagcaaatctactgcgaaccaatctcgctctcctactccacacataatagagactaatagcctatgacttcactctatctctatcaaacatcatcttcttatgtacacatttctttatacaactttcctttatcatcaaaatcaatctttaatctttaatagataactttgcattctccatttaatcaacagcaaatttcatacctatttcccatttttacatttccctaagtttaaatcg

SEQ ID NO: 252800 - DNA, 497 bp, Glycine max
agtagggcctggttgatatcgaatacgcgtatcatctagaagacctatgacgtcgcatgcacgcgtacgtaagctcggaattcggctcgagtttgcacatttggaaagtgttgtttttctttttttcatttgcattgcaaagcaaaaaccttgcaaattgcaatggcttccaacaaggttattgccaccatcttggttctttctctccttgcctactcaacatcattcaccaatgcatgtggcacatgccacccaaaacctactccttctccccctcctccatcagggaagtgccccaaggacacattgaagctaggggtgtgtgctgatgttctaggacttgttaatgttgttgttggttcccctgtctctagcaagtgttgtgcattgcttgaaggtttggctgattcggaggctgcactttgcctttgcactgctattaaggccaatgttcttggaatcaacttgaatgtgcctatcacaatcagtgtgctact

SEQ ID NO: 252801 - DNA, 500 bp, Glycine max
  unsure (1)..(500): unsure at all n locations
agaaggtntaggtttgaaacagcaaaggaagtaactctgtagaagagctatgacgtcgcatgcacgcgtacgtaagctcggaattcggctcgaggcgcaaaggggaacaagaagaagaagatggtgtccttgaagcttcagaagcggctcgccgctagcgtcctaaagtgtggcagaggcaaggtctggctcgatccaaatgaagtcaatgaaatctccatggccaattctcgacaaaacataagaaagttggttaaggatgggtttattatcaggaagccaactaagattcactctcgctctcgtgctcgtcgaatgaaggaggccaagaggaagggacgtcactctggctatggtaagcgtaagggtacaagggaggcaaggcttcccaccaaaatcctttggatgaggaggatgcgtgtcctcaggcgcttgcttcgcaagtacagggaatcaaagaagattgacaagcacatgtaccacgatatgtacatgaaggg

SEQ ID NO: 252802 - DNA, 507 bp, Glycine max
  unsure (1)..(507): unsure at all n locations
tagggaggncgctaggtgtgagattcgtactacgcgtatcctctagaagcgctatgacgtcgcatgcacgcgtacgtaagctcggaattcggctcgagagttatcctcataaatacactctaattaggtggcaagataagtgtctaaccttagtaacattgccacatattgtgttcattttggaattgtgccactaaaattctattcaattcatctatggctgcctcttcttatgctatgcaatcaatcctggcaaaccctgtgatccgcattttcagcgggtctagggtgaaccaatttggcgttcctgctttgcacatgagaaggaatgttggcctgagagttaggtccatgtctaaggaagatcaaccaagtgagcctgcaacctcagttacaccgtcactcatcagtagaacccatgccacagctcagtctctgctccttcaccaaaggtgagcactaagttttctgatgtgttggcattcagtggtccagcatctgagaggg

SEQ ID NO: 252803 - DNA, 530 bp, Glycine max
agggatgaaagggttcttgcttacgcggggacggggggaagaatgtaaagactcagctatgacgtcgcatgcacgcgtacgtaagctcggaattcggctcgagtgaatcagcaccacattcacctgagctttttgggaagattccaaagcatgggtttccttgcagcattcactggtggtggtttccttggcatgtcagaaatgcttggaaaccccattaaccttaatggtggcacaagggccacttcatttggctctaacccttggctctttaagactggggctcttttcttccaaaagaaaggctgaacttcaaaaaaaagctgcaactgcttgctcctgccaatgatgagcttgccaagtggtatggtccctgacagaggatcttcttgcctgagggtctcttggaccgatctgagatcccagagtacttgaccggagaagtccccggagactatggttatgacccatttggtcttaacaagaaagccagaagatttttccaaatatcaggcatttggaattgattc

SEQ ID NO: 252804 - DNA, 523 bp, Glycine max
  unsure (1)..(523): unsure at all n locations
gagttagtaggggtctnngtcgcgcgatgggggggaagaaggtaacacttcagctatgacgtcgcatgcacgcgtacgtaagctcggaattcggctcgagggctcgacaaaaaggccactagctctggggagaagaatggtctcatttttgatctcgtggtgggacttttggaggctctcttcttaccatcgaggaggtattttcgaggtgaaagcccctgctggtgatactcacttgggaaggtgaagattttgataacagaatggtgaacccatttttgttcaggaattcaagaggaagaacaagaaggatattagtggaaatgccagagctctgaggaggttgagaacagcatgtgagcgggcaaagaggactctctcttccactgctcaaaccaccatagagattgattccttgtacgagggtattgacttctacacaaccattacccgtgcccgttttgaagagctaaacatggatttattcaagaagtgcatggagcccgtggagaagtggttgccg

SEQ ID NO: 252805 - DNA, 520 bp, Glycine max
  unsure (1)..(520): unsure at all n locations
gagtaggaggcttggttaacgcatangaacgtaatcgcannaccatanaagagctatgacgtcgcatgcacgcgtacgtaagctcggaattcggctcgaggtcgatgctcatcctacataacctccgagctctacaccgaataacgaagccatggggaagacacatggaatgggagctggtcgcaagctcaagtctcaccgcatgaggcaaaggtggactgataagtcatacaagaaatcccatcttgggaatgaatggaagaaaccttttgccggttcatcccatgccaagggaattgtccttgaaaagataggtattgaagctaagcagcccagctctgctattcgtaagtgtgccagagttcaacttatcaagagtgggaagaaaattgcagctattgtccctaatgatggttgcttgaactacattgaagagaatgacgaagtcttgattgctggatttggacgaaagggtcatgctgtgggagatattcctggtgtcagatttaatgttgagaag

SEQ ID NO: 252806 - DNA, 509 bp, Glycine max
  unsure (1)..(509): unsure at all n locations
agtagtgaggttgcttatgtaagggggtaaacagaacactatagaagagctatgacgtcgcatgcacgcgtacgtaagctcggaattcggctcgagcagctgcagcttgcgcaaaacttgctttggactgcaccgtcttcatggccgacaaagacatccacagacaatattcaaatgtgaggttgatcaagttgttgggagctcaggttgaagcagtagatggagggttcacagatgcagcatcagaggcgtttcggtattgggtaggggatttggaaaacaggtaccacttgagtggctcagcggtgggaccacacccgtgtccaaccatggttcgggagtttcagtcagtgatagggaaagaaacgaggatgcaagcattggaaaaatggggtgggaagccagatgttcttgttgccagcgtagggactgggtcaaacgctttgggtctgtttcatgagtttatagcagacaaagatgtgaggttcgttggagttgaagctgnnggt

SEQ ID NO: 252807 - DNA, 508 bp, Glycine max
  unsure (1)..(508): unsure at all n locations
ngaggagttcttaagttttgaacacgccatcgggcgataatantgtaaaagcagctatgacgtcgcatgcacgcgtacgtaagctcggaattcggctcgagttttgcattttttgctaacaataatattgagaacttgcatgatgctgatcacatttaagatatgactatcatatatacgcaatgtagaacagataaacacacccgtattctcacatatagctgctgctatctacactccacccacacatttgatgaaacgtgtccctagctaggtctactactacatgcagcttcccaatttgattacctcaaaatgcactactaggctacccaattgagcaataaagcctataatttcacatgaaacagctaccgggaaggcttaaaatatgccagagcagcacaacttacaaagagctagctagctaataacacgacgcagacacacacataatctcaaacgctgacgcagagtgcatagccaacatcatcgtgcatacccaacc

SEQ ID NO: 252808 - DNA, 513 bp, Glycine max
  unsure (1)..(513): unsure at all n locations
ngaggaggacggtttggtaacgacacgaagagtagctgtaaagaccagctatgacgtcgcatgcacgcgtacgtaagctcggaattcggctcgagaggacccatttaacccattcaaccattaccaacaacaacagcatgggcctcaaaaagtgccggcaccactcattccaacgccgcaacctgctccgnctcatcctcggcgccatcgcggccttcgtcgtcctcatcctcctcgtcatcttcctcatctgggtcatcctccgccccacaaagccccacttcaccctccaagacgccaccctctacgccttcaacctctccacccccacacccaacaccctcaccctcaccatgcaggtcaccctctcctcccacaaccccaacgcgcgcatcggcgtctactaccacgcgctccgcgtctacgcctnctaccggagccagcagatctccctcgccaccgcgctccccgacacctaccagggccaccgcgacttcggcgtctggtcgccgt

SEQ ID NO: 252809 - DNA, 506 bp, Glycine max
  unsure (1)..(506): unsure at all n locations
gagggagaaggttttggtcaggggacgagaggaaatgtttagaccagctatgacgtcgcatgcacgcgtacgtaagctcggaattcgctcgaaagagacttcagaatgtcagaccaaaaggaaactgtgtgggttgatttccttgtgggggctggtatcaagccaacatctatagtcagttacaaccatctgggaaacaatgatggtatgaatctttcggctccacaaactttccgttccaaggaaatctccaagagcaacgttgttgatgatatggtcaacagcaatgccatcctctatgagcctggtgaacatccagaccatgttgntgttattaagtatgtgccttacgtaggggacagcaagagagccatggatgagtacacttcagagatattcatgggtggaaagagcaccattgttttgcacaacacatgcgaggattccctcttagctgctcctattatcttgggacttggtcctttctgctgagctcagcactagaa

SEQ ID NO: 252810 - DNA, 515 bp, Glycine max
  unsure (1)..(515): unsure at all n locations
ngggagagaggcgtgncgtccgtaacgcggggtaaacggagaccttctagaagagctatgacgtcgcatgcacgcgtacgtaagctcggaattcggctcgagtctagaatctcgttcttcctttcttctctcagattccccctttgcctccttcttcaaccccttttctttctctctctgtctttcgcactttcattctctcttaaaaatctaaatcccttttggtcttcatctttgcctctgacccaggtatggcttcgaaacgcatcctgaaggagctcaaggatttgcagaaggatcctcctacgtcatgcagcgcaggtcctgtggctgaagacatgtttcactggcaagccacaatcatgggacctgctgatagcccatatgccaggtggtgttttcttagtttcaattcattttcctcctgactatcccttcaagcccccaaaggttgtttttcggactaaggtgttccacccaaacatcaacaggcatggccagaatatgtcttgaca

SEQ ID NO: 252811 - DNA, 517 bp, Glycine max
  unsure (1)..(517): unsure at all n locations
ggagagtttttgataaagcatgcgggaggacggagacactctataagagttnnncnnnnnncggncgcggccgtaagctcggaattcggctcgagatccaatcctcgcacacatgcatgctgtctctgccaaagttggggccaagtcataactacatttccattgttacgattctttctttccatcccaaccacttattaagcgtctgatccaatttctttctcttaccatggatcattggaaaccattggtacccaatttctctgaccaagcttcaaattcacgcactctggaaagagctctggctaaagagatgcgcggttggtttgcgctctcttcccttggtgcctttggagggtacagggcctccaacgcgccacatgctgacgtgtcatcgccagcatcgaacgatgaacaacctagtcccacatcggtgccttctccgaaatggtacccggttacacggtgtgtttcttctggggtgtcggaaaagtcattaagcatgttgtttgcggga

SEQ ID NO: 252812 - DNA, 513 bp, Glycine max
gaggagtaaagcctgtttacggaaggggggtaaaggagacacttctagaagagctatgacgtcgcatgcacgcgtacgtaagctcggaattcggctcgaggatgtatctggaaatttggaaggtaaaaaatttgaaggacctggagggggcattgagtggcttaggtggcatccaagaggacacatactcttagctggttctgaggatttcagcatttggatgtggaatactgataatgctgccttacttaatacatttattggtcatggtgatagtgtaacctgtggtgattttactcccgatgggaaaataatatgtactggttctgatgatgcaaccttgagaatatggaatccaaaaactggagaaagcactcatgttgtgcggggccatccatatcataccgagggattaacatgcttgacaataaattcaacttcaactcttgctctttcttggtctaaggattgattcgtccattatgtggatatcaccacaaggaagaagtgttg

SEQ ID NO: 252813 - DNA, 519 bp, Glycine max
  unsure (1)..(519): unsure at all n locations
agaagaagtnnnnnnnnnttgaattcgttggcacttccaaaaccccnannananangaagnngnatgcacgcgtacgtaagctcggaattcggctcgaggtggaaagagcaccattgttttgcacaacacatgcgaggattccctcttagctgctcctattatcttggacttggtccttcttgctgagctcagcactagaatcgagtttaaagctgaaaatgagggaaaattccactcattccacccagttgctaccatcctcagctacctcaccaaggctcctctggttccaccgggtacaccagtggtgaatgcattgtcaaagcagcgtgcaatgctggaaaacataatgagggcttgtgttggattggccccagagaataacatgattctcgagtacaagtgaagcatgggaccgaagaataatatagttggggtagcctagctgaatggtttatggtaataatatggttgcttataatttggcaagggtaatggatgcttcagcttattaatgc

SEQ ID NO: 252814 - DNA, 506 bp, Glycine max
gagggaggtgcgctaggtctgatacccgcataacgcgtcactctgctagaagcgctatgacgtcgcatgcacgcgtacgtaagctcggaattcggctcgagaatttgacggtgtcggtgattcaccaaattctatctctctagctctctcaaatctcaattcactcattcattcaccctttcgtctctatctcaatttcactatgtattgcctacaattcagctaaccgcaccaattccgatggccgcgtagcggcggctacaggacctgcaatcccaaccgtcgaacaatatctgcgtcgactgttcccagaagaacccgcaatgggcctcggactcctacggcgtcttcatgtgcctggagtgctacatcaagcaccgctgcctcagcgtcacatctccttcgtgcgatccgtgacgatggattcgtggtctgaaatccatatcaggaagactgaatccggaggcaacgacctactgaacgcgttactcttgcagaaccgcttc

SEQ ID NO: 252815 - DNA, 507 bp, Glycine max
  unsure (1)..(507): unsure at all n locations
nagggaggatcnctaggctctaaacaggaggtaacgaggtaacattttagaagcgctatgacgtcgcatgcacgcgtacgtaagctcggaattcggctcgaggtgggagcaatacatatcattcattcagaggcaacacacgagttgtgaattaagagcatggctgcacaagctctcgtatcatcatcatctcttacctactgagccgaggctacaagacaaagtcttggaccaagatcactccaatctccatttggcttctcaagagaagcctcctttcttgttaaggcaactgctactccccatgtcaagcaaggatcagacagacctttgtggttagcatcagagcaaagtctttcctacttggatggcagccttacgggtgactatggatttgaccctgtgggactttcggaccctgaaggaacaggaggggtcattgagccgaaacggctagcatatggtgagataatcaatggtcgatatgcaatgttggtgcagtggtgc

SEQ ID NO: 252816 - DNA, 503 bp, Glycine max
gagagacatgttctgaacagagaacgcgtaaaacgaaacactctataacagtctattagccgcatgcgcacgctcggaattcggctcgaggcttgcagggactgaaaaccttctcttacccttctctcaagtttcaagagatttcatcatggctccaaagaaggacaaggctccaccaccttcctccaagcccgccaaatctggcggtggcaagcagaagaagaagaagtggagcaagggaaagcaaaaggagaaggtgaacaatatggtgctgtttgatcagggcacctatgacaagctcctttctgaagctcccaaatacaagctcatcactccttccattctctctgatcgtttgaggattaatggatcacttgcaaggaaggctataagagaattgatggcaagaggttctatcaggatggtgtctgcccatgcaagtcagcaaatttataccagggcaacaaacacctaggtggtgaactgatcttagtttacggagt

SEQ ID NO: 252817 - DNA, 534 bp, Glycine max
  unsure (1)..(534): unsure at all n locations
nggtagatggtnnnnnttacgagactttatggatcactctagaagagctatgacgtcgcatgcacgcgtacgtaagctcggaattcggctcgagatgtacactgcgtctctttatgcagcatttgcctccctcattcacaacaaacatagcacattggcaggtaagagggtgatattattctcatacggaagtggcttaactgccacaatgttttctttgcaattacgagacagtcaacatccgtttagcttgtcaaacatggctagagtgatgaatgtcgatggaaaattgaagtcaagacatgagtttcccccggaggagtttgttgaaaacttgaagttaatggagcatagatatggtgcgaaggaatttgtgacaagcaaggacagtagccttttatcttcgggcacattctatctcactgaagttgactccatgtatcggagattctattcaaagaaaacttaagaaagcaagttgactcacgctgagaacggtgtgaatgcttatggcggtgctaatgggcactgatg

SEQ ID NO: 252818 - DNA, 534 bp, Glycine max
  unsure (1)..(534): unsure at all n locations
gggtagcggggtcngaaacgagactatacggtactatggaacactcttgagaagctatgtgcacgcgtgacgtaagctcggaattcggctcgagtgaaaaccgactgttagtaatgaatccagagaagaagaccataattccaactgaatacttgggagtgaagttgatctcttttggatttgctggacaaggacgtgcaataatgcgtggccccatggtttctggagtcattgatcaacttctgactactactgagtggggtgagctggattacctcattattgacatgcctnctggaactggagatattcaactcacattatgccaggtagttccattaactgctgctgtaattgttaccactcctcaaaagctgtcgttcattgatgttgcaaaaggagttcggatgttttcaaaacttaaggtgccttgtgttgctgttgtggagaatatgtgtcattttgatgctgatggaaaaacgatattacccatttggcagaagtttaaggtgttaggatgtttaacaatttttt

SEQ ID NO: 252819 - DNA, 529 bp, Glycine max
  unsure (1)..(529): unsure at all n locations
nggtagtaaggtctgagaaagaactttatgtacntccngaantcnntnnnnntnnttgacgtcgcatgcacgcgtacgtaagctcggaattcggctcgagctagaagcagctatatgaagaactaaagaggacagagagagataagagagtgtgtgaaatggatgtcgagaaaatgccctacatacacgctatgctgtaagagcttgttataaagcacactgcaacacactgtgtgctaacacatgctgggactgaacccaccacttttggctgacttgacataccaacatatgcctgtggggtaagtggcacaccatgcattgctggtgacccgctcaattgttcaaaccctgataaggttgaccccgctaggatcatctctgtgggctacgaatcatacctgaccgtcgtaacatgcctgtacatgattgcttttcgcgttgtcagaaggatctgccccggatcggcttagaacgaccgcatttcaactcagatggctgttaatgcgccgagtttgaagcggttctt

SEQ ID NO: 252820 - DNA, 532 bp, Glycine max
  unsure (1)..(532): unsure at all n locations
ggtagcgtagttgctcagcnatgatgcactacatanttcagttatgacgtnngatgcacgcgtacgtaagctcggaattcggctcgagattcttaacttatactccgaattatatggacataatgatggataactctcctagggctnttagatccttcttacgtggtgaatgctcacgtggtgatgagggcttgaatggactgggagccgggagacttggtgtgacttcactcgcaccattgtgttgcctacctgctgcatggtctatatagggatgccatgacaatggctgcgtctaacgaatcatcactgatgctcaaggatctaacaagatgctcaactcagctgcagcaagtattcaaaagcaacttcctggtgttaagattgcaatcctcgacatttacaagcctttctatgacctcgttcaagcccattgctaatctgaggatgtggaggccaaccaaaggttgctgggtaaccggactgtcaagacaacaccttgattggtattgcaaattctcaggaactagag

SEQ ID NO: 252821 - DNA, 505 bp, Glycine max
agtagttcctagagttgtgctgagtacagcacacttcgtatcaccatagaagagctatgacgtcgcatgcacgcgtacgtaagctcggaattcggctcgagctttaaaactttcataacacaaagcacatagcaaagctcatccttgagttaaaaaatggcagcagcttcttccatggctctctcatccccatccttggctggcaaggccgagaagctgggcccatcagccccagaagtggtaagggtgcgcatgtgcctgaccgtgccctatctcgtgtcttaaaggagcccatggttccgtcctgatcgagtcacgtactcgtgcctatgcaacagcgagcggaactcctacataccagctctgttcaaaggcgcttgccgatgaggcgtcaagttccttcagcgtgcatagaagcacctctagcgtttcccataaaagcaagaacatgtcatggagccggactaaacatcgttagatgtctgtaaaaggtgcaattcatcat

SEQ ID NO: 252822 - DNA, 507 bp, Glycine max
  unsure (1)..(507): unsure at all n locations
aggggaggggtagggttttnaacgaanctagggggaataacggaacactctagaagagctatgacgtcgcatgcacgcgtacgtaagctcggaattcggctcgaggttcagcagataaggtaatctcaaagctcgtcgtgttttcgcatcaatggccatggccatggctgaggcttcaagaatcacgttacactccactctcctccctttttttacccccaaaacccacgttggtcaccgccacttaagcctctcgtcatcacgcaagcaccaagtccagtgctcggtgtctgcaggcgcggcggctcagacgaacccagtggcttggggctgcgagattgactcgctggagaactcttcggctctgcagagatggctgtcggagtcggggcttccgccgcagaagatgggaatagagagagtggaagtgggagagagaaggctggttgctttgaagaacattaggaaaggggagaaactactctttgtgcctncctcacttgtcat

SEQ ID NO: 252823 - DNA, 507 bp, Glycine max
  unsure (1)..(507): unsure at all n locations
agtgagtnnnnttagagtctgttacggaatacagcatataacgaaacactctagaagagctatgacgtcgcatgcacgcgtacgtaagctcggaattcggctcgagtccgaaatttggtgactggtatgaattctatgaccccgcgcaccgcaaaacctattccatcgagttgccagagttgaggggatctagagtttgttacaccaaagatggttggttactgctataccgacccagaactcaccgtgtgttcttcttcaatccctttactatggagattatcaagctgccaaggtttgagatgtcataccaaatagttgccttctcttgtgctccaacatcacctgactgtgttctgtttactgttaagcatgttagtcctactgttgtggccatcagcacatgttaccccggggcaacagaatggaccactcttagttaccaaaaccgcttgccctttgtcagtagcatctggaataagcttgtgttttgtaatggactcttct

SEQ ID NO: 252824 - DNA, 537 bp, Glycine max
ggtagactgaggttaaaaagaactatatagtagacactatagaagagctatgacgtcgcatgcacgcgtacgtaagctcggaattcggctcgagagaagaacatgtagttgagaactaagaaggagaagcaaatggcttcctcaatgatctcttccccagctgttaccactgtcaaccgtgccggtgccggcatggttgctccattcactggcctcaagtccatggctggcttccccaccagaaagaccaacaatgacattacctccattgctagcaacggtggaagagtgcaatgcatgcaggtgtggccaccagttggcaagaagaagtttgagactctttcctacctgccagaccttgatgatgcacaattggcaaaggaagtagaataccttcttaggaagggatggattccttgcttggaattcgagttggagcacggtttcgtgtaccgtgagcacaacatgtcaccaggatacttcgattgacgcttcttggaccatgttgtaagttgccctatgttgggtggccggaac

SEQ ID NO: 252825 - DNA, 527 bp, Glycine max
  unsure (1)..(527): unsure at all n locations
agtagcgaagttgaaagaggacggggggaaaaggaacnatcttgagaagcttcatgcacgcgtacgtaagctcggaattcggctcgagcaagtggtcaggaatcactctacatgattggtggcgaaatgagcagttctggttgattggtggaacaagtgcacaccctgctgctgttttacaagggttgttgaaggtcatagcatgagtggacatatcattcactttgacctcaaagtcagccaccccagaagatggagatgatgagtttgctgatctttatgaggtgaagtggagctttctaatggtccctccaatcactattatgatggtgaattccattgctattgctgtgggggtagccaggactttgtacagtccatttccacaatggagcagactagtaagaggggtgtttttcagcttctgggttttgtgccatctttacccctttgcaaagggcctcatgggaaagagagggaaagtttctaacatcatctatgtttggtctggaatgctcttcattatt

SEQ ID NO: 252826 - DNA, 532 bp, Glycine max
  unsure (1)..(532): unsure at all n locations
ggtaggaagtgnttacgaggacgagcggtttatcgtaaaactctnnaanatctatgacgtcgcatgcacgcgtacgtaagctcggaattcggctcgagctcatgataagtgtgactataaccattgcccttggggatattcttctgttgtaaatttggacttgtctcatcctttcctagccaaggcaatccaagccctcaagccattgaggataagacttggaggttctttgcaagaccgggtgctgtatgatgtaggaagtttgaagtctccttgccatccccttcaaagtgttaaaggtgaattgtttggattttcaaaaggatgtttacacatgaaaaggtgggatgagctgaatcagtttttcaacgagacaggggccattgtgacatttggctngaatntactccatgggaagcaccagattagtcataatgtttgggaaggcgcctgggaccctacaaatgcttataattntatagagtacactatttcaaagggatacaagattgattcatgggaacttggtaat

SEQ ID NO: 252827 - DNA, 507 bp, Glycine max
  unsure (1)..(507): unsure at all n locations
aggggnagacgtgagtngtgatacgaantacggagtcttaatggaaaactctagaagagctatgacgtcgcatgcacgcgtacgtaagctcggaattcggctcgagcaaacactctgcagcaggagcgtacgcataactccccgccgtccggacatttcttggttcctgattcaccatggcaactatgagaggctgtaatcgatttgaaggatgaaccactggacttgtctataatttttgaaggaggaaagggttgtaacagcagatttttgttccatcatcatattatctgaacttctggtagaaaatggcagctgaagatgataggaatcttgtcgaaatcatggaaaccctgaatccaatagatgttgctaaatacatgaattttgttggtgccccccaagctggtgctatagctacattttcaggcacaactcgcgacacctttgaaggaaaaacagtcgtggagttgagatacgaagcttatgttccaatggcaatacgct

SEQ ID NO: 252828 - DNA, 508 bp, Glycine max
  unsure (1)..(508): unsure at all n locations
agtaggtnttntaggtcgtgttatgtagtaccagattattatagtaacactatagaagagctatgacgtcgcatgcacgcgtacgtaagctcggaattcggctcgagagaaatcatcagcattcacataggtcaggccgggatccaggttggcaactcctgctgggaactctactgcctggaacatggcatccagcccgatggcatgatgccaagtgactcctccttcggtgtagcccacgacgccttcaacaccttcttcagcgaaaccggatccggcaagcacgtccctcgcgccgtcttcgtcgatctcgagcccaccgtcatcgacgaagtccgttgtggcacttaccgtcaactcttccaccccgaacaactcatctccggcaaggaagatgccgccaacaactttgccagaggccactacaccgttggcaaagagatcgtagatctgtgcttggatcgcgtccgaaagctcgcagacaactgcactggtctncagggcttnc

SEQ ID NO: 252829 - DNA, 507 bp, Glycine max
  unsure (1)..(507): unsure at all n locations
naggagtnacctaggtttgattacgaantccgagagtataaagtaacactctagaagagctatgacgtcgcatgcacgcgtacgtaagctcggaattcggctcgagaaaattaatcatcttacttatttattctccgaaaatggttgatttacattggaaatcaaagatgccaagttccgacatgccttccaaaactctaaaactctctctctccgacaacaagtccttaccctctttgcaactacccttccgcaccacagatatctctcacgccgcaccttctgtttgcgccacttacgactactatctccgtcttcctcaactcagaaagctttggaactcctcagattttcctaattggaacaacgaaccaatcttaaaacctatcttgcaagctctcgaaatcaccttccgctttctctccattgttctctccgatccaagaccttactccaaccacagagaatggactcgcaggatagagtctcttatcacacatcaaattg

SEQ ID NO: 252830 - DNA, 536 bp, Glycine max
  unsure (1)..(536): unsure at all n locations
ngagttagagtcaatctggaacagaaccgtagtactctgtagaacagctatgacgtcgcatgcacgcgtacgtaagctcggaattcggctcgagctctagacttagattttgtgaatggctgaagtggaagagggacaggtcatcggcgtccacaccgttgatgagtggaagctgcaactccagaatgcaaaagactccaaaaaactgattgtggtggattttactgcttcctggtgtggtccatgccgttttatggccccagttcttgcagagattgcaaagaaaactcctgaattgatcttcctcaaagtggatgtggatgaagtgaggcctgttgctgaggaatattccattgaggccatgccaaccttcctcttcttgaaagatggcgagatcgtggacaaggtggttggtgctagtaaggatgaccttcaagccaccatagccaagcatgcatctgctgntgctgctggctctttttcttgaaagggagtttcttaatatggaagaagacccagaattatggggttttata

SEQ ID NO: 252831 - DNA, 530 bp, Glycine max
ggttgttttagttgataggggacgggggtgacttgtagaccagctatgacgtcgcatgcacgcgtacgtaagctcggaattcggctcgaggttcgcaaaggtggtgcttatactggagaggttagtgctggaatgcttgttaattggggaattccttgggttattattggtcactctgaacggaggcagcttttgaatgaatcaaatgagtttgtgggagataaagttgcctatgcacttcaacaaggtctgaaagttatagcatgcattggggaaactcttgaacagcgtgaagctggtacaacaacggctgttgttgctgagcaaacaaaagcaattgcagctaaaatatcaaattgggacaatgtcgttttggcctatgagccagtttgggccattggaacaggaaaggttgcaactcctgctcatgctcaagaggttcatgctgatttaaggaaatgggttcatgacaatgtgagtgctgaagttgctgcatctgtaagaattatctatggaggctccgtaaaagg

SEQ ID NO: 252832 - DNA, 540 bp, Glycine max
  unsure (1)..(540): unsure at all n locations
ngggtaggggtaggttgatagggggacgatcggtaatctctagaccagctatgacgtcgcatgcacgcgtacgtaagctcggaattcggctcgagatgggaactccagagacgtcaagggaaccatgtccagaccggatcctggaccacataggcggcgcctttcgcatgggcgccgggggtggggtccgctttcaatttcttaaagggcctctacaacgcaccaaggggcgcgcgtgtcgtcgccgcgtcacaagcggtacgcctcaacgcgccgcgcgtgggcggaagcttcgccgtgtggggcggcctcttcttcagcttcgactgcaccatggtctaccttcgccagaaggaggacccctggaactccatcttcggcggcgccggcaccgggcgcttcctcttcatgcgcccagggccttcccgccgnncgccggttccgttgggtcgggcggggtccttctcgctcttatcgagggcgccggattcatgctcaacaagttcctcatggcgcagaaaaccaattgccctatattgg

SEQ ID NO: 252833 - DNA, 538 bp, Glycine max
  unsure (1)..(538): unsure at all n locations
ngggtagggtcagttanttactgagaccgaagctctatgtaacactctagaagagctatgacgtcgcatgcacgcgtacgtaagctcggaattcggctcgaggtttattctctttctctgccctctcatcttcgagctccgatggcgagcctgtggcgcgcggcaaccggcatgacggacaacgccaccgattacgacggcgtcgagttctggtcgaaccccgagcggaccggctggctcaccaagcagggcgagtacatcaagacctggcgccgccgctggttcgtcctcaagcaaggcaagctcttctggttcaaggactccgccgtcacgcgtgcgtctcgtccacgcggcgtggtccccgtcgccacgtgcctcaccgtcaaaggcgccgaagacatcctcaacaagcccaacgccttcgagctctccacgcgctccgacaccatgtacttcatcgccgactccgagaaggagaaggaggattggatcaactctatcggccgctccatcgtccagcactccagatccgtcaccg

SEQ ID NO: 252834 - DNA, 541 bp, Glycine max
  unsure (1)..(541): unsure at all n locations
ggtagtntaaaggaataactgaaaggggggaaatggaacactatagaagagctatgacgtcgcatgcacgcgtacgtaagctcggaattcggctcgagtaaaagccttagccttccctacaactccaaacacaaagacatcatcatccatggctgcctccgtctccactgtcggagctgtcaacagagctcttttgaacctgaatggttctggagctggagcttcagctcccagttcagccttctttgggaccagcttgaagaaggttattgcctcaagggtccccaacagcaaggtttccggtggaagcttcaagattgttgctgtagaagagaagaaagagattgaagagacccagcagaccgacaaggacagatggaagggtctggcctatgatatctcagacgaccaacatgacatcacaaggagggaaaggtttgggttgactcccttttccaagctccacaaggattgctggaacttactatgccatcatgagcctcctacgagtaccttaaaactgggacttgtgcaggacttt

SEQ ID NO: 252835 - DNA, 536 bp, Glycine max
gagtaggactagtgagtactgagacggaactctatgtagcactcatagaagagctatgacgtcgcatgcacgcgtacgtaagctcggaattcggctcgagctcgagccgctcgaatattcactatggcagatgaggtggctctgctagatttctggccaagtccatttgggatgagggtcaggattgcacttgctgaaaagggtatcaaatatgagtccaaagaagaggacttgcagaacaagagccctttgctcctcaaaatgaacccggttcacaagaaaatcccggttctcatccacaatggcaaacccatttgtgaatctctcgttgctgttcagtacattgaggaggtctggaatgacagaaatcccttgttgccttctgacccttaccagagagctcaggctagattctgggctgactttgttgacaataagatatttgatcttggaagaaagatttggacatcaaagggagaagaaaaagaagctgccaaaaaggagttcatagaggcccttaaaatatttggaggacc

SEQ ID NO: 252836 - DNA, 537 bp, Glycine max
  unsure (1)..(537): unsure at all n locations
ggtaggctaaaggnagtactgaaagggggtatatagcaatcctctagaagagctatgacgtcgcatgcacgcgtacgtaagctcggaattcggctcgaggggttcaccaaatgggccattaacaatgtgtccctaacattgccaccaaccccttacttgggttctatcaagttcaaaataaagaatgcctttgacaaaacacccccaccagttaccttcccacaagattatgacatctttaaccctcccgtgaaccctaatgcatctattggcaatggggtgtacatgttcaaccttaatgaagttgttgatgtgatcttgcaaaatgcaaaccaattatctgggagtggtagtgagattcacccttggcacttgcatgggcatgacttttggattttggggtatggagaagggaaattcaaatcaagtgatgagaaggaaattcatttgacacatgcaccgctgagaaacacttgagtnatatttccataatggtggaccggtttgaaggttaaaggcttgtaacccagggagttt

SEQ ID NO: 252837 - DNA, 511 bp, Glycine max
  unsure (1)..(511): unsure at all n locations
aggggnagcctagagtttnaaacgacgnatcgccgactttaatgtaaacactcatagaagagctatgacgtcgcatgcacgcgtacgtaagctcggaattcggctcgaggtcagcaggtatcataggtctagccaacgacaaactctccatgcttggtcaattgtccaacaaatatggcaatgccttctcctattgtctcccctcatctttttcagcacaaccaaactcttctgtatcaggtttcttgtccattggagcctcatcattgtcatcatcaccatacaagttcactcccttggtcaagaatccaaagattccaagcttgtactttcttggtttgacaactatcactgtggcaggaaagccactaggagtttctgcctcaagctacaatgttcctaccataattgactctggcacagtaatcacaaggcttcctgtggctatttacaatgcattgaaaaaatcttttgtgatgatcatgtccaaaaagtatgcacaggcaccagg

SEQ ID NO: 252838 - DNA, 505 bp, Glycine max
  unsure (1)..(505): unsure at all n locations
tggagtccctaagtctgnttactgaaacaagcattgtatcgtaacactcatagaagagctatgacgtcgcatgcacgcgtacgtaagctcggaattcggctcgagtgaagagtgagagagagagagagagagaggcacttggaatccaaaaatgagagaaatcatcagcattcacataggtcaggccgggatccaggttggcaactcctgctgggaactctactgcctggaacatggcatccagcccgatggcatgatgccaagtgactcctccttcggtgtagcccacgacgccttcaacaccttcttcagcgaaaccggatccggcaagcacgtccctcgcgccgtcttcgtcgatctcgagcccaccgtcatcgacgaagtccgttgtggcacttaccgtcaactcttccaccccgaacaactcatctccggcaaggaagatgccgccaacaactttgccagaggccactacaccgttggcaaagagatcgtagatctgtgc

SEQ ID NO: 252839 - DNA, 536 bp, Glycine max
  unsure (1)..(536): unsure at all n locations
ngagttagagtaacttgataagagagaagacaggtattctctagaccagctatgacgtcgcatgcacgcgtacgtaagctcggaattcggctcgaggggcagtgggcaaatttaccgcctgaattgcttctggacataataaggagggtggaagatagtgagactacttggcctgcacgtgctgttgttgtttactgtggttcggtttgtaaatcatggagggctgttacgaaagagattgttaagactcctgaacaatgtggaaggctcacatttcctatttcgttgaagcagcctggtcctcgtgattctccaatacagtgctttatcaggaggaacagagaaacttcaacatatctattgtacattggcctggtaccatcggagaatgagactgataagttgttattagctgccaaaaaggtaagaagggcaacaggcacagacttcgtcatatcnttggttgcagatgatttttttcgctccagcatcacatatgttggaaaactcangtctaattatttgggtaccaagat

SEQ ID NO: 252840 - DNA, 547 bp, Glycine max
  unsure (1)..(547): unsure at all n locations
ngagttagttcttaagtctgataaacgaaacagacagtaattcgctagaacagctatgacgtcgcatgcacgcgtacgtaagctcggaattcggctcgagctattcttagatccaaaagtggtggtcggaaagcttgctcctatgctgatgcatatgatgtattcgaaagaatggcttattatgggatatcatcaaatttgatcctttatcttacaacaaagcttcaccaaggcacagtatcctctgcaaacaatgtcaccaattgggttggcaccatttggatgacacccatattaggcgcctacgttgctgacgctttgcttggccgctattggacttttgtcatagcctgcaccatttatctctcggttagtctctcaataagctactattgcttctaccaattttttagcctcttataacccccgtaagaggttcataatcaattcaattcatctagcataaatctcatcctattggnatctaaatatcatgtgttgacaccatctttaaaagagttggcctccctccaaaaaaaaaaaagaa

SEQ ID NO: 252841 - DNA, 534 bp, Glycine max
agttagagtagattgagtagggggacgagcggtaatctctagaccagctatgacgtcgcatgcacgcgtacgtaagctcggaattcggctcgagggaaagagtgggattttcagtccctcacaggcacttcttgtgaagccagtgaagaggcagatgatggggaagagcaagggaatgagaattgcatgccaagccaccagcattcctgctgatagagtccctgacatgggcaaaagacagctcatgaatctgcttcttcttggtgccatttcactcccctctgctggaatgcttattccctacacctacttttttgtccctccaggttcaggttcttcagctggtggtactgttgccaaggatgctgttggaaatgatgtaattgcagagaattggctcaaggcacatggacctggtgaccgaacccttgcacaaggattgaaaggagatcctacctatcttgttgtggagaaagacagaacccttgcaacatatgcaattaatgccgtgtgcactcaccttggatgtgtcgc

SEQ ID NO: 252842 - DNA, 539 bp, Glycine max
  unsure (1)..(539): unsure at all n locations
ngttagtcgtaactgnagtactgatacagccacttattagtattactcggagagacaagcttgcatgcctgcaggtcgactctagaggatcccctcggggaattccaattccacattttcaagaaataaggaggcaaaaatgttcatatatgaattggaattatttgttttcttattaggcctatcctgaagccaaaggaaatgagatcggaattcctcggggaattccaattccacattttcaagaaataaggaggcaaaaatgttcatatatgaattggaattatttgttttcttattaggcctatcctgaagccaaaggaaatgagatcggaattcctcggggaattccaattccacattttcaagaaataaggaggcaaaaatgttcatatatgaattggaattatttgttttcttattaggcctatcctgaagccaaaggaaatgagatcggaattcctcgggggtaccgagctcgaattccctatagtgagtcgtattaaattcgtaatcatgtcataactggttnctgtgga

SEQ ID NO: 252843 - DNA, 537 bp, Glycine max
  unsure (1)..(537): unsure at all n locations
gagttagggntaagtgnattactgagacgacaggttatgcatcactcatagaagagctatgacgtcgcatgcacgcgtacgtaagctcggaattcggctcgagattagtttggagaacagtgtctgctatcataaccacttgtggagcaatgctgattccattcttcaatgacgttgtgggacttcttggagcactggggttttggcctttaagtgttcttctaccagtgcagatgagtatcaaacaccagaggaccccaaggtggagtggtagatggattggtatgcaaatcttaagtgatgatagcttcatagaatcaggtgcggctgctgttggctcatgtgccagtatcgtgcttgacctacagaaatacataccgtgttatggagactattgaactccattcaccctctgctacataagctaaaaactgatgtggacagttatgcaggtttgcatatcttttgctgagatctgagattggacccaaaggtactctaacaactagaaacatttggactaatctcctgaaaaaa

SEQ ID NO: 252844 - DNA, 511 bp, Glycine max
  unsure (1)..(511): unsure at all n locations
naggttaggacgtagagtctangtactgatnacccgcactgtaccgtagtcacatagaagagctatgacgtcgcatgcacgcgtacgtaagctcggaattcggctcgagtgcagctttctccgacagcttcattcaccatggctgatcagaccgagaaggcttttgtgaaacaaccaatagtgtttctcagctcgaagaaaactgcgacgggatagagacccgcaaagggagagaaccgattttggaaatccattgggcttggattgaacactcccagactagccatctaatgaacctacattgacatgacgtgccggttcactgccgctgaccacattcgcgtatggatagtggctgtaacacttgacatagctatgatcatcacgactaccagtgtgaggtggatttacgttcacattaccacgcagcatacgagccgcgagcataggctgtacagcctgcggtgcctaatgtgtgagcttactcacatgaattgcgttgcgctcactg

SEQ ID NO: 252845 - DNA, 504 bp, Glycine max
  unsure (1)..(504): unsure at all n locations
gaggaggacttaggtctgttacgaanacgagggtataccgtaacactctagaagagctatgacgtcgcatgcacgcgtacgtaagctcggaattcggctcgagctctagttttatattcacacaacaaaccactaagaaaagagaggataaaccaatggctacttcactttcagcaactgggtgtgttggaacttccttctatggaagttggggcacttcaattgttggggaggattacaccatgctggccaagtcagtgccatcacaagttcgtatggggaggggaaagccagtgagattgcagcctatgatgaagaatgtcaatgaagggaaaggtatctttgcacctcttgtggtgatcactcgcaacatcgttggcaagaagcgtttcaaccagcttagaggcaaagcaattgctttacactcccaggtgatcacggagttctgcaaatcaataggagcagatggaaaacagagacaagggctgatcangttggccaaga

SEQ ID NO: 252846 - DNA, 510 bp, Glycine max
  unsure (1)..(510): unsure at all n locations
agggtagggcntagagtctgttactgaaaacgcgggtataacagaaacactctagaagagctatgacgtcgcatgcacgcgtacgtaagctcggaattcggctcgaggagagaaagaaattaagaaaaaatggcagcctgcactgtctactcaacacaatctctgagcacaaattgctccatctcaaccccatcaaagacacagctgagtttcttccaccaaaagcaggtagttttctggaggaacagcaacaggggcaacagcagcagcagaagaagctatgtgataacatgtgcagcaggtgactcacagacagtggtgattggtcttgctgcagactcagggtgtgggaagagcaccttcatgaggaggctgacaagtgtgtttggaggagcagcagagccaccgaagggtggcaaccctgactcaaacacactcatcagtgacaccaccactgtcatatgcttggatgattaccactctttggatagaactggcagaaaggagaaa

SEQ ID NO: 252847 - DNA, 505 bp, Glycine max
  unsure (1)..(505): unsure at all n locations
naggaggcntagggttaaaccgaagacccgcataatacggtagaactcatagaagagctatgacgtttcatgcacgcgtacgtaagctcggaattcggctcgagagagagtcctgaaacttgggtgcgattccttcactcacaacaacaacacatcactatggctcttctgagtcgagcctcttcacgcttccctcagctggtttcccctcaaagggtagtttcactccacacaacgctcccatctctgaacgcatccccatccacagccacgcctacaccatatgccccgccaccgcctccgtccgcttcctctcccgccggcgtttcgaaggcggcggagttcgtgatctcgaaggtggacgatctgatgaactgggcccgccgcggctccatctggcccatgaccttcggcctcgcctgctgcgccgtcgaaatgatgcacanccggcgccgccgctacgatctcgaccgcttcggcatcattttcaggcccagccctcgcc

SEQ ID NO: 252848 - DNA, 533 bp, Glycine max
agttagtcgtggtttgttacagatacgacagtactctctagaacagctatgacgtcgcatgcacgcgtacgtaagctcggaattcggctcgagctcgagccgctgcagagaatggaggagagagacagttcaatggccttgctgatgtctacaggaagacattgacatctgatggtgtcgctgggctctaccgtggcttcaacatctcatgtgttgcaatcattgcgtatcgtggtctgtactttggattgtatgattacgcgaaaccagttgtcctcaccggatcattgcacgatagctattgtgccagctatgccctctgatggctcatgaccaatggtgcaggtcttgcatcatacccaattgacactgctcgaagaagaatgatgatgacctctggtgaatctgtcaagttcaagagttccttggacgcattcacacagatcctgaagatgagggcgccaagtccttgttcactggtgccggtgctaacatccttcgtgccgatgctagtgctggtgtgctttctggac

SEQ ID NO: 252849 - DNA, 535 bp, Glycine max
  unsure (1)..(535): unsure at all n locations
nggtaggcgtaatctggtaggggatgaaggagaaatcgtaagaccagctatgacgtcgcatgcacgcgtacgtaagctcggaattcggctcgaggtatattacaaggctctactctactgcttcaccttctgctctagagaatctactggcgatacatggcttccgctactgtctctgcagccaaacgagccattcatgctaatgggaaaggcttctctgaattctatggcattcgcagatcatcaggctacacttgccgtatgtagaaaatcttcagaggatttgcattctggcattgccttccagacctatgcagttacaagcagtacacgatacatgaaggctgtgacagaagcaaaactgaatgctgctcataaaccgatatgcaaagattggaacgaactacttgacgcgctgtcacagtccgatagacttccgtcttgacgtcattggcattaacgacacccgtggcgcttaacaagactgtcaccttctcaagttctatgcgatcctaggaaaacttgatgctggtaa

SEQ ID NO: 252850 - DNA, 534 bp, Glycine max
agttagctagatgagtacggaacgagggtacacagtagtcactatagaagagctatgacgtcgcatgcacgcgtacgtaagctcggaattcggctcgaggaagctaaccgccaggcataccgtaccctccttgtgacagttccaggacttggtcagtacatctctggtgccattctctttgaggaaactctctaccaatccacaactgatggcaggaagattgtcgacgtgctcctcgagcaaaacattgttcccggtattaaagtcgacaagggtttggtaccccttgctggttccaacgacgagccatggtgccaaggtcttgatggtcttgcctctcgctcggctgcatactaccagcaaggtgcccgtttcgccaaatggcgtactgttgtgagcatccccaacggtccctctgctctggcagttaaggaagctgcctggggtctggctcgctatgcagcaattgctcaggacaatggattggtcccaattgtggaaccagagatcttgcttgatggggagcatggtatt

SEQ ID NO: 252851 - DNA, 502 bp, Glycine max
  unsure (1)..(502): unsure at all n locations
aggaggcctaggctgttatgaantcgggagtaaaagtatacactatagaagagctatgacgtcgcatgcacgcgtacgtaagctcggaattcggctcgagatcacgtttagttcgcacaaggttttaaaaaatggctgatgctgaggacattcaacctcttgttgttgataatggaactggaatggtcaaggcgggttttgcaggtgatgacgctcctagggccgtgttccccagtattattgggcgaccacgccataccggtgtaatggttgggatgggtcagaaggatgcttacgtgggtgatgaagctcaatcaaaaaggggtatactcaccttgaagtatcctatagagcatggcatagtcagcaactgggatgatatggagaagatttggcatcacacattttacaatgagcttcgtgttgcccctgaagaacaccctgtacttcttaccgaggcacccctcaatcccaaggccaacagagagaagatgacccatat

SEQ ID NO: 252852 - DNA, 505 bp, Glycine max
  unsure (1)..(505): unsure at all n locations
aaggagaacttaggtttgtaacgaanacggggggtataaggaaacactcatagaagagctatgacgtcgcatgcacgcgtacgtaagctcggaattcggctcgaggagagaaacaatggccaatgtttcaattccactcccacgaaacggtttctccaaacccaattactcgacaaaacgcccatgtttcaccccttcagcttcaacactcagaatttcttgctctggagtggctgagtttgatggatctcatcagaaaaaaggaggtttgtttaatttcaatggaatcaagggcgtggcttgtggtattcttgcagcttgtgctgttacttctgctgcatttcctgttactgctgctactcagaggcttcccccattgtcaactgagcccaatcgctgtgagcgtgcatttgttggcaacacaattggtcaggcaaatggtgtatatgataaaccattagatctccggcaatgtgatttcacaaatgagaaaaccaaccctaag

SEQ ID NO: 252853 - DNA, 503 bp, Glycine max
  unsure (1)..(503): unsure at all n locations
aggaggcntaagtttgttacgacaacgggggtataacagaaacactctagaagagctatgacgtcgcatgcacgcgtacgtaagctcggaattcggctcgagctttctgatggtagagattatattatgtacttgtttctggaatcatcgaattgatttccttgtgatatttgagtggtgagttactcaagaatgatgttgaagatggtatttgatttcctattacaagtttacttgggaaaatatttcatgtttcaaaaaaaaaaaaaaaaaaaaaagggcggccgccgactagtgagctcgtcgacccgggaattaattccggaccggtacctgcaggcgtaccagctttccctatagtgagtcgtattagagcttggcgtaatcatggtcatagctgtttcctgtgtgaaattgttatccgctcacaattccacacaacatacgagccggaagcataaagtgtaaagcctggggtgcctaatgagtgagctaactcacat

SEQ ID NO: 252854 - DNA, 538 bp, Glycine max
ggtaggcgtaagttgaaaagggggacggatggaaatctatagaacagctatgacgtcgcatgcacgcgtacgtaagctcggaattcggctcgagattttatccaattgaaattttaaaaatgactgggataaacttaagaattcaattattgaaattgaataagtaaacaatttaattggattggtcgaatggtatcaaaaaaatggagtactaactcccatttcttatttattattgaattaaccgatcaacttgctttgttatcgaacatttctttttgatttcaaaaattttccggaaaaaatttgaatctatttttatatgcgaatcaatcctactacttctggtcctgaggtttctgcgcttgaaaaaaaaaatctgggacgtatcgcccaaataattggtccggtactagatgtagcttttcccccaggtaagatgcctaatatttacaacgctctgataagtaaaggtccagatacctgttggtcaaccaaattaatgtgacttgtgaagtacaccaattattttgaaaaa

SEQ ID NO: 252855 - DNA, 535 bp, Glycine max
  unsure (1)..(535): unsure at all n locations
nggtagcgacagggctacgagaaggggggttaacggaaacactctagaagagctatgacgtcgcatgcacgcgtacgtaagctcggaattcggctcgagccgtgtcagagatctcttggactttagcatctacctagacattagcaatgaggtcaaattcgcttggaaaattcagagagacatggcagagcgtggacacagtcttgaaagcatcaaggctagcattgaagcaaggaagcctgattttgaagcatatattgatccacaaaagcaatacgcagatgcagtgatagaagtgttgccaacgcaactcattccagatgacaacgagggtaagattttgagagtgagattgatacagaaagagggggttaagtactttagcccggtttacttgtttgatgatggctctaccatttcatggataccatgtggaagaaagcttacatgctcctaccctggcatcaaattcttctatggacctgagacttactacgngaaatgaggtgtcagttgtagaaatggatggacaatt

SEQ ID NO: 252856 - DNA, 550 bp, Glycine max
ggagttagcgtgatgttgtactgatcaccgacatcattgctactactatgagagacttgcttgcatgcctgcacgtctactctagaggatcctctcggtgaattccaattccacattttcaagaaattaggaggcaaatatgctcatatatgaattggaattatttgttttcttattaggcctatcctgaagccaaaggaaatgagatcggaattcctcggggtattccaattccacattttcatgatataaggaggcatatatgttcatatatgaattgcaattattcgttgacttattaggcctatcctgaagccattggaaatgagatcggaattcctagtgtaattccaattccacatcttcaagatataatgaagcacttttgctcatatatgaattgtaatgatgggtctaccaattaatgcctatcctgtagccataaggctttgatatctggtattcctcggtggttacccttctctgatactctatacttgagtcggattataatgtgttaacatggtcaaaactgtttttccagtttgag

SEQ ID NO: 252857 - DNA, 533 bp, Glycine max
  unsure (1)..(533): unsure at all n locations
nggtaggcgagagtnnttacgaaacggagctttatgtagcactatagaagagctatgacgtcgcatgcacgcgtacgtaagctcggaattcggctcgagaacgaacttcgcatttccacgaaaatggcttcccaaaacccagcggaggaagaaaattcaaagcgacattggtcccttgaagacttcgagatcggaaaacctctcggtaggggcaaattcggtagagtttacgtcgccagagaagttaagagcaaatttgttgtggcgttgaaggttatatttaaggaacaaattgataagtacagagttcatcaccaactgaggagagagatggagatacagaccagtctccggcacgcaaacatcctgcgtctttacggttggtttcatgatgctgaccgtgttttcttgattcttgagtatgctcataagggagagctttacaaggagctgagaaaaaagggtcatctcactgagaagcaagctgccacgtatattttgagccttacaaaggcgttggcatattgtcatga

SEQ ID NO: 252858 - DNA, 511 bp, Glycine max
  unsure (1)..(511): unsure at all n locations
aggagttcnttaagtgtggttactgaantacggacgctgtattgtagacactcatagaagagctatgacgtcgcatgcacgcgtacgtaagctcggaattcggctcgaggttagagggagggtgaggatgcagggaattaaattagggtttacaataatgttggtggttgctggcattgtagcagtgccacgcatctcgggtcatgtatgcaatggtaattcgggtactattcaagaggaatgcgaggagtactataaacccggagggccaactattccgtcatctacagaatgctgcaacgctctgagaaatgttgatgtgccctgcatgtgccgacttgctaacaattttcagtcatacttcagcggtggaaaagctgtctataccctcaggcagtgtggaaaagatgttccttccggaaccacctgcggatgttaccgtgctccccctgcttatactcaagtgtgatacgtcagcattgaagacgtatgcatacaacttgcctgacct

SEQ ID NO: 252859 - DNA, 505 bp, Glycine max
  unsure (1)..(505): unsure at all n locations
agaaggggctaggtgtgttacgaantacaccgcactatatagtaacactctagaagagctatgacgtcgcatgcacgcgtacgtaagctcggaattcggctcgaggaaaaccattgttcaggcccatgaaaatctccgcccaggatcaatatttgtcaataagggagagctcttagatgctggtgtaaatcgcagtcctagtgcttatctcaacaatcctgctgcagagagaagcaaatttaagtatgatgttgataaagaaatgactctgttaaagtttgttgatgatgaatggggtcctttgggaagtttcaattggtttgctactcatggtacttcaatgagccgaacaaactcattaattagcggtgataataagggtgcagctgcacgatttatggaagactggtttgagcgaaaagggtctgtaagaatggattcggttggatttgaaaatgatggaatcccccgaagaatttaaacataattcccagccttcatgata

SEQ ID NO: 252860 - DNA, 503 bp, Glycine max
  unsure (1)..(503): unsure at all n locations
agaaggcgtaggtttgngacagatnacccgaactatatcgtaacaccatagaagagctatgacgtcgcatgcacgcgtacgtaagctcggaattcggctcgagcttgctgatcctcatcatgggaaccatttttcctcctcactctctctctccactcctcaacatcaaaccttcaccctcaagaattctcttggctccctgtccccaacccaagtcaaattctctcttttgctccaaacccattgtttcaagtctcagaaagaaccaaacttcatctcccaaaccttcatcgggcacaagctggttggctcatgctcaacagggcctagcagctttggctatctccttggcactcaactttagcccagttttgtttaatggcaatgcattggcatctgagtttgatgtgcttaatgagggtccacccaaagattcttatgtgtttgatgatgcatgagtgcttagtagggtgaccaggtctgatttaaagcagttgttgtct

SEQ ID NO: 252861 - DNA, 540 bp, Glycine max
  unsure (1)..(540): unsure at all n locations
nggtaggcttagatgtgagacgaaggatagaacggtaactctctagaacagctatgacgtcgcatgcacgcgtacgtaagctcggaattcggctcgagttggctgacaagtacttgaacgaggctgcacttggaaatgctaacgaggatgctattaacaggggaactntcttccaatcttgaattggaggcaaagcanacttggcaagtaaatatttctgttcctgaaggttgtgctgatccaagtgctagaagttgtgatgggacttgcgtgtaacattcttagaattctcaatgtcttaggtgcaaagagaagatgccaagtttgagatgattttactatatttttcatattggactgtcttcctctataattttgagttaaagtgtccacttaaattgaaaaaaaaaaaaaaaagggcggccgccgactagtgaactcgtcgacccggggattaattccggaccggtacctggangcgtaccaanttttccctaatgggagccgattaaaaccttgggggaaaaatggggctaatac

SEQ ID NO: 252862 - DNA, 536 bp, Glycine max
  unsure (1)..(536): unsure at all n locations
ggtagattaagttgaaaaagagaagagaagtactctctagaacagctatgacgtcgcatgcacgcgtacgtaagctcggaattcggctcgagctctcatggcatcttcttctggtagtttagacacctctgcaagtgcaaactccttcaccaacttcaccttctccacacaccctttcatgaccacttctttctctgacctccttgcttctcccttggacaacaacaagccaccacagggtggtttgtctgagagaactggctctggtgttcccaaattcaagtccacaccaccaccttctctgcctctctctccccctcccatttctccttcttcttactttgctattcctcctggtttgagccctgctgagcttcttgactcgccggttctccttaattctttccaacattctgccatctccaacaactggagccttttggtgctcagagcttcaattggaaagagcagttcangggggaatcagcaaattgtcaagggagaagaccaaagcttctcaaaatttcctttcaaaa

SEQ ID NO: 252863 - DNA, 529 bp, Glycine max
  unsure (1)..(529): unsure at all n locations
ggtagggtaggtgggtacgaaacgggggtaaatagaagcactctctatgacgtcgcatgcacgcgtacgtaagctcggaattcggctcgagcctaaagatatgccctcctaatggtggagaaactagtcctgtatggccatctgatggaaattctcaatccattgcatttcaaagtagcattcttcgttgcctctctcgtatgcttgatgaggctatacatgctgacctaactatcatgacagccgatggaagcacgttgagagctcataaggcagttctctcagcaagttccccagtgttccagagcatgtttcatcacaacctgaaggaaaaagagtcctccacgatccatatagaagacatgtcactcgagtcctgcacggctcttctaagttacttgtatggagcaatcaagcaagaagatttctggaaacaccggcttgcattgcttggagctgctaataaatatgacattggaagtctcanagacatctgtgaggaaagcctnctggaagatctcagcacagg

SEQ ID NO: 252864 - DNA, 536 bp, Glycine max
ggtagggaagttagtacgaaagagaggttatgcagtcactcatagaagagctatgacgtcgcatgcacgcgtacgtaagctcggaattcggctcgagcaacgactttgtcttccaatgaccctccaacctcactttccctatccctccccggtgttgactcatccgaagtttccaatcgaacaactgagccgattcatgccgcacctcctccgccgccacagccacagccacagccacagccgttgaatactatccctttgctcccaatgatgacggtgccctcggtttctccgacggggatggcgccgtttaattttagcgcagagtttctggcggtgatgcaggaaatgataaggaaggaggtgaggagttatatggagttgcacaatcagaagaatgggatgtgttttcaggctgcggtgaatgatgggtttagggacgcctcggtgaagcgtattgggaatagcaggggtgattcgtaaatattatcatcgaagaatggaacaacacaagtagagatgaggaaaaaaactac

SEQ ID NO: 252865 - DNA, 531 bp, Glycine max
  unsure (1)..(531): unsure at all n locations
agttagagtaggttgataagaggcgggggtatatgtcagacctncttgacgtcgcatgctcgcctgcacgcgtacgtaagctcggaattcggctcgagctttcattaacccaacagtgtcgctgcaggagaagaagatcgaatcgaaacgaaacgcgaataagtttctttctctcttgctggacgaataatggttctgaggaggaagaagatggagcagcgcttcaccttcttctgctgatgttgatttcatggccacctcccagtcccagcatcgctgcgttttcgttgggaatataccgtatgatgccacagaggaacagcttattgaaatctgccaggaggttggcccagtagtctcattcagactagttattgacagagaaactgggaaaccaaaaggttatggattctgtgagtataaggatgaagagacggctttaagtgctcgacgaaatcttcagggttatgaaattaatgggcggcaattacgcgttgattntgctgaaaatgataaagggaatgatagaaa

SEQ ID NO: 252866 - DNA, 538 bp, Glycine max
  unsure (1)..(538): unsure at all n locations
ngagtagggtaagtgtgtatgcataacgcccatcagtagcactatagagagctatgacgtcgcatgcacgcgtacgtaagctcggaattcggctcgagtccactatggctcgtcactcctagctcttaaccaggctactgttcaccgtcgtggccccattaaatacgtcggtgtcagcatgaagatgcactggttatgtgcacaaggaagacagcgcaagccttgaccttgtgcagctggtgacatttgaatgaccaagtgtcaatcccagtattcttcgttagtactgtgtaagtataccgaatgacgccgctgatggacagcttattgaaatctgtcatgacgttgtcccagtagtatcattcatactagctattgacggatgaactgtgaaacgcaaacgttatggattctgcgagtataaggatgaagagacggctttaagtgctcgacgaaatcttcagggttatgaaattaatgggcggcaattactcgttgattttggtgaaaatgatttagggaatgattgaaaccctcg

SEQ ID NO: 252867 - DNA, 510 bp, Glycine max
  unsure (1)..(510): unsure at all n locations
agtagtntcntgaggtttgnaactgagntaaagcatctatatagtaacactcatagaagagctatgacgtcgcatgcacgcgtacgtaagctcggaattcggctcgaggtgttttagcaggatggagtctcaggtgaagcacgcacttgttgtcaaagttatgggtcgtactggatccagaggactagtaactcacgttagagtgaaatttttggatgatcagaaccgtcacatcatgaggaatgtgtaaggacctgtgcgagaaggatacattgtcactctactcgagtctgaaagggaagcacgatgattgcgctagatggtttcttttggcttgcctgcaaattcgaactatacagtgtgattttgatgattctaatggtagcaggtggatgtcataggttttagcacgctatcacatagtctgtctttggtctatagatattcgaattatggcgtgaactttagatgattagagctcacgcttcatggttggagtatgatatggat

SEQ ID NO: 252868 - DNA, 506 bp, Glycine max
  unsure (1)..(506): unsure at all n locations
gagtagacataggtctgaacacgacanaaagacgctttatgnaaacactctagaagagctatgacgtcgcatgcacgcgtacgtaagctcggaattcggctcgagtgctcccttggcattgttcccttcatcaatgcacagattgttttccagcttcttgcacaagtatatcccaaattgcaagatcttcaaaagagagaaggtgaggctggaagaaagaaagttctgcagtacactcgatatgcttcagttggatttgccattgtgcaggcaattggccaagttcttttcctacgtccctatgtcaatgacttttctacagagtgggttatttcttctgttatcttattgactcttggctctgtgtttacaatgtacatcggagaacgaattacagacctaaaacttgggaatggcacctctcttttgatattcacaaacattatctcgtacttgccagcttcttttggtaggacaattgctcaagcatttaatgatgcanacta

SEQ ID NO: 252869 - DNA, 526 bp, Glycine max
  unsure (1)..(526): unsure at all n locations
aggaggacgtaggtttgaatagggggtacggaggtantactggaaatactntnnaagagctatgacgtcgcatgcacgcgtacgtaagctcggaattcggctcgagaagagttgagaggcagttaggagatacaggtgtaaatggaaatggcctattgcgataccagcaatgtagtgtttcccctgaaattgttgaagttcaggatgattctgtcaaagttgattccaaagagtcaatgataacagaaggaaccatattatggctggaggattcagattggcaaaagggttatcagataaaagaggtaatcaacactagtgagttgacatacttcattgcatcccatgttgaagagccaggaaaaaatctggtcctatatgtaggctctcattcattccagcttgaaccagcatgggaaagatatgaatttatgggtatcaagttcaagaggccggaacanaagtatttgacaattaatgaaagccaaaaaagttttattaaagccaaattttcttggccttgaat

SEQ ID NO: 252870 - DNA, 537 bp, Glycine max
  unsure (1)..(537): unsure at all n locations
ggtagttntagagttggaagagagacgacggtactctctagaacagctatgacgtcgcatgcacgcgtacgtaagctcggaattcggctcgagctcgagccgaatcggctcgaggagtcttgcaattgaagttgaagtcttgcccttctctcttcaactccaaacacaagacatcatcatccatggctgcctccgtctccactgtcggagctgtcaacagagctcttttgaacctgaatgggtctggacctggggtttcagctcccagttcatccttctttgggagcagcttgaagaaggttattggctcaagggtccccaacacaaagatttcctctggaagcttcaagattgttgctgtagaagagaagaaagagaatgaagagacccagcagaccgacaaggacagatggaagggtctggcctatgatatctcagacgaccaacaggacattaccagagggaaaggggttgggtggactcccttttccaagctccccaggaggctggaacctccttatgtgccataaggacccc

SEQ ID NO: 252871 - DNA, 530 bp, Glycine max
  unsure (1)..(530): unsure at all n locations
ggtaggntaagttagtacgaaacagcgatatatagaactatcatagaagagctatgatgcacgcgtacgtaagctcggaattcggctcgagccagaagggtgattcctgcgagtatgctcatggtgtttttgagtcctggctacatcccgcccaataccggacaaggctttgcaaggatgagacgggctgtgctagaaaagtatgcttctttgctcacaaacctgaagagctacgccctgtgtatgcttccactgggtcggctatgccatcaccaaaatcctattcagctagtggacttgacatgacagtgatgagtccattggctcttagttccacatctttgccgatgccaactgtttcaaccccacccatgtctcccttggcagcagcttcatctcccaagagtggaagcatgtggcagaacaaaataaaccttactccaccatcgttgcagctccctggtagccgactgaaggctgctttgagtgcccaggatctggagatggagaatgaactgctcngtctaaaa

SEQ ID NO: 252872 - DNA, 537 bp, Glycine max
  unsure (1)..(537): unsure at all n locations
ngaggtagggcatagatgttttagggggggaggggtaaatgtaagactagctatgacgtcgcatgcacgcgtacgtaagctcggaattcggctcgaggtgtttctgtaaccatggcatccaccactctatcccctacaaccccttctcaactatgctcaagaaaaagtgggattttcagttcctcacaagcacttcttgtgaagccagtgaagaggcagatgatggggaagagcaagggattgagaattgcatgccaagccaccagcatttccgctgatagagtccctgacatgggcaaaagacagctcatgaatcttcttcttcttggtgccatttcactccccactgctggaatgcttattccctacacctacttcttttgtccttcaggttcaggttcttcagctggcggtacctgtgcccaagatgccggtggaaatgatgtaattgccgaaaaatgggctcaaggcacatggacctggtgaccgaacccttacacanggattgaagggagacccccccattttgtggggaga

SEQ ID NO: 252873 - DNA, 535 bp, Glycine max
agtaggcttaggtttaattacgaagtatacagtactattgtatcactcttgaggagctatcatgcacgcgtacgtaagctcggaattcggctcgagctcaaaaacctacacttatacaccttgcattctaatattaagagaggaaaccaactcttaaaataaagataacatttttagatcaaagcaaaatcttacagagttgataatatctttgaatttaaacattatcttaaaaatttgaatttaaaaatttaaattattctcccgagtcccaacactttcttccttctacagtagattgtgtgtgcttgtggacaatttgactgagtttgttgtgttggccccatgaactgaatttatgtctgtgaattttcttttctacgtaggtgtcaagtgctacagccacttttgccatgacattttcagcatctatgtcagtggtggaatattaccttctaaaacggtttcctattccttatagtaagtatgaatgtgaatgggaataaaactaacaaaattaatcttatattcttat

SEQ ID NO: 252874 - DNA, 537 bp, Glycine max
  unsure (1)..(537): unsure at all n locations
ngggtaggctaagtaatacgagaagaggagttaatggaaacactatagaagagctatgacgtcgcatgcacgcgtacgtaagctcggaattcggctcgagcttgcaaccatactcgtggctcgcgttaccgatggtaggaagaatggtacctgcgcttgactgaagccagatggactgacacaagtgactgatgagtgctacaatgacactggtgccatggtcacaattctggatcacactgcactaactgccacacaacatgatgagactgtgagcactgaccaaattgctgctgaccttagagagcatgttatcaagcctgtcattactgagaagtgcctgtatgagaagaccatcgtccagcttaaccattctgagacgttatgcagtggaggccctgatggcgatgctatgctcactggaagaatgagcatgattgatcccaaagttggctgggtgcacatggtggaagtggcgttttcagggaaggaccctaacaaggttgccagaacagttcccgttattggaaggcaagt

SEQ ID NO: 252875 - DNA, 538 bp, Glycine max
  unsure (1)..(538): unsure at all n locations
ggtagtcatagatctgtaatcgaagtaacgaactattatgtancaccatagangagctatgacgtcgcatgcacgcgtacgtaagctcggaattcggctcgaggaaatggagactctctgctctgcattggtgttcccatctttcagaatcacaacttcagctttctccaaatgtggcatcagggctttcattgccgttgagcaacatacttcgcagactaaggttgctctcctcaaaattggtaccagaggaagtccactagctctggctcatgcatatgagaccagagacaatctcatggcatcacatccagagctagcggatgaaggggctattcagatcgtgataataaaaacaactggtgacattatactatcacagccacttgcagacatcggcggtaagggcctgtccacaatcgatatagacgaggcactcattaacggtgacattgacatcgccgttcactctatgaaagatgtacccacttactgaccctataaaacgtatctaccatgctacctttcacgtgagggc

SEQ ID NO: 252876 - DNA, 543 bp, Glycine max
  unsure (1)..(543): unsure at all n locations
gagttagtnntaagtgtgtactgaacgaggagttaatggaatacactctagaagagctatgacgtcgcatgcacgcgtacgtaagctcggaattcggctcgaggaaaattctctttagagagatagagagaggaagaaagaatggcagcttgcactgtctactcaacacaatctctgagcacaaattgctccatctcaaccccatcaaagacgcaactcagttttttccaccaaaagcaggtagttttctggaggaacagcaagaagggcagctgcagcagcagaagaagctatgtgataacatgtgcagcaagtgactcacagacagtggtgattggcctggctgcagactcagggtgtgggaagagcaccttcatgaggaggctgaccagtgtgtttggaggagcatcagagccaccaaagggtggcaaccctgacttcaacactctcatcagtgacaccaccactgtcatatgcttggatgattaccactctttggacagaaactggaaaaaagagaaaggggttactggcccttgaccc

SEQ ID NO: 252877 - DNA, 532 bp, Glycine max
  unsure (1)..(532): unsure at all n locations
gtaggctaggtnnnnttagaactcgttgcantncgtanntctnttnaanagctatgacgtcgcatgcacgcgtacgtaagctcggaattcggctcgagctggtaaagcagcagatttgacatattgggagagcgcagctcgcatgattgctgatgtttcgaagtctgacaagatcgttgtagagaaatccacagtcccggttaaaacagctgaggcaatagagaagattctgacccacaatagcaagggaatcagattccagattttatcaaaccctgaattccttgctgagggaactgcaatcaaagatctctttaacccagaccgtgttcttattggaggcagggaaaccccagagggccaaaaagctattcaagcattgaaggatgtttatgctcaatgggtccacgaagaaagaatactaaccacaaatctctggtcggcagaactatctaagcttgctgctaatgccttcttggcccaaaggatttcatctgtcaatggcatgtcagcactttgtgaggcgtctccg

SEQ ID NO: 252878 - DNA, 505 bp, Glycine max
  unsure (1)..(505): unsure at all n locations
agtagggcctaggtctgttactgaanacccgcagtataaagtaacactctagaagagctatgacgtcgcatgcacgcgtacgtaagctcggaattcggctcgagggcgagtgtcgtttccttcccttccctaacgatctgaggaagacaccaagcttctctccacgcccttcttgggtaatctgaagtgcagcgatggcggatggattgcactcgcggcatccatcagtagttcagaagttatctggacagtcttatttgttgtctaggcttgcccctactcactcaagaaactattccacaactggtagttacttcaatggaggcttgcagtcttcgggtttggttccagtcatggcacatgcaccggctgagaaaggagtgtctggatttttgttggatttcatgatgggaggagtgtcggctgctgtgtccaagacggctgcggctccaatcgagcgagttaagttgctcatccaaaaccaggatgaaatgatcaagagtgg

SEQ ID NO: 252879 - DNA, 510 bp, Glycine max
  unsure (1)..(510): unsure at all n locations
gaggagttcnttaggtctgttacgaantcacgcattataatagtaacactcatagaagagctatgacgtcgcatgcacgcgtacgtaagctcggaattcggctcgagtcgtgacgaagttgctcagaatcttgtaatttccggagaagatgcctcgcaggtggaaagcattgatccgaggtctgagggttcaactgagagtaagaagggatcaaaggatcggagagggtcctataaaagaaggaagactgaacagacatggaccatagttgcccaaactactgatgataatcatgcatggagaaagtacggacaaaaggaaatcctaaattctcaatttcccaggagttacttcaggtgcactaggaagtttgaacaaggttgccgagcaaccaaacaagtgcaacggatacaagagaatcctgatatgtacaccattacgtacattggctttcacacatgcaaagacaccctcaaggctccacaaatggtgacacattctgaaanctgg

SEQ ID NO: 252880 - DNA, 486 bp, Glycine max
cgactcactcgcgtgtcgtatacacgagtactgacgtcggacgcacgcgtaagtaagctcggaattcggctcgagctcgagccgaatcggctcgagatcaaattagttcattctctttgcgcagttccctacctctcctttcaagatgcagatcttcgtcaagaccctcaccggaaagaccatcacccttgaggtggaaagctctgacaccatcgacaacgtcaaggccaagatccaggacaaggaaggaattcccccggatcagcaacgtctcatcttcgccggaaagcagctcgaggacggccgtaccctcgccgactacaacatccagaaggagtcaacccttcaccttgtccttcgtctccgtggtggcatgcagatcttcgtcaagactctcactggcaaaaccataaccctaaaagttcaaagctccgacaacaatgacaacgtcaaggccagaatccaggacaaggagggaaacccccg

SEQ ID NO: 252881 - DNA, 482 bp, Glycine max
ggattgaatcacgtgtcatatagaagagtaatgacgtcggacccacgcgtacgtaagctcggaattcggctcgagtccagacctactcaaggtgacattctgattgatatccaggacaggtttccccgtgatttcctttatgacatgttcgccaaagcaataagttctgaagattcctcaagcattggtccattaccaacagatatagcaggtttgagcttaaatatggacaatcatgagcctaaacgttggtcagattttcagaacttggctctagatgggtttgatactgtatcacgaattgatcaggataatcttggtttttcgtctgctgtgagaaaagtacaatatggggatattaaatcgcatccatctgcgcctcaaccagctggtggtgttttggcaggaagcacatattcccatctaaatattggtgaagaaagcagaggaatgtacctgtagcaactaaagcagaggcattg

SEQ ID NO: 252882 - DNA, 477 bp, Glycine max
  unsure (1)..(477): unsure at all n locations
cggttncntctggttcnngaatgattaatgagtgaggtgtacgataatnnctacgacnnnngncncatgaatncntaaaatcngnncnnncgctcgaggaccttttctaagaaatgcaatggctaggtatcccactatacaacatcactgcatacctccctgtcatcgagtccattggtttctcgagcacattgatggctgcaacatcatgccatgccttcccacaatgtgtgtttgatcactgggacatgatgtcttctgacccattggctgcaggattacaagctgcacagcgtgtcactgacattcgcaagatgaaaggcttgaatgcacagatgactcctcgctctgagtttgaagacaagctttaaatttgtttcataaattattttactttgagcttaatcgaatttatttgctcatgtgaacaatgctactttagaattaaattctgttaattttgtttgctgtttcgcc

SEQ ID NO: 252883 - DNA, 489 bp, Glycine max
actgactccgttgtctagtcgaagagtactgaagtcggacccgcccgtacgtaaactcagaattcggctcgagcaaatacctcactccacagttgaacaacaacaccaacaccaacttctggaatgaacattttcaaatccccactggaccatgatttgaactgtggtggaatattccacgactcagcagaagcatcttattcgtctgaaacaaggagcaccccctcagacgaagaagtgattctagcgtcagcgcggccaaagaagcgagcgggaagaagagtcttcaaggagacaaggcaccccgtctaccgaggagtgcgtcgcacgaacaagaacaagtgggtctgcgagatgcgagtccccaacaacaactcacggatttggctcgggacatacccaacgcgcgaaatggccgcacgtgcgcacgacgttgccggggctcgccctcaggggaaaattcgccttgcctcaacttcgcggactcca

SEQ ID NO: 252884 - DNA, 483 bp, Glycine max
  unsure (1)..(483): unsure at all n locations
cgattgactcacgtggcctatagaagagactgacgtcggacccacgcgtacgtaaactcggaattcggctcgagcaaaagggatccatggccaaaagtttctgataatgcaaaagaccttgtgaagaagatgctagatcctgacccgaggcggcggcttactgcacaagaagtgttagatcatccatggttacaaaatgcaaagaaagctcctaatgtttccttaggagaaactgttagagcaaggctcaagcaattttctgtaatgaacaagcttaagaaaagagctttaagggtgattgctgagcatttgacagtagaagaagctgctgggctaaaagaaggattccagcttatggatacaaacaacagaggcaagattaacattgatgaattacgagtaggggtgcacaaacntggtcaacaagttcccgaatcaaatgtcaaagctcttagggagctggtgatgtagatggggatgggc

SEQ ID NO: 252885 - DNA, 477 bp, Glycine max
cttccttgcgtggcatatagaagagagctgacgtcggacgcacgcgtacgtaaactcggaattcggctcgagcaaaactgctgatggccctactgttggaccacgaggtatctattgtgggcatgaggatactgttgaagacgtggctttctgcccatcgagtgcacaggagttctgtagtgttggagatgattcttgtctcatcttatgggatgcacgtgttggctctagccctgtggttaaggttgagaaagctcataatgctgatcttcactgtgtggactggaatccccatgatgataatctgattcttactgggtcagcagataattctgttcgcatgtttgatcgccgcaatctcaccactaatggagttgggtcacccatccataaatttgagggtcacaaagctgctgttccttgtgttcaattgttttcaagaatatcaaccggaatttggaagtccagcctaggatg

SEQ ID NO: 252886 - DNA, 484 bp, Glycine max
tgattgactcacgtgtcgtatagaagagtactgacgtcggacccacgcgtacgtaaactcggaattcggctcgagcaattttgtttttcgccttgtatctctcccaattcctcagtttccttctttcttcatctttgtgtcatggccagaggttcttcccagtctcagtcctccacttcaacagccacgcgaccaggaccagcaggcatggctccccgcggttccgccgccgccaccgccggcatgcgccgccgccgtctcggcggcggaaacagctccgccagcaccggcgttggaggcggcagcagcaacatgctgaggttctacacggacgacgccccggggctgaagatttcgccgacggtggtgctcgtgatgagcctctgcttcatcggcttcgtcaccgcgctccacgtgttcggcaaactctaccgctccaaatctggtggcgccgtttgatcttttggagatgtagttccgatcc

SEQ ID NO: 252887 - DNA, 463 bp, Glycine max
cgggaatgaatgaatcatgtgctaagagcgagaaatacacagacgcacgcacacgtaagctcggaattcggctcgaggtgtttcgctgtctctcccatcctttcgcattctcaatacccttttgatttgtgaaaggaaagcaaacatggttgatcaggtccaacaccctacaatcatggacaaggttgctggtcagctccatctccgttctggtctttcatctggtattagaagttatgatggagcctaccgccacccagctatgtaccaaagaccctcttttgggaattactcgaatgctgcattgcagtttcctgtgatgcccacatgcaaagctaccatggatttgtctgctactgcaacatctgcctcacccgtctttgttgctgctccagcagagaaaggccattttcttttagactttctcatgggaggtgtttcagcagctgtctccaaaactgct

SEQ ID NO: 252888 - DNA, 473 bp, Glycine max
  unsure (1)..(473): unsure at all n locations
agggctctcgtggttncgaatgaatcangtgtcgtatagcagatactgacgagagacgcacgcctacgtaagctcggaattcggctcgaggcttaatcgaactattcagattctaaaaaatgagttggtggtgggctggagcaatcggtgctgccaagaagaaattcgaggaagaggaaccgccgcgaagcttccagagcgtgggcctggtgatcggcgtgacgggcatcgtgggcaacagcctcgccgagatcctccctctcgccgacacccccgccggtccatggaaggtctacggcgtcgcacgccgcccccgtccgccgtggaacgccgaccatcctgtcgagtacatccagtgcgacgtctccgatcccgccgacgccgaagccaaactctccgccctaaccgacgtcactcacgtcttcttcgtgtcgtggaccaaccgctccaccgaaacagaaaactgcgaagtn

SEQ ID NO: 252889 - DNA, 484 bp, Glycine max
ctcgccttgccgtggctctatactaagctactgacgtcggacgcacgcgtacgtaagctcggaattcggctcgagatcatgtttgcagataagatacatagcagaatgggtgaaggaacttttgggcaggtcttagaatgctgggatagagaaaggaaggaaatggttgccgtaaaaattgtccgtggtattaagaagtatcgagaagcagccatgatacaaattgaggtgttgcaacagcttggtaaacacgataaaggaggcaatcgtcatgcatgacttgcgcatgattcatactgacctgaagcctgaaaacatactactaatgtcaccagagtatgtcaaagttcctgactacaagagttcagctagatcaccaagttcctagttcaagagagttcccatatcaagtgccataaaggttagtgattttggcagcacccacttatgaccaagaaaatgaccattactttggatcaacccg

SEQ ID NO: 252890 - DNA, 492 bp, Glycine max
ttcacatgcgagctctatactagcgactgacgtcggacgcacgcgtacataaactcggaattcggctcgagatcatgtttgcaactcagatacatagccgaatgtgtgaaggaacttttgggcaggtcgtaggatgctgggataaatcaaggaacgaaactgggtgccgtcgaaattgtccgtggcattaagaagtatccagaaacagccatgatacaaattgaggtgttgcaacagcttggttaacacgatgcacgacgcaatcgtcatgcaagacttgcacatgatctcatactgacctcgaaccctgacaaacatactactagtttcaccagcgtatgtcaaagttcttgcctataagagttaacgaagatcaccatcgtgcccaatgcaggagcgtttcgctaggtaaactcctgtcaacactatctgcttgtcggaactcccgcctctttccctgcaaagtttcccgttagctgggatctacccctt

SEQ ID NO: 252891 - DNA, 461 bp, Glycine max
ggtaagaatgattcaagagccaagtgtcgaaaatgactaagacgcacgcctacgtaagctcggaattcggctcgagacttgttccacaatctgagaaaagccttgagtctgcaaaatttgtatatttgatgggtgctgatgatgttaacttagacaagatcccagatgatgcttttgttgtttatcaaggtcaccacggtgacaagagtgtttatcgggcaaatgttgttttgccagcagcagcattcagtgagaaggaagggacctatgaaaataccgatggtttctcacaacaaacattgcctgcagttccaacagttggtgactccagagatgattggaagataattcgagctctatctgaggtggcaggagtgcgtttgccctatgatacaattggggccgttcgtgctcgaatcagtactgtagccccaaaccttgtgaaaatggatgagagagac

SEQ ID NO: 252892 - DNA, 465 bp, Glycine max
  unsure (1)..(465): unsure at all n locations
ggtgntgaatgaatgangtgtcgtatagccgataatgacttnagacgcacgcccacgtaagctcggaattcggctcaagtcaattttcaagctctcaacgccatctccagctgcttccttatcagaagcgcttcgccccagagattctcgcttcctctccttcaatccttcttcgaacgctattaattacaaaattaacctctccgcttccctccgatccattcactccctccctcttaaaacctccttgcggatcaaatgctcccaaacagatgggaatggaagtcctgcaaagaggacagtgcttcatgatctttatgagaaagaagggcagagtccatggtatgataatctctgcagacctgttacagaccttcttcctcttatagcaagtggtgtcagaggcgtcactagcaaccctgcgatttttcagaaagctatctcatcatcgaatgcttacaatga

SEQ ID NO: 252893 - DNA, 474 bp, Glycine max
  unsure (1)..(474): unsure at all n locations
cgggnctncttgggtncgaatgaatcaggtagcgtatagtcgaaaatgacgtaagacgcacgcctacgtaagctcggaattcggctcgagaaagatagaaaaccctagcttaccttttcaactttcacgatgcaaatcttcgttaagacactcactggtaagataatcacccttgaggtggagagttcagataccatatataatgtaaagtccaagattcaagacaaggaaaggatcccaccagatcagcaacgtctcatttttgctggcaagcagcttgaggatggacgtacacttgctgattacaacatccatgaggagtccactcttcacttggtgctccggctccgtggtggaatgcaaatctttgttaagacattgaccggatcgacaaccaaccttgaggtcgatagctctgatcacattgacaatgtcaatgctaaaattcacgatcccaacggtaacccatcagac

SEQ ID NO: 252894 - DNA, 488 bp, Glycine max
  unsure (1)..(488): unsure at all n locations
cactgcaccttcgngtggcgtagtcgaagagctacgaagtcggatccgcgcgtacgtaaactcagaattcggctcgagctggcacataggtgtttattgctacacactagaagaattatggaagctctcaagaccctcttcttagccatttttgttgtcttggcttccgcattgtattcagccaatgccaaaatccaggagcatgaatttgttattcaagcaacgccagtgaagatgctgtgcaacacccacagcaccatcacagtgaatggacaattccctggtccaacattggaagtcaacaatggtgacactttggtcgtcaaagtcactaacaaagctcgttacaatgtgactattcactggcatggaattcggcaaatgagaacaggatgggctgatggaccagaatttgtgactcagtgccctattccgtctggagaaagtacaccgaaccgtgtaacaattaagggcagaagggacacttt

SEQ ID NO: 252895 - DNA, 473 bp, Glycine max
  unsure (1)..(473): unsure at all n locations
agggtntncttggttnggaatgaatgaggtgtcgtatagcagagactgacgtacgacgcacgcctacgtaaactcggaattcggctcgagctcaatccgctcttgactcactgacgcaggcccttagttcatacatcaggagaactgggcatggcattgttatggatgaggagaaagatagcgatatggtctcatcgcttcctgaatttaacgcttctcttgacgcattatgggattatatctttttcgtcaacgaagctttcagcatttcaattaaagatgcctttgagtatcttatcactcttcgtcagaagtgacctgtagagttgattgccaagtttttggctgataagcttcatgcaggtaataaaggtacttctgacaaggaactggaagctacacctgacacaatcctggtgttattcacgttcagtcatggcacagatgtttttgcagcatttcttaacagatat

SEQ ID NO: 252896 - DNA, 466 bp, Glycine max
  unsure (1)..(466): unsure at all n locations
agggtctgaatgaatcangtgtcgtatagcagagaatgactaagacgcacgcctacgtaagctccngaattcngctccgagctctctctactgctagattcgacgattccagaagtgccttcctcctcctcctccttcttcccctctaatcggatccaaatccaaatccaaatccagttcaaagaagatgcaatacaagaacctggggcgatctggcctgaaggtgagccagctctcctacggcgcgtgggtgagcttcgggaaccagctggacgtgaaggaggcgaaggccctcctacagtgctgccgcgaccacggcgtcaacttcttcgacaacgccgaggtctacgccaacggccgcgccgaggaaatcatgggccaggccatccgggagctcggctggaagcgctccgacatcgtcgtctccaccaagatcttctggggcgggcaaggcccaacgacaatg

SEQ ID NO: 252897 - DNA, 504 bp, Glycine max
  unsure (1)..(504): unsure at all n locations
gccccccctccgaatgcactcangttagcgtagtcgaagactacgcaagtcggatccacgcgtacgtaaactcganattcggctcgagcatttctccacttccattttctctctcacttttcaagaatcgtaagctatgggaaagtcttacccaactgtgagtgctgattaccagaaggccgttgagaaggcgaagaagaagctcagaggcttcatcgctgagaagagatgcgctcctctaatgctccgtttggcatggcactctgctggaacctttgacaacggcacgaagaccggtggacccttcggaaccatcaagcaccctgccgaactggctcacagcgctaacaacggtcttgacatcgctgttaagcttttggagccactcaacgcgggatttcctattttgagctacgcccatttctaacacttggctggcctttgttccctttaagtcaacgggtggaacctgaagttcaattcaaccctgaaaaagaagacaag

SEQ ID NO: 252898 - DNA, 483 bp, Glycine max
agaatgaatgacgtgtcgtatatacgagactgacgtcggacgcacgcgtacgtaagctcggaattcggctcgagcaagtttcgtttccaggtttcggcgcaatcggcttctgcttcaaggaaggagagcttgttattctctatcaacaagtaaaatgtcaggtgaagagggtgtcattgcagttgagccagctgctgctgctgctgccatcccaggcgagccaatggatatcatgactgccttacaacttgtgctcagaaaatctctggcttatggtggtttgtcgcgtggccttcatgaaggtgcaaatagtgattgagaagcatgctgcacaactctgtgttcttgcagaagactgtgaccagcctgactatgttaaactggttaaggccctttgtgcagagcacaatgttagcctgctgacagttccgagtgcaaagacccctggagaattgggcgggttggtccaaaattaattcgaag

SEQ ID NO: 252899 - DNA, 466 bp, Glycine max
  unsure (1)..(466): unsure at all n locations
aggctgtgaatgaatcgagggtcgatgcgccaatgaccaagccctcgactcgtcatctctgagttcggctctagacggaagcgttttcgattacgcacgcaccttatattacctacgagaaaattattattgcgactattacagagagtagcatgcgcccaacggttatggtcagaaggattagctctcatttggattcttcatcttcctcacgatcctgtgatcgcatactcaagactctcgctagtggcttctcacgtcaatgtggcgtcagacctagatcatctccgacttttccaatcgtgcgcatctgaatccgtcaacaatcacctccttcgtgatccccatgatcgtattctccgtgtaactgtcccttatagcaggggtcgatttcgagtaaatccggatttttgcagtttggcgtgcgatagactgttcggcaaaaagaccccgtttttgttgccgn

SEQ ID NO: 252900 - DNA, 451 bp, Glycine max
  unsure (1)..(451): unsure at all n locations
gggnnggggtagatgattcaggtcaagccatagtactagacgacgcctacttagctcgaattcggtcaaggtctcacacattctaattaatatccttttggctccttcgcttatgaatcttcntcgtcttcntcntcttgttcctgcaacgcactgaattcgattaatcaatccatcttcaattgctttgtttcgatcggaggaaaatggccgatcagttatcgaagggagaggaattcgagaaaaaggctgagaagaagctcagcggttggggcttgtttggctccaagtatgaagatgccgccgatctcttcgataaagccgccaattgcttcaagctcgccaaatcatgggacaaggctggagcgacatacctgaagttggcaagttgtcatttgaagttgggaagcangcatgaagctgcacaggcccatgtcgatgctgcaaattt

SEQ ID NO: 252901 - DNA, 484 bp, Glycine max
accgcctccctgcctagcgaagactacgaagtcggatccgcgcgtacgtaaaaccagaattcggctcgagcgacgacgacatcgtctccgccttcgaaggaaactccaacctcttctgggccgagcgtttcggcaaacagttcctcggcatgaacgatttgtgggtcaaacactgcggaatcagccacaccggcagcttcaaggatctcggcatgaccgtcctcgttagccaggtcaaccgcttgagaaaaatgaatcgccccgtcgtcggtgtcggttgcgcctccaccggtgacacctccgccgctttatctgcttattgcgcttcggcggcgattccttccactgtgtttctgcctgctaataaaatctcgcttgctcaacttgttcagcctattgccaatggtgcctttgtgttgaatatcgacactgagttttgatggttgcaagcagttgaatagaaaaggtcacgccgaagttgcca

SEQ ID NO: 252902 - DNA, 474 bp, Glycine max
  unsure (1)..(474): unsure at all n locations
gaatcatcgcgtgcatatcgaccgactgagtcaggcncactccaaaaggatccctccgggaaatccaattccacaatttcaagaaataaaggaggcaaaatgttcaaaaaagaaattggaataattggtttcctaataaggccaacccgaaacccaagggaatgagattcggaattccccgggaaattcaaattcacaatttcaagaaataatggggcaaaaatgttcataaaataattgggattatttggtttcctattaggcctatcctgaaaccaaaggaaatgagatcggaattccccggggaattccaattccacattttcaagaaataaggaggcaaaaatgttcacatatgaattggcattatttgttttcctattacgcctatcctgaagccaaaggaaatgagatcggaattcctcgggggttaccaactcgaattccctatagggagttcgaataaaatcgtac

SEQ ID NO: 252903 - DNA, 485 bp, Glycine max
cgaatgactcacgagtcctatagaagagaactgacgtcggacgcacgcgtacgtaaactcggaattcggctcgagcactcacaaacgcacactgaattcaaaaacatcgaaagagagaggcatggccgagcaaaccttcatcatgatcaagccagatggcgttcaaagagggcttattggcgagattattagcagatttgagaggaacggtttttacatgaaagggttgaaactcgttactgtggaccgtccttttgctgagaagcactatgctgatttgtctgcaaagcctttctttagtggtttggtggattacattgtctctggccctgttgttgccacgatctgggagggtaagaatgttgttacaactgggcgaaagattattggaggcgacaaaccagctcaacctgagcctggaactatttgtggtgactttgctactgacattgggaggaaggttatccaaggaatgattcattttg

SEQ ID NO: 252904 - DNA, 473 bp, Glycine max
  unsure (1)..(473): unsure at all n locations
aggngcnnttggnntgagaatgaataangtgtcgtatagcaagtactgacgacggacgcacgcctacgtaagctcggaattcggctcgagacttggtctactctgtatatcaaatccaaaggtcaatgttatggataccttaagcagacttagccatgatactgattcagaagtagctatggcagctgttatctccttgggtctgataggtgctggaacgaacaatgctcgaattgctggcatgcttcgcaatctttctagttattactacaaggataccagccttctattctgtgtgcggattgcccaaggtcttgtacatttgggaaagggcttattaacacttaatccatatcattctgatcgcttcttactgtcaccgacagcacttgctggattaattaccatgttgcacgcatgcctagacatgaaagctattgtgttgggaaaatatcactatgttctctacttcc

SEQ ID NO: 252905 - DNA, 479 bp, Glycine max
  unsure (1)..(479): unsure at all n locations
actcanctggcgtagcgaagataccgctatcngaccaggcgtacgtaaactcgaaattcggctcgagaacattgtacgtacgtacctggggcacttggttcatatgcagataaatggctgccaaataatggtcaccaccttgcttatgcacttatgttttcaaaagctgttgtggtgattgcatgtccatgtgcacttggtttggcaacaccaactgctgtcatggtggcaacatgggttagggccaacaatggtgtgttaattaaatgatgagactccttggcaagggctcatatggtgaactacgtcatatttgataggacaggcactctaactcacgctaaagccactgttactgttgccaaagtgtttggaggaaaggtccgtggtcaatttcgtacactgggtgcttttgctgatgcaaacagttgacctccgactgggacactcaaaatccaaataccgctgcaattttcatg

SEQ ID NO: 252906 - DNA, 484 bp, Glycine max
  unsure (1)..(484): unsure at all n locations
ccccacatcgctggcgtgtcgaagactacgcagtcngaccgaccgtacgtaaaaccagaattcggctcgaggcacgattagcttgttgtttggagcgatccgaggacgactctgtaaacaggttgggttaccagcacatccttacacgtgatcaacttctcgctgacgccggccgttacaaggaaattgacaatggcatgcagtgtgaacttgacgggaactgcgttgttaaaggcgcacttgatgtagacattggtgccaacccttctgctgaaggtggaggagaatatgatggagttgatgatgcatctgttaacgttgttgacactgttgacacattcaaaattcaggagcaacccgcaatctgacaagaagcatgttgttaccgtcatgaataggtttatctacaatttgactcttaagctcgatgcagagctttaggagttggttaacaatcatcctcaaaggaccagcgaaaaacctg

SEQ ID NO: 252907 - DNA, 480 bp, Glycine max
gactgattcactggcgtatactagcgactgacgtcggacgcacgcgtacgtaagctcggaattcggctcgagtgatagtatgcctccgtcagagttattaaatagaaaaaatttgcaaggcaacttggttgttgagaaattagatagcctaatggtgctggcatttttgcaccttgaatcctgtcaaagcagtggccgtttgactgaggtattcgatactctactagcttcatttcagagaaccgtattgaatgcgtacaagtcaaaatttacccagtatgtgatgttctatgcatgtgcactggaccctgaaggatgtggtgtgaaatttgccatggttcttgctgatatgtttggatgtgatgttaatccccctattactaggatgagtgctgctgcttatcttgctagttatttgactcgtggcaaagttctttcaactgcaatgggtcaacaccatcataaaaagcttggttgatc

SEQ ID NO: 252908 - DNA, 479 bp, Glycine max
  unsure (1)..(479): unsure at all n locations
ctccgctgcaagtcatcccacgctacgagtcngacgcacgcgtagtcaactcggaattcggctcgagttcctttgcaactagttcattgaagagcaacaaaaataatggctgaaacaaagttgagctttaaggacaaaagatggtcactccatgggatgactgctctagtcacaggagctacccgaggcatagggcatgccattgttgaagaattggcagaatttggggcagctgttcatatttgtgcacggtaccaagatgatattgataaatgtttggaagagtggaaaggcaagggacttactgtgacgggttcagtatgtgatttacaatgttctgaccaacgcacaagattaatggaaattctttcctccatcttccacggaaagctcaatattttaatgaacaatgctgcgacaaccattaccccagaacaatactagattacactgcagaagatatatcacccataatgggc

SEQ ID NO: 252909 - DNA, 470 bp, Glycine max
  unsure (1)..(470): unsure at all n locations
aggggctgaggttgagaatgaatcangtgcgtatagcaagaatgacgacgacgcacgcctacgtaagctcggaattcggctcgaggaatgatgcatgctaccatcaaatcattagccattggctaagcactcatgcaattgttgagccatttgtcatagcaacaaacaggcaactgagtgtggttcaccctatttacaaacttctgtttcctcactaccgtgacaccatgaatattaattcacttgcccggaaagccctggtcaatgcagatggtattatagagaaaacattcttgtggggtaggtactctatggaaatgtccgctgtcatttacaaggactgggttttcactgatcaagcattacctaatgatcttgtaaagagaggagttgctgttaaggacccatctgctccccatggagttcgtcttttgattgaggactatccttatgcttctgatgggctanan

SEQ ID NO: 252910 - DNA, 487 bp, Glycine max
  unsure (1)..(487): unsure at all n locations
gcccccccgactccctacgtgccagccaagacactgagtcggaccaggcgtacgtaaactcgaaattcggctcgagatggctttaggtgttcctgctcttccgttgacatacgtggctcacgttctggcagttgttgccagcgtcttggtcgtggtctgggtcgtcaatttcaggggtggcttggcttgggattctgataacaagtccctcatcttcaacattcatccagttcttattgttattggcttactagttcatgggggtgaagctattataagttacaaagcttttcccctaaagaaggaagtgaagaaattgatacaccttgttttccatgccatcgcattaatacttggaatagttggaatttatactgccttcaagtttcacaatgaaagtgggattgccaatctctacagcttgcattcatggcttgggaatggggttantggcccttaagggaattcattggatatatggggttgt

SEQ ID NO: 252911 - DNA, 481 bp, Glycine max
  unsure (1)..(481): unsure at all n locations
gaatgactcgcgtgcctatagaagagtactgacgtcggacccacgcgtacgtaaactcggaattcggctcgagctcgagccgaatcggctcgagcggctcgagaatttctctttctctctttttttgtgtgtccaaaatggctcctagttctgctcacaacaatgggttctatgtgcttatgctagttgggatagtggttagcactatggttgctacctgtgctggtagcttctaccaagactttgatctaacatggggtggtgaccgtgctaagatattcaatggtggccagcttctatcactttccctagacaaagtctctggctctggcttcaaatcaaagaaagaatacctatttgggaggattgatatgcagctcaagctcgttgccggcaactctgctggcactgtcactgcttactacttggtcatccaagggggcancacatgatgagattgatttcgagtttttgggacacc

SEQ ID NO: 252912 - DNA, 484 bp, Glycine max
agattgaatcacgtgtcgtatagaagagactgacgtcggacgcacgcgtacgtaaactcggaattcggctcgagattctccatacctcaacgaagaggttaaagagacggcaacactttgctgtccgccttgaccgagcagagcttcgtcttggccctcgattttgccctaaagtactctcagtcacaacagacaccgtcgtcgtcgtcgtcgtcatcaatggcaccgaagcagaccaaggctgagaagaagatcgcttacgatgcgaagctgtgcgacctaatggaggagtacggccagatcctcgttgtgaactccgataacgtgggatcgaaccagctccagaacattcgcaagggtctccgtggcgactccgtcgtcctcatggggaagaacaccatgatgaagcgctcagtcaggatgcacgctgagaaaaacggaaacaaggcctatctcaaccttatcccgctccttgttggcaagg

SEQ ID NO: 252913 - DNA, 484 bp, Glycine max
  unsure (1)..(484): unsure at all n locations
cgggtccnntgtnggttgtagagatgaatttangtagtctaagtggcgcttaataagagagaggacgtcggacgcatgaattcgtgaattcggctcgaggtagaagccacttggattctctcgtctcctcggtgatcaccagttacccttctcgatttctcagcacagcgagagagatagagtcattcggcattcgaatgcgtgtgttgtgtggtcagtcaccgatggcagcactaactgccagggtacatgccgctgacgattaacgcatcacactgcctcgtaatggcgataccggtgtcagacagagtgactgcttttgcgaatttctgatggctccatcacaactaattttatgacatcagtggcattgatcttaagagatgaatgattgtacttgatggcaaacgggtcaagtgacaaatctgggatactgctgatcacgagcgatttcgctctaatagcagagcttactaccgtggtg

SEQ ID NO: 252914 - DNA, 475 bp, Glycine max
  unsure (1)..(475): unsure at all n locations
cgggnntcgcgttcngaatgattangggcttanagtccgtaataacattagtcacatcgcatgcatgagtacggaattcggctcgagggttattcaatgaactctgttgaaggtgctgctgtttctaccattcatgttaccccagaagatggtttcagttatgcaagctttgagactgttgggtatgacttcaaagtggtgaatctgaacgaaatggttaagagggtattggcatgttttctcccaactgagttctctgttgcagttcatgtggatggtgcaagcaagttgtttgatcagacgtgttttctggatgttaagggatactgtcgcgaagagaggagccacgaagggcttggaatgggtggttctcttgtctaccaaaaatttgccaagacttgtgactgtggttcacctagatcaactctgaagtgctggaaagaggaagatgaaaaagagtaagtttctttaagtg

SEQ ID NO: 252915 - DNA, 494 bp, Glycine max
  unsure (1)..(494): unsure at all n locations
gtcgtgccggtcgttcncgaatgaatcangtggcgtatagaagagtactgacgtcggacgcacgcgtacgtaaactcggaattcggctcgagatctttctaacccttgttcctgtcaaagttctggttcttgcacgtttgaaaaatgaacaagaaagcacctacttgcgttacaaattggcaggttataattgagaacaaggatggtatttttgatgggttgcctcacttaatttatgcatccagagagaagcgtccccagtatcatcataattacaaagccggagccatgaatgtcttgactgtgacatgtttgtgaacaatcccaagattgttcaacacgctttgtgcattttgatggattcacaaagaggaaaagaagttgcgttcgttcaatgtttccaacaattctacgatggaataaaagatgacccttttggaaatcagtgggtgattgcatttgagtacattatacggggcatggcangacttcaa

SEQ ID NO: 252916 - DNA, 505 bp, Glycine max
  unsure (1)..(505): unsure at all n locations
ngcncccnctctcactttgagggcttntagaatgaatcatgttgtcagctagaagagtataacgtcggacgcacgcgtacgtaaacacggaattcggctcgaggttctcacaaattaaaaaataaaaatattatatatacatatatatatatatatatattctcttcgagtccgtcgaaaaagaaaacaatggcgaaacccagcagcgaaaagccagaggagcatagcgattccaagtactacaaaggggtccgaaagagaaaatggggcaaatgggtatccgaaataagactacccaacagccgtcagaggatttggttgggatcctacgacacccccgagaaggccgcgcgtgccttcgacgcggcaatgttctgcttacgtggccgcaacgccaagtttaatttccccgacaacccacccgacatcgccggcggaacgtccatgacgccgtcgcagattcagatcngcgccgcacaattcgcaaacgcgggggcccacgaag

SEQ ID NO: 252917 - DNA, 472 bp, Glycine max
  unsure (1)..(472): unsure at all n locations
cgaattaataaggcgtcgtatagantagactgacgtccgacgcacgcgtacgtaagctcggaattcggctcgagatagagagtaagcctgagatcatggaaaaagttggtgtggctgtaaatagcaaaaatcaagaatccaaagcaacttccaccattaccattaagggtttcatgagccttctaatgaaaagtgtagatgagaatggtgatggtagcaagagagttatttctctgggtatgggtgacccaactctcaccacttattttcccatctcaaatgtagctgaaaaagctgttgctgaagcacttcagtcacacaggtttcgtggctatgctcccactgcaggtcttccacaggccaggattgcaattgctgaatacctgtctcgtgaccttccttaccaattatcaagtgatgatgtttacatcacctgtggatgcacacaagccattgatgtttcagtggcgag

SEQ ID NO: 252918 - DNA, 475 bp, Glycine max
  unsure (1)..(475): unsure at all n locations
aggggggnnttgggtnggaatgatcangtgtctagtgcactagcataacgatgacgtcggacgcacgcatacgtaagctcggaattcggctcgagggccttttcttatctctctctttctttctcatcttttggggcctcaaaatagtaggtgccactacacaatatgggttccaaagtaaagaccttggttttgctctctttgttttgcttggctctatttgagtccttgcaccaagcaagagcagcaaagtcacataatgatcataatgtgactcgcttgaaggggagaaaggagttaaatagatgtaatttgttcattggaagttgggttattgacccttcacaccctctctatgactcctcaagctgcccctttatagatgctgagtttgattgccaaaagtatgggagacccgataagcagtatctcaaatactcttggaagcctgattcatgtgcctttaccaagttcc

SEQ ID NO: 252919 - DNA, 494 bp, Glycine max
  unsure (1)..(494): unsure at all n locations
tcgcttggggcctntcttgaatgaataattcagccgctggaagagtacaaacgtcggacggacgcgtacgtaaactaggaattcggctcgagaaacacaccatggcatccgaaacataccagtccaagaatgtgtgtgtaattggtgctggaccctcggggctattggcagcgagggagctgagaaaagaacgtcacaaggtggttgtgttggagcagaaccatgatattggaggtcaatggctatatgacccaaatgtacaagacgaggatcccttatgaagagacccttggctaaaggtgcatagcagcatctatgagtctttaaggttcatgtctcccatagagatcatggggtcaactgatttctccattttagtcaagaaatgtagagacacactgacgtttccaagccagacaaagttccttctctagcttaacgacttttgtgaatggtttaagttgagtgagatgataaagctcaatacgaaggtg

SEQ ID NO: 252920 - DNA, 492 bp, Glycine max
tggccgtgggggctctctgaatgaataatgaggcgtcgtaataacactaacgtcggacgacggcgtacgtaaacaaggaattcggctcgagctcctacctcgtccttctaacccaacctcaacctgtttctccgagaatcacatccaacgcttctgtcatggaggaagttaacgttgtggaaactaaggatggaactgtctcagtagctgctgcgtttgctggtcatcaggaagccgtgcaggatagagaccacaaatttttaagaaaagctgttgaagaagcatataaaggggtagattgcaaagatggaggcccttttggtgctgttatagttcataatgatgaaatagttgctagttgtcacaacatggttctgtgtaacacagacccaactgctcatgctgaggtgacagcaataagagaagcttgtaagaagcctaagcagatagaacttgcagattgtgaaatatatgcttcttgtgaaccttgcc

SEQ ID NO: 252921 - DNA, 498 bp, Glycine max
  unsure (1)..(498): unsure at all n locations
ggacggctggtgtggtggggtgtntgaatgaatgatgtggtcgcgagaagagcacacgntggacgacgcgtacgtaaactaggnattcggctcgagattaattgcangaatggcacttcgttgcttggtgatgtccctttctgttctcttcactcttggtcttgcgagagaaagccatgccagagacgaagatttttggcatgctgtttgggcaaacactcccattccaagttcattgcgagattctcaaaagctgggcctggaagttggtgaatcgatgattaacctaagccaattgaagaaacacagttaccgaaaaccttcctccaaaaagaagaccttcaatcaagcaaaaccatgaaagttcaattccagaagcctcccctttaacaaccaatggggttgttggacaagggttaagggaattaaaagccatactaaaggaaggattaattttttgagaactaaggttccagaaaaaaacccattggggggaaa

SEQ ID NO: 252922 - DNA, 496 bp, Glycine max
  unsure (1)..(496): unsure at all n locations
ggggtgggcgtgtatgaaggaatcataagtcgccanatntaaaccagtgacggncgacgcacgcgtacataaactcggaattcggctcgaggcagaaatgaagatgatagatgatggctttgaggagaaagctaaagagcggaaaaaacagaagctgaaaatgctagaagagaaaggattgttaactaagagaagtaaaaagagaaaacgaaataaagaatttgcagaggaagggaaagaacaaaagaaagaggttttaactgctaggaatgtggcggaaatgaagatgatggatgagggtggcattgaggagaaagcagaagaggggggaaaacaaaaattgcgaacagagaaaggtttgtcaaagaaaaaaaagtcaaaagaaagaagaaaagaatctgcagaggaaggaaaaaaacagagaaaagaggaagtagaaccattagcagatatagcaactccaaagaaaaggagtaagaagagacagtaaattatg

SEQ ID NO: 252923 - DNA, 469 bp, Glycine max
  unsure (1)..(469): unsure at all n locations
gggtgngaantcttgaancagtaangtgtcgtaatgaagaaaaatgacgtcgcacgcacgcgtacgtaagctcggaattcggctcgagatcaagctcactcatcacttctcatctttcttcacaataactattagctcatcatctccagcacagctggacatgtcatcaaatgcaaagctgcggttgcatgggacgcacggaacccatttgttattgaagaagtaaaggttgcactaccacaagctggtgaagtgcgtttgtagatgctctagagatctccttgccacactgacgtctacttctgggaagctaatggcgacaatcgagatgatcttcgtggatttagtgatgaagctggtcggattgtggagagcgtaagataggatgtgactcatcgtaaagtagaggaccatgctctcactgtgttcaccgaggagtctatggactgccttcattgcaagtcagagg

SEQ ID NO: 252924 - DNA, 474 bp, Glycine max
  unsure (1)..(474): unsure at all n locations
agggnncncnaggctgntgaatacttaatgatctangtgtcgtaaataagaataatgacgtcggacgcacgcatacgtaagctcggaattcggctcgagcagaaattgttgccccacttgttgcaacccttcccttggagatcaagggagaaattgaggagtttctcaaagtggttttcactctgtttcaagacctggattttactttcttagagatgaatcctttcacattggttgatggaaagccttatcctttggatatgagaggcgagctagatgacactgctgctttcaagaacttcaagaaatggggagacattgaatttccactgccatttggaagggttatgagtgccaccgagtctttcattcatggattagatgaaaagacaagtgcatccttaaaattcacagtgttgaacccaaagggccgaatttggacaatggtagctgggggaagtgctagtgtcattt

SEQ ID NO: 252925 - DNA, 493 bp, Glycine max
  unsure (1)..(493): unsure at all n locations
cggcccgtgggcttgtcntgaagaaataatcgagcggcgagaagagacaaacgtcggacggacgcgtacgtaaactaggaattcggctcgagattttttttctctctttcataacctagtgagactctgtgtcagagtttgtgaagtgaatcccataatcatgaagaaaggaaacttgggacttggtctcaaactctcagttcctgtgtctgatcaatctaattttgccaggttcctgactgaaagtgggacttttaaggatggggatctgcttgtcaacagggatggagttcgaattgtctctcagaatgatgtcgaagctccacctccaatcaagcctacagacaaccagttaactttggcagacatagatgtaatcaaagttgttggaaagggaaatggacgggtagttcaattggtgcaacacaaatggactagtcagttttttgcgttgaaggtaattcagatgaatattgaggagtctatgcgcaag

SEQ ID NO: 252926 - DNA, 496 bp, Glycine max
  unsure (1)..(496): unsure at all n locations
cggtctcagtggggntctctggaatgaatcatgtggtcgctagaagagactaacgtcggacgcccgcgtacgtaaactacggaattcggctcgagattcaattctgttcatcctttgcttcccaaagaacgagaacataaaaagcaatgggtagccttgaagcggaaagaacaacagtaggattggcagcacgagacccttcagggattctctccccatacacctacaatctaagaaacacaggccctgatgatgtttacataagagttcactactgtggaatttgccattctgatctccaccagattaaaaatgatcttggcatgtccaactatcccatggtcccaggacatgaagtggttggtgaggtactggaagtggggtcagacgttagcacgttcagagtgggagagttggtaggagttggactcctcgtaggttgctgcaaaaactgccagccatgccaacaagacattgagaattactgcagcacgaa

SEQ ID NO: 252927 - DNA, 490 bp, Glycine max
  unsure (1)..(490): unsure at all n locations
tcgcgggtggggcttntggaatgaatcatgtggtcgctagaagagtataacgtcggacgcacgcgtacgtaaacacggaattcggctcgaggaattatttcaagaattccttccacaccttcaaagttacaagccatggatacttctcatcctctttctattgaaagcttctcttacagctggttagtgaacctgaagccatcactagaaagccttgatggctcccttagaacttcccttgatgcttctgatgaagcttcttccttcattgaaatggacccaagaatgccaccttctaaaagattcttcagaaactcccaagatttcaaatttgacttcccaatttcacaatcccctctcactcttgttgatgctgatgagctcttctccaatggctacctcatgcacctttttgttgagtcattgaagatggaagcatttgaggcctcagatgccaatccaaccctaccttcctcatcacatgtgcaan

SEQ ID NO: 252928 - DNA, 492 bp, Glycine max
  unsure (1)..(492): unsure at all n locations
tggtggtgaggggcgcnttgagaatgtatcangcgtcgtatagaaactactgacgtcggacgcacgcgtacgtaaactcggaattcggctcgaggttcacaattctgatccagaacttataactcttttcacatctccgtttggtttaggattgagtgttggatctagtcatctagatttaaaaaaaaaatgaagatcattgagaaaattcgcgcagcttctgctgatccaaacagggtggtgttctcatttgagttcttcccccccaagactgaggatggtgtggacaatctgtttgagaggatggaccgcatggtggctcacaacccctctttttgcgacatcacttggggcgctggagggacaacggctgatcttacattggaaattgccaacaagatgcaaaacattgtctggtgtgagaccatgatgcaactcaactggcacaacaagcctgtcgaaaaagattgacaatgctctccaaacatcaaa

SEQ ID NO: 252929 - DNA, 491 bp, Glycine max
  unsure (1)..(491): unsure at all n locations
tagcggtggggnnntntgagaacttatcaagcgtcgtatagaatagtactgacgtcggacgcacgcgtacgtaagctcggaattcggctcgagtctctttcttcttttctttaatacttaattcgtcttttttatctttctttctttctttccccttttatatttctgggttcgatattgttatcggtttatttgtgcactacttccgccggctattcaggaatcatggctagggttttggctcagtctattaatgtccctggtctattggctgagcataggcatggtcagcaaaaggaatcaggaaaattaaaaagatcgaccaaaatgatgagtgctttacgaacaaatggattaagaatgtcaggtttctcagggcttcgtactttcaatcctttggatactatgttgagacctggaatagattttcattctaaggtatccattgcaacttcttcacggcgagcaagagctaccagatgcgtgcccaa

SEQ ID NO: 252930 - DNA, 490 bp, Glycine max
  unsure (1)..(490): unsure at all n locations
gggggcgtggggnntntncgaatgtatcangcgtcgtatagaatagtactgacgtcggacgcacgcgtacgtaaactcggaattcggctcgagcgcgggtgaggtagaacccttccacggtggtgactgcgcgatgggtgcctacaagtatgtttcagagctatggcgcaagaagcagtctgatgtcatgcgcttcttgcagcgggtgaggtgctgggagtataggcagcaaccttccattgttcgcttgacaaggtcgacccgccctgacaaggctcgtcgcttgggcttcaaggctaagcagggctatgtgatataccgtgttcgtgttaggangggtggccgaaagaggccagttcccaaaggtattgtttatgggaaagccacanacaaaggtgttacccaactgaaatttcagcgtancaagaggtcattggccganngaccagctggacggaagctgggtggactaagggtcctcaaattctac

SEQ ID NO: 252931 - DNA, 478 bp, Glycine max
  unsure (1)..(478): unsure at all n locations
cgtgggntatcgtgggtngaatgattaatcgtcttcagcgcgtagataattncgtccatggccgcaggtagactctagaggatcccctcggggaattccaattccacattttcaagaaataaggaggcaaaaatgttcatatatgaattggaattatttgttttcttattaggcctatcctgaagccaaaggaaatgagatcggaattcctcggggaattccaattccacattttcaagaaataaggaggcaaaaatgttcatatatgaattggaattatttgttttcttattaggcctatcctgaagccaaaggaaatgagatcggaattcctcggggaattccaattccacattttcaagaaataaggaggcaaaaatgttcatatatgaattggaattatttgttttcttattaggcctatcctgaagccaaaggaaatgagatcggaattcctcgggggtaccgagctcgaatn

SEQ ID NO: 252932 - DNA, 482 bp, Glycine max
  unsure (1)..(482): unsure at all n locations
cggtggccnntngtggtggnggaatattaatgagcgangagtcgtaaaatagatcgatccgtcgctcgcacgcatacgtaaactcggaattcggctctagcaagattgaagatgatagaccttgcgcgcgtgcagaaggagcttgtggaatgcagcaaggacgcggagggatcgggcatcaaagtcagccccaaaaacgacaaccttgttctcttgatcggcaccattcctggccccgtcggaactccatatgaagggggcattttccagattgatatcacattgcctgatgggtacccgtttgaaccccccaagatgcagtttaaaaccaaagtttggcaccctaatatcagcagccaaagtggagctatttgcctggatatcttgaaggaccagtggagcccagcactcactctgaagactgcacttctttctgtgcaagcacttctctctgctcctcagcctgatgatcctcaagatgn

SEQ ID NO: 252933 - DNA, 481 bp, Glycine max
  unsure (1)..(481): unsure at all n locations
tggggnnnnnnncggtttcgngaatgacttcaatgagtctangtggcgcaaaataagaacaatgacgtcggacgcacgcatacgtaagctcggaattcggctcgaggttttgcaactcataattctgagccatatgggccagttccaaagtacagaggaaaatgtgaagctgatccagaaactaaaagaagttactgtaatgggaagattgttggagcacaacactttgctcatgctgcaatagctgctgggtcatttaacccttcaattgactttgcttctcctcttgatggagatggacatggaagtcatacagcctctattgcggccggaaataatggaattcctgtgaggatgaatggccatgaattcgggagagcgagtgggatggctcctcgtgctaggattgctgtctacaaggcaatttatagactgtttggagggtttgttgcagatgtagttgctgcaattgatcaggctg

SEQ ID NO: 252934 - DNA, 489 bp, Glycine max
  unsure (1)..(489): unsure at all n locations
ncgtggggtggggngcttcgaatgaactacgtgtcgctagaagagaataacgtcggacgcccgcgtacgtaaacacggaattcggctcgagaaagttttttcctttctctgctctttgccttctctgacacatttggtgccttgtagagcgtgttttggcatgaatgtggtatggcgaatgacgttgatgttgctgagcgtggctccttctctgggaaggactaccaggaccctccaccagcaccactcattgatgctgaggagctcacaaagtggtccttttacagggctctcattgctgaattcattgccactttgctcttcctctacattactgtgctcacagtcatagggtacaatcaccagactgacctcaaggaaaatggtgaaatctgtggtggggttggcattcttggcattgcatgggcctttggtggcatgatcttcatccttgtctactgcactgctgggatttcanggggtcacatt

SEQ ID NO: 252935 - DNA, 496 bp, Glycine max
  unsure (1)..(496): unsure at all n locations
ctgtttaggggggnnttntgaagaatgttatgaggtcgtcatatataaactactgacgtccgacgcacgcgtacgtaaactcggaattcggctcgagattgaatcctgtgcatacatcctcacttatcctcttcctgcgactctcttctcattggttctccgtattctccctcaatcctattaaccttttcttctttcatttcccaccccattctataatcaatcaatggcaatggcttcttcaatccctaatgcgccttctgcgttcaattctcagagctacgttggtctcagagcgccactgaggaccttcaacttttcttctcctcaagctgccaaaattcctcgctcccaacgccttttcgtcgtcagagcctccgattcggagttcgaagccgccgttgtcgccggtaaggttccgccggcgcctcccgtgccgcccagaccggcggcttcggttggaacaccggtggttccttcacttcnacttcaccgg

SEQ ID NO: 252936 - DNA, 473 bp, Glycine max
  unsure (1)..(473): unsure at all n locations
aattttttcagcgtcgtatagantagactgacgtccgacgcacgcgtacgaaagctcggaattcggctcgagcacaataatctaaaactagtactatatcgaataattctctaattaacatggcttcgacatgtacaccctccacactcattctcctcaccctcaccacattcctcattgcccaagcccaagcccaagccccggcaccgtccccgtcgggcgcggtgaacctcaccgcgatcctggaaaagggtgggcaatacaccaccctaatgaaactcctgaaggacacacagcagctcactcaaatcgagtcccagctcaaatcaaactcagaaggcttcacgctcttcgcgccgaccgacaacgccttccagagcctggaaaccggttgcctaaacaagctcagcgacgaccagaaagttaagctcattccccttcacgtcactcccaaatactacacgatctccgan

SEQ ID NO: 252937 - DNA, 464 bp, Glycine max
  unsure (1)..(464): unsure at all n locations
ggttctggtatattgaatagttangtgtacgatagtagttaatgacgtcgacgcacgcatacgtaagctcggaattcggctcgaggccgcgtgacgagaaggccaatttcatgcgcgagattctcctcaagtatctgcccctcggggaacgcaacagagctcaaaagcatagagaatatagagagaggataatagcaaattatcagcctctacatcgggagttgtactctgtggatcctgctacattctttgtccccacatttctgagagcaattaatgataatacggaacaaagtattagaagtatagtgtctgagccctctccaggcatttttatatttgacatatttcagacccacttttgtgagttattgctatctgagattgaaaattttgagaagtgggtgaatgaaactaaatttcggatcatgcgtccgaatacaatgaataaatttggtgctgta

SEQ ID NO: 252938 - DNA, 493 bp, Glycine max
  unsure (1)..(493): unsure at all n locations
tgtcggggtggggnntttggaatgaatgatgtggtcagctagaagagacaaacgtcggacgacgcgtacgtaaacaaggaattcggctcgaggcaatagcaagtcggtcgctcagacacgcacagatctgatctgatctgatctatctgaagccgaaaacgccgacggtgatgatgaagatggggtgttcacgttgctccttcttcctcttcctcatcctcttagtggcgctcttcccctcgtcgctctccgagatccgcttctccgagatccgaaacgacgatcgccgcatcatccccttcgatcagtttggattcacccacaagggtcgccttgagctcagcgtttccaaaatctcactctccaattccaatttggacctctcgaaggtcggcttctttctctgcaccctcgattcctggcttcatgtcctccagcaactcgaggacggtgagattcggtgcgcccttcaatccgatctggtcaagtccgt

SEQ ID NO: 252939 - DNA, 484 bp, Glycine max
  unsure (1)..(484): unsure at all n locations
agaggtntnatgaatgaatcatgtagtcgctanaatagacttaagtcggacgcccgcgtacgtaaacaaggaattcggctcgagctgagcaggccgagcgttacgaggagctggttgagttcatggaaaaggttgcaaagactgtggaggttgaggagttgacggtggaggagaggaatctcctctctgtggcttacaagaacgtgattggtgcgaggagggcttcgtggaggatcatatcctccattgagcagaaggaggagagcangggcaatgaggaccacgtggccattataaaggagtacaggggcaaaattgaggctgaactcagcaagatctgtgatgggattttgaacctccttgagtccaacctcattccttccgctgcatctcccgagagcaaagtcttttaccttaaaatgaanggtgattaccacanggtacttgctgagttcaagaccggggcagagatgaaagaggctgn

SEQ ID NO: 252940 - DNA, 481 bp, Glycine max
  unsure (1)..(481): unsure at all n locations
gtggnttntgaaatattatcgtgtcgctagaagagtacagacgtcggacgcccgcgtacgtaaacacggaattcggctcgagggaatttttagcccaggtttcaatggcatcaaggctgaagcatgaaaattttgttcagttgcttggatattgcattgatggaacctcccgtattcttgcttatcagtttgcatctaatgggtctcttcatgatattttacacggcagaaaaggtgttaaaggagcacagcctggtccagttttgacatgggcacaaagagtaaaaattgctgtangggctgcaagaggacttgaatacttgcatgagaaggctgatccacacattattcaccgggacatcaagtcaagcaatgtgctaatctttgatgatgatgttgctaaaattgcagattttgatttatcaaatcaggctcccgacatggctgcacgtcttcattctactcgtgtccttggaaactt

SEQ ID NO: 252941 - DNA, 467 bp, Glycine max
cggggctggttacctaatgatctaggtgtcgtaaataagatcatgacgtcgcacgcacgcgtacgtaagctcggaattcggctcgagcttcattgcattattgcagataagatcaaccctactcccttcagattcgggccaagatggcatcacttcatgctaatgtgacatcagttgtttgcaagagtggcaaccatgcttctcaatcgaaattcacaagctcttcattcttgcctgggtttgatgttgttggtcgtgcttcaaatgcttggaagaaagaacttgtcccatcttccatttccttggtgcctagagccacactaacatttgatcccccaactaccaactcagacaaaaccaaacaaaggaagcacactgttgaccctgcttctccagattttcttgcccttccttcatttgaacagtgctttccaaagagcaccaaagaacacagagaagttactcct

SEQ ID NO: 252942 - DNA, 502 bp, Glycine max
  unsure (1)..(502): unsure at all n locations
ggggctnctagggggctggtcgggtcggaatgaatcatgtggtcgctanaagagacttacgtcggacgcccgcgtacgtaaactaggaattcggctcgagataaccaaacactcttcttcatgttcctcttcttcttcttgtacttgttctatctgtgacgagcatcatggcctcgagagcagtgctattgttggctatgtgtgtgcttccggccatggttgtggccattcgcccagcaaagaaccctttttgcgtgaagggtcgcgtctactgtgacccttgccgtgctggttttgagacctcagcaaccacctacattgccggtgctgagattatgttgcaatgcaagagcagggttagcaacgaggttgtgtacaccaagaaggggtacactgactcaactggagcatacacaatgtacgtggacgaggatcacgcagatcanatatgcagtgccaagcttgtaagcagccctcaacctcaatgcaaggaagtcacccc

SEQ ID NO: 252943 - DNA, 484 bp, Glycine max
  unsure (1)..(484): unsure at all n locations
ggggtgnttcgagagattatgtggcgcctagaagagtacaaacgtcggacgcccgcgtacgtaaacacggaattcggctcgaggccgcccttttttttttttttgacagcagaaagcgaatgataagccaattatattgatacaaacttaaccagatttcaacaagaaaactctaaatcaaactaaaagctctacaagagataaacaccccttaactaaacagttggatttagaagtacaaatagagaactcccttctttaaactattcacgttttggaaagacaaccaatttacggagggagcagggaaatattttttggaagcaagaaatatgtttatcaggaaatgaccagaccagctacaacagatgatcaaaatcatcagaacctacataaatgcaattatcagtccattctctaatcgtcatcctcttcctcgccactgccttcctcatcatcatcttcatcattcagctcagataca

SEQ ID NO: 252944 - DNA, 472 bp, Glycine max
gcaatatcatgcgtcgaaggatatagtacttgcgtggatccacgtctactatcaatgatccctcggggaattccaattccacattttcaagatataaggaggcaaatatgttcatatagtaattggaattagttgttttcttatgtaggcctatcctgaagccaaaggaaatgagatcgggattcctcggggaattccaattccacactttcaagaggtatggaggcaaaaatgttcatatatggattggcattatttgttttcttagtaggcctatcatgaagccaaaggacatgagatcggaattcgtcggggaattccaattccacattttcacgatatacggaggcaaatatgttcatatatgaattggcatcaggtgatttcttattaagcctagcctgaatccataggaaatgagatccgcattcctcagtggtaccgagctctaattctctatagtgagtcgtat

SEQ ID NO: 252945 - DNA, 484 bp, Glycine max
  unsure (1)..(484): unsure at all n locations
gggggtcttcgaatgaaccatgtggcgtcgtatagantaatactgacgtccgacgcacgcgtacgtaagctcggaattcggctcgagcaatggttcaggtcttgcatcatatccaatacacactgttacaataagaatgatgatgacctctggtgaagctgtcaagtacaagagctccttggatgcaatcacacagatcctcaacagtgaaggtgccaaatccttgttcaagggtgccggtgccaacatcctccgtgccgttgccggtgctggtgtgcctgctggttatgagaagttgcacgttcttgtgttcggcaagaagtacggatctggtggggcttaagttccaatgctgactcagtactatgatatgtttttatatggcgatgatgaataacactgagtttcacgaatcctatactaattgctggcgcaagatttggttaactncattaacaagatgggatattgtccgaaatccgtt

SEQ ID NO: 252946 - DNA, 474 bp, Glycine max
  unsure (1)..(474): unsure at all n locations
agaatgtattgaggcgtcgtatagaaaagactgacgtcggacgcacgcgtacgtaaactcggaattcggctcgagatttccttaaggaatgcatatcatggaggaagttctagtacaattggactcaccgcgatgaacacatggaaatacccaataccagagggagaagttcatcatatcatgaatccagatccataccgtggaatctttggctcagatgccaataggtacgccagagaattgcaagatcatattgactatggcacatcaggaaaagttgctggatttatagctgaaacaattcagggagctggaggagcagttgaactggcacctgggtacctaaaactggtctatgacattgtacacaaagctggtggtgtctgcattgctgatgaagtgcaatgtgggtttgcgcgcacaggaagccatttttggggatttgagacacagggtgtcattcctgatatagtn

SEQ ID NO: 252947 - DNA, 478 bp, Glycine max
ggggctcttcgaatgaatcatcgagcgtcgtatagaaactactgacgtcggacgcacgcgtacgtaagctcggaattcggctcgaggccaggtcctcacccaggctgtgagcctaggcatgattgttacgtctgcactgataatatggaaggcattgatgtgcgttactggcagtgaatctcccgttgttgttgttctttctggaagcatggaacccgaattcaagcggggagacatcttgttcttgcacatgagtaaagatcctattcgggcaggggagattgttgtgtttaatgttgatggacgtgagattccaattgttcatcgtgtaattaaggtacatgaaagggaagatactggggacgttgatgttctcaacaaaaggagacacaattaatgggatgacaagctactgtatgctcatggtcaacttggcggcaaaggcacacataatggtaaacccgtcgggtcctaacaa

SEQ ID NO: 252948 - DNA, 454 bp, Glycine max
ttaatgagtgaggtgtcgttaataaatatatgcacgtcgacgcacgcatacgtaagctcggaattcggctcgaggagaaacccaatgtggatctctcagcaagaaaactcttcaagttggttcttcctcccagttgttaccttcatcatcctctttcttttacgtactttcctcaatcttttatccaaccggaacaatgattccaaaaaaccctcaccaccatctcctccaaagcttccaataataggaaacctccatcaacttggtacccacattcaccgcagtctccaatccttagctcaaacctatggttctttaatgctacttcacttaggaaaagtgccagtccttgttgtctccacagctgaggcagctcgtgaagttttgaaaacacatgaccccgttttctccaacaaaccacatcgtaagatgtttgatatcctcttgtatggtt

SEQ ID NO: 252949 - DNA, 481 bp, Glycine max
  unsure (1)..(481): unsure at all n locations
ggggcnntctgagaatttatcaggcgtcganaagagagnaacgtcggacgcccgcgtacgtaaacacggaattcggctcgagctccaacaataccgagttccagatcgtgccgagcatcatcagggatggcttgaagaccgttctcaataagtaccagaagatgaaggacagaatcgtcggtgtctcagaagacacgaggacgagtgtcaataggctctagcagatgcaggtcaatggctcactcttgttcacggccatcaacgtcaatgactcgatcaacaagagcaagtttgataacttataaggatgccgtcactcgcttcacgatggacagatgcaagctactgatgtgatgagtgccggacaggtacctgttgagtgtggctactgaaacattggcaagggatttacatcagcatcaaccaagaccgcgctcgtatccatgtcaccgatattgaatccatttgtgcccttcaagcn

SEQ ID NO: 252950 - DNA, 497 bp, Glycine max
  unsure (1)..(497): unsure at all n locations
ggctctctctcccttgggnngnttgaatgattatcgtgtcgctagaagagtcgatacgtcggacgcccgcgtacgtaaacacggaattcggctcgagcgtagatcgaaagggaatcttcttccatgggctccaagcggattccgaaagaacttaagggactccagaaagaacctccaacctcttgcaacgccggtcctgttgcggaagatatgtttcattggcaagcgactataatgggtccccctgatagcccttatgctgggggtgtttttctagttactattcattttcctccggattatccattcaagccacccaaggttgcatttangactaaagttttccacccaaatatcaacagcaatggtagtatttgtcttgatatcttaaaggagcagtggagccccgccttgacaatatctaaggttttgctctccatttgctccctattgacggatccaaacccagatgattccttggtgcctgaaattgctca

SEQ ID NO: 252951 - DNA, 483 bp, Glycine max
  unsure (1)..(483): unsure at all n locations
cggggcncnntgagaatgaatgaggcgtcgtatagagcaataacgtcggacgcacgcgtacgtaaacacggaattcggctcgaggggacataaaacctcaaaatttactggtcaatcctcacactcatcagctaaagatttgtgactttgggagtgcaaaagtcttggtcaaaggggaaccaaacatatcttacatctgctctaggtactatagagcacctgaacgtatatctggtgcaactgagtacaccacagccattgatatttggtcaactggttgtgtacatggtgaactaatgcttgtccagcctctattccctggtgagagtggagtacatcagcttgttgaaattatcaaggttttacgtaccccaataagggaagaaatcaagtgcatgaatccttaatataccgagttcaaatttccacaaattaaaactcaaccatggcaccagatcgttcacaagcgcttacctccttgag

SEQ ID NO: 252952 - DNA, 487 bp, Glycine max
  unsure (1)..(487): unsure at all n locations
aggggcttnttgaatgaatgatgttgtcgcgaatanantagtactgacggccgacgcacgcgtacgaaagctcggaattcggctcgaggccgtcgtcgctgtttttgtgtgtcgcttcttcgtaagtgcagctgcaatggtgaagggacgccaaggagaacgtgtcagactctacgtgaggggtacaatccttggatacaaaaggtccaagtcaaaccagtatccaaatacatccctgatccaaattgaaggtgtgaatgccaaagaagaagtatcatggtatgctggcaagaaaatggcctatatctacaaggctaaggtgaagaagaatggaagccattaccgctgcatatggggcaaggttacaacgcctcatggtaacagtggtattgtccgtgcaaaattcaagtcgaaccttccacccaaatcaatgggagcccgagtaagagtattcatgtatccaagcaacatatgagattcacgtgag

SEQ ID NO: 252953 - DNA, 474 bp, Glycine max
  unsure (1)..(474): unsure at all n locations
agggnnnntggntnnnaatgatttagagtccnnggtcgntaatnanatgaggccgtcgcctgcacgagtacgtaagctcggaattcggctcgaggttttccttgtttcccctattattatctcgctctcacaaaatcatggcattctctagtgctttgattctgtggtcgttgctagcaatcaacatggccctgccaaccctcgcaaccgtctacaccgtgggagatacttcaggttgggcaattggtactgattatagcacttggactggcgacaagatcttttcagtgggtgatagtctcgcgttcaactatggagctgggcacacagtggatgaagttaaagagagcgattacaagtcgtgcaccgcagggaattctattagcacagacagtagtggtgcgaccacaattgcccttaaaagtgcaggcactcattacttcatatgttctgttcctggacattgttctggcg

SEQ ID NO: 252954 - DNA, 503 bp, Glycine max
  unsure (1)..(503): unsure at all n locations
cgcnctntctttcncattgaggcgttntagaatgaatcatgtggtcgctagaagagactaacgtcggacgcacgcgtacgtaaactacggaattcggctcgaggtctttcgctgttccaagatgggtgtggctgagaacattcccgatatggaggagggtaccttggagattggaatggaatacagaactgtatctggagttgctggaccattggtcattcttgacaaagttaagggacccaaatttcaagagattgttaatattcgtttaggagatggaactactcggcgtggacaagttctagaggttgatggtgaaaaagctgttgttcaggtatttgaaggtacatctggaatcgacaataaatttacgactgtgcaatttactggagaggtgttaaaaactcctgtctcactagacatgcttggacgcatatttaatggctctggaaaaccaattgataatggtccaccaattttacctgaggcttacctggatattt

SEQ ID NO: 252955 - DNA, 470 bp, Glycine max
  unsure (1)..(470): unsure at all n locations
agtactaatgtagtcgtcttatagattntaacgtcggacgcacgcgtacgtaaactaggaattcggctcgaggttctgttctgacgtttaactcacttcttcttcttcttcttttgatctcttcgttcgcatcttgcggataaaagcagcgctgtaattttcgtttctctgctttgtgcttttttcatacgttgcgtttgggtgttaagttgttccgtttcagccatggtggagaacaatctcttcgaggatatatttatggtcgaaaaattaaaccccgatgacaaaaaattattcgataaagtcactcgcattgaagcaagaagtgaaaagtttgacatgtttatgcacctggacattaattccgagatatatccgttaaaggttggtcagaagtttgctcatgtgcttgtttcaacacttaatcctgatggaactccagacactggaatattataccaagatcagtc

SEQ ID NO: 252956 - DNA, 503 bp, Glycine max
  unsure (1)..(503): unsure at all n locations
cgcnccncctcctcctttgggcnnttngggaatgaatcatgttgtcgcatagaagagtaataagtcggacgcacgcgtacgtaaacacggaattcggctcgagccagcaccaagagactcttcaagatcacgctctctctcctccgcctcggcttcaactcctccaaatgcaaaacggcagccaagatggccgtggccaggatcaagctgctgaggaacaagcgagaggtggtcgtgaggcagatgcgtcgcgacattgctcttcttctccagtctggtcaagacgccaccgctcgcatcagggttgagcatgtcatgagagagcaaaatgttttggctgcaaatgagttcattgaactcttctgtgaattagtggtggccaggctcgcaatcatttcaaagcaaaaggaatgtccagcagatttgaaagaaggaattgctagcttgatatttgcagcccctaagtgctctgaaatcccagacttgtggcacttaagaatatc

SEQ ID NO: 252957 - DNA, 467 bp, Glycine max
  unsure (1)..(467): unsure at all n locations
tcctctagccgcacaggatatactaacttgcgtccgtccaggtcgactacaaaggattcggctcgaggtttcagtgagtgatcggtgttcacttgatccttcataagtcgtcatcatcatcatcatcatcaccgttgattgaagaagatgccgatcagaaacatcgccatcggaaggcctgaagaggctactcaccccgacacgttgaaggcggggttggctgagttcatctccaccttgatcttcgtgttcgccggttcaggttccggcatcgcctacaacaagctcaccgacaacggcgccgccactcccgccggcctcatctccgcttccatcgcccatgctttcgccctcttcgtcgccgtctccgtcggcgccaacatctccggcggccacgtcaacccgccgtcancttcggcgcctttcgtggcggcaacatcancttactccgcggcatcgtctacgtt

SEQ ID NO: 252958 - DNA, 496 bp, Glycine max
  unsure (1)..(496): unsure at all n locations
ggtncctctcctaagggcngttgagaatttattaggcgtcatatagaatagcaatgacgtcggacgcacgcgtacgtaaactcggaattcggctcgagcactgttccaatacggaatctaaggcaaagcaaaccaaacatcttgaatcatgggttcaacaggtgagactcagattaccccaacccacgtatctgatgaagaagcaaaccttttcgccatgcaactagccagtgcttctgtccttccaatgatcctcaaatcagcacttgagcttgatctgttggaaatcatagccaaggctggccctggtgttcatctttcccccactgacatttcttctcagctcccaacacagaaccctgatgcacccgttatgttggaccgtatattgcgcctattggcttgctacaatatcctctctttttctctccgcactctccctgatggcaaggttgagangctctatggtctcgcccccgtgccaagtacctggtta

SEQ ID NO: 252959 - DNA, 497 bp, Glycine max
  unsure (1)..(497): unsure at all n locations
ngccncctttnncttggggcngttgagaatttatgaagcgtcgtatagaatagactgacgtcggacgcacgcgtacgtaaactcggaattcggctcgagtcagggacctcccaacgcagctctcaatcaagcccgatttggtgacctacaacaccatcatcaaggcgttttgcgaaaagggttcgtttgattccgcattatcagtgtttcaagagattgaggagaagggtttgagccctgattccatcacgttcaacactttgcttgatgggttgtattcaaagggtcgttttgaggagggtgagaaagtgtgggagcaaatgggtgtgaagaatgttgctcctggtgtgaggagttactgctccaagttggtggggttggctgaggtgaagaaaatgggtgaagcagttgtgctttttanggaaatggagaagttgggtgtgaagcctgacctcttctgcatcaatgctgtgatcaaaggtttcgtgaatgagggt

SEQ ID NO: 252960 - DNA, 466 bp, Glycine max
  unsure (1)..(466): unsure at all n locations
ttctttcggcccccgagtgancaggngnggncggccnnnnnnnnnaanaaangatcccctcggggaattccaattccacattttcaagaaataaggaggcaaaaatgttcatatatgaattggaattatttgttttcttattaggcctatcctgaagccaaaggaaatgagatcggaattcctcggggaattccaattccacattttcaagaaataaggaggcaaaaatgttcatatatgaattggaattatttgttttcttattaggcctatcctgaagccaaaggaaatgagatcggaattcctcggggaattccaattccacattttcaagaaataaggaggcaaaaatgttcatatatgaattgggattaattgttttcttattaggcctatcctgaagccaaaggaaatgagatcgggattcctcgggggtaccgagctcgaattccctataatgagtctg

SEQ ID NO: 252961 - DNA, 465 bp, Glycine max
  unsure (1)..(465): unsure at all n locations
aggntgngaatactgaatgatctaggtgtcctaaataagaagaatgacgtcggacgcacgcgtacgtaagctcggaattcggctcgaggaaggcgtcttcataaacgcctttcttctccgtttccgtttcctcgttcaaattcgctttttgatctgcgaaaatgagagagtgcatctcgatccacattggtcaggctggtatccaggtcggaaatgcttgctgggagctctactgcctcgagcacggcatcgggcccgatgggcaaatgccaagtgacaagacagttggcggtggtgatgatgctttcaatactttcttcagcgagactggtgctggaaagcacgtgccacgtgcagtgtttgtagatcttgagcccactgttattgatgaggtgagaaccggaacttaccgccagctttttccaaccagagcagctcatcagccgcaaagaagatgccgccaaa

SEQ ID NO: 252962 - DNA, 479 bp, Glycine max
  unsure (1)..(479): unsure at all n locations
agggcnctggnctttaagaatgaatcaagtagcgaggtgtccntaaaannaaagncnnnnngncnnnnnannnnnnnanctcggaattcggctcgagatcaaagaagaaacaaccgcaacagatctccgtttctcgccaaacaaacacaaaatggctgccttcagcggcgacgaaaccgcacctttctttggcttcctcggagccgccgctgccctcgttttttcctgtatgggagcggcgtacggaaccgcgaagagcggcgtcngggttgcttcaatgggcttgatgaggccggagctggtgatgaaatcgatcgtgccggttgtgatggctggtgtgttgggtatctacggtttgatcattgcggttatcataagtacgggcattaaccctaaggccaaatcgtactatctttttgacggctacgctcaactctcttcaggtctcgcttgtggcctcgctggcctctccgctggca

SEQ ID NO: 252963 - DNA, 452 bp, Glycine max
cgaatgatctaggtgtcctatataagagaaatgacgtcggacgcacgcgtacgtaagctcggaattcggctcgagtagaagagccttccatatatagcctcccaaaaaaatgaagagtactacctctttggctctctttctactttgtgccctaacttcatcatatcagccttcagccaccgctgatattgtattcgacaccgaaggcaatcctattcgaaacggcggcacatactatgtgttgccagttataagaggaaagggcggcggaatagaatttgccaaaaccgaaacagaaacatgccctctcactgttgtgcaatctccctttgaggtctcaaagggtctaccactgataatttcatccccatttaaaatccttgacatcaccgaaggacttattttgagcctcagtttcacttatgtacccccctgtgcctcaactccttctc

SEQ ID NO: 252964 - DNA, 480 bp, Glycine max
  unsure (1)..(480): unsure at all n locations
cgggnngcgtgttncgaatgaatcangtggcgtanagtcantaataacagcaagcccgtcggacgcacgagtacgtaaactcggaattcggctcgagcggctcgagcctctctctcgtgtcgggtgaagggaaaaatcaaatcaacatgctgagagtgggcgcaaagagggttttggaaacgacgttgtttggggttagggttccggcgaggctgtaccacgagagggttgtggatcactacgacaacccccggaacgttggatcgtttgacaagaacgacccgagcgtggggacgggtttggtgggggccccggcgtgcggcgatgtgatgaagctccagattaaggtcgacgacaaaaccggaaaaatcgtcgatgctcgattcaaaactttcggctgtggctccgccattgcttcttcctccgtcgctactgattgggtgaanggaaggcaaatggangaagttctgactataaaaa

SEQ ID NO: 252965 - DNA, 557 bp, Glycine max
  unsure (1)..(557): unsure at all n locations
gaggagaggagagcnnaggagagagaggagaggnagnnagggaggaagggaggggttggtagccgatcgaaggacagaggagatctatgacgtcagatgcacgcgtgcgtgaagctcgggaatgcgactcgagctagggcggtgatgtacaccaaagaggaggcagatggaagaagacttaagaatccattgggcactataagcggaaaggaataggaataaccgggttgaccaggaaatagtgcaatggcagaactggatggggcctttagaggcaccgatagggaggctggtgaaatgtctaggtttcttttgaagagcgatgggctcttccttgggaggtcttctggaatgaactgtgttggagcagtaagaagtgaggaagccattggcccaggggacacagaggtagagaggaagtgggagcggggatgaaacatttgagcaagaggtttatgcggaaaacttggatcaggttggattgagcaccgaagcgactggggtggagctcgtagggatcaaaagagagaggcggtttaaaatttttgaaaaggtaa

SEQ ID NO: 252966 - DNA, 561 bp, Glycine max
  unsure (1)..(561): unsure at all n locations
gagatgagagaaggggagtagcagagaggagagnnagnnnagnnagaaaggtttgttctatgattcatcgtgaacacttcgaagagctatgacgtcgcatgcacgcgtacgtaagctcggaattcggctcgagcaactntagaatccaagggcataaaatgacaattgttgaggtggaagggacccacactctccaaaacatttatgattcacttgatgttcatctagggcagacttactctgtgttggttactgctgatcaaccaccccaagactacctcattgntgtcacaacacgattcacctcccaagtgttgaatgctacctncatttttcgttatagtaactctggtggaggtgttactggcctttntccttgggggccaactattcaagttgattggtctttaaaccaagctcgctctcttaggaggaatttgacagcaagtgggccaagacctaatccacaaggatcataccattatggttngataaacacaactcgaacaattagacttcaaaattctgcttcagttatcaatgggcaaccgaattcccctt

SEQ ID NO: 252967 - DNA, 554 bp, Glycine max
  unsure (1)..(554): unsure at all n locations
gaggagaggagagggaggagtgagaggagatggagnnagngatgggtgtgagtatgagcagtatcgtcagtactactgagaccngcnngcctgcctgcacgccgactctagcagagcccctcggggaagcccaagncctctttgtcaagaagtaacgaggccaacgagggcagatatgactgggacttattcgcttccttattaggcctatcctgaagccacaggaaatgcgatcggaattcctcggggagttccaattccacattttcaagaaataaggaggcacaaatgttcatatatgaattggaattatgtggcttcttattaggcctatcctgaagccaaaggaaatgagatcggaattcctcgaggaattccaattccacatttgcaagatatgaggatgcgcaaatgttcatatatggatgggaaattatgagtttcttattaggcctatcctggaacccaaggaaatgagatccggattccttgggggtacccgaactcgaattccctaaaatgatgcgtactaaatccgtagtcctgtgctagct

SEQ ID NO: 252968 - DNA, 567 bp, Glycine max
  unsure (1)..(567): unsure at all n locations
gacgcagagagaaggggaggatgagagaggagagnnagnnnagnnatgaaggtttgatttcagctactacgtcacnacatcgaagagctatgacgtcgcatgcacgcgtacgtaagctcggaattcggctcgagtcgaagagctgtagaaaagaacctagagtggccactttagacgaacgcccttctgcgaaaagggggcttcctcttgaagctaaccctgaagtcatgaaccagttcctttggggtcttggccttccactggacgaggcagagtgctgtgatgtgtttggcttagatgaagagcttctggaaatggttgcgaagcccgtactcgccgggctatttctttatccaattaccgcagagtccgaagaagaaaggttgcaacagtgaaactgaaataaggattataggcagcaaagtgtattgtatggaacaaaccgtgggtattgcctgggggacactagaggctgcttcatgcactttcgaacataaccggcgaaaccaaacctggtgagcggtaaatagtttggtaaagggtgtaaagtcaactcaaagcctgatt

SEQ ID NO: 252969 - DNA, 570 bp, Glycine max
  unsure (1)..(570): unsure at all n locations
ggaggagatggagaggggnaggaggaggagagggagaggnagnncagnnggaggggtgtgagttaagtatcttctttcgtagnnacngctgngagagataagctagcgtgcctgcaggccgactctagaggatcccctcggggaattccaattcttcattttcaagaaataaggaggcaaaaatggtcatatatgaattggaattatttgttttcttattaggcctatcctgaagccaaaggagatgagatcggaattccgcggggaattccaattccacattttcaagaaataaggaggcaaaaatgtgcatatatgaattggaatgatttggttacttattaggcctatcctgaagccaaaggaaatgagatcggaatagctgggggaattccaattccacagtttcaagaaataagggggcaggagtgtgcatagaggaattgggaagggtgggtgtagtgataggcctagtgcgaagccgaagggaatgagagcggagttccgtgggggtgcgcggctttaaattccctataatgggtcgagattaatgcgtaaatcagtggggat

SEQ ID NO: 252970 - DNA, 565 bp, Glycine max
  unsure (1)..(565): unsure at all n locations
gattatgatgaaaggggaggagnagagtggatagnnagnnnagnnattaatggttctgctctagtagtgactanagtagcactctagaagagctatgacgtcgcatgcacgcgtacgtaagctcggaattcggctcgaggcatgatcaatttttttggttcttgatttccttcttttctcttggtttgtgttgtcgttgagaagtcgcacataatcttcttccttctcgattttcctctccttcgacgattcttagggtttcgcttcgttcaccaacgcgcgtggtttctcttctcttcacgattttggggtcgaaatttggagtttagtttgccggcatgtccatgagtgagcgcaagactattgacctagatcaaggatgggattttatgcacaaaggcattttgaagctgaagaacattctataagggcttcccgagcctcagttcagctcggaggactatatgatgctatacacgaccatatacaatatgtgcactcagaaaccggcttatgactattcccaacaactgtttgaccaggaccgggaatcgttttaaagaat

SEQ ID NO: 252971 - DNA, 555 bp, Glycine max
  unsure (1)..(555): unsure at all n locations
gaggagaggagaggcnaggagagagaggagagnnagnnagnnaaagggtctgttttcagtgagactganatnacntcatagaagagctatgacgtcgcatgcacgcgtacgtaagctcggaattcggctcgagcttcgtttgcgtgctgaagctcttgttgtctcacaggtacacaacagcactggaggcaatcacagagggagtgaaccacatcaacatgtctgattcatacaagaagaatcgcatgtaggtcttcaacaccaaaaagcctacattcttctacgtcaatctcgccaagaggtctatgcaacaacataacgaggttgagctgtcagcactaggaatggctattgctacagtgattactagggctgagatcttgaaaaacagtgagcttgcctttgaatagaaaagggcgacgtcgaggatggacatcaagagtgattctagaaggcaaccggtgcgaaaggccaagacggaagtgttatttggagagaccgagaaacttagggaggtgaggggggctgatagggctgatgctgagaatgaggaaa

SEQ ID NO: 252972 - DNA, 573 bp, Glycine max
  unsure (1)..(573): unsure at all n locations
ggtgtatgagagaaggggntggtgnagagagggagagtnagnnnnagnnntgggaggttttccgtatagctagcattgnagtnactactatagaagagctatgacgtcgcatgcacgcgtacgtaagctcggaattcggctcgaggtacctcgctctctgtctcatcatgctcgctcacggcggcgccggcggtgtccccgccgccaagcctgctgtctccgacaacaattccgcgccgctacccgccgccaaactgagctacaaatgttcggtctgcaacaaagccttctcctcttaccaagcactcggtggacacaaggccagccaccggaagctcggcggcgagcaccactcgacctcctccgccgtgacaacgagttcggcgtcgaacggcggtgctaggacccacgagtgctccatctgccaaaagacgttcccaacaggacaggccttgggaggacacaaacgttgtcactacgaaggcgggaacagcgccggaaccggcttttgaggaatggggttcacttacacagggagccccccggatttcgaattggaacctccgggttttt

SEQ ID NO: 252973 - DNA, 483 bp, Glycine max
ggaaggtcttaccgggggatgcgcagtatctctcggagagacaagcttgcatgcctgcaggtcgactctagaggatcccctcggggaattccaattccacattttcaagaaataaggaggcaaaaatgttcatatatgaattggaattatttgttttcttattaggcctatcctgaagccaaaggaaatgagatcggaattcctcggggaattccaattccacattttcaagaaataaggaggcaaaaatgttcatatatgaattggaattatttgctttcttattaggcctatcctgaagccaaaggaaatgagatcggaattcctcggggaattccaattccacattttcaagaaatatggaggcaaaaatgttcatatatgaattggaattatttgttttcttattaggcctatcctgaagccaaaggaaatgagatcggaattcctagggggtacccaacttggttcccttatagggag

SEQ ID NO: 252974 - DNA, 488 bp, Glycine max
  unsure (1)..(488): unsure at all n locations
nggtagggtgtcttaaacggggggaggatgaacgtaaaactctagaagagctatgacgtcgcatgcacgcgtacgtaagctcggaattcggctcgagggcggcttcttcttccgttgatgtctatcggcgtgaacaatggcgacttacgctgcgatgaagcccacatagcccggcttggaggagccccaggagcagatccacaagataaggatcaccctttcctccaagcacgtcaaaaacctcgagaaggtttgtgcggacttggttcgcggggcaaaggacaagcgcctaaagggtaaaggacctgtcaggatgcccactaaggttcttctcatcactaccaggaagtccccttgtggtgaaggtaccaacacatgggacagatttgaacttcgtgtgcacaagagagtgattgacctctacagctgcccagatgtagttaagcagattacctctatcacgattgcacctggtgaaggaggttaag

SEQ ID NO: 252975 - DNA, 571 bp, Glycine max
  unsure (1)..(571): unsure at all n locations
ggagaatgagagaaggggagaatnatgagatnnagagnnagnnnatnnnaggaatttttgnttaatgaaactactgnaacactcacanaagagctatgacgtcgcatgcacgcgtacgtaagctcggaattcggctcgagcacaaccgaaacagattccatctctttacaaaacgacaacgctatcaaattggtcccttcttttccttttcctcttcctctccacccttcacatagctatcaccctatcaacccccaccaacttcatcaagtactcctgcagcaccacccagtacccagccctctgcatgcagtccctctacgtctacgccttcaccatccagcaagacccccacgagctcgtccagacagccctctccctctacctcaaccacaccgaggccatcaaaaccttcgtcgcaaaatgcaacaaattcagaggcctgaaaccgagagaatacgctggcttgaaggactgctcttaagaaatcaatgacagcgtcgaccggcttaacccgtcgcttaaaggacttaaattgagaaaggtgaaagggtgaggaacttacgttgca

SEQ ID NO: 252976 - DNA, 558 bp, Glycine max
  unsure (1)..(558): unsure at all n locations
gagtatgaggagaggggagtgggatgagaggagagnnagnnntgnnataagggtatacgttattgaaaagtatgatagcatantgaagagctatgacgtcgcatgcacgcgtacgtaagctcggaattcggctcgagctcgagccgaatcggctcgagtcagcacttgagttattagtatcaaccacgaatgtccacaagttgagaaagaaaagcaaaagatggaagctgttaagttggtgtctagtgatccaagtgagagaccagacacataccgagtcgcttacataattcatttcttgcttggtgctggcaacttgctcccttggaatgccttgatcactgcagtggattactttgcctacctctatccaaccaaacacatagaaaaggtgttctctgtggcctatatgatttcatctgtgatggtgcttcttgggatgatcagttggggaggttggagcaaaacaacattgaggctgagaatgaacttggggttctccatgttgggtatgcctcttaatggagccccaagcttaaacttggccttgagcagaac

SEQ ID NO: 252977 - DNA, 568 bp, Glycine max
  unsure (1)..(568): unsure at all n locations
gagtatgagagaatgggctggagnagatatttagagnnatnnnagnnatgaaggtttctgtataggaagcatgatagtaccactctagaagagctatgacgtcgcatgcacgcgtacgtaagctcggaattcggctcgagctcttcttcattcagtctttgacttcttggctttcaagaatgacatccaattttggaacaaaaataaatctatggaaggactctctgcaaagaccgttgttgtgagctttgcttgtcagcttatcatcttcctttatctacttgacaatgacacctcttggatgattcttgcaagctctggaattggttgtgttattgagttttggaaaattggtaaagccatgcgcatagagattgataggacaggaaggatacctatgttgaagctccgcgatcgagaatcatacgtacggaataagacaaaggaatatgatgatattgctatgaagtatttgttctatgttttatttctccttgttgctggcttttctggttactcactgatgtatgagcgtcacaagaacctggattcctgggatttggccttc

SEQ ID NO: 252978 - DNA, 576 bp, Glycine max
  unsure (1)..(576): unsure at all n locations
gatgatgagatagaggggatggatnagtagagggagagnnatgnnatgnnatgaatggtgttaggttcagttagtattacagtaccactcatagaagatctatgacgtcgcatgcacgcgtacgtaagctcggaattcggctcgaggagcaatgttgttgacgatatggtcaacagcaacgccatcctctatgagcccggtgaacatccagaccatgtggttgtcattaagtacgtgccttatgtaggggacagcaagagggccatggatgagtacacttctgagatattcatgggtggaaagaacacaattgtgttgcacaacacatgtgaggattcactgttagctgctcctattatcttggacttggtccttcttgctgagctcagcactcgaatcgagtttaaagctgaaaatgagggaaaattccactcattccacccagttgcgaccatccttagttacctgaccaaagcccctctggttccaaccgggtacaccagtggtgaatgcgttgtcaaagcagcgagctatgctggaaaacatcctgagggcttgtggtggattaacttccgg

SEQ ID NO: 252979 - DNA, 487 bp, Glycine max
  unsure (1)..(487): unsure at all n locations
nggaagtgtattttaagacaagccatgtacagtatcactctagaagatctatgacgtcgcatgcacgcgtacgtaagctcggaattcggctcgaggcaacttgtatcaaatcaaaacgtccttcaagagctatggctgtctgaaagagtactaggatttctaagggaaataagggtggcacgtagaacgctgtttatccttttgtcaagaatgactggtacgatatcaaggtcccttgactattctaggtcacgaatattggcaaaaccctcgtatctcgtatccagtgaaccaatattgtatgctaaagactcaaacattggctttttgaagtctcattgactgatctgaaaggggatgaataccactccttcaagaagattcctatgagagctgaggacgttcaaagtatgaatgtactgacttacttgttgagaatggatatgacaaattgaaagactgaggatttggagcgtaaaatgtgaac

SEQ ID NO: 252980 - DNA, 562 bp, Glycine max
  unsure (1)..(562): unsure at all n locations
gaagaagatggagaggggaggatgagagagnnagagnnagnnnagnnagaatggtttgngtttagctagtatctngaacatatcnaagagctatgacgtcgcatgcacgcgtacgtaagctcggaattcggctcgaggttttcgtatgcttaaaatgctgtggtgtgcacagaagtcttggctctcagatatcaaaggttttatctgtgacattggatgaatggtcaagtgatgaaatagatgcaatgattgaagttggaggaaattcttctgctaattcaatttatgaggcttattttccagaaggatttacaaaacctggaccagatgccactcatgatcagcgtgtgaaattcatccggttaaagtatgagcatcaagaatttttgcaacctagtgtgcgcattgtgtcaggaaaaagcaaccccccaaaaagtatatccaaagggattatggatagttttcgaattacaagtgattcacagcatatggaaaggatggtagaatttattggaatgtaaaaggtgaaagtgatcaaaggctcagatttaactttcaaaat

SEQ ID NO: 252981 - DNA, 574 bp, Glycine max
  unsure (1)..(574): unsure at all n locations
gattatgatagaattttatgtttattatattgatattnatgnnatgnnnagagtggtctgngtttcatttgcatcgttgacatatcgaagagctatgacgtcgcatgcacgcgtacgtaagctcggaattcggctcgagagaatacaataacatagcatagagtgagaagtgagaagagaaaaatggcaatctccatacccagtagacaacttttcatagatggagagtggaaagtccctcttctcaacaatcggtttccgatcatcaaccccgctactgaagacatcataaggcatattccagccgctactaaagaagatgttgaccttgcggtggatgctgctaaaagagccttttcccataacaaaggcaaagattggtcttcagctcctggctctgttcgtgctcgctatcttcgagccattgcttcaaagataacagagaaaaaggatgaactaggaaaggctggaaacaattgattgtgggaaaccactagatgaagcactggcagacctggatgatggtattgggtggtttaactactaatgccaagcttgcaaaaaggattggcct

SEQ ID NO: 252982 - DNA, 557 bp, Glycine max
  unsure (1)..(557): unsure at all n locations
ggaggagatggagaggggaggaggagggaggagagtnagnnnagnnagagtggtatgagttattgcaagtattgnaacnactacgaagagctatgacgtcgcatgcacgcgtacgtaagctcggaattcggctcgagctgcgttcggcaccagcgaaacgctcttcgttatctttttctcgactccgcggcgtagatccgaggagttcgggaaaccctaactcatcttccttcacaacagaacaacgcttcttttccctatccatcatctcaactgaagtcatggctggactagcacctgaggggtcacagttcgatgctcgtcaatatgattccaaaatgagtgacttactttcatctgatggacaggacttcttcacatcctatgacgaggtttatgatagttttgacgctttgggtttgcaggagaatcttttcaggggaattacgcctacgggtttgaaaagccattagccattcaacaaaagggggtaggttcccttttgaaagggcctggggtattcaacagggttaaattggaacctgggaagacggcat

SEQ ID NO: 252983 - DNA, 586 bp, Glycine max
  unsure (1)..(586): unsure at all n locations
tgatggatgatatatattanaattatnatgatatttatatgnnatnnnnatnnnatgaatagtattctgttctagttctcactacagtacnactatagaagatctatgacgtcgcatgcacgcgtacgtaagctcggaattcggctcgagcgaagggattcatttatcagataaaaggtcaacacaggctctgcctgctgcttcgatgatccatgataactcgtctgatcgcacggccttagtgccagcgactcatcattcatatctctgccctatcaactttcgatggcaggatagtggcctaccatggtgctgtctggtagtacggctaatgagacccagatctacagatcgagatgcccctgaatcatgctcagaaaacccagtcggcaggatccgctcctactatcttatatggtcataacgtaaccgattcagcaattgaagtatctactatctattatacaggctaatgaaacttgatgaatatatggaagtccctactatcttatgatgtggctaagaaaacccaatttgcatttgaagtttgcttcatctttattggttcttagaaaaattatattat

SEQ ID NO: 252984 - DNA, 555 bp, Glycine max
  unsure (1)..(555): unsure at all n locations
gagaagagnagaggggaggtgagagaggagagnntgnnagnnnagaagggctcngtatacgtagcactacagtnaccatgatagaagagctatgacgtcgcatgcacgcgtacgtaagctcggaattcggctcgagctcgaacaaccacaacaccatcttcatcacatggcaaacgcagcatctggtatggcagtccatgatgactgcaagttgaggtttttggagctgaaggcaaaaaggacacaccgtttcatagtttttaagattgaggagcagcagaagcaggtcattgtggagaagcttggtgagcctgcccagggctatgaagatttcactgccagccttcctgctgacgagtgccgttatgctgtttatgattttgagtatctgactgaagggaatgtccctaaaagcagaatttttttcattgcgtggtcccctgacacatcaagggtgaggagcaagatgatttatgcaagctccaaagacagattcaagagggagctggatggaattcaagtagaagtgccagcaaattgatccaccgggagggg

SEQ ID NO: 252985 - DNA, 567 bp, Glycine max
  unsure (1)..(567): unsure at all n locations
tgatgatgagagaaggggaagtagnagagaggagaggnagnnnagnnntgaagggatttgaatgcacgtcctacagtagccactatagaagatctatgacgtcgcatgcacgcgtacgtaagctcggaattcggctcgagggaaggcgttattctgagaagggtcattccttcggataacagttgcctcttcaatgctgttggctatgttatggatcatgacaaaaagaaagctgctgagttgagacaggttatagcagcaacagtagcaagtgatccacagaaatattgtgaagcatttcttgggaagccaaacacagagtattgtaactggattcttgactcagagaagtggggaggtgcaattgaactttcaatattagcagattattatggacgtgaaattgcagcatatgatattcagacaactcgatgtgatttgtatggtcaggaaaggaattattctgaaagagtgatgctgatttatgatggtctccactatgaggcattagtgatggctccctttgaaggagcgtccagaggagtttgaccaaaccatatttgctgt

SEQ ID NO: 252986 - DNA, 490 bp, Glycine max
gataattgtctcttaaggtggggaagacggtatcactctagaagatctatgacgtcgcatgcacgcgtacgtaagctcggaattcggctcgagggctcttccaggtgacaatgttggctttaatgtgaagaatgttgcagtcaaggatctcaagcgtggttttgttgcatccaactccaaggatgaccctgccaaggaagctgccaacttcacatctcaagtcattatcatgaaccaccctggccagattggaaatggatacgcaccggtgcttgattgccacacttctcacattgctgtcaagttttctgaaatcttgaccaagattgacaggcgatctggtaaggagcttgagaaggagcccaaatttttgaagaatggtgatgcaagtatggttaagatgattccaaccaagcccatggtggttgaaactttctctgagtatccctcccttggtcggtttgctgtgagggacattccttaaactggg

SEQ ID NO: 252987 - DNA, 485 bp, Glycine max
aaggaagtgtttctatagagggggtgaacagtattactcggagagacaagcttgcatgcctgcacgtcgactctagaggatcccctcggggaattccaattccacattttcaagaaataaggaggcaaaaatgttcatatatgaattggaattatttgttttcttattaggcctatcctgaagccaaaggaaatgagatcggaattcctcggggaattccaattccacattttcaagaaataaggaggcaaaaatgttcatatatgaattggaattatttgttttcttattaggcctatcctgaagccaaaggaaatgagatcggaattcctcggggaattccaattccacattttcaagaaataaggaggcaaaaatgttcatatatgaattggaattatttgttttcttattaggcctatcctgaagccaaaggaaatgagatcggaattcctcgggggtaccgagcttggaatccctattat

SEQ ID NO: 252988 - DNA, 490 bp, Glycine max
  unsure (1)..(490): unsure at all n locations
gaagtgatgatgtttaagcccattgangtactatatgagagattacgtagacatgcctgcatgcgtactctagatgatcctctcgatgtattccaattccttatcttcaagatataccgagcaaaggcgagcatatatgaattggaaggatgcgtaatcttattaggcctatcctgaagccaaaggaaatgagatcggaattcctcggcgaattccaattccacatattcaagaaataaggatgcaaaaatgtatcatatatgaataggaattataagatttcttattaggcctatcctgaagccaaaggatatgagatcggaattcctcgattaattacaattccacataatgaagacttattgacgtataccagaccatataagaatgcgttacattcagagaatcataatgcccatcctgaaaccaaattaatatgatttcgttattccttgacaattccgaaatccaagatttctttattacattt

SEQ ID NO: 252989 - DNA, 564 bp, Glycine max
  unsure (1)..(564): unsure at all n locations
gagtaagatattattttatattntgatattatatgnatntntgnnatgaatttttgattaaagtatcatgcgacnatatcgaagactatgacgtcgcatgcacgcgtacgtaagctcggaattcggctcgaggcaagcgcttaaagaggctcctgctgatatgcaatgcaaggatgagtttcttcttcagagtgtaaaaactgttgatggtaccagtccgaaggatatcactgcagacatgttcaacaaggatgcaaggcatgtggttgaggagtgcaaattgagagtgctgtatgtttctccacctcaaccaccgtctccagtcccagaaggttcggaggaaggatcctcacctaaaggttctgtttcagagaatggaaatgccaatggttctgacttcacacaatcggcaagaggatttactgagcgacctgaatcttaagacagatctgcatatgctagagctcttatcttaaggctgactgaagaaaagaataatgcaattcaacaaaataacaagctcttgcacgaactggaacgacttaaaaagggaaggcagtaaaa

SEQ ID NO: 252990 - DNA, 575 bp, Glycine max
  unsure (1)..(575): unsure at all n locations
tggaggatgatgtnagaggggnatggagnagtagatggnagagnnnagnnnntggnnagaaatgggtctgcgaatctgaacaatactgnagcnatatcgaagatctatgacgtcgcatgcacgcgtacgtaagctcggaattcggctcgagctcgagcctgtatttttcaggctcgtactgctcacacagaactccttgatttaaaaccgcttcccatgtcttcccttggcaacagtacttatgaagcattatataaattttcacattttaatcctatacaaacacagacttttcatgtcctgtatcacacggacaataatgttctgttaggagctccaactggaagtggaaaaactatatctgctgagcttgccatgcttcgtctttttaatactcagcctgatatgaaagttatttatatagctcctttgaaagctattgtcagggaaaggaatgagtgattggcaaaagcgtcttggctctcaactagggaaaaaggatggtgaaatgactggagactattcttctgatttgacggcttttttggtcgcccaatttaatcatatcaacgtct

SEQ ID NO: 252991 - DNA, 569 bp, Glycine max
  unsure (1)..(569): unsure at all n locations
gattatgatatatatttttgtatnatgatatttagatnnatnnnatnnnagaatgttctcngttttgaaattactgnagcactctcgaagagctatgacgtcgcatgcacgcgtacgtaagctcggaattcggctcgaggaaaactcttcttcaacaacccttcttttgatctgtgcaagtgatcttgaaaggagggaacaacaatggtgaagtctataaactttctcctacttctgtctctactagcctttgctcccttatgtcactgtaaaaagaaaataggaggttacctctaccctcaattctacgacggttcatgccccagagctcaagagattgtccaatccatcgttgccaaggcagtggcaaaagaaccccgcatggctgcttcgttgctcaaactacatttccatgattgttttgtcaagggctgtgatgcatcggtgctgctagatagcagtggaactattatcagtgagaagaggtcaaatcccaaccgtgattcagcccgaggattttaaagcattgatgaaattaaatctgcgcttgaagaaggattgccaactta

SEQ ID NO: 252992 - DNA, 570 bp, Glycine max
  unsure (1)..(570): unsure at all n locations
tgaggagatgnatattttaatatanagtagatgnataggnatnnnagnnnagaaatggtgtctgtttatgatcagcattacagtagcactatagaagatctatgacgtcgcatgcacgcgtacgtaagctcggaattcggctcgagctttttttctcctcttctgccctccacacaacttctctctcctctctctctctctacaaatccttctttcttctcttcgctgctcactgtagcgtagccatggctttcagagttggaggagcgggaggaggaaatgcctcttctggcatgggtgttgctgagcatagcgtaagcacgttcctggaattgcagaggaagaaagttcatcgctatgtgatttttaaaattgacgagaaaaagaaagaggttgttgttgaaaaaactggaggccctgctgaaagctatgatgatttcactgcatccttgcctgaaaatgattgccgatatgctatctttgactttgaattttagacatctgagaactgccaaaagagccaaaacctttttaatgcattgagcttccttggtaacccgcattcaccct

SEQ ID NO: 252993 - DNA, 572 bp, Glycine max
  unsure (1)..(572): unsure at all n locations
gattatgagataaggggnaggagacgagagggagaggnagnnnagnnnaggaaggtgttngtaatagaatgtatgatagtactcctctagaagagctatgacgtcgcatgcacgcgtacgtaagctcggaattcggctcgagattccaataaataccttcctctctatattttcgcacaataccctctcacccttcaacgatgagttactacaatcagcagcaaccacccgtcggtgttcctcctccccaaggttacccaccgccggattcttacggaaaggacgcgtaccctccgccagggtacccgccgcaaggaggataccctccgcaggcgtatccagcacaggggtaccctccaccctacgcgcctcctcagtacgctcagcctccgccgcaacaacaccagaattcatctggcccaggttgcttagaaggatggtaagtctctctctctctctctctctctgcatatttctgagtgaaggtgttcgtggcaactcagatcgggattcactcgattgattgcggttgcgattaccggtgcaacaataacttatggtgcgcccgcccg

SEQ ID NO: 252994 - DNA, 494 bp, Glycine max
caaggagggtgatgtttgtcaacaagcagggatggatggaaacactatagaagagctatgacgtcgcatgcacgcgtacgtaagctcggaattcggctcgagaatttttctacaaactcgttttactattatgcatactacattggagcaaatgcctcctggattgtaatacccttgatcattgccatccgctgctggaggaagatctgtgcagcatttcgagttcaaggtggccagacaaaaaagcctaaagttcgttgaaggaaacattttcaggttattggtcttagagatcctgagctaataatgatgttttggggtagttgagataggagagattgttgtaagaattgtgacattgattctcttaaactgcatatctcaaggagaaaaaataaatcccagtgtcatttgagaaagtgatgtttttaaatttaaggttttgaataaggattttcccaacaatggatttgaaatgaattttggatggtacg

SEQ ID NO: 252995 - DNA, 494 bp, Glycine max
  unsure (1)..(494): unsure at all n locations
nagaggtgtctctacgacggggggnggatgcgaaacactatagaagagctatgacgtcgcatgcacgcgtacgtaagctcggaattcggctcgagctctctttctccgattcattgccgctccaccagcaatggccacgcacgtgagtcacgtgatagtagcggcagcatttcttctatttcttctccctttctctttctccttctccatctcccattctcaccgatccgctgcaatcaacctcttcgctgccactcccacaagcttagaagacgcgtacgaggcgcttagagtttttcagattctcggaatcgaagagaagaatactcctgtgaacgaggacacgtgtcagaaagtagttgaaagtctagcctcgtcttctcctctcaaggatttgttctatgccttgaaagttaacgccattttaaaatgcaatgtcaatgggaacgtttttaaggatattgcttcaaggactaaaacccactggtcattgt

SEQ ID NO: 252996 - DNA, 563 bp, Glycine max
  unsure (1)..(563): unsure at all n locations
gatggtgatgnagattttatgttgattatattttgtggnagnnntgnnattaatggtctgagttacgttatctatgttaacactatcgaagatctatgacgtcgcatgcacgcgtacgtaagctcggaattcggctcgagcaagttctcaaatcactcttcttcttcatccttctgatctgctaattctcaaggtattcaaaattgggtggttttcgattgaactgtgatgtccaagccactgctaggcatagcgtaagaggaaggtcaaagcaatgtcactttgttggtttcttcctcagccaccatggaaagtgtgtgcctgaatagctcaaaactgaaagagcgcaactacatggggttatctgattgttcatctgtggacagctccgcgccgtccttctcagatgagactaagagcaatctgaacctcaaggctactgagctcagactggggcttccggggtcgcaatctcccgaacgagattcagatctttgcttgagaagttcgattcagtttgatgaaaagccactgtttcctttgcattctgcaacctgtgaaca

SEQ ID NO: 252997 - DNA, 576 bp, Glycine max
  unsure (1)..(576): unsure at all n locations
gagtatgatagaatggggattatnattatatttagatggnatnnnatnnnatagatggtctgngtattgataaggactgcagtactcctctagaagatctatgacgtcgcatgcacgcgtacgtaagctcggaattcggctcgaggaagagcagtagaaagaaactagaatggccactttagacgaacgcccttctgcgaaaaggtggcttcctcttgaagctaaccctgaagtcatgaaccagttcctttggggtcttggccttccactggacgaggcagagtgctgtgatgtgtttggcttagatgaagagcttctggaaatggttccgaagcccgtcctcgccgtgctttttctttatccaattaccgcaaagtccgaagaagaaaggttgcaacaggaaaacgaaaaaaaggattatagcagcaaagtgtattttatgaagcaaaccgtgggtaatgcttgtggtacaatagggttgcttcatgcacttgggaacataacctncgaagtcaagcttgtttgagggtcattctttgataaattttttaaaacctactggaagccttgattcat

SEQ ID NO: 252998 - DNA, 564 bp, Glycine max
  unsure (1)..(564): unsure at all n locations
gatggagatggagaggggaggaggatgagagggagagnnagnnnagnnnaggaaggtgttctgttatgctagcatgatagtagcactctagaagagctatgacgtcgcatgcacgcgtacgtaagctcggaattcggctcgagctcgagccgtggtgttcatctttcccccactgacatttcttctcagcttccaacacagaaccctgatgcacccgttatgttggaccgcattttgcggctcttggcttgctacaatatcctttctttttctctccgtactctccctgatggcaaggttgagaggctctatggtctcgcccccgttgctaagtacctggtcaagaccgaagatggtgtctccattgctgctcttaacctcatgaaccaggacaaagtcctcatggaaagctggtactatttgaaagatgctgtccttgaagggggtattccatttaacaaagcatatggaatgacagcctttgaataccatggaacagatccaaggtttaacaaggttttcaacaaggggatggctgatcacttcacaatcaccatggagaaa

SEQ ID NO: 252999 - DNA, 584 bp, Glycine max
  unsure (1)..(584): unsure at all n locations
gggaggaggatgagagaggggnagataggagtagatggatgagcnnagnnnnagnnnaggaaggttctgangtattagaaagatatgatagtaccnctcatagaagagctatgacgtcgcatgcacgcgtacgtaagctcggaattcggctcgagcaaaactctctctcgctctctttctctcttccattcccacgttgaaactgccggaaaacacagcgtcgccggagcgaagatcggaaaacgcaaccggaccacataattagggtttctcgaagaatgccactctgcaggcaccacattcggagcgcgcacgctctggcggatccggagctgtgccgcaccgccgatagcgacgactccgaagtgctcctagaagccgtcgcaatgtccggactcgtcggctttctccgccagctcggcgacctcgctcagtttgctgctgagatgttccatgacttacatgaagaagtactggctactaccgcaagaggccacagtcttatgtctcgtgttcaacagcttgaggctgaaagtccaacactagagaaagtttttttgcaccaacctcatattcaataattt

SEQ ID NO: 253000 - DNA, 495 bp, Glycine max
gagaatgtgttcttaaaggggggagagaacgggaaacacttatagaagatctatgacgtcgcatgcacgcgtacgtaagctcggaattcggctcgagcagtgactaaaccaaacctctcactcgccgtcgtagggtttctcctttcgtttagcaacaacaacaatggttgcagccaagaaaaccaagaagacccatgagagcatcaacaacaggctcgctcttgtcatgaagagtggaaaattcaccctcggttacaagacggttctcaaatcacttaggagctccaaagggaaattgattatcattgctaacaactgcccccctttgaggaaatcagagattgaatactatgctatgttggccaaggttggagttcatcattacaatgggaacaatgtggatttgggcactgcatgtggaaaatattacagagtgtgctgccttagcattattgatcctggtgattctgatatcatcaagacactacctgccga

SEQ ID NO: 253001 - DNA, 489 bp, Glycine max
ataagtgtatcttcaccagaaatatacagtatcacatagcagatctatgacgtcgcatgcacgcgtacgtaagctcggaattcggctcgagatttttgttgtttcgagtgagcgagggaagatgtacggtggatattcatggtgtgcagcagcaacaatggatgcaaccaacaaaaccatcagtacccatgatagcattaaaactatactccctcttctcatgaagagtggaaaattcaccctcggctacaagaccgttctcaaatcacttaggagctccaaagggaaattgatcattattgctaacaactgttccacctttgaggaaatcagagattgaatactatgctatgttggcacaaggttggacttcatcattacaatgggaacaatatggatctgggcactgcatgtggaaaatattacagagtgtgctggcttagcattattgatcctggtgattcccatttccttaagacacttactttg

SEQ ID NO: 253002 - DNA, 494 bp, Glycine max
  unsure (1)..(494): unsure at all n locations
ggtgaatagtatcttaactnatgccacgatcgtacctacattagctgttacgtaccatgcacgcgtacgtaagctcggaattcggctcgagcacaaacttgtttttagaccactaagttgcaggctcacaggcgaggcaaatgatcagttacgtcaatggtttgaacatgatgaagcactcgagcgtgctattaatggataatggattctattaccgcatggagatggaacaggtctttcaaagcctatatctttaagtcgaattgacatgaaacccttcataatcgggagtgcaccaatgcaagataattcaagcagttcagttacaatttcttcaccacaggtttcttcaacgcatgctcgaattaactataatgatggtgccttcttcttgattgatttacagagtgagcatggcacctggatcattgactactaatgaaagcatttccggatacctactaattcttcctggttggaaaccttcattttaa

SEQ ID NO: 253003 - DNA, 563 bp, Glycine max
  unsure (1)..(563): unsure at all n locations
gatggagatgaagaggggnaggagnagagagggagaggnagnnnagnnnagtagtggtctgattcacgtaagtatctcgacnactacgaagagctatgacgtcgcatgcacgcgtacgtaagctcggaattcggctcgagggcaggggttcacgtgggaggcgtttagcggtttggatgggggcttcaagctctccgctgcgtccgcggtcatgctgtgcctggagacatggtactttcagattctggttttgctcgcggggcttctccctaatcctgagttggctcttgattccctntctatctgcaccacaatttctggatgggtgttcatgatctctgttggattcaatgcagctgcaagcgtgagggtgagcaacgaactangagcaagaagtccaaaatcagcatcgttttcagtggttgtggtgacagtgatttctttcataatatcagtaattgcagcactggtggttcttgcattaagagatgtcattagctatgccttcacaaggggtgaaaaaggtgcttgctgcaggttcagatctttggccaatccttggc

SEQ ID NO: 253004 - DNA, 567 bp, Glycine max
  unsure (1)..(567): unsure at all n locations
gagtatgatggagaggggnaggaggagaagagggatgagnnatgnnnagnnnatgaaatggtgtgcgatatagtaagtactgnatcnactacgaagagctatgacgtcgcatgcacgcgtacgtaagctcggaattcggctcgaggtgagagtgagtgagtggttctcttgcagcaacaaggtttagtgacaccaaacagactggaaatgggtcgtggggtcagtgctggtggtggacagagttccttggattatctctttggcagtggggtacctgccagcagtgcaaatggtgctcgcactcaaaatgcaagtgctccttcaccaccggttgataagcaaagtccagcaccagcagcagcagcagcacctgcacctgcagcagcagcagcaccagcacctgcaccagcaccagcaccagcaccagctgataagcaaattccagctggaattcctggaagtctcagaaacaattaccatcgcgctgatgggcaaaactggggcaactttctcactgatcggccatctaccaaggttcatgctggcccgggtggtggatctttcctt

SEQ ID NO: 253005 - DNA, 575 bp, Glycine max
  unsure (1)..(575): unsure at all n locations
ggatgtgatttatattttnattatnattatatttatatnnnatnnnatgnngaagtggtgttgngtaatgacaagatatgtagctatccttctagaagatctatgacgtcgcatgcacgcgtacgtaagctcggaattcggctcgagcattttcaagctgtttggtgtaaagatgggacaagtgcttggttgtgttcaagtgaagcagtcaactgtagccgtcaaggaatgtttcgggaagtacgatgatgttcttcaacctggttgccattttgtgccatggtgtcttggctgcggtgtggctggtgtcctttctacgcgtgtcatgcagctaagtcttcgttgtgaaactaagacaaaggacaatgtgtttgttaatgtggttgcctcaatccaatatcgaacattggcagaaaaagcatcagattcctactacaaactcaccaataccaaatcacagatacaattctaagtctttgatgttatcagagctactgttccaaagatggaacttgatgcctgttttgagcagaagaacccatttcctaaagcagttggacaaagacttggtaagg

SEQ ID NO: 253006 - DNA, 551 bp, Glycine max
  unsure (1)..(551): unsure at all n locations
gattagagtagtgggaggtgagagagnagagnagnnagnnagaaaggttttgtatagaagcatcatagtaacactatagaagatctatgacgtcgcatgcacgcgtacgtaagctcggaattcggctcgagtgcttccaagatggttctgctagagaagctctgggatgacgttgttgctggccctcaacctgagcgtggccttggcaagctcagaaaactcaccaccctcaaaactattgatgaaggagacagtagcaagctgcagaagacgttgtcgatgccgtcgacaccgacaaccccgatgactcccacgactccaacgacaccgggatccgcgcgtaaagctgacaacgtttggaggagcgtcttccatcctgggagcaactccgccacaaagaccatcggtgctcagatgtttgacaaaccacttcccaacactcccactgtctacgactggctgtacagtggggagaccagaagcaggcaccgctgaaaggataagctaagaaaaccgtgggttgcatgtaaatattggccggtttcgttaaa

SEQ ID NO: 253007 - DNA, 487 bp, Glycine max
ggtgagtgtacttacaacgcccaagacggtgacactctagaagagctatgacgtcgcatgcacgcgtacgtaagctcggaattcggctcgagctttcaaccttaacactcctcacttcgtttccgtcgcaggtttttacacactccaccgctgcttccccttcacctccgatttcgttaatcagagatcaaaatgtctcgaagatatgacagccgtacaacaatcttctccccggaaggacgtctttaccaagtggaatatgcaatggaggctattgggaatgctggtaccgcaatagggatcttatcaaaagatggggtagtgctggttggtgaaaagaaggtcacatccaagctgctccaaacctcaacttccaccgagaaaatgtacaagattgatgatcatgttgcatgcgctgtggctgggataatgtctgatgccaacatcctaatcaataccgcaagggttccaaagccacggttccact

SEQ ID NO: 253008 - DNA, 489 bp, Glycine max
tggagtgttttcttacgagggggggagtatggtgacactctagaagagctatgacgtcgcatgcacgcgtacgtaagctcggaattcggctcgagttttgcgctgaatccgtgtcctttgcgatcttctacgttcgtgaatttcgtcgagagggttaaacagcttggtaccctcgccttttctgcagtcattgggaacatcttctccgcgatcttgaccttctgcttcgcattagttggcactttgttgggggctttgactggagctttgataggacaagaaactgagagtggcttcattcgaggggctgctgttggtgccatatcaagagctgtattttccattgaagtgttcgaatcctatctagtctctggcattctgatgaatctgggattggctggtgtctatacttgaatgatgttaattgccagcttacctgaatggaatcactgttccttaaaaggattggcccggcccttttaagtgccc

SEQ ID NO: 253009 - DNA, 571 bp, Glycine max
  unsure (1)..(571): unsure at all n locations
gatgatgagagaatggggaggagnagatgaggagagnnagnnnagnnaaaggtagttngtatgaagatagttggatgcactcctatanactatgacgtcgcatgcacgcgtacgtaagctcggaattcggctcgagccttctcatcgaatcgaagcgccgcaccgtgtttcttctgtgcctgaataacgcaaagaaaattgaagcatcctaagggttgtttctaagggataccgggttgggagagaagatgaagcaggtggtgggaacggtggtttcaaataagatgcagaaatcagtggtggtggcagtggatagactattctaccacaaattgtacgaccgatatgtcaagcgcacgtctaagtttatggctcatgatgagcacaatcattgtaacatcggtgaccgagttcggctggatccttctaggcctttgagtaagcataaacattgngcagttgctgaaattctcaagaaagcacgtatatatgttccgtcctcaatgccaatgccggngagtgtgagctcaagctctgaaacatctgctttctggattggcttaaagtggaa

SEQ ID NO: 253010 - DNA, 564 bp, Glycine max
  unsure (1)..(564): unsure at all n locations
tgatcatgatgtaatgggatggtgatttgtgnatgtnnatnnnatnnatggaagggttctgttatgttagcagtacagtagcactctagaagagctatgacgtcgcatgcacgcgtacgtaagctcggaattcggctcgagcttctttcagtttgtctcccaggttgtcaatattccctcaatttatgtttcatttacgacgctctcaatttgttcaggtctttaacaacagcccagatgagactgcttactttagaatgatactgaaccgtgaaaatgttacaaattctgttgtcatggttcagccttcgttgatttgttattcattccatgctggtcctgaaccagctcttcttgatgttgcggccattgcggcagataagatcctgcttttggattcatttttcactgttgtcatttttcatggttcaaccattgctcagtggcgtaaggctggatatcataatgaaccggaacatcaggcatttgctcaattgctactagctcctcatgatgattcagatttaataattaaggagagatttcctgggccttggcctgttt

SEQ ID NO: 253011 - DNA, 577 bp, Glycine max
  unsure (1)..(577): unsure at all n locations
tgataatgagatataggggnaatatnatgagagggantgnnagnnnatnngtaagattgtgagtatagaagcgtatgtcagcnatcactctanaagatctatgacgtcgcatgcacgcgtacgtaagctcggaattcggctcgaggagagatcagttcagagaaacgaaacgctattggaggcaaagcacgtaaaagatgtagttacagtatttcacggtttaagagctcctactctgagcgttcgaaagtacattgatcgtatcttcaagtactcaggttgcagcccatcatgctttgtcgtggcacacatatatgtggacagattcattcaacacacagaaatcaaattgacttcacttaatgtgcaccggcttctgataacaagcatcatgctagcagcaaagtttatagatgacgcattctacaacaatgcttactatgcaaaagttggaggagtgagcacgtctgaattaaacaggttggagatgagctttctatttggcataaattttaggcttcagtttagtgtaaacacgttttggagatattgtaaggcattgggaaaaggaatctga

SEQ ID NO: 253012 - DNA, 562 bp, Glycine max
  unsure (1)..(562): unsure at all n locations
gattatgatataatggggagganatgagagnatagnnatnnnagnnagaaaggtgtctgtacatgtaggactacagtaccactctagaagagctatgacgtcgcatgcacgcgtacgtaagctcggaattcggctcgagtgaagagagaaggcttaattaataagcaaatggaaaggctaaattttattaaaaatggagtgagtagattgcctccaggttttcgtttccagccaacagatgaagagcttgtgtttcagtacttgaaatgtaagatattctcgtgccagttgccagcttcaatcattcctgagattaatgtcagcaaaaatgatccttgggatttgccaggaaattgtgatgagcaagagaggtactttttcagctccaaggaagccaagtatcgaaacggcaatcgtatgaaccgaacaactaactctggctattggaaggcaacaggatcagacaaaaaaatttcatcatcaataagtaatattggttttgcggggcttagaaaaactctaatatttattaaaggaaatcttcaaatgggtcttggactga

SEQ ID NO: 253013 - DNA, 560 bp, Glycine max
  unsure (1)..(560): unsure at all n locations
gataatatgggagggagtagagagaggagggntgnnagngaaggtgtggatgaggggaatgtagcacctccannattnntnnntgacgtcgcatgcacgcgtacgtaagctcggaattcggctcgagttcaaatctcactgccccaaaaatcctttcttttttaaatagccatttgacttcagcctctacagcagagtcccagatctctgcattccaattcccatggcaggtcgctatgacagtaaccccttcgatgaggaagaagttaaccccttctataatcctggaagtgttcccgctgccactaattcaaggctttcacctctgaagccagaacctgttgattataattatggctttggtgcgacagttgatatacctcttgattcatcaacggatttgaaaaagaaggagaaggaacttcaagccaaggaaactgaattgagaaaaagggaacaggaagtgagacggagagaagaagctgcttcacgagctggaattgttcttgaggagaagaattggccggcttttttcccaattatccattncgacttggtta

SEQ ID NO: 253014 - DNA, 488 bp, Glycine max
gagtgtctcttacagggggggggagatgggtgacactatagaagagctatgacgtcgcatgcacgcgtacgtaagctcggaattcggctcgagcttataacaacaattaaacatgagtgcagccagcagagcttggattgtggcatcaagcattggagcagtggaggcattgaaggatcaattgggggtgtgcaggtggaaccatgcattgaggtcactgcagcagcatgccaagagcaacattagatcctacactcaggccaaaaccttgtcttctgctacttctgctgctgtctccaataaggtcaagaggaccaaggaggagtccatgaggaaagtcatggacttgagctgttggggtcccaatacttcaaggttttagtgtgtggactattctaattgcattcatcattgtgctgcaaggtttatgaagattcaatactaactttgtaggcttttttgcatgggatgcattcccttggcccttt

SEQ ID NO: 253015 - DNA, 488 bp, Glycine max
  unsure (1)..(488): unsure at all n locations
agtgctccttaccgaacatngcatgtactacaacattatacgtacatcggcgcgtccttacctaagctggcaactcggattgagctaatatactttcaacttacttgcttcacttcatcggtgcgtgcatttagcacatctagcattagaccagtgaatgcaaagtgatgttccgagaattaccatacaggaattgaaagaacgacgcttgaacggattcaggagcccctgtagcgtgccaggacaagccatgcgatcaatacaagctagcctcggcagttcttttcttacgacccaattccgcattactatgcatatcctgcgattccgacattcactgctcgaacaaactcatgtaccgccacgatcccgtgtcgatgtgtgagacgtgcgagcctgcacccattgatgtcacgtgcatggtcgactcacgctgcctttgcgtcacgtataactcggaattcaatcccttaaacccccttgtgcaa

SEQ ID NO: 253016 - DNA, 491 bp, Glycine max
acagtttcgtcaagcgggggcgaaggacggaatcctctagaagagctatgacgtcgcatgcacgcgtacgtaagctcggaattcggctcgagctcgagccgtttgatcgcaacgcaatggctggcaccggcatccatccataccaccagcaatgggctccggcggcagccgctcctcctcctcctcctccggcagccgcgggcggtcctcctcctcacccaggggaggaggttcgaactatattcataactggtcttccggaagacgtgaaagagagagagctgcagaatctgctgagatggttgcccggtttcgaagcatctcaattgaatttcaaagctgagaagccaatgggttttgctctcttctccgcaccacaccaagcactcaccgccaaagacattcttcaggacatgctcttcgatcccgacaccaagtccgtcctccatactgagatggcaaaggaaaatctatccgtcaaaggaggaatc

SEQ ID NO: 253017 - DNA, 576 bp, Glycine max
  unsure (1)..(576): unsure at all n locations
tggaggatggatgaaaggggaagaaggagaagagggagatggnagnnnagnnnatgaaatggtctgctttatgtacatgatggtaaacacatcgaagagctatgacgtcgcatgcacgcgtacgtaagctcggaattcggctcgagctcgatcaactcaacacaaaccaaaactcaagctaaaatgctcactctctctctcatctcgagatcatagtatcatattcaatatcatttcataccaaacacatggctttggaagctctcaactcaccaacaacaaccgctccatcttttccctttgacgacccaactattccatgggcgaaacgaaaacgttcaaagcgttctcgcgaccatccttctgaagaagagtacctcgccctctgcctcatcatgctcgctcgcggcggcaccaccaccgtcaacaaccggcacgtcagcccttcaccggcacagccacagccacagccgacaccagatccttccaccaagctcagttacaaatgctccggttgcgacaaggacttncccctcttaccaagcgctcgttggacaccaaggcccgtaaccgaaa

SEQ ID NO: 253018 - DNA, 571 bp, Glycine max
  unsure (1)..(571): unsure at all n locations
tgatggagatgagtaggggatggagattagagggtgtgnnagnnnatgnnnaggatgggatctgttcgttgcgtctttatagntaacactctagaagagctatgacgtcgcatgcacgcgtacgtaagctcggaattcggctcgaggctttgagtcactaagcctagcttaaatttcagttcaatttggttggaaggcttcttggccctaggggtaattcactgaagcgagtggaggctaccacaggttgccgtgtatttatcagagggaaaggttcaataaaagaactagataaggtatcatctattctttagtggattgtcttgcaagttgcaaatcctaagaacctaatttaatgtcagttgcttctcctttcaatttgttgagtgtgtcttttttttttttctgactacatatattaactgtaaccattaacttcactctatcttttataatccaaaggaagagttgttaaggggaaggccaggctacgaacacttaaatgaaccactgcacgttttgattgaagctgagttacctgtcaatggtgctgatataaggcttaagccaa

SEQ ID NO: 253019 - DNA, 487 bp, Glycine max
  unsure (1)..(487): unsure at all n locations
aggggtnntntttgattccttccctcgtccnacccanatnagtttgacgtcgcatgcacgcgtacgtaagctcggaattcggctcgagcaacaacttctgctacttcctactccaaccgcacttctgttccgcaattatcatgggcaaggtcaagatcggaatcaacggatttggaagaattggccgtttggtagccagagtggctctgcagagagacgatgttgaactcgttgccgttaacgaccctttcatcaccaccgattacatgacatacatgtttaaatacgacagtgttcatggacactggaagcatcacgatgtcaccgttaaggacgagaagacccttctcttcggtgacaagccagtcactatttttggacacagaaaccctgaagagatcccatgggggtcaactggagctgacatcatttgtgagtcccacggagtttttaccgattaggacanggncggcggacattttaaggg

SEQ ID NO: 253020 - DNA, 538 bp, Glycine max
  unsure (1)..(538): unsure at all n locations
agggggagggtgtttctgatttctagacatagaatagttattgctatagccgagctatgacgtcgcatgcacgcgtacgtaagctcggaattcggctcgagactacttatcggactttatttgctgtctatatggtaaacctggtgcatatggagtggtgacacttcctttctcagtcagagaaggaattaacattttcttggctggctttgttccaacagaaaatcttaggttccgtgatgactcactcaccttcaaggttgctgagactccacaggaaactgctgaggaagctcagacatatgctcgatacaaatacccaaccatgagcaaaactcaaggcaattttagacttcgtgtagctgaaggagaatttactgattctcagattattgtgatgctgggtgagaatgggacaggaaagacgacatttattcgaatgctggctggtttattgaaacctgacaccatagaaggtggatctgaagtggagatgcctgaatttaatgtttcatacaagcctcaaaagaatagcccn

SEQ ID NO: 253021 - DNA, 529 bp, Glycine max
agtagagtttttgtcccctcccgtatatgcatactctagacgagctatgacgtcgcatgcacgcgtacgtaagctcggaattcggctcgagacagcatgattcactcatactatgaagcatcagcacttatgcaatggatctgctgcttctggaacagaccctgattagtctctacatcgctgctgtggtctgcatgatcgaatatcaactacggaagctgtaattcgtgctaccacacatgagaattcgcgtcccaatcttcggcatctgactcctagtttgtgacgatctcgagcacacgtatcctgaatgatttgaactaaaaactcggtgacatattgctacttcatatctgacacttcaacctcgtcgaagaggctttcgcttagctcgccgcatacgatatatacacgcgagctgtggaacatggttgccgcacccaggaacgtcgatactacatctctagcgctagggccaatacaattgtgattaccgctactgacaatactgtaacacatgcgtcgaatc

SEQ ID NO: 253022 - DNA, 534 bp, Glycine max
  unsure (1)..(534): unsure at all n locations
gagtaagagtgngtcnnatttcgatatcggcgtgtaantgtatcactctagaagagctatgacgtcgcatgcacgcgtacgtaagctcggaattcggctcgagcgttgttgaagttgcatgcttagtttctgggatcttgtcctttggatctgagacactctctgagctttctttcttagaaaacgatgtcgtctcaacagcaagaccttcctcttcatctcaacctcttatggtcgacctcactctcattcaaggagctgattctaaaggagctgtctgtttggatggaacggtgcctggataccatttggatcgtggatttggatctggtgcagatagttggctaattcatttggagggaggaggatggtgtaataccatcagaaactgtgtctatagaaaaaatactcgtcgtggatcctcgaaacacatggaaaatcaaataccattcacgggaatattgagcaacatacctgaagaaaaccctgatttctntaactggaatagagttaaattacggtactgtgatgggg

SEQ ID NO: 253023 - DNA, 533 bp, Glycine max
  unsure (1)..(533): unsure at all n locations
ggttgggggctgncgttattgataaagaagtatattagtacactctagaagagctatgacgtcgcatgcacgcgtacgtaagctcggaattcggctcgaggttcttgagagaagttattaatgagaaggtggacatatgggctcttgggtgtctcctttttcgcatatgctacttcaaaagtgcttttgatggggagtcaaagctccaagtcttaaatggaaactaccgcattcctgaattaccaaaatacaattcacctgtgacggacttgataagagacatgctccaagctagaccagataacagaccagatatcacgcaggcaagcgctttgcttgattggccattcatctccatcagtttaggtctggtttcgtgttaatgagcaactacctattaatttacagaagtcattacctgacagaccacctgaattgccctcatccaacgatcatgaaagtgtgtcaatgccctcaaacagatcacctncaatgcctcgtaggaacccacctnctncaccttcatctggaga

SEQ ID NO: 253024 - DNA, 533 bp, Glycine max
  unsure (1)..(533): unsure at all n locations
gagtaagagggcttgnctctcgtattcgaatgtttatagtaacactcatagaagagctatgacgtcgcatgcacgcgtacgtaagctcggaattcggctcgagcacccttgtttgagccaggggagttaaagtcatggtctttgtacagagctgggattgcagagtttgtggccacattcttgttcctctacatcactgtcttgactgtcatgggtgtcaacagggcacccaacaagtgctcctctgttggcattcaaggaattgcatgggctttcggtggcatgatctttgccctcgtctactgcactgctggaatatcaggtgggcacataaatccggcagtgacgttcggtttgtttctggctaggaagctgtccctgacaagagcgctgttctacattgtgatgcagtgtcttggagctatctgtggtgctggtgtggtgaaggggtttgaggggaatgccaggtatgagttattcaaaggtggagccaattttgtgagtcatggatacaccaagggtgatggccttgg

SEQ ID NO: 253025 - DNA, 538 bp, Glycine max
  unsure (1)..(538): unsure at all n locations
nggaagacgtgnttttnnacaaccggagcttcagtgttaccactctagaagagctatgacgtcgcatgcacgcgtacgtaagctcggaattcggctcgaggtgtttactagatcatcaagttgggagcagtcagaataagtggcatggttgaaaggctacaattatctcagcaaataagggagaatgtatactctcttttccagcggatccttaatcagtggacatctctctttttcaaccgtcatattgaccaaatcatcttgtgttggttctatggagttgcaaagatttcacaactcaatctaacttttaaggagatcgtatacaactacagaaagcaaccacattgcaaaccacaagtttttcgtagtgtatttggtgattggtcattggctcgccgaaatggggtaactgaagagaacaggacaggagcatattgacataattaccttttacaatgaaatattcattccttctgtaaagccactgcttgttgaacttggncctgtggaccaaattccaaaaggnacccaatcc

SEQ ID NO: 253026 - DNA, 532 bp, Glycine max
  unsure (1)..(532): unsure at all n locations
aggagtttgatttctgtgnttagggctaatgtnatnactgtagagctcgctagaatgcctgcacgtctactctagagggtcccctcggggaattccaatagtttattatcaagaaataaggaggcaaaaatgggcatatatgaattggaattatgtggtttcttattaggcctatcctgaagccaaaggaaatgagatcggaattcctcggggaataccaatttcacattttcaagaaataaggaggcaaaaatgctcatatatgaattggaattatttgttttcttattaagcctatcctgaagccaaaggaaatgagatcggaattgctacaccaatttcaattgcacattggctagaaataatgatgcaaaaatgttcatacatgaattggaattatacgttcgcttattatgcctatactgaggccaaaggaaatgagatctttatcccttgagagaacctagctcgaattgcctaacatgagtcccaattaaatcgtaattaaattttttattttttccctttttaa

SEQ ID NO: 253027 - DNA, 536 bp, Glycine max
gaggttaggagggtgtctgagttaccgcaaaaagaatttatagtcaagctcagctatgacgtcgcatgcacgcgtacgtaagctcggaattcggctcgagaggcaagtgagcgtaggttggaagcagagagatggaaggttgggacccgaatacgaagtcgacgctgacacagatccctctgctgacgacgaaggcgggtccacgagacggagcggcatggacgcagaggcttaaggaagagtacaaggctctgatagcgtacacgcagatgaacaagtccaacgacaacgattggttccgtatctccgccgccaatccggaaggcactcgctggaccggtaaatgctggtacgttcacaacctcctcaagtacgaattcgacctccaattcgatgtccccgtcacttacccttccaccggccccgaactcgaactccctcaattggatggcaaaacccaaaagatgtataggggtggaaagatctgcttgactgtgcacttcaagcctctctgggccaaaaaattgcccagattt

SEQ ID NO: 253028 - DNA, 532 bp, Glycine max
  unsure (1)..(532): unsure at all n locations
gagtaagaagtgctttgagctacgtatagaatgttatagtcaagacgagctatgacgtcgcatgcacgcgtacgtaagctcggaattcggctcgagtcagtctctgtgtttgcggctgaggattccgaacgagtgaccttcttcgtttctcgcaaagtttaagtaatcatgggtaaggaaaaggttcacatcaacattgtcgtcattggacatgtcgactctgggaagtcaactaccactggtcacttgatctacaagcttggaggtattgacaagcgtgtgattgagaggttcgagaaggaggctgccgagatgaacaagaggtcattcaagtatgcctgggtgctcgacaagctcaaagctgagcgtgaaagaggaattaccattgatattgctttgtggaagtttgaaaccaccaagtactactgcacggtcattgatgctcctggacatcgtgactttatcaagaacatgattactggtacctnccaagccgactgtgctgtccctattattgacttcaccactggtg

SEQ ID NO: 253029 - DNA, 530 bp, Glycine max
  unsure (1)..(530): unsure at all n locations
gtgagtagtgttctgatgnccttactttgtccatagcgatancagtcaagatctatgaccgcacacgcacgccttcgtgaacttggaattctgctcgagaaaattcgttgtgcctatcctcaagtgttgccgtgagggggcatagaaatatcctgagatagcttatgaggaagttgtcattgacaattgctgcatgatgcttgtgaagaatcctgcacttttcgatgtactagtgatgcctaacctttatggtgatcttatcagagacctttgtactcgcttgattgcaggattgagctaaacaccaagcatgaccattgtttaggccgttttgcacttgctgaagctgtccatggtttcatgacctaatttggttgaaaagaatttacctaatccaactgctttactgttaattgtggttccaatgttccgccatttggaccttcataacttagaaaacctgattaataaagctatccttatcacgaatgcagaatgtaaataccgaccagttgatttcactggttaag

SEQ ID NO: 253030 - DNA, 534 bp, Glycine max
agttagaagtgcttttgtctcgtattcagaaggttatagtatcactcatagaagagctatgacgtcgcatgcacgcgtacgtaagctcggaattcggctcgaggcataaagaaaagaccatcaaagtttcacttcagccttatgcggtttagggtttcggtttttgaccctacctttgacgtatcgaaaccttaagtttcggatcaggtctgagcaatctggttggtagaacctttggtcttagagagtcaagttttatgtctgaattagacgatcaaattcctactgccttcgatccttttgctgatgcaaatgctgatgactcgggtgctgggtcaaaggagtatgtgcatattcgggtacagcagcgaaatggtaggaaaagcctgacaaccgttcagggattgaaaaaagaattcagctataacaagatacttaaagatgttaagaaagagttctgttgcaatggaacagttgttcaggacccagaactaggacaggttattcaacttcaaggtgatcagaggaagaatg

SEQ ID NO: 253031 - DNA, 529 bp, Glycine max
  unsure (1)..(529): unsure at all n locations
gggggagggctgnctctatgataaagaagtatatagtatcactctagaagagctatgacgtcgcatgcacgcgtacgtaagctcggaattcggctcgagaaaagactgatggccttttcctcaagtgttgccgtgaggttgcagagaaatatcctgagataacttatgaggaagttgtcattgacaattgctgcatgatgcttgtgaagaatcctgcacttttcgatgtactagtgatgcctaacctttatggtgatattatcagtgacctttgtgctggcttgattggaggattgggcttaacaccaagctgcaacattggtgagggcggtattgcacttgctgaggctgtacatggttcagcacctgatattgctggaaagaatttggctaatccaactgctttactgctgagtggtgttacaatgttgcgccatttggacctncacgacaaagcagaacagattcagaaagctatcctcaacacgattgcagaagggaagtaccgaacagctgatctcggtgcagt

SEQ ID NO: 253032 - DNA, 537 bp, Glycine max
  unsure (1)..(537): unsure at all n locations
agttaaggagtgnttnnnntctcagtatcagacatgttattgctatcactctagaagagctatgacgtcgcatgcacgcgtacgtaagctcggaattcggctcgaggtcaaattattcacaagctatctggacatattttccaattaagccagcataaatttgcatcaaatgttgttgagaaatgtttggagtatggtgatgctactgatcggcagttgttaattgcggagattgttggacatgacaaacaaaatgataatttattgacaatgatgaaagaccaatttgcaaattatgtgatccagaaggtttttgagatctgttctgaaaatcagcgagcaacattactttctcgcataagacttcatgctcatgctttgaaaaaatacacttatggaaaacacattgtggctcggtttgaacagctacttggagaagagaaccaaacaaatggatcatgatgacaataaaggtcttgcgcaatgcttccatgcaagcacaactagtatttctgtgttacaggagacagatgagat

SEQ ID NO: 253033 - DNA, 543 bp, Glycine max
  unsure (1)..(543): unsure at all n locations
gggaggggaggtgcttgnagtccatcgaattaagcatgtcatatgtatcactctagaagagctatgacgtcgcatgcacgcgtacgtaagctcggaattcggctcgagccaacactgatcttaaccgagcttcgtaaagatgaatcgggaaaagtttatgaagatggacggttccgttagaactggatgaaagggtactgctagaagaaagaagaaggctgtctacaagacaacaaccacagatgacaaaaggcttcagagcaccctgtacagaataggggtgaatgccatccctgctattgaagaggtcaatatctttaacgatgacgtctatatccagtttctaaatcccaaagttcaagcatacattgctgctcatacttgcgttgtcagtggctcaccgcaaacaatagaattgcacgatatactccctagcattatacaccaattaggaccagataactcggaagacctgaagaagctagccgagcatttacagaagcaggctactgaatgtgccgtttactcaaccacagttcaaac

SEQ ID NO: 253034 - DNA, 531 bp, Glycine max
  unsure (1)..(531): unsure at all n locations
ngaggagancagtatctgaaatttgaatggggggtaattgtagcactcctatgacgtcgcatgcacgcgtacgtaagctcggaattcggctcgagtccaaatccaaaaaaatcatggagcagttgtactacctcacccttgtgctactgtttgtgtccttcgtctctgtctcttttttcatcattttctacaggcatcgttctccgttcagcgtccccaacttgccgccggggaaggcggggtttccggtgatcggcgagagcctggagtttctgtcggcgggacggaaggggcttccggagaagttcttctccgatcgcatgacagagtactcttccaaagtgttcaagacctccatcttaggggagcctacagtgattttctgtggagccgcatgtaacaagttcttggtttctaacgagaacaaacacgtcatttcgtggtggcctgaaaatgtcaagaagttgttcccaacgaatattcaaacaaactctaaagaagaagccaagaatttgggaacattctttcttt

SEQ ID NO: 253035 - DNA, 521 bp, Glycine max
agtttggatgttttgacctcgtattacgaagtatcatgctagaagcgctatgacgtcgcatgcacgcgtacgtaagctcggaattcggctcgaggctgagttttgggcagaagtcacaatcattgccagaatgcaccacctcaacttggtgaggctgtggggattctgtgctgagaagggccaaaggatacttgtctatgaacacattcctggtggatcattggacaagtacctcttcagggtcaataagtctcataacaataaccatctcaaggagcaatcaagtagtttgaattcaaacacaccacaacaagaaaagcatgttttggattggaacatgaagtacagaatagcccttggtattgcaagggccattggctacttacatgaagagtgtttggaatgggttttgcactgtgacattaagccagagaacattctactaggtgatgacttttgtcccaagatatcagaatttgggcttgccaagttgaggaaaaaagaggacattgtgacccatt

SEQ ID NO: 253036 - DNA, 532 bp, Glycine max
  unsure (1)..(532): unsure at all n locations
gaggagancaggatgtgattattgaaatgggggggagaatatcataactcctatgacgtcgcatgcacgcgtacgtaagctcggaattcggctcgagaattagttcattctctttgcgcagttccctacctctcctgtcaagatgcagatcttcgtcaagaccctcaccggaaagaccatcacccttgaggtggaaagctctgacaccatcgacaacgtcaaggccaagatccaggacaaggaaggaattcccccggatcagcaacgtctcatcttcgccggaaagcagctcgaggacggccgtaccctcgccgactacaacattcagaaggagtcaacccttcaccttgtccttcgtctccgtggtggcatgcagatcttcgtcaagactctcactggcaaaaccataaccctagaggtcgaaagctctgacaccattgacaacgtcaaggccaagatccaagacaaggagggaattcccccagaacaacaacgtcttaattcggccggaaagaacttagggacgggcccc

SEQ ID NO: 253037 - DNA, 519 bp, Glycine max
  unsure (1)..(519): unsure at all n locations
aggagggagggtttgagaagaaagatgaggggtagtatacagaagcagctatgacgtcgcatgcacgcgtacgtaagctcggaattcggctcgagcaaggttcttgctgtctacaaggaagttattgctgaccttaaggcagctggtgcttcatggattcagtttgatgagcctacccttgtcttggaccttgagtctcacaagttgcaagcattcactgacgcatatgcagaacttgcgcctgctntgtctggtttgaatgttcttgttgagacctactntgctgacatccctgctgaggcatacaagaccctcacatctctgaatggcgtcactgcatatggatttgatttggcccgtggaaccaacactcttgatttgatcaagggtggatttcccgcgggaaaatacctctttgctggagtggttgatggaaggaacatctggcccaatgacccttgctgcttttctcactacctttgcaggtctttagggcatttgtggcaaagataactttgt

SEQ ID NO: 253038 - DNA, 532 bp, Glycine max
  unsure (1)..(532): unsure at all n locations
aggtaggaaggcgtctagttcacgaataaagtatttattgncaagacgagctatgacgtcgcatgcacgcgtacgtaagctcggaattcggctcgagcaaagcagataatggtgaactccggcagcgaagacttggcgacccatcagcttcaacaggctataactgaacagcttttcaaagctgcagagctgatcgatgccggtaatctggaactcgcgcatgggatattggcgcggctcaatcaccaactttctcccattgggaagccttttcagagggctgctttttatttcaaagaggccttgcaattacttctccatccaaatgccaacaacagttctttcaccttctcacccactggccttttgctcaagattggtgcttacaagtcattctcagaaatctcaccagttctgcagttcgccaatttcacttgtaaccaagcactgcttgaagctgtggaagggtttgatcgcattcacataatagaatttgatattgggcttggtggacaatggtcttctttcatgc

SEQ ID NO: 253039 - DNA, 532 bp, Glycine max
  unsure (1)..(532): unsure at all n locations
agtgaggagtgttctgatccccaccntgtattgcatcgcatagacacatgcttgcatgcctgcaggtcgactctagaggatcccctcggggaattccaattccacattttcaagaaataaggaggcaaaaatgttcatatatgaattggaattatttgttttcttattaggcctatcctgaagccaaaggaaatgagatcggaattcctcggggaattccaattccacattttcaagaaataaggaggcaaaaatgttcatatatgaattggaattatttgttttcttattaggcctatcctgaagccaaaggaaatgagatcggaattcctcggggaattccaattccacattttcaagaaataaggaggcaaaaatgttcatatatgaattggaattatttgttttcttattaggcctatcctgaagccaaaggaaatgagatcggaattcctcgnnggtaccgagctcgaattccctatagtgagtcctattaaattcgtaatcatgtcatagcttgttcctgtgtgaa

SEQ ID NO: 253040 - DNA, 529 bp, Glycine max
aggaggaggctttcttatgtatagacggttattgtcacactctagaagagctatgacgtcgcatgcacgcgtacgtaagctcggaattcggctcgagatttattgcctggctcttccatccccaatatccgaactcaaacgcggagtggcagcagagaacaaaaacatgtcatcttggctgagatctgcggtcaacaaagccgtcgaggtcggcaacaaaaacaacctcactcgcaccgtcaagaactacgccgacaccgtcgttcaacacgccggccaagccgtggccgagggcgccaaaatcctacaggatcgcattagtgctcggaattacagaagtgttgcgcagaccattaaaaggttggaagaagctgctgtctcgtataggggacctgagagagtgcagttgcttagaagatgggtggttgtgcttcaagagattcagaagttgtccgaggcttcattggctgaaggcaaagagaggactctcgagcagcactttgcggttgaagaagccaaggagaacccc

SEQ ID NO: 253041 - DNA, 536 bp, Glycine max
  unsure (1)..(536): unsure at all n locations
ggttagaaaaggcgtgnagtttatgtataacgcatgtgattagtatcactctagaagagctatgacgtcgcatgcacgcgtacgtaagctcggaattcggctcgagattccgactagccgcgttgactcggttccgtttttcattctcgcggatctaatattaaggaatagcttaagggcacattacaatgaaggcattgattctggttgggggatttggaacaaggctgaggccactgacactcagtttccctaagcctcttgttgattttgctaacaagcctatgattttgcatcagatagaagcccttaaggccattggagtgactgaggtagtgctagccatcaattaccaaccagaggttatgttgaatttcttgaaggattttgaatcaaagctcggcatcaagatcacatgttctcaggaaactgaaccactgggaacagcaggtcccctggctcttgctagggataagctgatagatgattctggagaaccctnttttgttctcaacagtgatgttatcagtgagtat

SEQ ID NO: 253042 - DNA, 534 bp, Glycine max
  unsure (1)..(534): unsure at all n locations
ggtggaaggctgnattcatgaccaagaatgtcatatgtatcactctagaagagtctatgacgtcgcatgcacgcgtacgtaagctcggaattcggctcgagatttcatctcagatttcgccttcgttcgtatcgaagaagaagaagatggggaaacagattgtgccggtgaaatcagtgatctacgcgctctcccctttccagcagaagataatgccgggtctctggaaggacttgcccacaaagattcaccacaaggtctccgagaattggatcagcgccactctcttgcttggtcccctcgtcggaacctacacgtatgttcagaactacctggaaaaggagaagctgtctcacaggtactgaactcatgcaagagctgattggataaccttctagtttgttgccttgatcttgtttagccacccaataatgtgacactgttgaaacttgctctaccgtttggttttgagatgtctgagtttgagctttttaaacttcgacagtgtttaatgatgggtctattcattaatcc

SEQ ID NO: 253043 - DNA, 530 bp, Glycine max
  unsure (1)..(530): unsure at all n locations
ngaggagganaggtatctgagtattgatataagaaagtaacatgctataagcagctatgacgtcgcatgcacgcgtacgtaagctcggaattcggctcgagaattatcaactctttcaaaagggagaagaaaaggaaaggaaacaaaacgcacaaaggattattatagcaatggcagaacaaaaccaaaaccagacaactgaagctggaaggcaccaagaggttggccacaagagccttctccagagtgatgctctttaccagtatattctggagaccagtgtctacccaagagaacctgaatccatgaaagaactgagagagttgacagcaaaacacccatggaacatcatgacaacctctgcagacgaaaggcaattcttgaacatgctccttaagctcatcaatgccaagaacaccatggaaattggtgtctacactggatattcacttcttgccaccgctctcgctcttcctgaagatggaaagatcttggccatggatattaacagggagaaatatgaatngggt

SEQ ID NO: 253044 - DNA, 527 bp, Glycine max
  unsure (1)..(527): unsure at all n locations
ggtagtcattatcntgtcctgcatagaaagctgagtcaagactagctatgacgtcgcatgcacgcgtacgtaagctcggaattcggctcgagccagaatacttcaggaggcagcaactgactgacaaatctgatgtttactcgtttggtgtggttctctttgaggtattgtgcgctcgaccagcattgaaccccacccttgctaaggagcaagtgagtctggctgagtgggcagctcattgctaccagaaaggcattcttgactcaattattgatccttatctaaagggaaaaatagctccagaatgcttcaagaagttcgccgagactgcgatgaagtgcgtggctgaccagggcattgataggccatccatgggtgatgtcttgtggaaccttgaatttgctttgcagctgcaagaaagtgcagaggaaagtggcaacggttttggtgacattcactgtgaagagccactgtacacagattctaaaggaaagaaggactctgatccgggttatgatggcaacgtg

SEQ ID NO: 253045 - DNA, 535 bp, Glycine max
  unsure (1)..(535): unsure at all n locations
ngggtagtagggtgtctgaatctacgtatagtagagtaatgctatagacgagctatgacgtcgcatgcacgcgtacgtaagctcggaattcggctcgagttcccaaccactacgccactactactcactcactgcagatctcaattgcatcgctgtccatggctaccatcgttagcatcaaggcccgccagatcttcgacagtcgtggcaatccaactgtcgaggtggatttgacttgctccgatggtacttttgccagagctgctgttccaagtggtgcatccactgggatttatgaggcccttgaattgagagatggaggatctgactaccttggaaagggtgtatcaaaggctgttgacaatgtgaacaccgtcattggccctgctttgattggcaaggacccaactgagcagactgctattgacaacttaatggttcaacagcttgatggaactgttaacgaattgggttggtgcaagcaaaaactaggagcaaatgccatattggcagtgtctcttgcaatctgcaaagg

SEQ ID NO: 253046 - DNA, 529 bp, Glycine max
agtagttatgttctgatgcaagctcagacgctatagcatagacgactatgacgtcgcatgcacgcgtacgtaagctcggaattcggctcgagattcttcaattccatatattctctttctctttcttgatttgtgttgtgaaacagttaaaagtggtcttgatgtctgaggcattggaagaggttgttccttcaatgaaaggagggtgtgaagaagaagggttgaacctgaaggctactgagctgaggcttgggttgccagggtgtgagtcaccagagagggagggtgtgtttaagagtgtggtggtgtctggggccaagaggggtttttctgatgccattgatggaaactggaatggtggaagatctgaaaaagatgcccgttgcttggtttctccaacttcaaagggtgctgttagtgttagtgttagtgcttccaagtctcttactctcactgcaacagactgcaccaaccaaccaacttgttaaggtgcttatgttctctaaagaaatttttcacactcttcata

SEQ ID NO: 253047 - DNA, 533 bp, Glycine max
  unsure (1)..(533): unsure at all n locations
aggtaggtagggtgtctgaatccacgaatagtatagcgacagtatagacgagctatgacgtcgcatgcacgcgtacgtaagctcggaattcggctcgagcttacacttacccacagggaggcgaacagagaaactcagagacccgaaggcagatttcaagatgaagttcaacattgcgaatcccaccaccggttgtcagaagaagctggagatcgatgatgacctgaagctgcgagcattttgggacaagaggatctcacaagaggttgttggtgatgctctgggtgaggaattcaaaggttatgtcttcaaaattactggaggttgcgacaagcaaggatttccaatgaagcaaggagtgttgacccctggtcgtgttcgcctcttgctgcatagaggaactccttgtttccgtggttacggaaggcgcaatggagagcgtangatgaagtctgttcgtgggtgcattgtcagccctgacctctctgttctcaacttggtattgtgaaaagggtgaaaatgattgcctggcc

SEQ ID NO: 253048 - DNA, 536 bp, Glycine max
  unsure (1)..(536): unsure at all n locations
aggtagtaaaggcgtgnaattcatgaataagtcagtcattagtatcactctagaagagctatgacgtcgcatgcacgcgtacgtaagctcggaattcggctcgagcaataattgttctctctgccatgggaaagacaactaacatgcttttgctggctggagaaaaagctgtaagctgtggagtaactaatgctgatagtattgatgagctcaacatagtaaaagatcttcatctcaggactgtggaacagcttggagtggacagaaatgttattgagaagcatctagaagaattggagcaacttctaaaggggatagctatgatgaaagagttgactccacggactcaagactatttagtttcatttggagagtgcatgtccactaggatatttgctgcatatcttaatacattaggagttaaggcccgccaatatgatgcatttgagatgggtattataacaactgatgacttcacaaatgctgacattntggaagcaacatatcctgctgttgcaaagaggttacatagtgat

SEQ ID NO: 253049 - DNA, 536 bp, Glycine max
  unsure (1)..(536): unsure at all n locations
ggtaggagtgcttgntttctatgatcaagaagataatagtatcactctagaagagctatgacgtcgcatgcacgcgtacgtaagctcggaattcggctcgagacataagggataccacagcggcggtaacagaagaacaagcagagaatgggtcgagtgagaacgaagacggtgaagaaatcctctcggcaggtgatagagcgtcactactcgcgcatgaccctggacttccacacgaacaagaagcttctggaggaagtggcgataatcccgtcgaagaggctaaggaacaagatcgcggngttctcgacgcacctgatgaagcgcatccagaaaggccctgtgcgcggcatcntcctcaagctccaggaagaggagcgcgagcgccgcatggacttcgtccccgacgtcttcgncatcaacaccgaccacatcgaggtcgacaagggaaaccctgacatgcttcaactcctcggtatcaacgacatccccggcatcacccaagttgatccctgtcctgttcagcagaacttccc

SEQ ID NO: 253050 - DNA, 529 bp, Glycine max
aggtagaagtgctggttggctggcctagctcgctcagcagtactactaatgttacgcatgcacgcgtacgtaagctcggaattcggctcgagcggcgacgcttcatttaaatttctgccctatcaactttcgagggtaggatagtggcctaccatggtggtgacgggtgacggagaattagggttcgattccggagagggagcctgagaaacggctaccacatccaaggaaggcagcaggcgcgcaaattacccaatcctgacacggggaggtagtgacaataaataacaataccgggctcattgagtctggtaattggaatgagtacaatctaaatcccttaacgaggatccattggagggcaagtctggtgccagcagccgctgtaattccagcttcaatagcgtatatttaagttgctgcagttaataagctcgtagttggaccttgggttgggtcgatcggtccggcttcggtgtgcacccggtcgctcgtaccttctggcggcgattcgcttctgtccttaaat

SEQ ID NO: 253051 - DNA, 532 bp, Glycine max
  unsure (1)..(532): unsure at all n locations
ngggaggaataaggatctgacctactgaataccgaagtaacatgctagaagcgctatgacgtcgcatgcacgcgtacgtaagctcggaattcggctcgaggggttttgggctggtgtttttgtgaagcttgagatcaggaattaatttcagtggttcagagaatggcaacggattcttcaaatggtaatggacatcaccagacaacaacaaagcagcctcctttgccatctcccctgcgcttttccaaattttttcagtccaacatgagaatcttggttactggaggagctggattcattgggtctcacttagttgacagattgatggaaaatgaaaaaaatgaggtcattgttgctgacaactacttcactggatccaaggataacctcaaaaagtggattggtcatccaagatttgagcttatccgtcatgatgtcacggagcctttattgatcgaggttgatcagatctaccatcttgcatgccctgcctctnctattttctacaaatacaattcagtaaagaccataa

SEQ ID NO: 253052 - DNA, 533 bp, Glycine max
ggttacaacggtttctgaatcctcggatagtatagtcatagtatagacgagctatgacgtcgcatgcacgcgtacgtaagctcggaattcggctcgagcggcgacgcatcattcaaatttctgccctatcaactttcgatggtaggatagtggcctaccatggtggtgacgggtgacggagaattagggttcgattccggagagggagcctgagaaacggctaccacatccaaggaaggcagcaggcgcgcaaattacccaatcctgacacggggaggtagtgacaataaataacaataccgggctcattgagtctggtaattggaatgagtacaatctaaatcccttaacgaggatccattggagggcaagtctggtgccagcagccgcggtaattccagctccaatagcgtatatttaagttgttgcagttaaaaagctcgtagttggaccttgggttgggtcgatcggtccggcttcggtgtgcaccggtcggctcgtcccttttgcggcgatgcgctcctgtccttaaa

SEQ ID NO: 253053 - DNA, 537 bp, Glycine max
  unsure (1)..(537): unsure at all n locations
ggtaggtagtgtgtctaatcctcagctagtanagcttcagtcatagacgagctatgacgtcgcatgcacgcgtacgtaagctcggaattcggctcgaggcgcaacgagtgcctttgatttcaacgtcgcgctctccgatgacgagaagtacgtccgccgcgagcacgagaaggaggccggagacggagccgccgctgaggagtcgcagatcgacattcaccccgccgtcaatcacaggctcaaggaaggggaaaccattaggattaatgtgaagcacaaatcaactagtggaactggcatgctctcagctgctggcctaaccagtgggcatgctgcgacaccaaagccaaaaatcgtgagtcttgctcccccaccaagtggagctgggaaaatcaagtctcctcttacacccccaccaaatgatccagttgctgctcggactgcttacaccagtcgtgctactggtcctaaagggacatacgaaagtgtgaaacattctaccaacgctttatcagatttttctcaactacagaaaag

SEQ ID NO: 253054 - DNA, 535 bp, Glycine max
  unsure (1)..(535): unsure at all n locations
gggtaagagtgtgtctgatctaatgaatagaatagtattagtatagaccagctatgacgtcgcatgcacgcgtacgtaagctcggaattcggctcgagtggaaaactcttaaagataggtggcatttgctacaataagaaactagccaagactctcagaacaatatcagagtctggtccaaaagccttttatgaaggattgattggtcttaatttagttaaagatgtccagaatgctggagggatattgagcatgaaagacctcaaaagttacactgttaaacagaaggaacccatatctaatgatgttcttggtctaaagctccttggcatgcctcccccttcaggtgggcatccaatgatgctactgctgaacattctagatcaatataaactcccttctggcctttctggtgcccttggtttccatcgagaaattgaagctttgaagcatgtatttgccgtgagaatgaatcttggtgaccctgattntgtaaatataactggggttctttctgatatgctttctcataggn

SEQ ID NO: 253055 - DNA, 532 bp, Glycine max
gtagtaaggtgtctgaatctccgtatagtatagtgatagtctagacgagctatgacgtcgcatgcacgcgtacgtaagctcggaattcggctcgagagaagatggctttaggtgttcctgctcttccgttgacatacgtggctcacgttctggcagttgttgccagcgtcttggtcgtggtctcggtcgtcaatttcaggggtggcttggcttgggattctgataacaagtccctcatcttcaacattcatccagttcttattgttattggcttactagttcatgggggtgaagctattataagttacaaagcttttcccctaaagaaggaagtgaagaaattgatacaccttgttttccatgccatcgcattaatacttggaatagttggaatttatactgccttcaagtttcacaatgaaagtgggattgccaatctctacagcttgcattcatggcttggaattggggttattgtcctttatggcattcagtggatatatgggtttgtgatctttttcttccctggagg

SEQ ID NO: 253056 - DNA, 534 bp, Glycine max
  unsure (1)..(534): unsure at all n locations
aggtaggaggcgtgnttccaagtattaagcatgcgttagtcatcactctagaagagctatgacgtcgcatgcacgcgtacgtaagctcggaattcggctcgagctcaacctcatgaaccaggacaaaatcctcatggaaagctggtactatttgaaagatgcagtccttgaagggggtattccatttaacaaagcatatggaatgacagcctttgaataccatggaacggatccaaggtttaacaaggttttcaacaaggggatggctgatcactctaccattacaatgaagaaaattcttgagacctacacaggctttgagggacttaaatccctggttgatgttggtggaggaactggatctgtagtcaacatgattgtctcaaagtatgccactattaatggcattaattatgatttgccccatgtcattgaaaatgccccatcttatccaggagtggaacatgtcggtggagatatggttgtcactgttccaaaagctgatgctatctttatgaagtgcattgccaacat

SEQ ID NO: 253057 - DNA, 537 bp, Glycine max
  unsure (1)..(537): unsure at all n locations
gggggagtgagttctttagtttatgtataagaatgtgattagtatcactctagaagagctatgacgtcgcatgcacgcgtacgtaagctcggaattcggctcgagcaaaattatctaaatctatttctgatctcagcttttcccttgaaagatgggaggtggtaaggacaaacacaatgaagaagagaaaggagttttctcacatcttgctcatggggtagctcaagctgctcatgggtaccctcctggggcataccctcctcaccaagggtacccacctggtcatggctaccctccacaaggcggctatcctccggctggttatccccctgctggctatcctcctgctgctggtggttaccctcctgctggttaccatccacatggttatcctggttcatctgctccacatggatctcatgcgcatgggcatggcggtatgggggcattgcttgctggtggtgctgctgctgcngcggctgcctttggggctcaccatgtntnccatggccaccatggatatggtggatatggaca

SEQ ID NO: 253058 - DNA, 524 bp, Glycine max
gaggagagatgatctgatttatagaaaaagaaagcatcatgctagaagcagctatgacgtcgcatgcacgcgtacgtaagctcggaattcggctcgagctcgagccgtgccgtcctcttcaagagcttgccaaccttacattaattatgggtaaccgagatggaattgatgagatgtcaagcacaaatgcttctgttcttctctcggtacttaagttgattgacaagtatgatctgtatgggcaagtggcatatcctaaacatcacaaacaatatgatgttcctgacatatatcgcctagcagcaaagacaaagggtgttttcattaatccagctttcattgagccatttggtcttaccttaattgaggcagctgctcatggtttgccaattgttgctactaaaaatggaagtcctgttgatattcatagggtacttgacaatggtctgctcgtaaatccccatgatcagcagtctattgctgatgctcttttgaagcttgttagcaacaaacaacttttggca

SEQ ID NO: 253059 - DNA, 520 bp, Glycine max
aggatgtcattatctgatatagaagacgaggagtagatgctagaacagctatgacgtcgcatgcacgcgtacgtaagctcggaattcggctcgagcttctggaacatataaaaacctagtattttatctggaggcatgtgaatctggtagtatctttgaaggtcttcttactgaagatatcaatatttatgcaaccactgcttacaatgcagaagaaagtagttggcgaacatattgccacggggagtatcctagtcctaccccagaatatacaacctgtttgggtgacttgtacagtgttgcttgcatggaagacagagacagacacaatttgcgaacagaaactctgcaccaacaatataaataggttaaagagaggactatatctggagattcatactatggctctcacgtgatgcagtatggcgatgtaaggcttaacatagatgtgctattccattatttgcgtacagatcctgctaatgataatttcactctagtggatgaaaactgccttatg

SEQ ID NO: 253060 - DNA, 532 bp, Glycine max
  unsure (1)..(532): unsure at all n locations
gaggaagagctttcntgtcctagccttgtatgtcatagtcatagacgagctatgacgtcgcatgcacgcgtacgtaagctcggaattcggctcgaggcggaactcgtgcccggtgtgccgccacgagcttccttccgatttggaaactagagttccgagccagatcgacgaggaagcgataggattaacgatttggaggcttccaggaggcggattcgccgtagggcgattctccggcggccggagaaccggggagagtcatttgccggtggtgtacacggagatggacggtggacttaacacaaatggtggtgctcctaggagaatttctcgttctgttagaagcaatagggttagggaaagtcgagggtttggtagagtttttcgcaatttcttttcattctttggaagaattggttctagaaactcttcttcttcttctgaacatgggtctgtgagtagaagccgtagtcacgtgagttcaatgttcaatagaagctcgcggagacatatccagacttgggttatggtg

SEQ ID NO: 253061 - DNA, 531 bp, Glycine max
  unsure (1)..(531): unsure at all n locations
ggaaggagttatctgttgcaaagtgagcagtcactgctatancactcttgataatgaacgcacacgtacgcatgctggaacttgggatttagctttaggaattatccttatagatcgatgccagattgatacggataggtgatcctcaatacaatgagggtcaagctcagatgggaacaaatttgtttaaattgtctcttgatgatgttgaaactcctaaaggttccatgttggatcttaaaaattctcaatctaaaattgcactttccaaaaacacaagttggaggaactattctgcgtaatgatctattggcaaaatttttgacagaaggcaattttagaacaagtgttgatttgcagcgcactcattgtattaaaagaatgattaaaatggtggccacaagttggatttctgagaataccagcctagcatttggctttgctattaaaagttcttttaaggggcttgccataattggtatttacaccatatgcttttaaaacttggaattttggaaactgcatttcaat

SEQ ID NO: 253062 - DNA, 533 bp, Glycine max
  unsure (1)..(533): unsure at all n locations
ggtaggaggagctctggtgccttacnncgtaccgctccagcatagacgagctatgacgtcgcatgcacgcgtacgtaagctcggaattcggctcgaggctgagtatgtgacatacatgtttggttatgatatggtacgtcctatgaataccggtgctgaaggtgtggaaacagcactgaagttagcacgaaagtggggttacgaaaagaaaagaattcccaaagatgaggctattattgtctcatgttgtggctgcttccatggtcgtacactaggtgtcatatctttgagctgtgacaatgaagctacccgtggttttggtcctttattacctggcaatcttaaagttgattttggtgatgcagaaacccttgaacaaatttttaaagaaaaaggagagcacatagcttgattcattatataacctgtacaatgtgaagctggggtgataagtccttcatatggttatttaatagctattttagatctttgctacaaataataagtatagatgattggttgtacatttaaaa

SEQ ID NO: 253063 - DNA, 535 bp, Glycine max
  unsure (1)..(535): unsure at all n locations
ggatgtagtgctgtgttactgggtacgtnntcatctgcatcatcaattataattatgaatgcacgcgtacgtaagcttggaattgggctcgaggcggaactctttccttttgtgccgtcacgagcttccttccgatttggaaactagagttccgagccagatcgacgaggaagcgataggattaacgatttggaggctttcaggaggcggattcgccgtatggcgattcttcggcggccggagaaccggggagagtcatttgccggtggtgtacactgaagatggacggtggacttaacacaaatggtggtgctcctaagagaatttctcgttctgttagaagcaatacggtttgggaaagtcgtaggtttggtagagtttattgcaatttcttttcattctttggaagaattgtgtcttgaaactttttcttctttttctgaacatgggtctggtgagttagaatccgtaatcacgtttgttctaatgtcaatataaacttttggtagacatatcaggactttgtttattgatt

SEQ ID NO: 253064 - DNA, 533 bp, Glycine max
  unsure (1)..(533): unsure at all n locations
aggtaggagggcgtgnagccatcgataagcagtttatgtcacactctagaagagctatgacgtcgcatgcacgcgtacgtaagctcggaattcggctcgagcttaattccatactgctagtcatttcagatctactaggaatagagattcgcactgttgaaattactagaaatccatggctgctccacaggcaagagctcgagcggattacgattatctgataaaactttatttgatcgacgatagtgaggtcagaacaagtagccttcttgtacgagtctctgacggttctttcacaactagtagcatcacgactataggcattgattctaagatcagaaccattgagctggatggaaaacggatcaagctacaaatgtgggatactgcatgatcacgagcggttgacagctattacaaccgcttactatcgtgatgctatcggcatattgctagtcgatgacgtttcagacgaatcttgatttaacataatcaggaatcggattcggacattgtggcagctgcttcagaca

SEQ ID NO: 253065 - DNA, 530 bp, Glycine max
  unsure (1)..(530): unsure at all n locations
agtagaaggctgncttatgtatggggagttatagtaacactctagaagagctatgacgtcgcatgcacgcgtacgtaagctcggaattcggctcgaggaaaaacccatagagattgatgccagattgagacaaagaatagatcctcaatacaatgaggttcaggctcagatggaaacaaatttgtttaaattgtctcttgatgatgttgaaactcctaaaggttccatgttggatcttaaaatttctcaatctaaaattgcacttcccaaaaacacagttggaggaactattctgcgtagtgatctattggcaaattttttgacagagggcaattttagagcaagtgttgatttgcagcgcactcatcgtattaaaggaatgattaaaatggtggccacagttggtattcctgagaatacaggcatagcattggcctgtgctatgaatagttcttttagggggcgtgccagttctgatatttacaccatctgctctcaagactgtgaattatggaatcctgcttgcacac

SEQ ID NO: 253066 - DNA, 523 bp, Glycine max
  unsure (1)..(523): unsure at all n locations
agtaganagtgttctgacctacgtcatacgacgtcacatgctagaagcagctatgacgtcgcatgcacgcgtacgtaagctcggaattcggctcgagcggaaccattctaccagggccacaagagcaccaacgtgctgaacccggtgtttaagggtcagcaattggtgccactcaacgctgaccaatccgcggaactgaagaaggagaacgccactggggtgtacgagatcgatgtgaagatgtaccttagggtcaggttcaagttgggtgtcttcaagaccaagacgcttaagcccaaagtatcatgcgacttacgtgttcctttgaaaggaagcgccggtgctggtgtctttcagaccaccaagtgcgactgggatcgctgatggattcggattcacccgacccgacccgacccggttctgctttcacgtcatttctcccttttcttatttctttattggttagttttggacatagtcggcgtactccttggcctttcaggttactgttcagagatatgat

SEQ ID NO: 253067 - DNA, 530 bp, Glycine max
  unsure (1)..(530): unsure at all n locations
tgggtagaaggttctnagctcgtataaagactattgtcaagacgagctatgacgtcgcatgcacgcgtacgtaagctcggaattcggctcgagcaagcttagttgtcaagttggaatcaacccatactccatggaatggactggtttggccaatagattactgagtaagggcaacgatattctgtgttgcgattatgctagttttgatggtttgattaccaagcaagttatgagcaagatggcagaaatgataaacagtctttgtggtggtgatgaaaaattgatgcgtgaaaggacacacctgctgttggcttgttgttcaagaatggcaatttgtaagaaagatgtttggagagttgaatgtggaatcccttctggatttccgctcacagttatttgtaatagcanttttaatgagatgctcattagatatagctatgaaaaattactgcgccaggctaaagctccaagtatgtttttacaatncttcaaaaatttggttcttttggtgggattgtgatgattactta

SEQ ID NO: 253068 - DNA, 539 bp, Glycine max
  unsure (1)..(539): unsure at all n locations
agttagaggtgnttnnnntttcagtaataggcgagttattagtatcactctagaagagctatgacgtcgcatgcacgcgtacgtaagctcggaattcggctcgagagggaacaaataaagacggcagtttgcctgcactgatcagttcttagagcatgaattcagcatccccgcagtttgtttcctcaagaaggatgagtgtgtacgatccgatccaccagattagtatgtggggagaaggcttcaaaagtaatggaaatttaagtgcagccatgcctctaattgatgagacagacatgaagtttgatagtcagtcagaggatgcttctcatggtatactgggagagcctaataagtatgaccaagaagctaacaaacctactgataagatacaaagacgtcttgcacaaaatcgagaggctgctcgtaagagtcggttgaggaaaaaggcctatgtgcagcagttagaatcaagtcgtttgaagttgatgcagttggagcaagagctttgacgtgcaagacagcanggaatttatttn

SEQ ID NO: 253069 - DNA, 528 bp, Glycine max
gaggagggcttgtgttgagctatgacatcaagactatcatgctagaagcgctatgacgtcgcatgcacgcgtacgtaagctcggaattcggctcgagaattgctccatactatggccgtggacctcatgacgaccggttacacccgaaacgacaacatcagtagtttcacaaccaaagccgaggaaaatgccgtccaagaagccgcttctggtctagagagcgtcgagaagctcatcagactcctctcccaaacccaagcccaagcccaagcccaccatcaattcaacaacaacaatagctctagtaatgaaatcgccatcgccatggactgcaaagccgtcgctgacgtggcagtctccaagttccagaaagtcatttccctcctcggccgaacccgtaccggccacgccaggttccgacgcgcccctcttcccaaccaacaccaacacacccaaccttccttcgaactcgccgttcttcacgctaccccgctgcaccagatcccacctccctccctcaacaaaatc

SEQ ID NO: 253070 - DNA, 516 bp, Glycine max
gtagtaggattgtttatgaataagacatacctcgcgagagtcaagcttgcatgcctgcaggtcgactctagaggatcccctcggggaattccaattccacattttcaagaaataaggaggcaaaaatgttcatatatgaattggaattatttgttttcttattaggcctatcctgaagccaaaggaaatgagatcggaattcctcggggaattccaattccacattttcaagaaataaggaggcaaaaatgttcatatatgaattggaattatttgttttcttattaggcctatcctgaagccaaaggaaatgagatcggaattcctcggggaattccaattccacattttcaagaaataaggaggcaaaaatgttcatatatgaattggaattatttgttttcttattaggcctatcctgaagccaaaggaaatgagatcggaattcctcgggggtaccgagctcgaattccctatagtgagtcgtattaaattcgtaatcatgtcatagctgct

SEQ ID NO: 253071 - DNA, 537 bp, Glycine max
  unsure (1)..(537): unsure at all n locations
ngggtagagtgngtctgatctcgtaataaagaattattgtcacgctcagctatgacgtcgcatgcacgcgtacgtaagctcggaattcggctcgaggcgggctgagctgcggagcgtgcttcgagatcaaatgcgcaaacgacaagcagtggtgtcactccggcagcccttccatcttcatcaccgccaccaacttctgtccccctaactacgctcttccaaacgacaatggcggctggtgcaaccctcctcgccctcacttcgacctcgccatgcccatgttccttaaaatcgccgaataccgcgccggcatcgtgcctgtcgccttccgcagggtggcatgtaggaagcatggtgggatcaggttcacaataaacggtttccgttactttaacctggttttgatcagcaacgtagcgggtgcaggggatatcgtgcacgcctacgttaagggatcacgaacggggtggatgccaatgagcagaaactggggacagaactggcagtcaaacgcccgtttggtgggtcaagccttgt

SEQ ID NO: 253072 - DNA, 536 bp, Glycine max
  unsure (1)..(536): unsure at all n locations
gatgagggnctcggagtattgtattagatgagctacagcatcactctagaagagctatgacgtcgcatgcacgcgtacgtaagctcggaattcggctcgagcttctttctttttctgtgagcctttctttcaggttcttaacttgatcagtgtgcagtgtccaaatcataagggtagttgcaaattgcaatggctaagcatgatgttgagggtggttccttctctgcaaaggactaccatgatcctcctccagcaccgttgattgatgctgaggaactcacacagtggtccttctacagggctttgattgctgagttcattgccacaatgctcttcctttacatcacagtgctcactgtgattggttacaagagccagagtgatgtaaaggctgggggtgatgtgtgtggtggagttggcattcttggcattgcttgggcctttggtggcatgatcttcattctggtgtactgcactgctggaatctcaaggggtcacataaacccagcagtgacatttgggctcttcttggcttg

SEQ ID NO: 253073 - DNA, 520 bp, Glycine max
  unsure (1)..(520): unsure at all n locations
gaggaganctggttgaaaggaggatgggggaaactgtagaagcagctatgacgtcgcatgcacgcgtacgtaagctcggaattcggctcgagcgaagcccttcagcaaccatgtcgaggagaaaggttagggagccaaaggaggaaaatgtcactcttggtccagccgttagagacggtgaacatgttttcggcgtggctcgcatctttgcctccttcaacgacaccttcatccatgtcactgatttgtctgggagggaaacccttgttcgcatcactggtgggatgaaagttaaagctgacagagatgaatcatctccatatgctgctatgcttgcagcacaggatgttgctgccagatgtaaggaactgggcataactgctcttcatatcaggctccgtgccactggtggaaacaagaccaaaacacctggtcctggtgctcaatcagctcttcgagcccttgcacgttcaggaatgaaaattggtcgtatagaggatggtacctccaattctttcga

SEQ ID NO: 253074 - DNA, 525 bp, Glycine max
  unsure (1)..(525): unsure at all n locations
gaggagggcagtatctgtnctatgcaactacgatagatctgtagaactgctatgacgtcgcatgcacgcgtacgtaagctcggaattcggctcgagctcgttcactctgcatctgactcctatagtttcctctgctaattccatatccccgttttccttcactcttgaaccccgattcatttccaccagcacaagaagcatggctgcaatatcaataccttctcacatgaaagcttggacatactctgagtatggaaaatccaaggaagttctcaagtttaatcagagtgtggctttgcctgaggtgaaggaagaccaggtcctcatcaaggtcgctgctgcttcccttaaccccattgatcataagagaatggaaggctatttcaagaacagcgactcccctttacctactgctccgggttatgatgttgctggagtggtggttaaagtgggaagtgaagtgaagaaatttaaggttggggatgaagtttatggtgatatcaatgtgaaaagcttggaatatcc

SEQ ID NO: 253075 - DNA, 543 bp, Glycine max
  unsure (1)..(543): unsure at all n locations
agggaagaagtgtaagtagaagtgnatatgaggttagctcactgagtccgtacntaaaccattntgactgnntntgctgcctgccagtcgactctagaggatcccctcggggaattccaattccacattttcaagaaataaggaggcaaaaatgttcatatatgaattggaattatttgttttcttattaggcctatcctgaagccaaaggaaatgagatcggaattcctcggggaattccaattccacattttcaagaaataaggaggcaaaaatgttcatatatgaattggaattatttgttttcttattaggcctatcctgaagccaaagggaaggagatcggaattcctcggggaattccaattccacattttcaaagaataaagaagcaaaaatgttcatatatgaattggaaagagattaggtgacttattaggccaatctgaaaccaaaaggaatgaaaacgggatttcttggggggacccgacctggaatgccctatattgaggtcgattaaattcgaatcaaggcatagctgag

SEQ ID NO: 253076 - DNA, 536 bp, Glycine max
  unsure (1)..(536): unsure at all n locations
gatggtagtgtattatggaggaagaggctcnagcatgnccagngcagttcgctatactggagagacagcttgcatgcctgcaggtcgactctagaggatcccctcggggaattccaattccacattttcaagaaataaggaggcaaaaatgttcatatatgaattggaattatttgttttcttattaggcctatcctgaagccaaaggaaatgagatcggaattcctcggggaattccaattccacattttcaagaaataaggaggcaaaaatgttcatatatgaattggaattatttgttttcttattaggcctatcctgaagccaaaggaaatgagatcggaattcctcggggaattccaattccacattttcaagaaataaggaggcaaaaatgttcatatatgaattggaattatttgttttcttattaggcctatcctgaagccaaaggaaatgagatcggaattccttcggggtaccgaactcgaattccctatagtgagtcgattaaattcgtaatcatgtcataactg

SEQ ID NO: 253077 - DNA, 549 bp, Glycine max
  unsure (1)..(549): unsure at all n locations
atgggagagagagagagagagatgagagtagatgtgacgtattgattacgtagtcatancgtataactatagaagagctatgacgtcgcatgcacgcgtacgtaagctcggaattcggctcgagaaacggtgacggttcaaaacgagtagcgctagatacgggtagtcaaactaaatttgatttatcttactatagtaatttgaggaattcgcgtggaattctgcaatctgatcaagcactttggagtgatgcttccacaaagacaactgttcagaggtatttgggcttgataaaaggcttgcttggattaacatttaacggggaatttggaaaggctatgatgaagatgggcaacattgagttgaagactggtactgatggtgaaattcgcaagatatgttctgccatcaactagattggcactgagaacaatggatgattaaattgcttggagaattggctttaattggatctggtggcatttgccagttgaatggatcatgtgcattttgtttcttttttgtggccaggacaaatattttcattag

SEQ ID NO: 253078 - DNA, 534 bp, Glycine max
agggtggaagtaatggagagagaggttgagttatgcatagaagcgatcgctagactactatgacgtcgcatgcacgcgtacgtaagctcggaattcggctcgagctggggttaatgcctgccactcctccggagaggcctaaaacgccaccttatgcccctccaagagctccttctcctaggcctccctctccaagggttccttctccaaggcctccatccccaagggctttccgagggcggcttctccgcgagttacctctcccaaagccacgtcttcccggattgctcatcaccacaaggaggttggccacagaccagaaccaactttgaggcaacagcaagcctcagctactaagatccagtctgtttacagaggttatatggccaggaaggagtttagagctctaaagggtctggtgaggcttcaaagaatggttaaagggcagaatgtgaagaggccgacagtgaatccatgaaacacattcagctgttagtgcgagttcaatgtcagatttcagcttgaaaggatcag

SEQ ID NO: 253079 - DNA, 551 bp, Glycine max
  unsure (1)..(551): unsure at all n locations
ggaggttagaatagaatgnaggtattaaagggtttagtatgaataggagggttatagtatacactcatagaagagctatgacgtcgcatgcacgcgtacgtaagctcggaattcggctcgaggcctctacagcagagtcccagatctctgcattccaattcccatggctggtcgctatgacagtaaccccttcgatgaggaagaagttaaccccttctataatcctggaagtgttcccgctgccactaattcaaggctttcacctctgaagccagaacctgttgattataattatggctttggtgcgacagttgatatacctcttgattcatcaacggatttgaaaaagaaggagaaggaacttcaagccaaggaaactgaattgaggaaaagggaacccagaagtgaagacggagagaagaagctggttcacgagctggaattgttccttgaggaaaaagaattgggccgncttttttcccaataatccatcacgacattgctaatgaaattccaattcatcttcaaaaaattgcatatggtgcatttaa

SEQ ID NO: 253080 - DNA, 541 bp, Glycine max
  unsure (1)..(541): unsure at all n locations
gggaagaagtggatggaggggagaggtcannggcatgattacgcacggatanagtaacactctagaagagctatgacgtcgcatgcacgcgtacgtaagctcggaattcggctcgaggccagtagtcatatgcttgtctcaaagattaagccatgcatgtgtaagtatgaactaattcagactgtgaaactgcgaatggctcattaaatcagttatagtttgtttgatggtatctactactcggataaccgtagtaattctagagctaatacgtgcaacaaaccccgacttctggaagggatgcatttattagataaaaggtcaacacaggctctgcctgttgctttgatgattcatgataactcgtcggatcgcacggcctttgtgccggcgacgcatcattcaaatttctgccctatcaactntcgatggtaggatagtggcctaccatggtggtgacgggtgacggaagattagggttcgattccggagagggagcctgaggaacggctaccacattcaaaggaaggcaagcagcccc

SEQ ID NO: 253081 - DNA, 534 bp, Glycine max
  unsure (1)..(534): unsure at all n locations
agtagtnaaggttccgccgatagtagtaaggcgttttattgtatcactctagaagagctatgacgtcgcatgcacgcgtacgtaagctcggaattcggctcgagtcttgtgcgaggccgaggacaaatcctacatcaagcgcaccggaagcgcccacggttgggatatcgtcttctacattttcagcttcctcaagggcatttcgctcttcactctaattgtcttgattggcactggctggtccttcctcaaacccttccttcaagataaggaaaagaaggttctcatcattgtcatcccccttcaagtcattgccaacattgctcaagtcgttattgacgagagtgggccctttggccatgactgggttacctggaagcagatctttcttcttggtgatgtcgtcttgtggtgcgctgtgctctttcccattgtctggtccattcagaaccctcctgaggccgctaggaccgacngcaagggctgtgntaaattgatgaagcttactctctttccggactaccatgcccgcgt

SEQ ID NO: 253082 - DNA, 535 bp, Glycine max
aggagaactgggttgccgtatcgagtaaccgcatatattgtatacactctagaagagctatgacgtcgcatgcacgcgtacgtaagctcggaattcggctcgagtttcaatctctctctctctctgtctctctctctctagacttagattttgtgaatggctgaagtggaagagggacaggtcatcggcgtccacaccgttgatgagtggaagctgcaactccagaatgcaaaagactccaaaaaactgattgtggtggattttactgcttcctggtgtggtccatgccgttttatggccccagttcttgcagagattgcaaagaaaactcctgaattgatcttcctcaaagtggatgtggatgaagtgaggcctgttgctgaggaatattccattgaggccatgccaaccttcctcttcttgaaagatggcgagatcgtggacaaggtggttggtgctagtaaggatgaccttcaagccaccatagccaagcatgcatcttgctgtgctgctggttcctcttctttgaagggaa

SEQ ID NO: 253083 - DNA, 525 bp, Glycine max
aggagatacaggtctgtttaagtatacgggggggaatatagcatcactctagaagagctatgacgtcgcatgcacgcgtacgtaagctcggaattcggctcgaggtttcttacctggtgctagatgaggcagacaggatgctggatatgggttttgaacctcaaattaggaaaattgtgaatgaggtgcctaatcgcaggcaaactctaatgtttactgcaacatggccaaaggaggttaggaaaattgcagctgatctgctagtcaagcctgtacaggtgaacattgggaatgtagatgagcttgttgctaataagtccattactcagcatgttgaagtattgccaccaatggagaaacaaagacggctggaacatattttgcggtcacaggattcaagatcaaaggtaattaatttttggtctaccaagaaaatgggtgatcaacttggtcgtaatctgacacgttaatttggaactgctgctattcatggggataaattccaagcttaaaaggatcatttgt

SEQ ID NO: 253084 - DNA, 537 bp, Glycine max
agggagagggtggaggagagggaggattggcgtacgtagtacgtagttaatctctagaacagctatgacgtcgcatgcacgcgtacgtaagctcggaattcggctcgagctcaagtggtgagaaaccgaatgaagagtgtgaggaatatccagaagatcaccaaggccatgaagatggttgccgcatccaagctgagagccgttcagaccagagctgaaaattcccgcggcctctggcagccgttcaccgctcttctcggcgacaatcccagtgctgatgttaagaaaaacgttgttgttaccatctcttcggacaaaggtctttgtggtggaatcaattccacgtctgtcaagataagcagggttttgtacaaattgaattctgggcctgataaagagacaaaatatgtcatattgggagagaaggctaaagctcaattggtgcgtgactcaaggaaacacattgtgctcaagcttactgaattgcgaaaaattccctgaattacactcaggtgtctgctttgcagaaaacatttt

SEQ ID NO: 253085 - DNA, 533 bp, Glycine max
agttagattgatgggaggaggattgagctcgattagtatgctaatacatagaacagctatgacgtcgcatgcacgcgtacgtaagctcggaattcggctcgagcggctcgaggagagagagagagagagagagagagagaggagagagtattggcgcttcatcaagatgggtatttctagggattccatgcacaagaggcgtgccactggtggcaagaaaaaggcttggagaaagaagagaaagtatgagcttgggcgtcaggcagcaaacaccaagttatcaagcaacaagacaatcaagaggattcctgttagaggtggcaatgttaaatggagggcatttgagcttgatactggcaattactcatggggtagtgaagcagttactcgcaagactcgtattctagatagtgtttacaatgcctgaaacaacgagcttgtgcgaactcagaccctggtcaagaatactattgtgcaagttgatgctggtgcctttaagccatggtaccctttacactatgggtgttaaatta

SEQ ID NO: 253086 - DNA, 534 bp, Glycine max
  unsure (1)..(534): unsure at all n locations
agagtagaatataaggaaagcagaggttnnngcatgattacgtagcttatcgtaacactatagaagagctatgacgtcgcatgcacgcgtacgtaagctcggaattcggctcgagcacaactttatcaaaccaaaaaacacaacaaaagaaagaaagaaagaaacaaagagttccttgctttgtagtaagatatatcatcaaaaatggttttgtcttggactagaagaaacgttttccgccgtgcaaagaaggagaaggaacaaagtcaactattagaagttgaggttgtgattcccaaccactttcgctgtccggtgagtttggagctgatgacagatccggtgactttatcaaccggcattacctacgaccgtgtgagcatcgagaagtggatcgagggagaaaacagaacctggcccgtcaccaaaccagtgctgacaacctttgactattcccaaacctgccattcgcttgatgattaagattggtgcgtgcaaacaggtctattggattgaagaatccccactcctgga

SEQ ID NO: 253087 - DNA, 548 bp, Glycine max
  unsure (1)..(548): unsure at all n locations
atgagtatggatatntagagaggtgagagtggttnnnggatcgattacgtagtcgtacacgtaacactatagaagagctatgacgtcgcatgcacgcgtacgtaagctcggaattcggctcgagtgatgggctcaatgctgctcagtctcagaccctttctcaccaccatcttctttctcacactcacagtgctcaaggtttcagcatcatcctcagtgattttctacaacaagtgccagcacccagtgtggcccgggatccagcccagcgcaggaaagcccgttctggcccgcggaggcttcaagctcgccccaaaccgggcctactccctccagctccccgctctatggtccgggcgcttctggggccgtcacggctgttccttcgacgccggcagcccggggcgctgcgccaccggagacttctgcaggtccctgttctgcaaccgccttcgccgaagcccaaccgccacccttgccgaggttaaccctggccaacgagccagacttttacgacctgagcctggtgacgggtacaacctacccat

SEQ ID NO: 253088 - DNA, 540 bp, Glycine max
  unsure (1)..(540): unsure at all n locations
atgggggaagtggagagagagagggttttgagtatgtagtacgatgctaatctctagaacagctatgacgtcgcatgcacgcgtacgtaagctcggaattcggctcgagcttagggttttaccgttaaacgattctcttcgtctttctctgttctgaaaccactaccgtttcgtcgtcaccatgccgcaaggggattacatagagcgtcacagaagagactatggctaccgtcttgatcacttcgagcggaagcgcaagaaagaggcgcgtcaagttcacaaacgttcttcaattgcccagaaggctctgggtattaagggcaaaatgattgccaagaaaaattatgctgaaaaggcacagatgaagaagactttggctatgcatgaagaatcaacgtctaggcgcaagactgatgataatgttcaggatggagctgttcctgcttatctncttgatcgtgataacacaacccgagcaaagggttcttaacaacacaattaaagcaaaagaggaaggagaaggcggaaaaatgggatgtt

SEQ ID NO: 253089 - DNA, 544 bp, Glycine max
  unsure (1)..(544): unsure at all n locations
ggtgttgttgttgatgatggagttagggaggatctgagtatgtgatagtagttaatctcatagaacagctatgacgtcgcatgcacgcgtacgtaagctcggaattcggctcgaggtcaaatggaagcccaagggcctatgcctcgtccataaccagcaccagcacaactttggaagagggagctatcagttatcccctgtccgggttgagtgctacgtttgagaacaacgaggtcaccattttcgccactctcacactttcaaacgggaccacctnctttgtccacgtctggcaagatggccctctctctggaactaccccacgagagcatagccacgagacttcccaccaaaactccaaggaaatcttggatcttctctctggttcctncactcagccaaccggaaattcacgccaaagaggaagaaacacccatggagtgctaaatgctgtgagctggggcatattgatgccaacgggtgccataatcgcaaggtacttgaaagtgttcaagtctgcagaccctacttgggtttaattccc

SEQ ID NO: 253090 - DNA, 545 bp, Glycine max
ggtgggagagaatattgagagtgagagaggtgtctacgtatgtagtatgtatgtaatctcatagaacagctatgacgtcgcatgcacgcgtacgtaagctcggaattcggctcgagaaacaaacaaacaacacagtttttcttgtctctatattcttccggccaccgcagatggcggcggagcacgacagctgctgctcgcgctgtgtcaccttcctaataaccataggcctcacagcgctcttcctatggctgagtctccgcgttgacgaaccaaaatgctacctcgactacatttacgttcctgccctcaacaaaaccctaaattccaattccactcacaacaaaaacaccacaatactcttcgctctcaagctcaccaacgggaacaaggacaaaggcatccaatacgacgacgttctgctctccttcagagtcttcgagagcgtcaacctcacgcgcccactcggcaacgccaccgggcaaaggtctaccagggccacccagagaaaggccaccagcacgggaaccttcagcggcgggggg

SEQ ID NO: 253091 - DNA, 542 bp, Glycine max
  unsure (1)..(542): unsure at all n locations
gatggaaggatattatgagaagaaaggggtntatcatcgatatgaaggatacagtagaactatagaagagctatgacgtcgcatgcacgcgtacgtaagctcggaattcggctcgaggctaggttgaaaatagtttggttttgtagtaagtgaggtgaggtgccaaaatggtgaagataactcttggtactttcgatgactcttttggtgttgcctctcttaaggcttatttggcagagttccatgcaactctgattttcgtgttcgctggtgttggttcagccatcgcttacaacgagcttacaaaagatgcagccttggatccaacggggctagtggcagtagctgtggcccatgcatttgcactgtttgtaggtgtctccgtcgcagccaacatctcgggtggccatttgaacccagcttgtacttttggattggccattggaggcaacatcaccctcattactggtttcttatactggattgcccagttgttgggttccattggggcatgccttcttcatcaatttcatcaccggcca

SEQ ID NO: 253092 - DNA, 523 bp, Glycine max
aggagacgggttgtctacgtagacacgaagtatattgctatcactcatagaagagctatgacgtcgcatgcacgcgtacgtaagctcggaattcggctcgagggggatctgaaccatctaatttcagccaccatgagtggtgtgacatgttgtcttcgtttccctgggcaactcaactcagatcttcgcaaacttgctgtgaatctcattcccttccctcgtctgcactttttcatggtgggttttgccccactcacatctcgtggttcccaacagtacagagctcttactgtacccgaattgacccaacaaatgtgggatgctaagaacatgatgtgtgcagctgatcctcgccatggtcgatacttgacagcttctgcgatgttccgtggtaagatgagcacaaaagaggttggacaaccgaataatcaatggtccaaaccaggacttaatctaacttgggggaatgaatcccaaccattgggaattccactgcctgggattcccttccaatggttggaaa

SEQ ID NO: 253093 - DNA, 541 bp, Glycine max
  unsure (1)..(541): unsure at all n locations
ggagaggtggaagagtaagaatgagatagggtttgagtatagagaatgtacgctaatctctagaacagctatgacgtcgcatgcacgcgtacgtaagctcggaattcggctcgaggaaaactccttatggtcaccttcaaaaccagtcaaccaacgtgatgctgatctcatccatttttgggataagttccgcaaagctcctgagggttctctcaggaaaaatgcagctcagaaacaagttttggaagcaatgtctcatagaatgcatgtagacaacagtgtaaaacttattgggaagcttttatttggtattgaaaagggtccagaagtactcaacgctgttagaccggcaggatcggcacttgttgatgattggcactgccttaaaacccatgggaggactttngagacacattgtgggtccttggcttaatatggcatgaaacatatgaggtccttttgcaacatctgcaatgtangggttaagaatgagcaaatggctgaggcctntggacaagctggggctctaattccttcaaac

SEQ ID NO: 253094 - DNA, 535 bp, Glycine max
tagtttatgatatgagagtgagaggtgtttagtatgtagatgatagtactctctagaacagctatgacgtcgcatgcacgcgtacgtaagctcggaattcggctcgaggtggaaacctgatacacgattggcggtttggtatacaactaaatccacagctcatgggtatcgacctcaaatttttctttgttagagctggaatgatgggatggctacttatcaatttatctattcttatgaagagcattcaagatggtactttgagccagtcaatgattctctaccagctattctgtgcactatacatcctggactattttgtacatgaagagtacatgacatccacctgcgacataattgcatagagactgagcttcatgttggtctttggagatttagtgtggattcctttctctttcaacatacaaggatggtggctcttgatgaacaatgtggaatttacaccaactgccattgtagcttaatggcttgtgttcctggatggattcattggattttcaggacaaacatgcaa

SEQ ID NO: 253095 - DNA, 536 bp, Glycine max
ggagggtaggagaggatgtggagagagggtctatgtatgtagacgtatgtaatacatagaacagctatgacgtcgcatgcacgcgtacgtaagctcggaattcggctcgaggaacaaaaaggttttctgtcggtccaatattgacaacttggtgggaagtaacgaattttccttggactatgacttcttggttgtagcagtaggagcacaagtaaacacttttaacacccctggtgtcaaggagaactgtcattttctgaaggatgttgaggatgctcagaagattagactgtctgtgattgattgctttgagaaggctgttcttcctagtctatctgatgatgagcgaaggtcaaatcttcattttgtagttgttggaggaggtccaactggtgtggaatttgcagccgagctggatgattatgttcaagaagatctaattaaactatattcaactggtaaaagataaggtgaaattacattggttcaaattggagatcatatcttggacaatgttgtggaagaattagttcttt

SEQ ID NO: 253096 - DNA, 547 bp, Glycine max
  unsure (1)..(547): unsure at all n locations
ggagggaagaatgagaattaggtagatagagggtcntgcctcggataaggagagttaatgtatacactcatagaagagctatgacgtcgcatgcacgcgtacgtaagctcggaattcggctcgagctcaccgcacgcactagcactgtctctcactgaaacttgttcgcacattttcacggatctaactaagttatcgccatgaatcgccaccacgatcccaatcccttcgaagaagaagaagtcaatcctttttcgaatggcactactgctcctgcatcaaagtcacgtattccaccattagcatctgagtcactgggctttggtcaaaggcatgatgctacagttgatattcctttggatactacaaatgactccaagaaaaaaggtcaagagctagcagcttgggaagcagatttaaaacggatagagaaaggaataaaaagaaaaagagaggcttgttctagagctggtgtttctgttgatgttagaattgggctncaatttttccaatcattcaacatgattttgccaatgggataccattt

SEQ ID NO: 253097 - DNA, 548 bp, Glycine max
  unsure (1)..(548): unsure at all n locations
gaagagtatagtgtgtaggagatagagaaggtcnnagtatgtaataggcgatataatagtagaactcatagaagagctatgacgtcgcatgcacgcgtacgtaagctcggaattcggctcgagccccgactcaattacaccacgcttctaaattctgagaatgaattcgtaagatcgaagcaatagcctttttctctgccgccactggtttcgatcccacacccacaaacgcaaaccctccatcctttgaatgctcttgcgttttcctttcactacctcattcctaactcacacacacacaacgggtgatatcaatgtcgactcctgctaggaagaggctcatgagagatttcaagaggctgcaacaagacccgcctgcaggaatcagcggggcaccttaagataacaacataatgctggggaacgctgtcatanttggtcctgatgatactccatgggatggaggcacgtttaagttgactctccaatttactgaggattatccaaacaagccaccaactgtacgatttggctctcgaatgtttcat

SEQ ID NO: 253098 - DNA, 543 bp, Glycine max
  unsure (1)..(543): unsure at all n locations
ggagggtatggtgttatgtgtagagagaggtgntggatcgattaagagagttaatagtaacactcatagaagagctatgacgtcgcatgcacgcgtacgtaagctcggaattcggctcgaggcggaatctgctagaattttctaataatggcgaaagacgttgagcaggtcacagagcaaggtgaatactccgcgaaggactaccatgaccctcctccggcaccgttgatcgacccagatgagctcacaaagtggtccttgtacagagccgccatagctgagttcatagcaacactcctttttctttacatcaccgtgttgaccattattggctacaagagacagagtgacaccaaaatccccggtaacaccgaatgtgacggcgttggcattttgggcatcgcttgggcctttcgtggcatgatcttcatccttggttactgcactgccggaatctctgggggacacatcaaccctgcggtgacattcgggttgttccttggacgcaaggtgtctttggtgaggcctttgttgtacatgata

SEQ ID NO: 253099 - DNA, 543 bp, Glycine max
  unsure (1)..(543): unsure at all n locations
tagggaatgagatgtgagtgaggaagggttntagcatcgataaggaaggatangctaacactatagaagagctatgacgtcgcatgcacgcgtacgtaagctcggaattcggctcgaggtgaatgcgtataaaaggaaaataaagaaattagcgtcaaaatgttgggtgtgttcagcagctccatagtgtcgccgccggacgagctcgtggccgccggcagccgtactccgtcgccgaagatgacggcggcggcgctgcggaagcggttcgaggagaagaacccctccgccgtgtcggtggaggtcggagagcatgtccagctcgcttatacccaccacaacgagtcgccgtttcagcccagatcctttgctgtcaaggatgaggtgttctgcttgtttgagggagcccttgacaatttgggaaacttgagacaacaatatggactggccaagtcagtcaatgaagtattgttggtcattgaagcttacaaagctttgcgtgaccgaacaccctaccctgctaatcatggtggtggccatctt

SEQ ID NO: 253100 - DNA, 532 bp, Glycine max
  unsure (1)..(532): unsure at all n locations
gagtagancggagttgtctatagcgacgggggggagattagtatcactctagaagagctatgacgtcgcatgcacgcgtacgtaagctcggaattcggctcgaggccttctctctctctctctctctctctctctctctgtgttgcgttttgtgaaatcttattcgacatggcgtcacgggacaacaagaaggcgtcgagcagccgagccggcagaattcgcaccctctccgatctgaaccgtccctccgccgattccgacagcgactccgatggccctcaggagtactacaccggcggcgaaaagagtggaatgcttgtccaggatccttcaaagggaaatgatgtggatgaaattttcaatcaagctaggcaacttggggctgttgaaaggcctcttgatcagcttcaggagcctncaaggtcaactagctntactggaactggcaggttactcttcgggggaaactacacgatctactaataatcagcaaccttgagctgttgttcataacattgttttctggagtaat

SEQ ID NO: 253101 - DNA, 520 bp, Glycine max
  unsure (1)..(520): unsure at all n locations
agaagaaatggttgntttatagtaacgaagggtatatagtaacactctagaagagctatgacgtcgcatgcacgcgtacgtaagctcggaattcggctcgagttacactcttgagatgtgcatgactggcctggatagagagaaagcacaggttttctacaaagaacaatctgcttcagctgccatgatgactgttaattccggcattagaaaaattcttccagattccgagatttgtgactttgactttgaaccatgtggttattcaatgaactctgttgaaggcgctgctgtttctacgattcatgttaccccagaagatggtttcagttatgcaagcttcgaaactgttggttatgacttcaaagcggtgaatctgaacgaaatggttcagagggtattggcatgtttcctccaaactgagttttctgttgcagttcatgtggatggtgcaagcaagtcgtttgagcagacctgctttctggatgttaagggatactgtcgtgaagagaggagccac

SEQ ID NO: 253102 - DNA, 520 bp, Glycine max
  unsure (1)..(520): unsure at all n locations
nagtaggcaggttgacctcgtataaaagacagtccgtatcaccatagaagagctatgacgtcgcatgcacgcgtacgtaagctcggaattcggctcgagcttgtctccagctacctccgttcctcgatctcattcaccagacagaacagaatgggttgtcaaggtagcaaggagaaaaaatcaaagacagaatttactacttcctatggatcagcagccactggtagtggtggtggtactagttacaacactgttcagcctccgccgtcgccaccaccacctactactactgctactactactaatcaggttcaaacatcagcagcacccaaaccacaatcaaaagcttctcctacagtgcagcagaaagcagacacgaggattctggggaaaccctttgacgacatataaaaatactacagtttagggaaggaattgggaagggggcaattcgggataacgtatctgtgcacggataatgcgagcggtgngacgtacgcgtgcaagtcgatactgaaga

SEQ ID NO: 253103 - DNA, 540 bp, Glycine max
tagggtatgagaggaatagtgagcgcgtatttgcgctatgtatccgtatgctatagctaaagacacaagcttgcatgcctgcaggtcgactctagaggatcccctcggggaattccaattccacattttcaagaaataaggaggcaaaaatgttcatatatgaattggaattatttgttttcttattaggcctatcctgaagccaaaggaaatgagatcggaattcctcggggaattccaattccacattttcaagaaataaggaggcaaaaatgttcatatatgaattggaattatttgttttcttattaggcctatcctgaagccaaaggaaatgagaatcgaattcctcggggaattccaattccacattttcaagagataaggaggcaaaaatgttcatatatgaattggaattgtgtggtttcttattaggcctatcctgaagccaaaggaaatgagatcggaattcctcgggggtaccgaactcgaatttcctatagtgagtcggattaaaattcgaatcatgtcatagcttgt

SEQ ID NO: 253104 - DNA, 540 bp, Glycine max
aatgtaagtatatagtgaggagtgagttcgagtatgtattagacgcaatccgtctagaacagctatgacgtcgcatgcacgcgtacgtaagctcggaattcggctcgagctctcactcagattcagcaattttctattttcttctctcatggcttcagattccaaaaaggatttccctgctgatgacaaagctggaacagcagagaataaagcatccaaagatgaaacgtcatctaaagattctccagcagcacaaagagctactacagctacttctggacctgcaactggtttttcaagcaacccttttgatttctctgcaatgtctggcctggtcaatgatccaagtatcaaggaattggctgaacagatagcaaaagatccatcattcaaccagatggctgagcaacttcagaaaacttttcaaggacttcacaagatgctatgcctagacttgataatcaacaatatttttcaaccatgcaacagggtttgcagaatcctaattttatgaccatggcttaacgccctgggttaatc

SEQ ID NO: 253105 - DNA, 548 bp, Glycine max
  unsure (1)..(548): unsure at all n locations
ggatggtgttggatagaaagtagtgagaaagaggctgntggatcggcttagcgtgttacagtaacactatagaagagctatgacgtcgcatgcacgcgtacgtaagctcggaattcggctcgagtggatccgtgccccttcgtgcggatcctcgtcggaaacctcgccgtcaagtccccggcatcatcaaagccctcttctttctccggcaaagtccacccttcgagttcccccttcttctgcaagatcctactccagggacttgattcgaattccacttctcctagagtgtccagtgtccctctgatatcagactccgacccacaccctcactccttcgccggctcctttgatttctccaaagcccaaatcttgaaagcctcgaagaagcccctgatgaagatctccgtctacaagggcccgaaaactccctcctgcgtcttcacctccggcaaactatagtgcaaagtttcaatacccctcgatctcaccttggccgagtcacgcccctggacctttcacaacggttggcttttcctttccaagaa

SEQ ID NO: 253106 - DNA, 551 bp, Glycine max
  unsure (1)..(551): unsure at all n locations
ggatgggtatggagagtagggagagggaagaggttnnangcttggaatatggagntagtatgctaacactctagaagagctatgacgtcgcatgcacgcgtacgtaagctcggaattcggccgaagcggcaggtacgttcccggtgccgtgctcatggatctcgaacctggaaccatggacagcatcagatctggcccctaccgcaagatcttgcgccccgacaacttcgtatgctgccaatgcagcgccagttacaagtgagccaaaagtcattatactgaatgcgcctagctgatcgactgcgttctcgacgtcaatgcgcatagaggctgaaaactgcaattgcttgcaaggatgtcaagtttgacactctcttggaggaggcacaggctctggcatgggaacactgttgatatcaaaaattagggaggaatacccagacagaatgatgctcactttctctgttttcccatctccaaaagtttctgatacagttgtggagccatacaatggcactttggctggtcaccaactggttgaaaatgcagac

SEQ ID NO: 253107 - DNA, 552 bp, Glycine max
  unsure (1)..(552): unsure at all n locations
ggaagggtatggagatgtaagggtaatgaagatggtcnnncttaatgcattaagcatgtttatagctaacactcatagaagagctatgacgtcgcatgcacgcgtacgtaagctcggaattcggctcgagggggattgggaaatcctaaattgacatttagtgacaatgtgaagctgagggctggcaataacaagctttctttacttagcgttgcagttggtctcccgaatgttggtgtgcactttgaaacatggaatgcgggggtgttaggcccagtcactctgaagggtctaaatgaggggactcgagacttgtcccggcagaaatggtcttacaaggttggactgaaaggtgaatccttgagccttcacaccgaaagtgggagtagctctgtggaatggatacaaggatcattaatggctaaaaaacaacctttgacatggtacaagacaacttttagcgcaccggccggcaatgatccattggctctagatttgggaagcatgggaaagggtgaagtgttggtaaacggtcgaagcattggtcggcat

SEQ ID NO: 253108 - DNA, 529 bp, Glycine max
  unsure (1)..(529): unsure at all n locations
agaaggggaaagcttgntgtatagtaacagccgatatatagtgacactctagaagagctatgacgtcgcatgcacgcgtacgtaagctcggaattcggctcgaggtgaccctgaacgaaacaggggagcaatactacatttgctccgttggatcacactgttccgctggccagaaactggcaattaacgttaacagagcttcttctaccggtccttcccctgcacctcaacccagaggaagtggttctccaccaagggctagccctgtccccacacaagcaccacaagccagtagccccactcctccaccaaggtctgcaccagcacctgcttttggtccatcctctgaaccagctactttcattgttggagaaaccgctggctggattgttcctggcaacgcttccttttacacagcttgggcctctggcaaaaacttcagggttggagacgtccttgtgttcaactacgcatcaaatacacacaacgtanaggaggttacaaaagccaactttgattctttgcagtt

SEQ ID NO: 253109 - DNA, 528 bp, Glycine max
  unsure (1)..(528): unsure at all n locations
ggaggaggggaagggttgncttatggtaatgaagggtatattagtagaactctagaagagctatgacgtcgcatgcacgcgtacgtaagctcggaattcggctcgagggcagttgttgatctgtcaaagtgtgttgaaaatcttgaaatgacaaagtctcgattactagagacagagcaacatctagctgaagttaaatcacaattgacttctgctcaaagatcaaacagcctggctgagacgcaactaaaatgtatgacagaatcatacaggtcaattgaagcacgcgcaaaggagtttgaaactgagcttaatcatctgcaaatgaagacagaaactctggagaatgaacttgaagatgaaaagagggctcatgaagaagctttggctaagtacaaggagctagaagaacaactacaaaggaatgagagctcagctgctgataatgacattaagactaagcaggagagagacttggaagctgctgctgaaaagttagctgagtgtcaggaaaccatatttcttctt

SEQ ID NO: 253110 - DNA, 529 bp, Glycine max
gaggagggctcggtttgccgaactggtacccgaacactacgctatcaccatagaagagctatgacgtcgcatgcacgcgtacgtaagctcggaattcggctcgagctctagccgaattaatcatcttacttatttattgtccgaaaatggttgatttacattggaaatcaaagatgccaagttccgacatgccttccaaaactctaaaactctctctctccgacaacaagtccttaccctctttgcaactacccttccgcaccacagatatctctcacgccgcaccttctgtttgcgccacttacgactactatctccgtcttcctcaactcagaaagctttggaactcctcagattttcctaattggaacaacgaaccaatcttaaaacctatcttgcaagctctcgaaatcaccttccgctttgtctccattgatctctccgatccaagaccttactccaaccacagaaaatggactcgcaagattgagtcttttatcacacttcaaattgaaataatggccatact

SEQ ID NO: 253111 - DNA, 525 bp, Glycine max
gagtaggaaagggttccgtatagtaaacaagactatatgtagaactcatagaagagctatgacgtcgcatgcacgcgtacgtaagctcggaattcggctcgagctcgagccgcaagatttcagttccaaacaaaacttatcaaaatctcatatactgattcagttctatacataaccatcgagatttattatcaaaccaaaaattctcaaaatctcttcacctctgtgatgaccatggaatacagaaccttagaactcaacatcatatccgcaaaggacatcaagaacgttaacctcttctccaagatggacgtatacgccgtcgttacgctctccggcgaccctctccaccctcagggcgccaccacccacgtccacaaagacgccggcagcaaccccacgtggaactaccccgtgaaattctccgtcaacgaatcgctggccaaggagaatcgtttgtctcttgagatcaagctcgtctccgaccgcaccctcggcgacaccgttatcggcaccgtccatgtt

SEQ ID NO: 253112 - DNA, 545 bp, Glycine max
  unsure (1)..(545): unsure at all n locations
ggaggtagtggagaggaggagagagaaaggttctgagtaagatgatgtatagctaatctctagaacagctatgacgtcgcatgcacgcgtacgtaagctcggaattcggctcgagtagagaagagcttcgaggaggagaacaagcttgaacccgagagaaagaccaaactagccaaagaccttggtttgcagccacggcaagttgctatttggttccagaaccgtagagctcggtggaagaacaaacagctggagaaggattacgagactctgcatgcaagttttgagagtctcaagtccaactatgactgtctactcaaggagaaagacaagttaaaagctgaggtggcgagcctcactgagaaggtgcttgcaagagggaaacaagaagggcacatgaagcangctgaaagtgaaagtgaagaaacaaaaggattattggatttgcaggaacaggaaccaccccaaaggcttttactgcaatcagttttcggaaggagaaggatccaaagtctcttctgtcggtagggggttgtaaacaggaa

SEQ ID NO: 253113 - DNA, 548 bp, Glycine max
  unsure (1)..(548): unsure at all n locations
agagggagaggatagaatgtggtagaaagagtgtgtcngaagtatgtagattgacgtcatagcatagaacagctatgacgtcgcatgcacgcgtacgtaagctcggaattcggctcgagcggaatctaaggcaaagcaaaccaaacatcttgaatcatgggttcaacaggtgagactcagattaccccaacccacgtatctgatgaagaagcaaaccttttcgccatgcaactagccagtgcttctgtccttccaatgatcctcaaatcagcacttgagcttgatctgttggaaatcatagccaaggctggccctggtgttcatctttcccccactgacatttgttctcaacttccaacacaaaacccttatgcaccccgtatgttggaccgtatattgcgcctattggcttgctacaatatcctgtgtttttctctgcagactcttcctgatggcaagggtgagaggctctatggtcttggccccgttggcaaatacttgggttaagaacgaagaagggggcttcaatggttggctcaaactcatga

SEQ ID NO: 253114 - DNA, 533 bp, Glycine max
  unsure (1)..(533): unsure at all n locations
gttgtatgtataagttagagtagttnagtatgagatggaaagtatttgtgacaccactatgacgtcgcatgcacgcgtacgtaagctcggaattcggctcgaggcaatcgggagagagagcaaggtcccttctcaaggatggcgatgactgtacacgtccttgctgggttggcttttatgttttcagctagcattttgcttcagattctggcatgtgcaatatataacaattggtggccaatgttatcagctctgatgtatgtgctggttcctatgccttgcttattctttggaggtggatccactcaatttctaatgagccgtgatggtggtggttggatagatgctgcaaaatttttgactggagcatcagctgttgggagcatagccattcctataatcctcaagcacgctcatatgattgagacaggcgcgatgctcattgaacttgtatcgttcttcatttttatatgtactgttttatgtttncaccaatccggccttgatgatgattggtaaccagaaaatccgca

SEQ ID NO: 253115 - DNA, 547 bp, Glycine max
  unsure (1)..(547): unsure at all n locations
ggaggganaggaaataagaagaggagttgttcgngatgtagtaagtaactcatcgctaacactcatagaagagctatgacgtcgcatgcacgcgtacgtaagctcggaattcggctcgagagcatggaaagaaggaattagaaaagcctcaagtgaagtgtacttgcatcttgttcttggaaaatttcagttgaatatggggactccaagaggaatagctcttctcagtttcacatccttcttgttttggagctcagcgaatgctttgctttctcctaagggagtgaactttgaagtgcaagctttaatgggcataaaatattctctagaagatccacatggtgttctagataattgggatggggatgcaattgatccattgagcttgactatggtcacatgttcttctgaaaacttggtcattggactgggcacttctagtcaaaggttatcttggactctatctncaagcataagcaacttaaccaacctncagattgggcttctacaggaataacaacataaatggaccaattcctttagaacc

SEQ ID NO: 253116 - DNA, 554 bp, Glycine max
  unsure (1)..(554): unsure at all n locations
ggtggtgtagtgtgatnaagtnagagtagtgagtgtgatgtattgtagtacgtagtctcatcgctaacactctagaagagctatgacgtcgcatgcacgcgtacgtaagctcggaattcggctcgaggtcactcttcttgcataacccagatctgcagacaatatgcgaagaactggcttgttacatttgttatgccttgtcattgctttagtaagtgtgcaagcagaagatgcgtataagtattacacatggacggtgacttatggaactatttctccattgggtagtccccagcaggttattcttatcaatggtcagtttcctgggcctagacttgacttggtgactaatgagaatgtaattctcaaccttatcaacaagctggacgagccatttttactcacttggaacggtattaaacaaaggaagaattcatggcaagatggagttttgggaaccaactgtcccattccttcagactcaaattacacatacaagtttcaggccaaggatcagatttgtacatatacttacttttcattaacttaactgg

SEQ ID NO: 253117 - DNA, 521 bp, Glycine max
gagtaggctagttgtctatgaatataagatacatcgtactactcggagagacaagcttgcatgcctgcaggtcgactctagaggatcccctcggggaattccaattccacattttcaagaaataaggaggcaaaaatgttcatatatgaattggaattatttgttttcttattaggcctatcctgaagccaaaggaaatgagatcggaattcctcggggaattccaattccacattttcaagaaataaggaggcaaaaatgttcatatatgaattggaattatttgttttcttattaggcctatcctgaagccaaaggaaatgagatcggaattcctcggggaattccaattccacattttcaagaaataaggaggcaaaaatgttcatatatgaattggaattatttgttttcttattaggcctatcctgaagccaaaggaaatgagatcggaattcctcgggggtaccgagctcgaattccctatagtgagtcgtattaaattcgtaatcatgtcatag

SEQ ID NO: 253118 - DNA, 528 bp, Glycine max
  unsure (1)..(528): unsure at all n locations
agtaggggaaatgcgtgtttatggtaacgggggggttaatagtatcactatagaagagctatgacgtcgcatgcacgcgtacgtaagctcggaattcggctcgagaattgatttgaggaaactgaatatgggtgagccttttgctcaaggagcttttgggaaactttaccgaggtacttacaatggtgaagatgttgcaatcaaaatcttggagaggcctgaaaatgatccagcaaaggctcaattgatggaacaacagttccagcaggaggtcacaatgttggccacactaaagcattctaacatagttcgtttcattggtgcatgccgcaagccaatggtatggtgcattgtaactgagtatgccaaaggtggttcagttcgacaattnttaatgaagcgtcaaaacccgttcagtccccttaaaatggcttgcaaacaagcttttgaaggttcaaaggggattgcttatggtcaatggcctggaattattcacaaggactttgaatctggaaaacctttggattt

SEQ ID NO: 253119 - DNA, 542 bp, Glycine max
  unsure (1)..(542): unsure at all n locations
ggatgggtaggatattagagaggagaaaggttctgaatttagtntattattgtattctctagaacagctatgacgtcgcatgcacgcgtacgtaagctcggaattcggctcgaggaatttctatctatctcttgtttcaatttcaacaacggttactcctttttcgttttgagtttcaatcaagccatcatcatgtctaccgcatcgcaacccaaggccaagaaaacggcgtcgtccaagaagcccctctcccaccctcccttcgccgtgatgatagcagaggcgattgcgagtctgaaagagagaaccggttcgagccaatacgcgataaccaaattcatcgaaaggaaacacaaggagttgcctgcaacctacaagaagcttgtcctcgttcatctcaagaaatctgttgctgctggcgagcttggtaaagtgaaaaactccttttagctcgcaccgactaagcctgctccggttaaggccggtgttcccaaaaagccaaccaaagctcccctaagcccggttcccaagccaaaactgtt

SEQ ID NO: 253120 - DNA, 545 bp, Glycine max
  unsure (1)..(545): unsure at all n locations
ggatggtaaggaataagggagagggcagtttgangtatgtagacaggaagtatattgtaacactatcttgacgtcgcatgcacgcgtacgtaagctcggaattcggctcgaggacagcttcaaagtgcaaggttgcaagcacctncaccttcttactgttgttctcttctcctcattcatattttccatttttatttttctaataaaacaaaacaacataagcaccgttcttttctctctgaaattcccatattcatcacttctgagctctggacgagatccctctctctcccattccagatctcgccatcagattcaccctttcattttaagcaaagtcataacttgaagaaggttcatggctgctccaccggcaagggctcgtgccgattacgattatctcataaagcttctcttgatcggtgacagcggtgttggaaaaagttgcctccttctgcgtttctccgatgggtctttcaccactagtttcatcacaactataggcattgattttaaaataagaaccattgagcttgatggaaaat

SEQ ID NO: 253121 - DNA, 547 bp, Glycine max
  unsure (1)..(547): unsure at all n locations
agaggttgaggataggagagagaagggagtggtctgagtttgatgttagtacgntattctctagaacagctatgacgtcgcatgcacgcgtacgtaagctcggaattcggctcgagcaacacacgggtagctgctgctgctaacaatgtgacatttgtgacaccaaacattgctttacttcaagcacattctttcaacaagtgcaaaggagtgtacaccacatatttcccttgcaaccctgctttcaagttcaactacactggcactccaccaagcaacatctttgtgagtagtggcactaagacagtggggttgccatacaacaccagtgtgcagctggtacttcaagacacaagcattattggagctgacaatcaccctcttcaacttcatgggtttaactatctcattagttggcaaagtgaagggaaccttgaaccccaaaaaggaccccattaaggtcaacctttttgacccttgtgaaaagaccactgctggagcgccatctggaagggggggttgccgttcgctttattgctgataaaca

SEQ ID NO: 253122 - DNA, 529 bp, Glycine max
  unsure (1)..(529): unsure at all n locations
aggagancaaggttgtcgatagtagacacgaagtatattgtgaacactctagaagagctatgacgtcgcatgcacgcgtacgtaagctcggaattcggctcgaggccagttctccaccccggaagatatgcttgctggaacctctaaccgtcctcgaacttttagacagaaagaagctgagcatgaagaggaagaacccgaggaagtatctggagatgaatctggagaagaatctgaagaagaacttctaagaaaaaaggaacacaaggggttattgagattgaaaatcccaacttagtaaagccaaagaccttgaaagctagagatgttgatgttggaaaaacaacagaactttcaaggcgtgaaagggaggagatagagaaacagagagcccatgagcgctatatgaggctgcaagagcaaggaaaaacagaacaagcaaagaaagatttagaacgtttagctcttatacgtcagcaaaaggaagatgctgcttaaaagcgagaaaaagaaaaagcttccaaagaac

SEQ ID NO: 253123 - DNA, 615 bp, Glycine max
  unsure (1)..(615): unsure at all n locations
aagaggantnnatnaagnnanttaanaagaagagtagnanannaagagaaagaaggagagagagagagaaaaaagaagnaanaanngaggaggaccggtatctgaatagaagcgaagaggagtatatggcaaaactctanaagagctatgacgtcgcatgcacgcgtacgtaagctcggaattcggctcgagccgaggcgaagagaagagaaaaattaagatggaggggaaggagcaggatgtgtcgctgggagcgaacaagttcccggagagacagccgattgggacggcggcgcagagccaagacgacggcaaggactaccaggagccggcgccggcgccactggttgacccgacggagtttacgtcatggtccttttacagagcaaggatagcagagtttggggccacttttctggttctatacatcactgtcttaaccgtcatgggaatcgccggggctaagtctaagtgcaataacggtgggattcaaggaatcgcttgggccttcggtggcatgatctttggcctcggttactgcaccggtggcatctcaaggggacaacataacccggccgggaaaattgggcctggttttggcaaggaagtggcctt

SEQ ID NO: 253124 - DNA, 535 bp, Glycine max
  unsure (1)..(535): unsure at all n locations
nagggaggagcggggntntnnccaactgagacaatgcgaaacatcgttataancnctctagagttatgacgtcgcatgcacgcgtacgtaagctcggaattcggctcgagctgttatctacaaccaagataagccatgggatgaccattggatcttttgggtaggaccatttattgcggcagccattgcagccttctaccaccagttcatcttgagagcaggtgcagccaaggcccttggatcattcaagagtaacccccataattgagatgtctttctcttcatgatgatggctctagtggaaagaagataattggagagatggatgttgatatggcaagtttaataatgggaaatgcttttggctatgcatttgcaacgtttctttgaccctctcgattatgtcttcaagattgtggataagtgtacattaaagtctctctcatgacaggtggagccttttgcactttcctctgtggtgttcttacctttagtgtgtcatttgtcttttgtaagttattctcttctgtcatct

SEQ ID NO: 253125 - DNA, 518 bp, Glycine max
ggtaaagtgtgtctgagtatttgtactgattagtatcactctagaagagtctatgacgtcgcatgcacgcgtacgtaagctcggaattcggctcgagcatgtccttatgtgagtggcattgctgctttgctcaaggctaggcaatcacattggagtcccgttgccatatggtactcttttatgaccactgcttctgttcatgacaataccatcaagcctttcagatgtgcactcaattccagagccttaactccttatgaacatggaacttgacccatgatgcctagaatagctcttgatcactgattagtctatgatatttagccactcgactacattgaattcctgtactgactgaaactgactacatctgaactttgaaggtttgctaagtattcacacgtgaattgtttgcactatctttcaagtcagtggaattgaactatactgtcctatctgtaggtattacactgcaaaaatccccttttagttttaacagttgacataaatgacaccaa

SEQ ID NO: 253126 - DNA, 515 bp, Glycine max
  unsure (1)..(515): unsure at all n locations
nagagttatctgaaattgtatgtagaaagtaattgtaacactctacaagagctatgactgtcgcatgcacgcgtacgtaagctcggaattcggctcgagcaaggagagtacgagcctccagaaagaccagatcctgatacagattatatcagagctcaggaggcccggcgcttcatgatttatgttcatgccaagatgatgatagttgatgatgaatacataatcgttggatctgccaacataaaccagagatcaatggatggtgccagagattctgagattgccatgggtgcttatcaaccatttcatttggctgccaggcagcctgccaggggacagatccatggtttccgcatgtcgttgtggtatgagcaccttggcttgcttcatgactctttcctccaccctgaaaatgaagaatgtattaagaaagtgaaccaaattgcttgacagtattgggatatctattcaagtgagtcacttgagcattgaccttcctgtcacctgctccgata

SEQ ID NO: 253127 - DNA, 514 bp, Glycine max
gtagagggtttgatatgtgaatgggggtataaggtatcactctagaagagctatgacgtcgcatgcacgcgtacgtaagctcggaattcggctcgagttcacagtggtggaccccactaaacgtgctggtacagagttgaaatacgggccatatgaaaatcatcccccgtattcatattctcctgtacttattcattttgaaaataacaatgcatttgctgttgttgaggagctagaacgtgaaattgaaatatctcactggggaagcattcaagtcactgagcaatatagcttggtccatgctggtgctcgacataaaggtgttttttcaagggttgaatatcaaactaaaccaggtggtactggtgtttcttcatttaaacatcttttagcgaaactaccccctagggttcactcagtatactaacaggatggaataagaaatatttcctcttcacatctacgtacagattctgggaagtcaaaactttgactttgaccttggtattccttt

SEQ ID NO: 253128 - DNA, 518 bp, Glycine max
  unsure (1)..(518): unsure at all n locations
gagggagcctttgttatagatgcggggtagtaatagcacactctagaagagctatgacgtcgcatgcacgcgtacgtaagctcggaattcggctcgagctcacacgtccctattttggcacccttgccaattgggttcgctgtgttcttggtgcacttggccacaatcccaatcactggaactggtatcaaccctgcacgaagtctcggtgctgccatcatcttcaacaaagaccttggctgggatgatcactggatcttctgggttggacctttcgttggtgcagctcttgcggctctttaccaccaagttgtaatcagagccattcccttcaaatccagttaattaattggattacaacgattcgtggtcaatcaaagttgggtaaataaaaagacccaaaccaagcaagtttctggttntattttatgatatatcgtcatctgttttcttttctccttattnntctctctttntttattattaaaccttctattttgtatgtaaattatgtaatg

SEQ ID NO: 253129 - DNA, 549 bp, Glycine max
  unsure (1)..(549): unsure at all n locations
nggaagagggttttngnttatggagggtttaagagaagactctagaagagctatgacgtcgcatgcacgcgtacgtaagctcggaattcggctcgagacaaacctctctaatttttgaagcttattattcccaatctcgatatgcaaatctttggggaaaccctaactgggcagacgatcaccttggaggtggaatcctctgacaccatcgacaacgtgaaagccaaaatccaagacaaggagggcattcctccggatcaacagcgtttaatcttcgccggaaaacagctcgaagacggcagaaccctcgccgactacaacatccaaaaagagtccacgcttcaacttggtcctccgccttcgcggcgggattgcaaatcttcgtcaaaacccttactggcaaaacaatcacgcctgaaggtggagtccttccgacacattccaataacgtgaaaggccaagattcagaataagggaaggaattcttccggttaagcaccgtttgatcttcgccggaaaacaacttgaagacggaggaaccctggccgt

SEQ ID NO: 253130 - DNA, 546 bp, Glycine max
  unsure (1)..(546): unsure at all n locations
gggagggcttaagtgntatactgaaagcggaggaaaagagaacactctagaagagctatgacgtcgcatgcacgcgtacgtaagctcggaattcggctcgagaaaaaaagcatccaaaaatggttctcacatccactgccactcacccagatgaaaaagaccagagcctaaactctacttttgcttccagatatgtgcgtgatcctattccaaaattcaagatgccagagaaatcaataccaaaggatgcagcttttcagataataaacgatgagttgatgttggatggtgcaccaaggctcaacttggcttcgtttgtgaccacttggatggagcctgagtgtgacaagctcataatggcttcacttaacaaaaactatgttgatatggatgagtatcctgtcaccactgagctncagaaccgttgtgttaatataatagcaaatctattccatgctnctataagtggagaggaagactgcagtaggtgtgggaactgtggggtcatcaaaggcaataatgttggcaggtcttgcttttaaaagg

SEQ ID NO: 253131 - DNA, 544 bp, Glycine max
  unsure (1)..(544): unsure at all n locations
nggtttatgttattgngaagggggagttaaagagacagttgtcagaactagctatgacgtatcatgcacgcattacctcagctcggaattcggctcgaggaatcattaaagataagattatattgctaagaagaaaaaatatgaaggttggctacttgcttggtgccctcttggctttgacatcaactggtggctctgcctatgaccctagtcctctgcaagatttttgtgtggcagccaaagaaaaagatggtgtatttgtgaacgggaaattctgcaaggaccccaagcttgtcaaagcagaagatttcttcagacatgttgaacctgggaaaactgaccacccactaagttcaaacgtgactcangtgtttgttgatcaactaccgggactaaacacgctcggcataggtttggctcgcatagattttgcttcaaaaggtttgaacgctccccacactcaccctcgcggcactgagatccttatagtccttggaggtactctttatggtggaattgggactttccaatcaaaatggaaatc

SEQ ID NO: 253132 - DNA, 547 bp, Glycine max
  unsure (1)..(547): unsure at all n locations
agggaggggctcagtgnnctaagtataaggaagtatattgtatcactctagaagagctatgacgtcgcatgcacgcgtacgtaagctcggaattcggctcgagatagggttcacccttcggccaaaaccaccgccaacgccgggcccaagccgacattccccgctacgaaatcccagctttccggcgccaaccgccccacctaccgcccccaaccgcagcaccaccgccgccgccgtagtcgcggatgtgcctccaccctctgctgctggctcctcctgatcctcctcttcctcctcctcctcgtcggtgccgccggcaccgtcctctactttctctaccgtccccaacgacccacattctccgtcacctccctaaaactctcttccttcaacctcaccactccctccaccatcagcgccaagtttgacctcactctctcaacaactaaccctaacgacaaaatcatcttctcctacgaccctacctccgtatcccttctctacggcgacaccgccgtcgccagcaccaccatcccctccttcctcc

SEQ ID NO: 253133 - DNA, 513 bp, Glycine max
gggagaagctattctatgaagaaagaaattatagtatcgctcagctatgacgtcgcatgcacgcgtacgtaagctcggaattcggctcgagctcaacttttcttcattttctctcttcctctcaccgagtgacgcactcgcctcgactcgtacggactccgatcccccccgagtcacactcagccagcaccaccgcccgatccgacgatgtctcgcgcctcttccgccgcctccggcgagatcatgctgttcggggtcagagtcgtcgtcgattcgatgaggaagagcgtcagcatgaacaacctctcacagtacgaacatcctttagacgccaccaccaccaacaacaacaaagacgccgtcgccgccggctacgcctccgtcgacgacgccgctcctcagaactccgggcgccaccgcgagcgcgagcgaaagcgaggagttccgtggacggaagaagaacacaagttgtttttggttggattgcagaaagtagggaaaggtgattggaga

SEQ ID NO: 253134 - DNA, 547 bp, Glycine max
  unsure (1)..(547): unsure at all n locations
ngggaggggtaaatgtcgttaagtgaatagggggagtgaatgagagacattatagaagagctatgacgtcgcatgcacgcgtacgtaagctcggaattcggctcgagaaaagactcagttgtgtatcgttgcagctctactagctagggtttcgcaagtgcgatcgaagaagaacgatggcgatggctgctgctctgcgtcgcgaaggaaggcgtttgacccaaccaatcaacgccctccgttcctctctcatctctcaagaccaatcccctcatggcgcgcgcttcatttccactcaagtggtgagaaaccgaatgaagagtgtgaggaatatccagaagatcaccaaggccatgaagatggttgccgcatccaagctgagagccgttcagaccagagctgaaaattcccgcggcctctggcagccgttcaccgctcttctcggcgacaattccagtgctgatgtaagaaaaaccgtggttgtaccatctttncgaccaaaggcctttgtgtggaatcatttcacgtctgtcaagattaaccgggt

SEQ ID NO: 253135 - DNA, 550 bp, Glycine max
  unsure (1)..(550): unsure at all n locations
nggtaagtccataatgtgncatatgtatatgagggggtaaaagatatacactatagaagagctatgacgtcgcatgcacgcgtacgtaagctcggaattcggctcgagagatgacccaaattatgtttgagactttcaatgtgcctgccatgtatgttgcaattcaggctgtcttgtctctgtatgccagtggaagaactacaggtattgtgcttgattctggtgatggtgtgagccacacagttcccatatatgaagggtatgctcttcctcatgcaattcttcggttggaccttgctggccgtgatttaacggagtacttggtgaaaatccttactgagagaggatactccttcagcacctctgctgaaaaggaaattgtccgtgatgtgaaagagaaaatggcatatgtggcccttgattttgaacaagaaatggagacttcctaaaatagtcttccagtggaaaaaagctttgaattgcctgacggacaagtcaataccattgggtcttgaaaaatccggttgccaaaaagacttgttcagccttc

SEQ ID NO: 253136 - DNA, 521 bp, Glycine max
  unsure (1)..(521): unsure at all n locations
ngagttaggtatagtgctgttatatggggagggggcgagttattagtatcgctgagctatgacgtcgcatgcacgcgtacgtaagctcggaattcggctcgagacttccaattgctctcactagtcactactactactggggatggcttcaactgcctcttgcacttctatttccccttctagtgatggttgcctttgctggtgacttaaacaaagactttgacatcacttggggagatggccgcgccaagatactaaacaatggagagttactcactctttcattggacaaagcatctggttcaagttttcaatcaaagaatgagtatctctttgggaagattgacatgcagctcaagctcgtccctggaaactctgctggtaccgtcactgcctattatttatcttcaaaaggatctacttgggatgagatagactatgagtttcttggaaacttgagtggtgatccatacatncttcacacaaacgttttcagcccaggcanangggacagggaacaa

SEQ ID NO: 253137 - DNA, 523 bp, Glycine max
  unsure (1)..(523): unsure at all n locations
nggtttggagcttgncgtcactgaacagacgagatcattggcaacactcatagaagagctatgacgtcgcatgcacgcgtacgtaagctcggaattcggctcgagctcagatccaggcccaaatccagatccagaatcacagcagcacgctgagcttcctagggccgaagcccatccctatgaagcacgtgggcatgcctccgaagcccacgaagctatacagaggggttcgacagaggcactgggggaagtgggtggctgagattagactcccgaagaaccggaccaggctatggctgggaaccttcgacaccgccgaggaagccgctctggcgtacgacaaggccgcgtacaagctccgaggtgacttcgccaggctcaacttccccaaccttcgacaccagggttcctccgtcggtggtgacttcggggagtataagcctcttcattccgccgttgacgccaagcttcaggccatttgcgagggcctggctgagctgcagaacaggggaagaccgagaag

SEQ ID NO: 253138 - DNA, 541 bp, Glycine max
  unsure (1)..(541): unsure at all n locations
agggaagtgaagctcncctaagggagagggaggagtagatgtaagactagctatgacgtcgcatgcacgcgtacgtaagctcggaattcggctcgaggcaatcgacttctgcttcaaggaacgagagctagttattgtgtatcaacaaggacaatgtcaagcgaagaggctggtggtgcagctgaaacagctgctgacatcccaggcgagcctatggatatcatgactgccttgcaaattgtgctcacaaaatctctggcttatggtggtcttgcacgaggcctatactatagggcaaaagtggattgagaagcatgctgcacaactctgtgtactagcagaagactgtgaccagcctgactatgttaaactgtgtaacgccctttgtgcatagcacaatgttagcctgctgacagtttcgagtgcaaagaccctcggagaatgggctggtttgtgcaagaatgatctcgaacgataagctaggaaagttactggtagctcctgtgtggttgcgaaagatatggtgaggagcatgaaaccc

SEQ ID NO: 253139 - DNA, 553 bp, Glycine max
  unsure (1)..(553): unsure at all n locations
ggggaagancctcatgtggcattatgtgtaagggggggttaatgagagacactatagaagagctatgacgtcgcatgcacgcgtacgtaagctcggaattcggctcgagctcgagccgagaagagccatggtgcacgtttccttctaccgaaactatgggaaaaccttcaagaagcctcgtcgtccgtacgagaaggagcgtttggacgccgagttgaagctggtcggtgagtacggacttcgctgcaagagggagttgtggagggttcagtacgctctcagccgcatccgtaacaacgccagaaatcttttgaccctcgacgagaagaacccgcgccgtatcttcgagggagaagcccttctccgaagaatgttccggtacggacttctcgatgagactcagaacaagctttgattacgtgttggctctcaccgtcgagaacttttctcgaacgccgncttccaaccttcgttttcaagtctggcatggccaagtccatccaccaagccagagtcctcattaggccaagcgccattagggttggagacacgg

SEQ ID NO: 253140 - DNA, 544 bp, Glycine max
  unsure (1)..(544): unsure at all n locations
agaagtgctagtcnttttgtagagggggtaaatagtatcactctagaagagctatgacgtcgcatgcacgcgtacgtaagctcggaattcggctcgagcaagaagtacgacaaattaagacagggcctaagagaaggtgttgtagagaggatacagcgagagcaaaatgtattctcattgggttcgattgatgcttctcattgcttgcattcttccagctttggttgaatgcagagtgaggcactacaaatttcatgtggtgtctaaacaaactaatagattgtgttcaagcaaatctattgtcaccattaatggcaagttcccgggacccactctttacgccagggaagacgatacagtgttggtcaaagtcatcaaccaagtcaatcacaaccgttaccatccattggcatggtgtgaggcaattgagaactggttgggctgatggacctgcatatgtcacacagtgcccaattcaaccagggcaaacctatgtatacaatttcacacttaacagggcaaagaggaacacttttggattatt

SEQ ID NO: 253141 - DNA, 516 bp, Glycine max
agtttggttgagggtctgattatagaggggggatgtattgtcatactgagctatgacgtcgcatgcacgcgtacgtaagctcggaattcggctcgggatttctctttttctttttatttgggtgtccaaaatggcttgtagtgcttcttaaaacaattgggtctatgggcctaatctaattagggtaagtggtaagactatgggtgctacctttgctggtagcttttaccgagactttgatctaacatggggtggtgactcgtgctaagatattcaatggtggccagcttttatcactttccctagacaaagtctctggctcttgcttcaaatcaaagtaagaatacctatttgggaggattgatatgcagctcaagctcgttgccagcaactctgctggcactgtcactgcttactacttgtcatcctaagggccaacacatgatgagattgatttcgagtctttgggaaacctaagtggtgacccttatattctccacacaaacatcttgatcc

SEQ ID NO: 253142 - DNA, 518 bp, Glycine max
gtttagttttctgtatagaggggagaagttatcactatagacagagctatgacgtcgcatgcacgcgtacgtaagctcggaattcggctcgagtttttactctctctctgtctctctctacgctttcttgttcgagatccctcaagggatccactaactgaaggagaaatggggttgacattcaccaagcttttcaaccggcttttcggcaagaaggaaatgcgaattctgatggtgggtctcgatgcaacttgtaagaacaccattctgtacaagctcaaaccttgaaagatcggtaccacaattcccaacattgggttccatggggaaactgggggattcaagaaccatagtttcacttgtctggaatgttggtgggccagaacaagattcgtcccttgtggaagcactacttacaagacacacagggtctcattttttgtggttgacagcaacgacagggacagagttgttgaggccagagatgagtagcacaggatgttgaatgaggatgaacc

SEQ ID NO: 253143 - DNA, 521 bp, Glycine max
gagttaaggaaatggtttcgtctcgaataggggatataaagctatcactatagaagagctatgacgtcgcatgcacgcgtacgtaagctcggaattcggctcgaggagaaagggagaaagggtgtgagaatggagagcaaagaggaagatgtaagggttggagcaactaagttctcagaaaggcaaccaattggtacagcagctcagggtgacaaggactacaaagaaccacccccagcacctttgtttgagcctggtgagctaaagtcatggtccttctacagagctggaattgctgagtttgtggccactttcttgttcctctacattaccatcttaactgtcatgggtgtcaacaggtcaccctccaagtgtgcctctgttggcattcaaggcattgcttgggcctttggtggcatgatctttgcccttgtctactgcactgctggaatttcagggggacacatcaacccagctgtgacctttggtctctttttggcaaggaagctgtccctcacaag

SEQ ID NO: 253144 - DNA, 522 bp, Glycine max
gaggaagagtctttagtttctgatcagatgatttattggcaacactcatagaagagctatgacgtcgcatgcacgcgtacgtaagctcggaattcggctcgaggttgaggatagcacaaagaaaagtaaacactgccacagcaagagtgttcaaatgggagagggaaaaggaagaatttgtgtcactggaggcacaggattccttggttcatggataatcaagagcctccttgaacatggatatgctgttaataccactataagatctgacccaggacgcaagagagatgttagcttcctcacaaacctacctggtgcatcagaaaagcttaaaattttcaacgctgatctcagcgacccagagagttttggtccagcagttgagggttgtgttggaattttccacactggcaccccaattgattttgcggtgaacgaaccagaggaagtggtgaccaaaagagccattgatggagcactaggcatattgaaagcaggcctataagcaaagactgtgaagag

SEQ ID NO: 253145 - DNA, 518 bp, Glycine max
  unsure (1)..(518): unsure at all n locations
ggttaaagcttanagttattgaagaggggtataatagcatcactctagaagagctatgacgtcgcatgcacgcgtacgtaagctcggaattcggctcgagctcaaacattgtttgttgtaggaagaggaatcttgagaaatggcaggggacagcaagagcaagattctgttcatcggagggactggttacatcggaaaattcatcgtggaagccagcgccaaagctggccacccaactttccttttggtgagggagtccactctctccaaccccgcaaaatcacccctcatcgacaatttcaaaggcctcggtgtcaatcttgttttaggagatctatacgatcaccaaagtttggtgagtgctataaagcaggtcgatgtggtaatttctactgtaggacacctgcagctagctgatcaagataagatcatttctgcaattangaagcannggaatgtaagaagttctattcatctgagtttggcaatgatgtggaccggactcatgcagttgaacc

SEQ ID NO: 253146 - DNA, 514 bp, Glycine max
  unsure (1)..(514): unsure at all n locations
agaagataacactatagaagagctatgacgtcgcatgcacgcgtacgtaagctcggaattcggctcgagctccacccaaaccctaactcccgaccctgttcccctctcgtatccgtcatgaaaggaggaaagtccaagaccgaatctaagagagccgatcccaaacttgctgtgaataagaagggagccgccaccaaggctaggaaacccgccggcaaggggaaggcagcgaaagaccctaacaagccaaagaggcctccaagtgctttcttcgttttcatggaggagttcaggaaggtattcaacaaagaacatcctgaaaacaaagcagtgtctgctgtgggcaaagctgctggagcaaaatggaagaccatgtctgatgctgaaaaagcaccttatgtggcaaagtctgagaaaaggaaagtggagtacgagaagaacatgagagcctataacaagaaacaggcgggaagtcctactgntggggatgaagaagaatctgagaagtctgttt

SEQ ID NO: 253147 - DNA, 547 bp, Glycine max
  unsure (1)..(547): unsure at all n locations
ngaggaaggggaatagattgttatgagaggtgggggatataatacgaacactatagaagagctatgacgtcgcatgcacgcgtacgtaagctcggaattcggctcgaggctacatggtttagcagcaaaaggagcgaccccaacctgctcactggtgctcttgttggtggacctgatgcatatgatgactttgctgatgaaagagataactatgagcagacagagccagcaacatataacaatgctcctcttattggtattctggcaagactaggtggaggtcatggtggctataaccagcttcttccagttgttgttccagctcctaagcctgctgttaccaagcctcaaccaacccccagtcccaagacaactccttctccagcttcatggtcaggcccaatttccattgaacanganaggaccacctcatgggttgccaatggaaaaacttattacagatactcaacagtcgtgactaacaaatctaacaagagtctcaattctctcaatctttcaatatccaagctttatggnccaaatctgg

SEQ ID NO: 253148 - DNA, 544 bp, Glycine max
agtaagggttaggattggtagagggggggaagataaatgtatagaccagctatgacgtcgcatgcacgcgtacgtaagctcggaattcggctcgaggagaaattttgtatgcgttggatttcgtagatctgattcatggtcagcacatagattgtggtggcagcacaatggatcctggcagtggaggaaacagtcttggcaacaactctaatctcgcttcaaaacaacgtttacggtggacacatgaattacatgagcgctttgttgatgctgtggctcaacttggtgggccagatcgtgccacacccaaaggtgtcctcaaagttatgggtgtacaaagcttgaccatttaccatgtcaaaagccatttacagaaataccgacttgcaaaatatttacctgactcctcatctgatgaaaggaaaaaggcttgacagaaagaaacaggggatatgctttccaaacttgatgggtcatctgggattccgattactgtaaccccttaacctttaaatgggaggttcaaaccgctttcctgaaccaa

SEQ ID NO: 253149 - DNA, 522 bp, Glycine max
  unsure (1)..(522): unsure at all n locations
ggtgagtantaggttctgattatagacacagtattgtcatcgctatagacgagctatgacgtcgcatgcacgcgtacgtaagctcggaattcggctcgagctcgagccgcaataacatagcatagagtgagaagtgagaagagaaaaatggcaatctccatacccagtagacaacttttcatagatggagagtggaaagtccctcttctcaacaatcggtttccgatcatcaaccccgctactgaagacatcatagggcatattccagccgctactaaggaagatgttgaccttgcggtggatgctgctaaaagagccttttcccataacaaaggcaaagattggtcttcagctcctggctctgttcgtgctcgctatcttcgagccatcgcttcaaagataacagagaaaaaggatgaactaggaaagcttgaagcaattgattgtggaaaaccactagatgaagcactggcagacctggatgatggtattgggtgttntaactactatgccgagcttgca

SEQ ID NO: 253150 - DNA, 512 bp, Glycine max
ggtttgattgtgtatgtatgacagaatagtatgctatagctagagctatgacgtcgcatgcacgcgtacgtaagctcggaattcggctcgaggttctattctaacttcatatcttctcctctttatctattggcgacggcatggcttatgctttcgaagtgtctacctttgtcatcaatgagaatggttccctaactggcacatcatatctacaactattggaggccctaatcgggaacccaaaccgactattagctacatggcataacgggttgtaggaactggatcattttgcatcgcgttgcaagctaaatgcttggaaactggagaggcagtgtcaattgacaaggttttacaaggcagaagatactagaatcgtgaactgcaattaatgcgtgtgatggatcattcaaatgtgatctctttgaaaccttgattcttttcgactaccagtaccgatgaactgtttctaatttggtgatggaggatgttacagaatccaagtaatgagc

SEQ ID NO: 253151 - DNA, 522 bp, Glycine max
  unsure (1)..(522): unsure at all n locations
gagttaggaggaggtgncttatggcactgatcactacagcatcactcatagaagagctatgacgtcgcatgcacgcgtacgtaagctcggaattcggctcgagcgaacgaaagacctcgacaattcttctgatccgtttcgtgcagatcaaaacttgcctgtttgcaacgctgcttctgacaaaaaaacgttgtaccatccgaaatgtcggacacagtggaacatacagatcaaagagctgaagctattccccaatccacagctacaccaaattggactattcatgtgtcagacataagaacagttaaggttagcaacatatcattggttacttccaagaaggacattgaagaattcttttcattctcaggtgatattcgatatatcgagatgcaaaggtcagagtcagagcacctggatagtggtcacactcaggttgcttatgttacatgtaaggatacacanggagcagacacagcagttctcttaacgggttccaagataggtgatctatatgtcacc

SEQ ID NO: 253152 - DNA, 516 bp, Glycine max
  unsure (1)..(516): unsure at all n locations
ggttaggtcttnnctaatcgaatagtatcgtacagcaacaccatagaagagctatgacgtcgcatgcacgcgtacgtaagctcggaattcggctcgagtgctgtttgctttttccattccatcctccaaggcgaagcagtgatggccaagaccacgctagattcgggatggcttgcagctaggtccaccgaggttcatttcacaggcactcaactcaccaccacgcaccctccctctgcctccacccaaccatggatggaagctattgtccctggaactgttcttgctaccttggtgaagaacaaagcggtgcctgatcctttttatggactaggaaatgaggcaatcttggacattgctgactctggaagagaatattacaccttctggttctttacaacctttcagtgtaagctgtcaggcaatcagcactgtgatctgaatttccgaggaatcaattactctgccgatgtctattaaaatgggcacgagatggtcctcccaaaggaatgtttc

SEQ ID NO: 253153 - DNA, 523 bp, Glycine max
  unsure (1)..(523): unsure at all n locations
gagtaaggggnagggctgtgttatcgattacgacgtatatgtgacactctagaagagctatgacgtcgcatgcacgcgtacgtaagctcggaattcggctcgagcttgttcctgatacgcactagtctctctctttcttctcggtccagtgtctctttcaaagtgctgctgctgccagcattgacctgagctagagcagtaaccgtcatcaccactgccagtacggtaccatggctgtgcttcaatctttcgtttcggtccacccagattctcactttcccatacagaaccttccctacggagtgttcaagccccaatccgcttctgctcctcgtaccggcgtcgccatcggagacttcgtcctcgacctctccgaaatctctttcgctggtctcttcgacggccctctactaaaaaactccgattgcttactccagcctaatctaaataagtttgtatcactgggaaggccagcttggagggaagctcgtgccactcttcanaagctttnatcagcaactga

SEQ ID NO: 253154 - DNA, 519 bp, Glycine max
gggttaggggtttataattgataggaggtatattagtatcactctagaagagctatgacgtcgcatgcacgcgtacgtaagctcggaattcggctcgaggcgccacttcagagaacacaacctgcactatcacaaactcctatggcgccttccctgatcgaagcatttgcaaagctgctcaagtgttgtaccccaccaccgagcaagagcttgtgtcagtggttgcatcagcaaccagaaacaaaaccaagatgaaagtagctacccgtttttcccacagcatccccaagctggtgtgcccagaaggcgaaaatgggttgttaataagcaccaaatatctcaacaaaatattgaaagttgatgtggaaacaagaacaatgactgtggaaagtggtgtgactctgcagcaacttataaatgaggcttgcaagggtaggttggccttgccatatgcaccatattggggggggttggacacatggaggcctatgggaactggtgctcatggaagcacttgcc

SEQ ID NO: 253155 - DNA, 549 bp, Glycine max
  unsure (1)..(549): unsure at all n locations
ngagtaaganncttagctcntcgctcgtagcaaagatctaatatgnatcactatagaagagtctatgacgtcgcatgcacgcgtacgtaagctcggaattcggctcgagagaataagcttagatcggaaaaattcacctctcggatcccgatcccatcgttgcaaatgatccgattcattctgttgcagaacaggcagggcaagacccgtcttgccaaatactacgttcctctcgaggactccgagaagcacaaggtcgaatacgaggttcatcggctcgtcgtaaacagagaccctaaatacacaaatttcgtcgagtttcgtacgcacaagataatatacaggcgatatgctgggttatttttctcactctgtgttgatatcactgataatgagttggcgtatttagagtgcatccatttgtttgtggaaatattggatcacttcttcagcaatgtctgtgagctcgatttggtttttaacttccacaaggtctatcttatacttgatgaattcattctagcgggtgaactgcangaaacaagcatg

SEQ ID NO: 253156 - DNA, 543 bp, Glycine max
  unsure (1)..(543): unsure at all n locations
agttagtnttaggttgttagggagagggggataaattttagactagctatgacgtcgcatgcacgcgtacgtaagctcggaattcggctcgagagcaagcaataccctagcggcgcctgctttctttgttcgtgttttgcatcaggatggagtctcaggtgaagcacgcacttgttgtcaaagttatgggtcgtactggatccagaggacaagtgacccaggttagagtgaagtttttggatgatcagaaccgtcacatcatgaggaatgtgaaaggacctgtgagagaaggagacattctcaccctactcgagtctgaaagggaagcaagaagattgcgctagatggtctcttttttttggcttgcctccaaattcgaacaaaagcaatatttttcttgatatttatggtagttagtcggtgctaaaagggttatagcaccctatcttaattgtttggatctattttcattcgaattattgcttgaaatttngtatgttaaacttcgagattgagggattcctttgttaatataatgattgg

SEQ ID NO: 253157 - DNA, 526 bp, Glycine max
  unsure (1)..(526): unsure at all n locations
ggttagggggtttgtaactgataaggtgaggtattagtagacactatagaagagctatgacgtcgcatgcacgcgtacgtaagctcggaattcggctcgagcttcccctataggctcgtcactcgttgctcttagcccacctgctattcgacgacgtggccaccggcaggatggcggaggccgcgtacgacgccagactacgagctgatccgtcaggtggtgccagaagagggcgaagccgaagaggatgacagcctgctgaacgccgagcaccagtctgcgagctataaggccaagttagccaagacctaagccaacaaggaggagcacgaccagagctagggcgacactaagtccaacagtggcagagccaggcagcacgccaagctcgaccattcagccggacacgacgtaaccgaactattcgaacgaacgccggccgagttaagacgtcagacacttggactgaagccgatgcgtttagcggcgcacgctcagaatgcgcagaactcncgctacaaaggac

SEQ ID NO: 253158 - DNA, 525 bp, Glycine max
ggttagggtaaggtttagttatagaatgtggggagaaatagttaatattatagaagagctatgacgtcgcatgcacgcgtacgtaagctcggaattcggctcgagaatgaagcaagcaagcctacaatagtacaccaaaacatttcagtagaaaaagttattctagaccatgaatttaaccccttgatcacagatgccggcctccctaagcttcttgcagatgatgttgtcttctcagctcttaaagcaagtgctgccatgggatatctagctcccgaataccttaccactggacgctttactgagaagagtgacatatatgcatttggggttattgttcttcaagttctatccggaaaggtattgatggggggtacaatccgggtggcagttgaagctttcagatttgaagattttgttgacacaaatctgaagggagattattctaaatctgaagccgcaattctttcaaagcttgcaattcagtgcactcttgaagtgccagagcaaagaccaaccatggtg

SEQ ID NO: 253159 - DNA, 517 bp, Glycine max
gtaaggctttagtaggggacggggacgtattgcaatactctgagagacctgctagcatgcatgcacgcctactttagcatgatcctttggctggagctcaattccacattttcaagaaataaggaggcaaaaatgttcatatatgaattggaattatttgttttcttattaggcctatcctgaagccaaaggaaatgagatcggaattcctcggggaattccaattccacattttcaagaaataaggaggcaaaaatgttcatatatgaattggaattatttgttttcttattaggcctatcctgaagccaaaggaaatgagatcggaattcctcggggaattccaattccacattttcaagaaataaggaggcaaaaatgttcatatatgaattggaattatttgttgtcttattaggcctatcctgaagccaaaggaaatgagatcggaattcctagggagtaccgagctcgaattccctatagtgagtcctatcacaatcgtaatcatgtgtta

SEQ ID NO: 253160 - DNA, 543 bp, Glycine max
  unsure (1)..(543): unsure at all n locations
ngagggaganctaagtcgtttatgaatagaagtatatagcatcactctagaagagtctatgacgtcgcatgcacgcgtacgtaagctcggaattcggctcgagcactctcccaccccacttacatacacactctcccactcctgcgagccggtcgagttgaatcggtgagtcagtgaccgagttgaaccatgtcggacgaagagcaccatttcgaatccaaggccgatgccggagcctccaagacctatcctcagcaggccggaaccatccgcaaaaacggctacatcgtcatcaagggtcgtccctgcaaggttgttgaagtttctacttccaagactggtaagcacggccatgctaagtgtcactttgttgggattgatattttcactgccaagaagcttgaagatattgtgccctcttcccacaactgtgatgttccccatgtgaatcgtactgattaccagttgattgacattgctgaggatggatttcttagcttgcttactgaaaatgggaacaccaaggatgacctgaagttacct

SEQ ID NO: 253161 - DNA, 515 bp, Glycine max
  unsure (1)..(515): unsure at all n locations
gagaaaagtctttgttcatgataatcgtttnatagtatcctcagctatgacgtcgcatgcacgcgtacgtaagctcggaattcggctcgagctcgagccgttgagattgtgaggaacaagaaagttaagttttggaagaaagtgtatgttatatacagctttttctttggtcgcaaaatcatcggccacatggtcaccttcttcttctactgtgttgggattccccttacaatcctggtccctgagggtcatgttccaatctggggagcctgttatattccttctgtcatcaccattctcaattcaattgggacaccaaggtccattcaccttctgttctattggatccctcttgagaatgtgatgtctttgcaccgtaccaaggcaacatttataggtctcttagagtatgggagggctaatgaatgggttgtgactgaaaaacttggtgactctgtcaacaataataataagaataaatcaggagatgctgtcaaagaagataatgccatcan

SEQ ID NO: 253162 - DNA, 506 bp, Glycine max
  unsure (1)..(506): unsure at all n locations
gagtttatggagcttttgtccaccaagaaatacagctccgctatagctcgagctatgacgtcgcatgcacgcgtacgtaagctcggaattcggctcgagcaggcacacaagattcttgtactgggaaggaaagcttatccttgcatttgctgatcaattttgggttaagtatctggttggctgggtgattccacccaaggtttctctccttaaggcaactcaaggtgatgctataagaaactattaccaatgaatgcatgtcattcaggacatgcttggtcctttgtacaaggtgggataggctttaaaatgggttcaccgtgagatggaagtataccccatttggcttttgccacacaaaatggtcaagcttgctggaaaactatgatttaccagaagcagggtccgactacatcgcagcaagagacacccaactgttcaatgtcacagatgtggagttactatgcaccagtcctgttttagggtgaggtattgatgggccgaan

SEQ ID NO: 253163 - DNA, 520 bp, Glycine max
gggtggggtatctgattatgaggacggaatgtttatgctatcactctagaagagctatgacgtcgcatgcacgcgtacgtaagctcggaattcggctcgagggcagcactaatttatatagcaagctagctaggttgaaaatagtttggttttgtagtaagtgaggtgaggtgccaaaatggtgaagataactcttggtactttcgatgactcttttggtgttgcctgtcttaaggcttatttggcagagttccatgcaactctgattttcgtgttcgctggtgttggttcagccatcgcttacaacgagcttacaaaagatgcagccttggatccaacggggctggtggcagtagctgtggcccatgcatttgcactgtttgtaggtgtctccgtcgcagccaacatctcgggtggccatttgaacccagctgttacttttggattggccattggaggcaacatcaccctcattactggtttcttatactggattgcccaattgttggttccattgggc

SEQ ID NO: 253164 - DNA, 517 bp, Glycine max
  unsure (1)..(517): unsure at all n locations
agtttaggaagctgntttaagaaggggggtatatagcattctcggagagacagactagcatgcctgcacgtcgactctagaggatcctctcggggaattccaattccacattttcaagaaataaggaggcaaaaatgtgcatatatgaattggaattatttgttttcttattaggcctatcctgaagccaaaggaaatgagatcggaattcctcggggaattccaattccacattttcaagaaataaggaggcaaaaatgttcatatatgaattggaattatttgttttcttattaggcctatcctgaagccaaaggaaatgagatcggaattcctcggggaattccaattccacattttcaagaaataaggaggcaaaaatgttcatatatgaattggaattatttgttttcttattaggcctatccttgagccaaaggaaatgagatcggaattcctcgggggtaccgagctcgaattccctatagtgagtcgtattaaattcgtaatcatgtca

SEQ ID NO: 253165 - DNA, 605 bp, Glycine max
  unsure (1)..(605): unsure at all n locations
gggatgagtatgtttgaagccctacgncgtatncgcatcagctannancatatnaagnattctatgaacgattcgcatggcacgtccgtactgttaaagctgcgtgaatcttcggcgtcagatgcctctatcagcactataatngnnataagagtagtagtagcgagatgtgactattagagatgtcgacaagtaatagtgcatctaacgcacgtacattcgtgtgtgtgcgctagtagaatgcgcatagtcgatagaacgctcatagctggatacagcttattacggactaccttcgaaggagtaagaaacagcattgtattcatgatgttgcccctcatcatatccataatgtggaagttcatgaaggtgagtgagataaatctggcaatatcaaagtgcttacataccctgatggcgacactgttgagaccttaacggagagagtagattttgatgatgaaaacaagatgattacctacaccatattggagggtgtcatgttgaagtactataagagctacaaggttatcgttcatgttttaccaaaacgtgatcagcacagccttatgaagtggactttcttgtatgagaaggtggcatag

SEQ ID NO: 253166 - DNA, 549 bp, Glycine max
  unsure (1)..(549): unsure at all n locations
nggtagggggntaatgtcntatatgtatacgggggatataatgagaaatcactctagaagagctatgacgtcgcatgcacgcgtacgtaagctcggaattcggctcgagagcgcctataaaagaaagccatttgctcactatttgtgtagatctgcatctcattctcattcgttcactgtcactttacccaatcctaacactttcttctctctgttttccttcttcctcgcatcaatggagttggacggcgttctcctcggcatgtgcaaccctctcctcgacatctctgccgtcgtcgacgacgctttcttgcaaaaatacggtatcaagttgaacgatgcgattctcgccgaggataaacacaaacctatgtatgaagaattggctaacaatcctaatgtggagtacattgctggaggtgctactcagaattcaatcagggttgctcagtggatgcttcaagcaccaggtgccacaagttatataggttgcataggaaaggacaaatttggaaaaggagataaggaggaaatgtccactanatgtgt

SEQ ID NO: 253167 - DNA, 552 bp, Glycine max
  unsure (1)..(552): unsure at all n locations
aggtnagtnnntttatgtgncgtatgtggatgggggggtaaatgagagacactatagaagagctatgacgtcgcatgcacgcgtacgtaagctcggaattcggctcgagcaacaacatgggagagaacaaacctgcagaggtgaaggatttccagatagtggtagctgagaacaaggaagagagcaagaaacagcagcaacagttggcaccaaagaggagttccaacaaggacaggcacaccaaggttgaaggcaggggaaggaggataaggatgcctgctctctgcgcagccagaatcttccagttgaccagggaattgggtcacaaatctgatggggaaaccatccagtggctcctccagcaggctgagccatccatcatagctgccactgggactggcacaataccagcattctgctctgcttgttgttggaaactaattttaacaaaaagctgcttctttttaataatccttcaaccaacttcaccaaagaattgatgaaatggggggggcatcagggagagtagtagtagggccagcttggcaaagg

SEQ ID NO: 253168 - DNA, 514 bp, Glycine max
  unsure (1)..(514): unsure at all n locations
nagtgtttggaggattgtatcgtatgtattgctcaacactagctatgacgtcgcatgcacgcgtacgtaagctcggaattcggctcgagagctgtcaggacaggagctacctttatttgctcgctatgggctggaacattgtttatcagttcaggaagggtcaaaacgaaatcgatagatacctgcgtctggttcctctcattactcttgtggacaattctcgagtcaaggagagacttgaagttatcgaaatggatcaacgtgaatacacattggatgatgaagaccaaaaagcacaaacagttatttttaaaccttgacctgacaaggatgacactgctgtgttgaagaaaacactatcatgttcttaccccaactgttctttcactgaagcacttaaaaaagaaaatgaaaagcttaaactagaactacaacggtcacaagcaaatttggatatgaatcagtgtgaagtcattcaacgtttactagatgtcacagaagttgcagcttattt

SEQ ID NO: 253169 - DNA, 513 bp, Glycine max
  unsure (1)..(513): unsure at all n locations
naggggcttctgtccatgcagcgtattgcatacgctctagacgagctatgacgtcgcatgcacgcgtacgtaagctcggaattcggctcgagctaagttcggcaccagcgaaacgctcttcgttatcttttctcagactccgcggcgtagatccgaggagttcgggaaatcctaactcatcatctcaactcaagtcatggctggacttgcacctgagggatcacagttcgatgctcgtcaatatgattctaaaatgagtgacttactttcatctgatggacaggacttcttcacatcctatgacgaggtttatgatagttttgacgctatgggtttgcaggaaaatcttctcaggggaatttacgcatatgggtttgagaagccatctgccattcagcatagggggatagttcccttctgcaagggacttgatgttattcagcaggctcagtctggaactgggaagacggctactttctgctctggtattctgcagcaacttgactatagctt

SEQ ID NO: 253170 - DNA, 524 bp, Glycine max
  unsure (1)..(524): unsure at all n locations
ggtagaggtgngttttanaatcgcaatttgatgctattgtcatanctcagctataccggctcatgcacgcgtacgtaagctctagattcggctcgagctaaaatggaatttcgatgctcagtcatctcttttaccattctctgctctcttgctcttgcaagagagagccatgtccatgcatcgctacctgaggaagattattgggaagctgtttggccaaacactcccattcccactgcactgcgagagcttctaaagcctctccctgcaagtgttgaaatcgatgaactccctaagcaaattgatgatacacagtacccaaaaacattcttctataaagaagaccttcatccaggcaaaacaatgaaagtacaattcaccaagcgtncctatgcacaaccttatggtgtatatacatggttaacggatattaaagacacctctaaagaaggatatagttttgaagagatatgcatcaagaaagaagcgtttganggaagaaaagaagttttgtgcaaaatcct

SEQ ID NO: 253171 - DNA, 516 bp, Glycine max
  unsure (1)..(516): unsure at all n locations
aagggtctgncttcccggtacgcagtcctacagcatcaccatagaagagctatgacgtcgcatgcacgcgtacgtaagctcggaattcggctcgagagcaattacatatagcacaattgtttaagagtgtattacgaaggaaaaacaatgaaagttgtgtacttccttgttgccatcttggctttgacatcctctcttgtctctgcctatgatcctagtcctctgcaagatttctgtgtggcagccaaagaaaaagatggtgtgtttgtgaacgggaaattttgcaaggaccctaagcttgtcaaagctgaagatttcttcagacatgtagaaccggggaagactgacaacccagtaggttcaaacgtgactcangtgtttgttgatcaactaccgggactaaacacacttggcatagctttggctcgcatagattttgcaccaaaggggttgaacgctccccacactcaccctcgcggcactgagatccttatagtccttgagggtactctntat

SEQ ID NO: 253172 - DNA, 526 bp, Glycine max
  unsure (1)..(526): unsure at all n locations
gaagagtntcgtctgcgctctgcattaagaagccctacagcnannactatagaagagctatgacgtcgcatgcacgcgtacgtaagctcggaattcggctcgaggcacaatcagcttaaaccaacctttcttgtaaactttattgattttgagaattaaagagggtatagacatggctagagcaattgcagtttctttcttggttctgcttctggctttccccactgtatttggagctgaccatgaagttggtgacactggtggatgggccctaggggttaattacaacacctgggcctctgggaaaactttcagaattggtgacaatttggttttcaagtatgactctacccatcaagttgatgaggttgatgagagtggctacaacagctgcagctcaagcaacatcatcaagaactacaaggatggaaacaccaagattgaattgacttcaactggcaaaaggtacttcttgtgccccatttcaggccactgtgctggangcatgaagctgcaaatcaatgtg

SEQ ID NO: 253173 - DNA, 515 bp, Glycine max
  unsure (1)..(515): unsure at all n locations
gagtggggttttnnnntttgaatctttgcatttgcannacactnnanatagcttgcatgcctgcacgtcgactctagaggatcccctcggtgaattccaattccacattttcaagaaataaggaggcaaaaatgttcatatatgaattggaattatttgttttcttattaggcctatcctgaagccaaaggaaatgagatcggaattcctcggggaattccaattccacattttcaagaaataaggaggcaaaaatgttcatatatgaattggaattatttgttttcttattaggcctatcctgaagccaaaggaaatgagatcggaattcctcggggaattccaattccacattttcaagaaataaggaggcaaaaatgttcatatatgaattggaattatttgttttcttattaggcctatcctgaagccaaaggaaatgagatcggaattcctcgggggtaccgagctcgaatccctatagtgagtcgattaaaatcgtaatcattgcatac

SEQ ID NO: 253174 - DNA, 523 bp, Glycine max
ggtagcgtgtctgattaaagtacacttagtgacactctagaagagctatgacgtcgcatgcacgcgtacgtaagctcggaattcggctcgagttcacacttggaaccttaaattcaattaaggttctctctcttgtaaaatgctccaagggaagggagttttataacatgacctagtaacgattcaccacatcatgcgtgccactcctctttaactctctcatcctttttctctttccgtgtcaccctctttcaggttaatttgcaatgactgaaccttccaaggtcattcacgttcgaaatgtggggcacgaaatatctgaaaatgatttacttcagctgtttcagccttttggagtcataacaaagcttgtcatgctgcgtgcaaaaaatcaggctcttatccaaatgcaagatgttccttctgcagttaatgccttacaattttatgcaaatgttcagccaagcataagggggaggaatgtttatgttcaattttcctcacatcaagaatttacaaccat

SEQ ID NO: 253175 - DNA, 520 bp, Glycine max
  unsure (1)..(520): unsure at all n locations
gagttagatgtgttatggagggagggtatatcagtatcactctagaagagctatgacgtcgcatgcacgcgtacgtaagctcggaattcggctcgagcgcctcgaggccctgaggcccattagggaggacgaggtcacctccatggttgactccgtttacaatcactgcaccagcactgaaaatttggggaaaggaatattgttgaggaagcacttgggggttgtggcattcaacaacataaccaggttggcatttgggaaaagatttgtgaactcagaaggtgtgatggatgagcaaggagtagaattcaaggccattgtggaaaatgggttaaagctaggagcatctctagccatggcagaacacatcccttggcttcgctggatgttcccactggaagaaggagcttttgccaagcatggagcccgccgcgaccgactcaccagagccatcatggcagagcacactgaagcacgcaagaaatctggtggtgccaagcaacattttgntgatgccctc

SEQ ID NO: 253176 - DNA, 519 bp, Glycine max
  unsure (1)..(519): unsure at all n locations
gggaggctntctctctgattcgtatctcatcgcaanactctagaagagctatgacgtcgcatgcacgcgtacgtaagctcggaattcggctcgaggaaatgaaggttgtttacttcttcgttgtgctattggctttggcatcctccattgcctttgcttatgatccaagccccctgcaagacttttgtgtggctatcaatgataccaaaactggtgtgttcgtgaatggaaaattttgcaaggatccaaagcttgctaaggctgaagatttcttctttcctggattgggacccggaaacacttcaaaccccctaggctcaaaggtgacagctgtcacggttaatgaaatattagggctcaacacacttggcatttccttggcacgcatagattttgcaccaaagggtttgaaccctccacacactcaccctcgagggacagagattcttgtagtcttggaaggtaccctctatgttggcttttgtgcgtccaatcaaaacgataaccgggtattccccc

SEQ ID NO: 253177 - DNA, 520 bp, Glycine max
  unsure (1)..(520): unsure at all n locations
ngagttatggtgtgttatgaagggagggtataacgagtacactctagaagagctatgacgtcgcatgcacgcgtacgtaagctcggaattcggctcgagcctgccagtagtcatatgcttgtctcaaagattaagccatgcatgtgtaagtatgaactaattcagactgtgaaactgcgaatggctcattaaatcagttatagtttgtttgatggtatctactactcggataaccgtagtaattctagagctaatacgtgcaacaaaccccgacttctggaagggatgcatttattagataaaaggtcaacacaggctctgcctgttgctttgatgattcatgataactcgtcggatcgcacggcctttgtgccggcgacgcatcattcaaatttctgccctatcaactttcgatggtaggatagtggcctaccatggtggtgacgggtgacggagaattagggttcgattccggagagggagcctgagaaacggctaccacatccaaggaaagcagcaa

SEQ ID NO: 253178 - DNA, 559 bp, Glycine max
  unsure (1)..(559): unsure at all n locations
gaggggagagtggggttttnttaatgagagttcatggtaacactcatagaagagtctatgaacgtcgcatggcacgccccgtacgtaaagcctcgggaatattgggcttggagggcaaccaattaagccgggggttgacacatgccctgggtgcctgatattcccaaacttcaaccaaaccaatttggggcccttcgccccttatgtgaaaagggacatgatgtaccaacaagggttgctttgcaggtggcacggttcttcgtttggccaaagatttggctgagaacaacaagggtgcacgtgttgcttgtgtctgctctgagatcactgcagtcacattccgtgggccaagtgacactcaccttgatagtcttgtgggccaagcatttgttggagatggaactgctgcagtcattggtggttctgacccaattccacaagttgagaagcctttgtatgagcttgtttggactgcacaaacaattgctccagacagtgaaagtgctattgatggacaccttcgtgaaagttgactcacatttcacccttctcagggatg

SEQ ID NO: 253179 - DNA, 513 bp, Glycine max
  unsure (1)..(513): unsure at all n locations
agtntaagcgtgtttgcgatcgatcatgttgcactcgctacacttctgagaagctatgagcacgcgtacgtaagctcggaattcggctcgagcagagattgacgccatggcattacaggtcgaatccactggcggggcttactttgttactgcttataaaggatacggtgccccatggtggcgtgaggatgctcgcggagttagtattgcaataacaaggtttactagcacgggtcacattgcccgagctgtgcttgagagcatgtgcttacaagtgaaagatggcttggattcaatgcataaagattcaggagaaagtgaatactagactacagagttatagcttagagtggatggctgggcatctgtacacaacctgctgatgcatattcaggcagatttggtggaatgtccagtaattatacctgctgacatagagacgacagcacttggagcatactatgctgacggattagctactgggatttggaaagaagatatattttcatactg

SEQ ID NO: 253180 - DNA, 516 bp, Glycine max
  unsure (1)..(516): unsure at all n locations
ngaggttaggagtgtatctgatttgagggagggagagtattcgtaaagaccagctatgacgtcgcatgcacgccttcctaagctcggaattcggcttgagctttgggatcggatattggcaatcaactgggtcgggcttaacaccagggagtctggcttccccaagattggtcggttggaggaaccattcttggatggttccaccggggattgtctaatggggttcttcctggatttaatttctgcaaaaccggaaggtgaagttgttcttctttgccgggaaccttgcttgaatgttaatgccttgaaggacatgaattgggaccttagtcaatggtgccccttgattgatgataggtgtttcttgcagtggcttgtcaagatcccatctgaacaggaccagttaagggctcgccaaataagtgcacagcanataaataaggtggaagagttgtggaagacanatcctgatgcttcttttgaggaccttgagaagccctgtgtagatgatgaacc

SEQ ID NO: 253181 - DNA, 518 bp, Glycine max
  unsure (1)..(518): unsure at all n locations
nggtagttttgtattgaggggggggtgaatagtatcactagctatgacgtcgcatgcacgcgtacgtaagctcggaattcggctcgagcctagattcagccacagttggaaaaaaaaaaaaaaaagttgttcgagatggcacgtacgaagcaaactgctcgtaagtccacaggaggaaaggcacctaggaagcagctcgcaaccaaggctgcacgtaagtctgcaccaactactggtggtgtgaagaagccacatcgttatcgtcctggtaccgttgctcttcgtgagattaggaaataccagaagagtaccgagcttttgatcaggaagctccccttccagaggctggttcgtgaaattgctcaggacttcaagactgatctgcgtttccagagccatgctgtgcttgcattgcaagaagctgctgaggcataccttgttggactctttgaggatactaatctgngtgccattcacgctaaacgtgtaactattatgcccaaagatatccagctggg

SEQ ID NO: 253182 - DNA, 514 bp, Glycine max
gagcctctgtcctcatctgaaaaattattctccactctatagagctatgacatcgcgcatgcacgcgtacgtaggcattgcactcgagccaagacatctgcatagattgcacaatacagaatcaacttggttgggatgatacgcattgtgcatcacatggaatattgcatctggtcaattcaactaggattcagggagaaggcgtgaatatatggatgcttgctattatctacgttatagcaagaaattcctggagcatatgtctcgaggcatcgcccattatatcagacttttaggactgacagtagctccaatcttggatggatgatcctgttctacctgctttacctacgattctgtatcttaactgcaagagctactctcatatctttcaaaggaaaatccttgacaggcatgctgctagtcatacatgtggtgggtgaccatgcaatgattcgaatcttctacccctgtagatttggattgttccgcattgaaacaattgacagtggct

SEQ ID NO: 253183 - DNA, 526 bp, Glycine max
  unsure (1)..(526): unsure at all n locations
tggtttagtatcntgggctccacgcctagtgctacagctatancatttatngattatgacgtcgcatgcacgcgtacgtaagctcggaattcggctcgagtgaatggaatacaaaacacaagacagagtcattcagcaaggcttgaaacgagaagcgaggatgcccatcagatgtattctgcattggcaaccgaaccaaggaagcgttgtgaacagccaagtcctgaatgagatctcgcagtgcgtcgaaagccttaacggcgtcaaagaaggaagatgcaaagcctccctcactttctacagacccaatttacgagaccaatcggtgaccatcgattttcctcgcgattttctggggatatcgatgctggagcagccgaacaaatactacttaatcattcgcggccagaagattgttctcgaggccgattcttctatcttgcttatcatggagaaactccaatcctacaagttcaaaagtcgcccttcatttcgagggagtgctgtataaattgggtgactttta

SEQ ID NO: 253184 - DNA, 523 bp, Glycine max
  unsure (1)..(523): unsure at all n locations
ttagcgtgnngtcatggagggggaggaagaatgagtatcactctagaagagctatgacgtcgcatgcacgcgtacgtaagctcggaattcggctcgaggtttgtcagtacaaaggcatcatcgctgccagtgtcgtcgcgttcagaggaaggaggccttcgcagacgtctttcttcgctgtctctgaagatccaagacagcccaacatggtcattttccagatccaagtccctctcatccatgggtgactatgtaaggacatgctgggcctggatcctctccaggaagctcatctttgccacagatctcgaaatgaacgaccagaaaactaagctccttggctcccacaacaggggcacttggagccatgtcttctataagctgcgctctgagatcagacggttcatctctacttctgatcacgccactcttgccaaaacctaccacaggtccacacctcaagtcttctcataattccctccacatttctcaatgcttacttcaaataatttacctctctatc

SEQ ID NO: 253185 - DNA, 514 bp, Glycine max
tgtatgtaggttttgaaattttgcatagatcagtatctctctagaacagctatgacgtcgcatgcacgcgtacgtaagctcggaattcggctcgagagagtgacataattcaagtcgacaacgttgagctgagctgcggttctctcagataacattcgttggatctgatttcatactttctttgtttgtctgtcttttatattctgagaattgagaatagagagcacaaagaaactgccatggacgctctgacgaaacaagccagcaagctcagagagcaagttgccaaacagcatcaggctgtaataaagcagttcagtagtagtggttatgagagttcagatgttgtggtcatcgatgaggtcgaaatgcagagacatcaccagctggaaaagttgcatagggccacacgttcagggaaggacttccagaaggaaattgttaaagcagcagaaacatttacagctataggttataagcatattgaaacaggaacataactttctgaggattg

SEQ ID NO: 253186 - DNA, 599 bp, Glycine max
  unsure (1)..(599): unsure at all n locations
agaaaagaggtcgngttggggagggggggatatgttaacactcagctatgacgtcgcatggcaccgcccgtacgtannagctnncggaatntcgggcttcggagggtccatttggccggtcctttttacacttcttcttcaaattacccttaatttaataccgcttaatntgtaacttcaacttcaacttcaacaacgcggtttcccaattttcttcaaccaaacctttctggcttacctttgcctaacttcccaaactcggcaacctttattggtttcccggcaagtttattcaatggggccaagggtccaagaatccggaattcaaaccggattttgggaagaaattggcccgttgggtagccagagtggctctggacagagacgatgtttgactcgttgccgttaacgaccctttcatcaccaccgattacatgacatacatgtntaaatacgacagtgttcatggacactggaagcatcacgatgtcaccgttaaagacgagaagacccttctcttcggtgacaagccagtcactatttttggacacagaaaccctgaagagatcccatgggggtcaactggagctgacatcatt

SEQ ID NO: 253187 - DNA, 506 bp, Glycine max
  unsure (1)..(506): unsure at all n locations
gggagactgcttgataggggggggagggtatatgtaaanactagctatgacgtcgcattgcacgccttcctaagcttgggattcggcttgaggggatttcccagggtcccccattgggggttcaaagggttacacccggttaagcattggcttaaatggggaaactaaggttggcccaatgttttgacctggtaatggctttctacaccattggttggccttcaaatctacagctagtcgcaatccgagcttagattatggattcaaagtgctgaaattgcaatggcatnctattgttcagaacttcaataccttgccaatcctgtcaccaatcatgtccaaagcgctgagcaacataaccaagatgtgaactctttaggcttagtttcttcaagacagacagctgaagcaatagatatattaaagcttatgtcatccactgtcttagttgctttgtgccaagccattgatttgaggcatttcgaggaaaacttgaagacactgtt

SEQ ID NO: 253188 - DNA, 527 bp, Glycine max
  unsure (1)..(527): unsure at all n locations
ngagaagagcatctgtgaaagagggagacagaggtatgctatagctcgagctatgacgtcgcatgcacgcgtacgtaagctcggaattcggctcgaggttctagccaatgcaccaacattggtccaatagattctggcgagacaaaccttctaagagtgatcaatgcagcactgaaccaacccttggtctttacaggggccaaccaccagcttacagggggtggtgcccattccttctaacttaaaacctttaacaaccaactcattattgctggacccagcccaaacaacggttgtcctattccaaggggacaaacttccaaaaggctattacttggccgaacttgcttaccattcggccaaaaacgaaccgttggccaccacaacaacaacggcatttttcgattttaaatccgaaccgtgcccaaccaagggttcttcgatcaaacccgttatgccgtttttcccaggctacaacgacancaacacagtcacctggtttcagcaaaagcctcagaaaaccccca

SEQ ID NO: 253189 - DNA, 514 bp, Glycine max
  unsure (1)..(514): unsure at all n locations
naggtgngttaagacggcgggtagaaagagtacactctagaagagctatgacgtcgcatgcacgcgtacgtaagctcggaattcggctcgagcagaaaaaatgggttcttcttcttctatgtggacggtgtgtgtgattttggcatcactggcctctgcagcactctgtgccaacccacgcaggccagtggatgtacaatttggccgaaactacgtgcccacatgggcctttgatcacatcaaatatttcaatggtggttctgacattcagcttcatcttgacaagtacactggtactggcttccagtccaaagggtcttacttgtttggtcacttcagcatgtacataaagatggttcctggagattctgctggcacagtcactgctttctatttatcttcccaaaacgcggagcatgatgagatagactttgagttcttggggaacagaacaggacaaccttacattctgcaaacaaatgtgttcaccggaggcaaaggtgatagagagcaa

SEQ ID NO: 253190 - DNA, 523 bp, Glycine max
  unsure (1)..(523): unsure at all n locations
gaaatagtgtctccatcgtatcgcactgantagcatcctcggagagacttgcgagcatgcatgcacgcgtactttagatgatactttggctcaagcacaataacttagttctaatacttatatgtgcacggatggtgagatattagcatcactgatcctctgcagttactatgtgccatcctgaacacagccagagaatgtacagtaatgcctaaactacttgcacacatggacctttgatcacatcagatatttcaatggtgatatagacattgagattaatcgtgacatgatcactgctactgtgattcaatccgaaaggtcatacttgtttgttcactaaagcatgtacatcatgatggttactggagattctgctggcgcagatactgatttgtatatatcttgccaaaacacagagcatgatgagatagactttgagttcttacggaacatatcaggacaaccttacattctgcaaactaatgtgtgtcacctgaggcatgggtgatagagagcaaag

SEQ ID NO: 253191 - DNA, 521 bp, Glycine max
  unsure (1)..(521): unsure at all n locations
ngagttaggtgtattatagacggcgaggtagtataagtatcactctagaagagctatgacgtcgcatgcacgcgtacgtaagctcggaattcggctgaggtctcttccattcacaaccttaaacctttctttcttgtaaactttattgattgattctgagaatagaactaagagggtatagacatggctagcgcaattgcagcttcttttttggttctgcttctggctttccccactgtatttggagctgaccatgaagttggtgacactagtggatgggccctcggagttaattacaacacctgggcctctgggaaaactttcacagttggtgacactttggtgttcaagtatgactccactcatcaagttgatgaggttgatgagagtggatacaacagctgcagctcaagcaacagcatcaagaactaccaagatggaaactccaagattgaattgacttcaccaggcaaaaagtacttcttgtgccccatttcaagccactgggcttgaggcattaa

SEQ ID NO: 253192 - DNA, 513 bp, Glycine max
  unsure (1)..(513): unsure at all n locations
agtaaggatgattgncttatgaaaagaaagtagtcttcagaacagctatgacgtcgcatgcacgcgtacgtaagctcggaattcggctcgaggagagatctatctatctatcaagatggcgctgttggttgagaaaacaagcagtggacgggagtacaaggtgaaggacatgactcaagccgatttcggaagattggaaatcgagctggcggaggttgaaatgcccggcctcatgtgcttccgcaccgagttcggtccctctcaatccttaagggcgctaggatcaccggggtccttcacatgaccattcaaaccggcgtactcatcgaaaccctaaccgacctcggggccaaggtccgttggtgctcctgaaacatttattcaaccaagggcattgcggcggcgacattgagcgctataagggcctacagttttacctgaaaggtgagacccttccagggatatctgtggggcacaccagagccgccctataagtggccccccgcgtggcgc

SEQ ID NO: 253193 - DNA, 515 bp, Glycine max
  unsure (1)..(515): unsure at all n locations
gaggggaggagctctgtttgagggggaggggagtgaaaggtaagactcagctatgacgtcgcatgcacgcgtacgtaagcctcgaattccgcttcagggctgccttaccttcatcacctaatccttggtcctggatctaacaatggctcatttggccctgtctaagatggctgtaactgttcctgttggcagcgattagtctctcaaaagatctgcggttaaggcacctaactttaacttttgggataaatcatgggcaccagtttttactttgtacttgaaggcaaacaactcaagtttaagaagtcgtcatgtggaattcatgtcagtgcaacaagcaagtgtacccaaagttaatgtatcacctttagagttggaagatgctaaagaacctacattgaacttacacaagcctaaagaaccctatacagcaacgattgtttctgttgataggctagtgtgaccaaatgctcctggngaaacttgtcatattgtgaatgatcatggtggaaatg

SEQ ID NO: 253194 - DNA, 511 bp, Glycine max
  unsure (1)..(511): unsure at all n locations
ngagggaggaggcttggtaggaggtggggagtatatgtaaacactcactatgacgtcgcatgcacgcgtacctaagcctgggattcgggttgaggatcttccttttcctttcggaaccttggtcaattttaaggggctccaatttcggttcttcaacggcggttttttggaccaaccccagcacctttttaataacatggcaaacgcagcatctggtatgcagtccatgatgactgcaagttgaggtttttggagctgaaggcaaaaaggacacaccgtttcatagtttttaagattgaggagcagcagaagcaggtcattgtggagaagcttggtgagcctgcccagggctatgaagatttcactgccagccttcctgctgacgagtgccgttatgctgtttatgattctgagtatctgactgaagggaatgtccctaaaagcagaattnttttcattgcgtggtcccctgacacatcaagggtgaggagcaagatgatttatgcaagct

SEQ ID NO: 253195 - DNA, 521 bp, Glycine max
  unsure (1)..(521): unsure at all n locations
gagttagatgtttgtacgacaagaaatgtattgctacactctagaagagctatgacgtcgcatgcacgcgtacgtaagctcggaattcggctcgagggctcctctcacattctccttcttcttcatccttatctcttacatttcttcatcatcagaagcgggatcaatcggaataaactatggaagaattgcgaacgacctacctacaccggcgaaagtggtggagcttcttaagagtcaggggctgaaccgtgtgaagctctacgacaccgacgccaccgtcttaaccgcgtttgccaactcaggaatgaaggtggtggttgccatgccaaacgagcttctcgccaacgccgccgcggaacagtccttcaccgacgcgtgggtccaagccaacatctccagctactaccccgccacgcaaatcgaagccatagccgtgggaaacgaagtgttcgtggacccgaacaacacgacaaagttcctcgtacccgccatgaagaacgttcacgcttntctagtcn

SEQ ID NO: 253196 - DNA, 522 bp, Glycine max
gggaaagctttcttatggtgggggggtataaaagctaatcactctagaagagctatgacgtcgcatgcacgcgtacgtaagctcggaattcggctcgagcaagagattgttctctgccaaagttcaaaccgaagcttttgattcagaagattagagggaagaggcttatgtttgttggagattcactgaataggaaccagtgggaatcaatggtttgtatggtcaattctgcggttccttcacataacaagacctggtacaagactggttcacttgctatcttcaaaatccaggagccggagcacgttaccacagtggaattctattgggcaccattccttgtagagtcaaattcagatgatccaaacatgcacagcatattaaaccgtataatcatgcctgaatcaattgaaaaacatggcgtgaattggacggatgcggactacttgatctttaacacctacatatggcggatgaacactttctctatgaaagttctacgacggtcatttgatgtaggat

SEQ ID NO: 253197 - DNA, 521 bp, Glycine max
  unsure (1)..(521): unsure at all n locations
ngtgtaaggtgtnggtattgaaggagggtagtatagttacactctagaagagctatgacgtcgcatgcacgcgtacgtaagctcggaattcggctcgaggctattctactcgcaagcaaatcagaacaagagaagagaatggcaggagcagaggggctaaacagagaacagtacgtgtaccttgcgaagctgtcggagcagtcggagcggtacgaagagatggtggagttcatgcagaaggtggtggtggggtggacgccggcgtcggagctcacggtggaggagcgcaacctcctctcggtggcctacaagaacgtgatcgggtctctgcgtgccgcgtggcgcatcgtgttctccatcgaacagatggaggaagggcgctagaacgacgaccacgtgtccctggtgaagcactacagatgcaaggtcgagaacgagctcacgcacgtatgcgccaagcattctaagctgctcgactgcaacctcgtaccctacgttttcccagcgagtccaatgtattc

SEQ ID NO: 253198 - DNA, 511 bp, Glycine max
  unsure (1)..(511): unsure at all n locations
nagggagagagggtctgcgtctgatgatggtaagtatactcaanacaattatgacgtnnnatgcacgccttcctaagctcggaattccgctccagggggttcggttgaacctgcaaaaccggttggccgcaaccgggctaaattgtgccaaaggaaaggttggcttggcccccatggaagccaacgaattctcattggccaattttggccaaaccttaaggaagctggttaaggtggggttatcatcaggaacccaccagattcactctcgctcacgtgctcgtcgaatgaaaggaagccaagaggaaaggacgtcactctggatacggtaagcgtaagggtacaagggaggcaaggcttnccactaaaattctatggatgaggagaatgcgtgtgctcagacgcttgcttcgcaagtacagggaatctaagaagattgacaagcacatgtatcatgacatgtacatgaaggttanaggtaatgttttcaagaacaagagagttttaatga

SEQ ID NO: 253199 - DNA, 455 bp, Glycine max
aggtaagaaaggatctgaaatgtggggtggaggatatatggtaagactcagctatgacgtcgcatgcacgcctacctaagctcggaattcggcttgagccggcaagaaattgaaggaaatcctcaaattaggccggccagtgcggacccaaacggcccaattctggagggacctgcaagagcacggattgaccacaccggaaagtcagcggcgactccgactccaatggacgcatcaatgctactacacgaggcagcggggaaggacgttcacgcgccgttctcatggatctggagcccggcacaatgtactcggtcagattcggccgttcggcagattttccgccgatacttgtcttcgcagtcgggccgcacactggccagggtatacacgaggcccagctacgactctctggatgtggaggagagccgagaatgcatgctgcaggtttcagt

SEQ ID NO: 253200 - DNA, 525 bp, Glycine max
  unsure (1)..(525): unsure at all n locations
gagagaaggatctgtgataagagggagacaggagtatgctacagctcgagctatgacgtcgcatgcacgcgtacgtaagctcggaattcggctcgagatccaatccaagacacagaacagaagaatggcctcaaaatcattcaccattagacttggttggttctgctacttcatgctcttcaactttatgcatttcaacagctggaccgggctcttattggaaaggtatgcaagcacatgccatgggtccattgctggatgccatcaagaagatgagctgttgatggagtctgaaataagccgaaagtttctggagcagaagagatcatacatttccaatggagctttacagagagacanaccagtttgtaatggtggtggctctggtgaagcttatagtaaaacctggagggtgtcttcctcccccctcaaatcctcaaagtagaggctgctctaagtattatcgctgtaggtctgactcttgattacatcttcatgcaaacatctttaaagggtgttcatgaa

SEQ ID NO: 253201 - DNA, 516 bp, Glycine max
  unsure (1)..(516): unsure at all n locations
tgatgatgtattaaagaggggagggagtattgctaagacgagctatgacgtcgcatgcacgcgtacgtaagctcggaattcggctcgagcctcagcagtcgtcacaaagactccataacccaaaaatgcctttcaagaggtaccttgagattggaagggtcgctcagatcaactattgcaaacagttcaggcggttcgcgatcattgtcgatgtcattgacccaaatacggctcttggtgatgctgccgacatggtgagggcccaagtgaacttcaagaagctctcgctcactgacatcaagattgatcttaagaggatttccatgaagaaggatctcattcaagccatcgaagcttgttatggtgataacagaatggaagagagttcttggggcacaaaactgattgtgcataagaggtaggccatcctcaatgactctgataggntcaaagattatgttggcaaagatcactagggcacctttgtgtacgcaaagactcgcttagcttaagaaa

SEQ ID NO: 253202 - DNA, 522 bp, Glycine max
  unsure (1)..(522): unsure at all n locations
nggttgagcgtttttcatgacaagacatgtatagctatcactctagaagagctatgacgtcgcatgcacgcgtacgtaagctcggaattcggctcgagaaacttctgggttgcaaaaatgaattcggacacgacttcctattggtgctacagctgcacgcgcttcgttcacatacaagaacagaacgacgtcgtttgcccgcgctgccacggcggcttcgtcgaaaaggtcaccgccccccaatcgtcaaggcaaggcttccgccgccgacgccgcaacgccgggaaccactcggcgttcaacccggtgatcgtgctccgcggaccgggagaggacgaggagagcagctttgagttatactacgacggcttcgacggcgaggggctccgcccgctgccatccaccatgtcggagttcttgcttggatcgggattcgaccggttgctggagcaggtttcgcagatcgagatcaacggcctcgggagggctgagaattcaccggcgtctaaggcggctatataa

SEQ ID NO: 253203 - DNA, 523 bp, Glycine max
  unsure (1)..(523): unsure at all n locations
gagaacaggtgnngaatcgataggagggtataaaagtatcactatagaagagctatgacgtcgcatgcacgcgtacgtaagctcggaattcggctcgagtcgacgcattccacatttctttcatatactaccagtcacatttcttatacagaaaagcagtgtctgcagcacccaaacgaaacgacagtgaccaaaacagcaaaacgacattacagagagagagcgacgatgccggaagaaacgacgtcgatcgactacgtgatggaggcggcatctgggccccacttatccggcctgagacttgacggccgtatgccgtcctgcgccaccgacggcgccgcgtactactctgccgattctaccctaacgctcgatttgctacgcaatcaacccttcgtcataggtgtttcgggaggtactgcctcgggaaaaaccaccgtctgcgacatgataattcagcaacttcacgatcaccgcgttgttctcgtcaatcaagactcggtttatcgcaggttggattctt

SEQ ID NO: 253204 - DNA, 518 bp, Glycine max
  unsure (1)..(518): unsure at all n locations
aggaaggaagtatctgagctcatgatacagatagctatgtcgtcaagacacttgctagcatgcctgcacgtcgactctagaggatcccctcggtgaattccaattccttattntcaaganataaggaggcaaaaatgttcatatatgaattggaattatttgttttcttattaggcctatcctgaagccaaaggaaatgagatcggaattcctcggggaattccaattccacattttcaagaaataaggaggcaaaaatgttcatatatgaattggaattatttgttttcttattaggcctatcctgaagccaaaggaaatgagatcggaattcctcggggaattccaattccacattttcaagaaataaggaggcaaaaatgttcatatatgaattggaattatttgttttcttattaggcctatcctgaagccaaaggaaatgagatcggaattcctcgggggtaccgagctcgaattccctatagtgagtcgtattaaattcgtaatcatgtcan

SEQ ID NO: 253205 - DNA, 513 bp, Glycine max
  unsure (1)..(513): unsure at all n locations
aggaaggatagatgtggatgatggagcgagggagtagatgtaatgactcagctatgacgtcgcatgcacgcgtacttaacctgggatttcggttcaggaccagtacatagcttttactgtacccgaattgacccaacaattgtgggatgctaagaacatgatgtgtgcagctgatccttgccatggtcaatacttgacagcttctgcgatgttccgtggtaagatgagcacaaaggaggttgacgaacagatgatcaatgttcagaacatgaactcatcatactttgtggaatggatccccaacaatgtgaaatccactgtctgtgatatccctccaactgagttgaaaatggcatcaaccttcattggcaactctacctctattcaagaaatgttcaggagggtgagtgagcaattcacagctatgttccgcagaaaggccttcttgcattggtacactggagaaagtatggatgaaatggagtttactggagcttanagcaacatgaatga

SEQ ID NO: 253206 - DNA, 522 bp, Glycine max
  unsure (1)..(522): unsure at all n locations
nggtttagaatttgtatagaagggggagagtaaggtatagctcaactataacgtcgcatgcacgcgtacgtaagctcggaattcggctcgagctggcatatgctttccttgcccccatcgtgcactttagagcaaattgttaggaaagacatggcaagaacggggacatggatggaccttggacttgatgccgtaacaattggttttgaaatgggtgaagacatacttggtgaactgatggaggacaccattttgagccttgtgagtgaaagtccagaaagtaaatggttctctggttctatttgagggaaagaacaatgagaacaagtttcaattgttaaagacaacttaatggcttttgatcatgcaagatgttaaagggatttcatatgtgtgaagtgaaatggaaggttattagggattaaaattgatccgaaaggactcataaagttaatagacctcctttaaggataccttggaacttggtactggatctttttaacctatatgactaatttggat

SEQ ID NO: 253207 - DNA, 524 bp, Glycine max
  unsure (1)..(524): unsure at all n locations
gggaaaagatctgntatgtaggggggcgatgtattagtatcactctagaagagctatgacgtcgcatgcacgcgtacgtaagctcggaattcggctcgaggcatctgaattctcagtcgcttctcgaaccctacttcttccgcggtgattgcatttgaattcctgtaatggcgattgataatatttttaaacatgaagccagtgaagaaaaaggagagcgggccagaatggcttcttttgttggagccatggctattgctgacttggtgaagacaaccttggggccaaagggaatggataaaattttgcagtcaacaggtagaggacgtgaagttactgtcactaatgatggtgctacaatcttgaagtccctccatattgataacccagctgctaaagtccttgttgacatatcaaaagtacaagatgatgaggttggggatggaactacctcagttgttgtattggctggtgaacttttaagggaggcagaaaagctggttgcagccaagattcatcctatg

SEQ ID NO: 253208 - DNA, 528 bp, Glycine max
  unsure (1)..(528): unsure at all n locations
ngggaagagcgctgtttcatgtatgcgaggggtgaatgagaaacactatagaagagctatgacgtcgcatgcacgcgtacgtaagctcggaattcggctcgaggcctcgtcctacacacactgaccctagccactgacccagccacagcctacaccttcggatgcattcaagaggccacagggagctcactgccaccacaagggctaatgtgcctgggccgacgcccattattactcttggcccaaacacaaaaactgtaccaatctaccttgtctaattgcttgcccacctttaaaacactcaactttagtgacgtcactgagacttgggcccgtggcccatgccacgaggatcaagtataccagtcttatcaaaaatcctagacgatcttcactttactatgtgacatacctggctatgagagcctaccatgagaattgacgatattacaccggaggctctagcgttcaacgctaacaccgtcacatgcaccgttgtagaaattggtaccggttttaaccagcctc

SEQ ID NO: 253209 - DNA, 517 bp, Glycine max
  unsure (1)..(517): unsure at all n locations
tactgatctgaaaagggaggtagaaagtgaatcactatagacagagctatgacgtcgcatgcacgcgtacgtaagctcggaattcggctcgaggaaaaaaaaggacattcattcatctatggctacccttattgctcccagcaaccactctccccaagaagatgctgaagctctcagaaaggcttttgaaggatggggaactgatgagaacactgtcatagtaattttgggtcatagaactgtgtatcagaggcagcaaatcagaagagtttatgaggaaatttaccaggaggatcttgtgaagcgcctagagtctgagatcaaaggagactttgagaaagccgtgtaccgatggatactggaacctgcagatcgtgatgctgttttggccaatgttgccatcaagagtggcaaaaactacaatgtcaatgtggaaattgccactantcctctcccgaagagcttttgcggttagacgcgcctatctcaaccgctacaagcactccttgaaagaagt

SEQ ID NO: 253210 - DNA, 522 bp, Glycine max
  unsure (1)..(522): unsure at all n locations
nagaagagcttgngttattgatgccgggtgtatcagcatcactctagaagagctatgacgtcgcatgcacgcgtacgtaagctcggaattcggctcgagctctttaccagttgccacactacaccgagattccccctaaacccgtttgcgttgttgtttgcgaagaaatggcgactaagaggagcgtgggaacgttgaaggagggtgatttgaaagggaagagggtgttcgtgagggtcgatctgaacgtgcctttggatgacaaccttaacatcaccgatgacactagagtccgtgctgctgttcccaccatcaagtacttaactggtcatggagccaaagtgatcctttctagccacttgggacgtcctaaaggtgtaacacctaaatacagtttgaagcctcttgtgccaaggctgtctcaacttctcggaattgaggttacgatggcaaatgactctattggggaggaagttgagaagttggttgcacaacttccagaaggtggtgttttgcttctat

SEQ ID NO: 253211 - DNA, 520 bp, Glycine max
  unsure (1)..(520): unsure at all n locations
nggaagagctgttgtatagaatggagggtgtatagtatcactctagaagagctatgacgtcgcatgcacgcgtacgtaagctcggaattcggctcgagctaacactaccccgtacgccaaagtgtacctctctctattcttcttcctcgatctattcaatccccttgacacgatatccaaataaaaccaagacccagaaagtgatcaagataaagaaggacaaagaaggaatatacatacacacatatacatacacaccatgaaactcgttcggtctcccgaatcatccttacaagcttacatagacacggataaatcatgtgagaaattcaaggaaaccggtgtaccagagttgctatcagccatggctgcagggtggaacacgaaattcatagtggaatcatggtcctacagtggtgccatagctgcaagcgtatgcctagcagatgcagctcgcaacactggtgcaagacacgtgtgcatagtcccggacgagcgatcagggcacagtacataaagg

SEQ ID NO: 253212 - DNA, 517 bp, Glycine max
  unsure (1)..(517): unsure at all n locations
aagggatggaggtctctgatttggggggagggaggatatatgtaaagactagctatgacgtcgcatgcacgcgtacgtaagctcggaattcggcttgagacttggttccttagaagccaagaagaagccacagagaaccaggcttctaattttttttaaccaccaggaaaatgggcttttacatcggtgggttcccccggattgggtccaaggaaagagctcaggtccgttctggagtctttctggaatggcaggagcagcgccgaggatttgcaaaaggtggctgctgatctcaggtcatccatctggaacagatggctggtgctgggatcaagtacatccccagcaacactttctcgttctatgaccagctgctcgacgccaccgccaccctcggtgccgtcccccccaggtacggctggaccggcggcgagattggattcgacacctacttctccatggccagaggtaatgctaccgtgcctgctatggagatgaccaagtggttcgacaccan

SEQ ID NO: 253213 - DNA, 506 bp, Glycine max
gtggaggagtattgacctcgaaaagatagtatagtatgactattatgacgtcgattgcacgcctacgtaagctcggaattcggctcgagagctagaagtttgcattcgtaggacaacccagtgtgatattggcctgaccaatttcatttattggggattttggccagatgccatccctggatatgccattgttgaacggacaagctttgaaatttctactgagactcatgatgagcttttatatgacaaggtgaagctgctttgaaatggggtacggttgtagactgatatatcagaaaacctgagatctgaaagcctttatcgctgataatttacatgtgatccttggcctgatgcttttttcgtctaattgggcaatgatctatgaaatgaccagcgcatgaatttaaagaactgtatgcatacacgattgttacattagttatttttttgcttagtcaatgcttgcgttgctgataaggggacgatattgatgacttttatct

SEQ ID NO: 253214 - DNA, 509 bp, Glycine max
agggagaatagtcgtgcatcgaatttgttatgactgcataagcgctatgacgtcgcatgcacgcgtacgtaagctcggaattccgctcgagctctagccgttttcattttcaggagaacccagtgtgatggggacttggccaatttcttatattgcggatcctgacaataggcttgcgctgttgatgccatggttttacgaccaaaaattgcatgtgctactgagactcatggtgggcttttatatgacaaggtgaagctgctaggaaatggggacctattgttaagtgaaatatctgaaaacctgagatctgagagcctttttcgctgatattttacatagcattcttgcattgatgccttttccctctaattcggcaatgatctatgaaatgaccagcgcatgattttaaggaactgctttcatacacgattgttccattaaattttattttccattaggaatgcttcccttgctgttaaatgtaccaacttgaagtcttccatctg

SEQ ID NO: 253215 - DNA, 520 bp, Glycine max
  unsure (1)..(520): unsure at all n locations
tagatctcgagccacgctccacngnatcgcatagncgagctatgacgtcgcatgcacgcgtacgtaagctcggaattcggctcgaggatctctggttccttccgcgcctcttctcagagtcgcttagtttacagtctttacgcgaatcctttacgagctcgagctgtgacagaacggagtcggagcaatgccgcgacgagtcggcggcgatggttctgaaattcgtggcggtggcgtcgattctggtcgccggattcgggggagtctcgattccgctggtcgggaagtcgcggctgtttttgtgtctgtttgttgattttttaagcttcataatatatgtttatgaaaaagtcttttattattactttttaggttttttttcttattttgtattgttttatattatattgttttttgttttattgttttcttttgtagtttgattgtttgtttattatgcttttattttttctaatttaattcattttttagctttattgtatattgtttgtttatattg

SEQ ID NO: 253216 - DNA, 512 bp, Glycine max
gagaggtttgtccttcgaatgaatattgtatactctataagactatgacgtcgcatgcacgcgtacgtaagctcggaattcggctcgaggatttttcctggacaaccagtcaaggattacattgactctgcagtgagacatgtgctactaagacagggtgttcttggtatcaaggttaagatcatgcttgattgtgatcctatagggcaactggttcctaaatctcaactttctgatcttgtcacgattctcacaccaaaaggagaggaagaatatgcacagcctgctgttgtttgggcagctgatatagtggacgctgtcgctctattgagaatgatgacaggtcgcgttgtgaaggataggatctgattactcatatcgcttctgtcaaggaatctgacgcagaatgtaccattctgtatgtgacagatgcctcaaggtcaatgcagtatccttcttacagggatctgcaaaagtttctagtagaacgtacagcccggttttttttaact

SEQ ID NO: 253217 - DNA, 519 bp, Glycine max
ggttatgttttattatgaagggggaggggaagagtatcactatagaagagctatgacgtcgcatgcacgcgtacgtaagctcggaattcggctcgagctgagttttccgttgcatattcgccgtttctccctatcctggatacagatttgcgatttggatctgagaagagaatggatcgagaaaatggcgacggcgacattgaaggcggtggtggcgccgacgacggtggttttcgctctccgattggtcgcaagtaccaccctgtcttggccaacgatcgcgcggtgctcgaaatgtcctccatggatcagggaccttcttcttcctcttccgcatttccagatcagcatcctaatatcagaaaagtaaatacaagtgtgaatggtagttcggatgctaaagaagagaacccttctcatgaaaaccaacctaatggatccctgcagcaggaatctaaactggaattgtttggttttgattctcttgtcaacattcttggtctcaaaagtatgactggt

SEQ ID NO: 253218 - DNA, 508 bp, Glycine max
  unsure (1)..(508): unsure at all n locations
agggagaaggatctgatagggagaggacgataaatgtatagaccagctatgacgtcgcatgcacgcgtacgtaagctcggaattcggcttgagggataccgactgggaaaaatgggagatgccctctttttggatgaaccttccattggttttgggaaagggaaaggacctttaccaaccttggccgaggtggtttgtcaatattctcgatttgatatttggcttctgggaatgcagagaaggcaaggcagattctagttgaggggcttgagaatgttttgttgtcaaagccactacttgaggctttattgcattttgaggctattcaacctttgccaaagcgtgttggtgtcgactttttggagtcatgggttgtcaaattcataatgcctaactcaaagagtgctggtgtagcaagtccaacaaagcgtgaagaactttctagtatttttctggagtttttaaatctctttggtgattgtcaatctatcangagagctgaagattg

SEQ ID NO: 253219 - DNA, 511 bp, Glycine max
  unsure (1)..(511): unsure at all n locations
agggaaggaggttctaattgggggaggggggtaaatgtatacactctagaagagctatgtgcacgcgtacgtaagctcggaattcggctcgaggtaagccatttcccaacacaattggcttcattcatgcatatcgcgatcggatttatggtggtgaagttcaagagtcctttcattattgcaagtataagcgtgatgaataccaacttacatatttgctgatgattgtgttccaaggtggctaactgcatcataccacatagattttgacaccatggcaggtgcagacaagtttggaaatatctattttgtgcggttgccacaagatggttcagatgagatagaagaagatcctactggtgggaggatcaagtgggagcagggaaagctgaatggagctcccaataaggtggaagaaattgtacagtttcacattggtgatgtcgtcacatgcttgcaaaaggcttctcttataccaggtggtggaaagtgcattgnatttggaacagtt

SEQ ID NO: 253220 - DNA, 514 bp, Glycine max
  unsure (1)..(514): unsure at all n locations
ggagtaagaaggatttgaatgtgagaggaagataatactactagacgagctatgacgtcgcatgcacgccttacgtagcttgggatttcggttcagccggttcaagcaccgattttcgaattcccgtggaaaccgtaccgtgctctggtttctggactcgaagatgaaggccacaaaggaattgaccgagcaagtggaggaaaacgaggtcaaggttttggttgaggaggacgacgaagaatacgagtccgtggatgaagtagtagacgacgcagaagatgatgaagacgaagaagaggacgatgacgacgacgaaggagacgacaatgacgacgaggaagatgatgctcctgacggcggtgacgacgacgacgacgaagatgatgaagaagaaggtgatgtccatcgtggtggtgagcctgacgatgacgataacgactcagacgacgactcagacgacgacgaagatgaagacgaggaggacgaggaggagcaaggngaagaggaggatttg

SEQ ID NO: 253221 - DNA, 522 bp, Glycine max
  unsure (1)..(522): unsure at all n locations
aggaaaaggatggattttnttatcgttggtttggggagagatatgtgacactcttatgacgtcgcatgcacgcctacctaagcttggaattcgggttgagcctcaaccgatttctctttttccttttggggtccaaatgggttctaagtcttacttacaattcttgggtctatgggcctattcttatttggattgtggttaacccctatggttgctacctgtcctggtagcttttaccaggactttatcctaccatggggtggtgaccgtgctaagatattcaatggtggccagcttctatctctttcccttgacaaagtctctggctctggcttcaaatcaaagaaagaatacctatttgggaggattgatatgcagctcaagctcgttgctggcaactctgctggcactgtcactgcttactacttgtcatcccaagggccaacacatgatgaggatgatttcaagtttttgggaaacctnagtggggaccctaatatcttcacaacaacattcttacgc

SEQ ID NO: 253222 - DNA, 498 bp, Glycine max
  unsure (1)..(498): unsure at all n locations
agtaagctgattcgactaagacgattattgcagcactctagnagatctatgacgtcgcatgcacccttccttaacctcgaaatccgcttcaacccctttcatcttctaatctcttctcttttccctgctaatcatggcaaccttgtcaactgtgaaggtttccccccattgcatgtttcaaacagcaagcaaaaatccatccactgttgccaccacaatgaagtgcccttcttcttttgggtctgtgaagagcatttccagatcttttggcttgaagtcatcctcttcatttagagtcactgccatggcttcttacaaggttaagctgattggcccagatggaacagagaacgagtttgaagccactgacgatacttacatcttagatgcagcagagagtgctggagttgaacttccttactcttgccgagccggagcatgctctacctgtgctgggaagattgntgctggttctgtggaccagtcttattgctcaat

SEQ ID NO: 253223 - DNA, 496 bp, Glycine max
gagtgagtctgcgcatgtagttgactgctattgtatcctcatagaagagctatgacgtcgcatcgcacgcttgcctcggaattcggctcgagggtgaatgcgtttaacaggacaatacagaaattagcgtgaaaaatgttgggtgtgttcagcagctccatagtgtcgccgccggaggagctcgttgccgccggcagccgtacaccgtcgccgaagatgacggcggcggcgctgcggaagtggttcgaggagaagaacccctccgcagtgtcggtggaggtcggagagcatgtccagctcgcttatacccaccagaacgagtcgccgtttcagcccagatcctttgctgtgaaggatgaggtattctgcttgtttgagggagcccttgacaatttgggcaacttgagacaacaatatggattggccaagtcaaccaatgaagtattggtggtcattgaagcttacaaagcaatgcgtgacagagcaccctaccctt

SEQ ID NO: 253224 - DNA, 494 bp, Glycine max
ggggagaagctgtgtacgacggggggtaagagaacactcatagaagagctatgacgtcgcatgcacgcgtacgtaagctcggaattcggctcgagcatttatcaactcactcatcaatctcgtttgttctcactaactattacttcatcatgtcgtcgagcacagttggtcaagtcatcaaatgcaaagctgcggtttcatgggaggcagggaagccacttgtgattgaagaagtagaggtggcaccaccacaagctggtgaagtgcgtttgaagatcctctacacctctctttgccacactgatgtttacttctgggaagccaagggccaaactccattgtttcctcgtatatttggtcatgaagctggagggattgcggagagcgtaagtgaaggtgtgactcatctcaaaccaggggaccatgctcatccagtggttaccgggggagtgtggagaatgccctcattgcaagtcacaggagagcaacatgtg

SEQ ID NO: 253225 - DNA, 521 bp, Glycine max
  unsure (1)..(521): unsure at all n locations
tgtnagagtgtgtctgcncaccgaacactaagtcactncttnannccntnnnnatttatgacgtcgcatgcacgcgtacgtaagctcggaattcggctcgaggaaaattttgaaaagtgttttgtgcagcagtactcaatgattcaccgacttgaaacaaataaactgcgaaatgtggcaaagttttttgctcatttacttggcacagatgctctaccttggcatgttttatcttatatacgcttgactgaagaggacacaacttcttcttcacgtatatttattaagattctcttccaggaattatcagaacatcttggaatccgactgctaaatgagcgattaaatgatctaacaatgcaagaatcttttgaatccatatttccaaaagataatccaaaaaacacacggttctgcattaacttctttacatctattggtcttggtggtcttaccgagaacctacgtgagtatttgaagaatatgccacgtcttatcatgcaacaacagaaacaagtttn

SEQ ID NO: 253226 - DNA, 513 bp, Glycine max
agttagaaggggtcgtgcatcgataaagaaataatagcacactctagaagagtctatgacgtcgcatgcacgcgtacgtaagctcggaattcggctcgagcgataagaaacatttatcaagtatgggtttggacctttctgaagggaaaatcagaaacaacttggaggctggagttattgagcctgcaatgagcaaagtaaaaattattcagtttgcaactgaagctgccattactatccttcgaattgatgacatgatcaagcttatcaaggatgaaagtcaaaatgaggattaaagtataactgaatctatgaggcatctactccgcagtgcttacaaaagggagggttgtgttagtgtgcatttgaagagggtatctgcatttaatcttcaatgcccttgttcttgaaggacaactgctctaattattcttctgaaagtagctgtattatatttacatctttgcattttatattccaacaatttttaggcaaacatgtttggtcatgcat

SEQ ID NO: 253227 - DNA, 516 bp, Glycine max
  unsure (1)..(516): unsure at all n locations
naggtaaagtggttttaaattgagaacagcacatacgttannacntnnaagnatcttgacgtcgcatgcacgcgtacgtaagctcggaattcggctcgagctcgagccgaatcggctcgaggtccaatcatgctttctactctctttactctttagtttaattttattttttgtatatattaaggcggcacagacccaagtgggtgtaagtcagtcttgggagtgagtcactcttcttgcataacccagatctgacaatatgcgaagaactggcttgttacatttgttatgccttgtcattgctttagtaagtgtgcaagcagaagatgcgtataagtattacacatggacggtgacttatggaactatttctccattgggtagtccccagcaggttattcttatcaatggtcagtttcctgggcctagacttgacttggtgactaatgagaatgtaattctcaaccttatcaacaagctggacgagccatttttactcacttggaacggtattan

SEQ ID NO: 253228 - DNA, 502 bp, Glycine max
gggaggaaagggatctcatacgccgagaaaaggaggaaaggttatactcgagctatgacgtcgcatgcacgcgtacgtaagctcggaattcggctcgagcacccgctcagaacgcagaggagcagaagcctaagccttcaacatggcgagagggttgaagaaacacttgaagaggctcaatgctccaaaacactggatgcttgacaagcttggtggggcctttgcaccgaagccatcatctggaccccacaagtccagggagtgtcttcctttgatccttatactacggaacaggctaaagtatgctctaacatatagagaagttattgccatcttgatgcagcgccatgttcttgttgatggcaaggttaggacagacaagacataccctgctggtttcatggatgttgattctattcccaaaacaaacgaaaatttccgtctactgtatgacacacaaggtcgattccgtcttcactctgtaagggacgaatagtcaaat

SEQ ID NO: 253229 - DNA, 497 bp, Glycine max
  unsure (1)..(497): unsure at all n locations
ngtaaagtcattgattagagagggaggatgataaatgttatacacagagctatgacgtcgcatgcacgcgtacgtaagctcggatttcggctcgagcagatggtttcatcctggttcggggaaatttagggttggaactccaacctgagaaggttttcttattccaaaaggctgctatttacaagtgtaacatggttggaaagccagttgttgttacacgtgttgtggactctatgactgataatctaagacctactcgtgctgaagcaacagatgttgccaatgcagtgttggatggaagtgacgcaattctccttggagcatagaccctgcggggacaataccctgtagagaccatttctatagttggaaaaatatgtgctgaggcagagaaagttcataatcaagattngtattctaagaaagctgtanaatattgtggagagccaatgagccatttgtaatcaattgccttctctgcggttcgggcagctatc

SEQ ID NO: 253230 - DNA, 499 bp, Glycine max
  unsure (1)..(499): unsure at all n locations
gggaaaaggcctgtgttactgacggagggtaaatgagtaacattatagaagagctatgacgtcgcatgcacgcgtacgtaagctcggaattcggctcgagcatgagaggactttggccacggatgtgctatttggccttctgaaggaagtgcttaaaaatcgacctgacatgaagttggttgttatgagtgcgactcttgaagctgaaaagtttcagggttattttttcggtgcccctctcatgaaagttcctggaaggctacatcctgttgaaattttctatacgcaggaacctgaaagggattacttggaggccggcattaggacagtggtacagatacacatgtgtgagcctncaggagatatacttgtatttctgactggagaggaagagatagaagatgcttgccgcaaaataacaaaagaaaattctaatctgggaaaatcaaggtgggcctgtcaaaagttgtacccctgtattctactctttcctcctgct

SEQ ID NO: 253231 - DNA, 522 bp, Glycine max
gaggggaagtggatctgaaatggggggtgggggagtatatcgcaaaactctagaagagctatgacgtcgcatgcacgcgtacgtaagctcggaattcggctcgaggagagtggtttcagtgagtgatcggtgttcacttgatccttcataagtcgtcatcatcatcatcatcatcaccgttgattgaagaagatgccgatcagaaacatcgccatcggaaggcctgaagaggctactcaccccgacacgttgaaggcggggttggctgagttcatctccaccttgatcttcgtgttcgccggttcaggttccggcatcgcctacaacaagctcaccgacaacggcgccgccactcccgccggcctcatctccgcttccatcgcccatgctttcgccctcttcgtcgccgtctccgtcggcgccaacatctccggcggccacgtcaaccccgccgtcaccttcggcgccttcgtgggcggcaacatcaccttactccgcggcatcgtctacgtcatcgcccag

SEQ ID NO: 253232 - DNA, 516 bp, Glycine max
  unsure (1)..(516): unsure at all n locations
ngggaagaatagcgtcgtttatggaacagggggggtaaatgagagacactatagaagagctatgacgtcgcatgcacgcgtacgtaagctcggaattcggctcgaggtatctactactcggataaccgtagtaattctagagctaatacgtgcaacaaaccccgacttctggaagggatgcatttattagataaaaggtcaacacaggctctgcctgttgctttgatgattcatgataactcgtcggatcgcacggcctttgtgccggcgacgcatcattcaaatttctgccctatcaactttcgatggtaggatagtggcctaccatggtggtgacgggtgacggagaattagggttcgattccggagagggagcctgagaaacggctaccacatccaaggaaggcagcaggcgcgcaaattacccaatcctgacacggggaggtagtgacaataaataacaataccgggctcattgagtctggtaattaaatgagtaccatctaaatccttaac

SEQ ID NO: 253233 - DNA, 491 bp, Glycine max
aggtcttgttttgcaggacaggagatattgtatagctcgagctatgacgtcgcatgcacgcgtacgtaagctcggaattcggctcgagttccactgccaaaaggggtggtcattcagtgtccaaaaaaggggttttgccgggtttggttaaattcaaatttgctactggtggtccctttggtggggattcaaacatgggtggggaattatctaagtacccaaaagcagagcttcctggcccaatgcagcacgatcaaagtttgacaacctcagtcattagagaacgtccaaatcaatcgttaaatcgtctttctcagaaactggatcccatagactggcttacgtatgagccatatctctgggagaatgagagacagtcttacctacgacatgctgttctctttggttactttgtacaactcaaccgtatgtacacagatactgttcagaaactgcctactaattcagaatctaatattctgacgtggtcc

SEQ ID NO: 253234 - DNA, 492 bp, Glycine max
  unsure (1)..(492): unsure at all n locations
gttaaggattgtatgagggggagagatgatgttatacacagagctatgacgtcgcatgcacgcgtacgtaagctcggaattcggctcgaggatgaagcaatacttcggcgtctacctcaagcctttgaaattggaattccagaccaaagggagagggctgaaatattgaaggttgtcttaaagggtgagagggtcgaagacaacatagactttggtcatatagctggtttgtgtgacggttacactggttcagatctatttgatctttgcaagaaagctgcctattctcctattagagaactactggatgaagagaagaaacgaaaacaatctcatgcccctagaccttagtcccagttagattttgaagaagcccttgctacttcaaagaatacatatgttgctgctagtgaataccgaggattcaggcatgagtcaccancaagatggacagttgccttgttagtcaagatgatctcagtttcaagctgc

SEQ ID NO: 253235 - DNA, 495 bp, Glycine max
  unsure (1)..(495): unsure at all n locations
nggaaaggggttcgtatgaagggaggggagaaaggttaaactcgagctatgacgtcgcatgcacgcgtacgtaagctcggaattcggctcgaggtgaaatggccggttcaattggaagcgcanggaacacaagcacgggtgtggagtggcacgtgcgacctccaaaccctaagaaccccatcgtcttcttcgatgtcaccatcggtaacattcccgccggtcgaatcaagatggaactcttcgccgatattgcccccaaaactgccgagaatttcaggcagttctgcactggggagtacaggaaagcaggactgcctgttggttacaagggttgtcaatttcatagagttattaaggatttcatgattcaggcgggtgattttgtaaagggagatggtagtggatgtgtttccatctatggactcaagtttgatgatgaaaactttacagccaaacacactggtcctgggcctctgtcgatggcaaaataacgga

SEQ ID NO: 253236 - DNA, 498 bp, Glycine max
  unsure (1)..(498): unsure at all n locations
tggaaaagcacttaggtcagcctcacganctatagctanancaatcaagatctatgacgtcgcatgcacgcgtacgtaagctcggaattcggctcgagtagttctgtttctctttcttctctctgttctctgaaccaagttctcaattcaatcttcttcacccttttgatctgctaattctcaaggtattcaaaattgggaggttttcgtttgaattgtgatgtccaagccactgctaggcataggggaggaggaaggtcaaagcaatgtcactttgttggtttcttcctcagtcatcatggaaagtgtgtgcctgaatagctcaaaattgaaagagcgcaactacatggggttatctgattgttcatctgtggacagctccgcgccgtccttctcagatgagactaaaagcaatctgaaccttaaggctactgagctgagactggggcttccgggattgcagtctcccgaacgagattcaaatctttgcttgaaaag

SEQ ID NO: 253237 - DNA, 491 bp, Glycine max
aagcctgttttacgacggcggggataaagcagacctcatagaagagctatgacgtcgcatgcacgcgtacgtaagctcggaattcggctcgagctcaagcgagactacgtcgtttcggaggagatcggccggggaagattcggcaccgttttccgctgctcctccgcagactccggtcactcctacgccgtcaaatccatcgacaaggtggcaataaccgccgccggagactccctcgacgcgcaatgcctattgacggagcccaagatcgttcagcttctctcccctcaccctcacatcgtaaacctccacgatctctacgaagacgaaaccaaccttcacatggttctcgacctctgttacgaatcgcagtttcaccaccgcgtcatgtccgaaccagaagccgcttcggtgatgtggcaactcatgcaagccgtggcgcactgccaccgccttcgcgtcgcgcaccgagacgtgaaacccgataccat

SEQ ID NO: 253238 - DNA, 505 bp, Glycine max
  unsure (1)..(505): unsure at all n locations
ngtgtaggagcctgtatgattgaacggaggagttatcagcatacctcatagaagagctatgacgtcgcatgcacgcgtacgtaagctcggaattcggctcgagctcgagccgattcggctcgagggaacaagcaagtgcttgtaaaggactatgttaccggttttcccaaagaatccgacatgaatattgtcgaaagtaccataacatagaaacttacacacggatccaatgatgtgttgctcaaaaatttgaatgagccttgtgatccgtatatgaggaatctcatgaacaggtcccaaaggcatctcccaatagtattgcttacactcctggctctgcattaataatgatatggcagtgctaaagtcctgtaatctgagcacaccatattattacgaaagagaatgaccgtggggctttaccaaatggcaagagtgtagctcgtaaccgtcagctcacatactcttcaaagatgaacacacagatgcttcacttgacgtacta

SEQ ID NO: 253239 - DNA, 519 bp, Glycine max
  unsure (1)..(519): unsure at all n locations
atggaaggaagcgtgntgtatgtgtatggggggagaaatgagaaacactatagaagagctatgacgtcgcatgcacgcgtacgtaagctcggaattcggctcgagattgttttgcctggatgaaggtacaattcaccaagcgtccctatgcacaaccttatggtgtatatacatggttaacggatattaaagacacctctaaagaaggatatagttttgaagagatatgcatcaagaaagaagcgtttgacggagaagagaagttttgtgcaaaatccttgggaacagtaattggttttgccatttcaaagctgggaaagaacattcaagtactttcaagttcctttgtcaataagcaagagcaatacactgtggaaggagtgcataatcttggagacatagcagtgatgtgtcatgggctaaatttcagaactgcagtattttactggcattaagtccgtgaaacaacagttttcatggttccattggtggctggtgatggaaccaaaactcaggccc

SEQ ID NO: 253240 - DNA, 500 bp, Glycine max
aggagagttatctgaaatgcgtgggtgaatgaggagaccttatagcagagctatgacgtcgcatgcacgcgtacgtaagctcggaattcggctcgaggacctccgtgaatcgataagcaaccaaaccgacgtggccctgagcatctcaaagctcctgttgtcgaaagaagctcgggacaagaacctcgtgtattcgccgctgtcgttgcacgttgttctgagcatcatcgccgctggctccaagggccccacactcgatcagcttctctccttcctccgatccaaatccaccgatcatctcaactccttcgcctctcagctcttcgccgtcgtgctctccgacgcctctcccgccggcgggcctcgcctctccttcgccgacggcgtgtgggttgagcaatccctctcgcttctcccttccttcaaacaacttgtcagtgctgattacaaggccactttggcttcagttgatttccagaccaaggcttgttgagtggccc

SEQ ID NO: 253241 - DNA, 495 bp, Glycine max
  unsure (1)..(495): unsure at all n locations
nggaagtgtcattgtctattgaaagaaaagtagtgctatagcagagctatgacgtcgcatgcacgcgtacgtaagctcggaattcggctcgaggaaacatgtcttccttaagctccttagtgctgctccttgcagctctaattctatcccctcaagttcttgcaaactatgagaatcccccagtgtacaagcctgccactgagaaaccaccagtttataagcccccagttgagaagcctcctgtttacaaacctgcagttgaaaaccctccaatgtataagcctccagtagagaagccaccagtgtacaagcccccagttgagaaaccctcagtttataagcccccagttgagaaaccaccagtgtacaagcccccagttgaaaaaccaccagtgtacaagcccccagttgaaaaaccctcagtgtacaagcccgcagttgaaaaaccaccaatgtacaagcctgcagttgagaagccctcagtttacaagcccc

SEQ ID NO: 253242 - DNA, 504 bp, Glycine max
  unsure (1)..(504): unsure at all n locations
aggtagagcctgtgtgctggtcacgcctcgctacagctagacactatagaagagctatgacgtcgcatgcacgcgtacgtaagctcggaattcggctcgagcaatgcccttatctgcttcgaaagaaccggtgtcatccaaacatggtgaagaggtggcaactggatcaataatagctgaaacttctactgtacagggttcggcttgcccaactgtccaagcttgagatctattttagaatatgcttaacacaacacatgcaattcgaacgttgttttcttggaaagatttgaaagtaactccgttgggttcaatgcccgctagtcccatgcatcctttctgttggtcaacaaccaaccacaagtcaatcgaatgaattcttcaagactccggactctctttctgtccggagggaatcaattgtttctcaatcaatcatgcctcaactggataaattcacttattttacacaatttttctggttatgccttttcttctttactn

SEQ ID NO: 253243 - DNA, 498 bp, Glycine max
ggggtagtatgctgtatacaggaagggggggaaaaggacaacattatagaagagctatgacgtcgcatgcacgcgtacgtaagctcggaattcggctcgaggtggtccttctatagagccctcatcgctgagttcatagcaacccttctcttactttatgtcactgtgctcaccattattggctacaaaaggcagactgatacaacggtaggtggcaccgactgtgatggggttggcattatgggcatcgcttgggcctttggtggcatgatcttcatccttgtttactgcaccgtcggtatttcaggaggacacataaacccggcggtgacattcgggttgttcctaggacgcaaggtgtcgttgataagggcgttgctgtacatggtggcacagtgtgccggtgctatctgaggtactggattggccaaggggttccaaaaagcatactacaacacgtatggaagtcgtgccaactgtgtagctgatggctacaac

SEQ ID NO: 253244 - DNA, 511 bp, Glycine max
  unsure (1)..(511): unsure at all n locations
gagggtgggctcnnaattgtatgggagttattgtcacactctagaagagctatgacgtcgcatgcacgcgtacgtaagctcggaattcggctcgaggcggaatcgtaaggctgtattagaagagcagcaaagacgagttcaggaagcaatggcatcaaagccagctccttctgaagataattttgagatgaaggccttaaaagctatgggggatatggaagatggagatgctgtgtttggatctggtgctgaagttaacctggattcccaggtttattggtggcatgacaaatacagacctaggaagccgaagtatttcaaccgtgttcacactggatatgagtggaacaaatataatcagactcactatgatcatgacaacccacctccaaagattgtccaaggttacaaatttaatattttctatcctgagcttgtagacacgacacaagctccaacctacaccattgagaaagatggcagcaacggggagactcgcattataagattc

SEQ ID NO: 253245 - DNA, 509 bp, Glycine max
aggaggagggtgagtagtggggggggggaaatggtaacactatagaagagctatgacgtcgcatgcacgcgtacgtaagctcggaattcggctcgagggaagagggagtgagagtgttcttcgtttgctaccttctctcagaaatggttacgttcaggtttcaccagtaccaggtggtcgggagggctctcccaacggaagcagatcagcatccgaagatctaccgaatgaagctctgggccaccaacgaggttcgcgccaagtctaagttctggtattttttgaggaagctgaacaaggttaagaagagcaatggtcaagttcttgctatcaacgagatttttgagaagaacccaaccaagattaagaactacgggatatggttgcggtatcagagtaggactggttaccacaacatgttcaaggagtaccgtgacaccactctaaacggttcagttgaggcaatgtacaatgagatggcttctcgccacagggtcaggagcccatgc

SEQ ID NO: 253246 - DNA, 490 bp, Glycine max
gggagtctttgtatggggggagaagataatgtcataccgagctatgacgtcgcatgcacgcgtacgtaagctcggaattcggctcgagttttggctttgtggtaaagtggcaacccttaaccattgggggtccttatggcctcaatcctggaatttcaggttctcgtctttggggcaccattcctcagtccatttaacagcatactgtttggaatcaaatggcaacagtgagaacaccattgaattttgattccagcaagcagagtttttgtcaattttctattgaccttctcggtggaggaattttagtggacaaaactggagattggatcacacttatacaaaattctccaattagtaacttgttgagagttgctgcttggaagaaaggctgtttaatggttaagattgtgatgtctgggaatgcagcagtcaaaaggagtgattgggcctcattggtacaagtatttttaaccaacagcaacagtcc

SEQ ID NO: 253247 - DNA, 494 bp, Glycine max
  unsure (1)..(494): unsure at all n locations
ngggaaggtgattgtaagtgggggagagataatgctcataccagagctatgacgtcgcatgcacgcgtacgtaagctcggaattcggctcgagcgcagtttcttgatctctcctctcaagatgcagatattcgtgaaaactttgaccggcaagaccatcacccttgaggtggaatcctgcgacaccattgacaacgtttaagctaagattcaagacaaggaagggatcccacctgaccagcagagacttatcttagcggataaacaacttgaggatggtcgcacccttgccgattacaacatgcagaaggaatcaaccctacatctcgtgcttcgactcacgtgtggcatgcatatctttgtcaagactttgaccgagaagaccgtcacccttgaggctgaatactgggacaccattgataatgttaaggcccagatccaggacagagagggcatgcctccatatcagcagaggctgatacttgccggtacaca

SEQ ID NO: 253248 - DNA, 492 bp, Glycine max
  unsure (1)..(492): unsure at all n locations
gtgtaagacgcctcnctcacgacagccagactactgtagaactgttctattacgtcgcatgcacgcgtacgtaagctcggaattcggctcgagcagagcttctgcctctgtctatttccctcgcagatctcaaccaattcttataaacccctttggagatctgcttcaagctctgtccccttcttccacatccacactcccctctcaagtttttgtggataagattgagctataatggctgccaggagaccgggtttgattgctttgtttgatgttgatggaactcttacagctcccacgaaggtggtcacaccggagatgttgacattcatgcaagaactgctgaaggttgtaacggttggagacgttggcggttctgaccttataaagatatcagagcaacttggcagcacagttaccaatgactatgattatgtattttctgagaatggtcttgtggctcacacggaaggaaagctcattggaactcac

SEQ ID NO: 253249 - DNA, 497 bp, Glycine max
ggggggtatgctgtgtatgtgtaggaggggaaaagggtaacctcatagaagagctatgacgtcgcatgcacgcgtacgtaagctcggaattcggctcgagcgacaaatgggtgtatttctacgggagcacattttaatcctaataaattgacacatggtgctcctgaggatgaagtccgtcatgcgggtgacctgggaaacatagttgctaatgcagagggggttgcagaggctacaattgtggataatcagataccactctctggccccaattcagtagttggaagagccttggtggtccatgagcttgaggatgaccttggaaagggtgggcatgaactcagtttgacaactggaaatgctggtggaagattagcatgtggtgtggctggtttgactccagcataatcagtgcagcgaattttttgtagcagtcgtgttatgttatcagatattatgttctctgtgaagcatgatgactcactgatttctttaac

SEQ ID NO: 253250 - DNA, 493 bp, Glycine max
  unsure (1)..(493): unsure at all n locations
gggagctgtattagaagaaggagaaagagaacactcatagaagagctatgacgtcgcatgcacgcgtacgtaagctcggaattcggctcgagctcttgcagattgtctcaaacaaatgacgagactctgatcctatatattgctgccatgactgataaaggtggaagcatcctgacctggaatacacaaacatgggaaaggatggcctcaaagcatattattcgcgatccaatctctgcatttaatgtctcagctgatggaaagtttcttgcgtgtggaacaccttcaggagacattgcagttgtaaattcaacaaatatgcagattcacacaatgataaaaaaggctcaccttggcatagtaactgctttagcattctcccctgattcaaagggcggtggctactgtatccatggattcaagtgcgagggtaacaataattgaagagaagaagactaatgggctaagctngaggattgcattatttatcatc

SEQ ID NO: 253251 - DNA, 498 bp, Glycine max
  unsure (1)..(498): unsure at all n locations
ngggggagagggtttgtatgtgcagggggggaaatgggtgacctcatagaagagctatgacgtcgcatgcacgcgtacgtaagctcggaattcggctcgaggtcccaaccctaggcagagagaaaattccccaaatcacaaaccctagattgagagaaaccctaacacgccatgggaacacccgagacatctcgcgaaccctgccccgatcgcatcctcgacgacatatgcggcgccttcggcatgggagcggcgggtggctccgccttccattttctcaagggtctctacaattccccgaaaggcgatcgatgcgtaggcgccacccatgccgtgcgccttaacgcccgccgcgtcggcggcagcttcgccgactggtgcggactctgctacgcctgtgactgcaccatggtctacgctcgccagtaggaggacccctggaacttcatcgtcgacggcgccgccactggcggctacctgtctatgcgccagggcctc

SEQ ID NO: 253252 - DNA, 516 bp, Glycine max
  unsure (1)..(516): unsure at all n locations
gaggggagcatgcttnnctttgtggacggggggtaatgagtaacactctagaagagctatgacgtcgcatgcacgcgtacgtaagctcggaattcggctcgaggttagattaggtcttcctacccaaaacaaaacttcaatttctgtttcagttcgcggagatcaatattttatctaggtccatcgtcgatagaagatacgagaaaccaaaggcaatgtttttgtgggattggttttatgggattctagcgtcgctcgggctgtggcagaaggaggccaagatcttattcttgggcctcgataacgctggcaaaactaccttgcttcacatgctcaaagatgagagattagtccagcatcagcctacccagtatcctacatcggaggagttgagtattgggaagatcaagtttaaagcttttgatctagggggtcatcagattgctcgaagagtttggaaagattactatgcccaggtggatgcaatggtgtacttggttgatgcttatgacaagg

SEQ ID NO: 253253 - DNA, 520 bp, Glycine max
  unsure (1)..(520): unsure at all n locations
nggagggagacaatgttttngtatgtgtgacgcggagtaaatgagagacactatagaagagctatgacgtcgcatgcacgcgtacgtaagctcggaattcggctcgagggttcagcaaagaggtaaccaagcatgaggatgctccacagagtgagtggatggggtggaattggaggtcagagggtgacatgttcttgaatggagcatacttcaggcaatctggtgctggtgcctcttccagctatgctagggcttcaagtctcagtgcaagaccttcttctcttgttggctacatgaccaccactgctggtgcacttacctgtagaaagggcaaccgctgctgatgattgatgaataaatgatgatcactttaataattattagctaagaaatgaaatttatttccagctgcagggttgcaaaaggaaaaattaatatgaatgattaatatgaattaattaaccttatgcttaattggcttcccttgcagtaaactatatataatacatcctatgccttt

SEQ ID NO: 253254 - DNA, 490 bp, Glycine max
gggtagaggattttatggggggggggataaaggtatactcagagctatgacgtcgcatgcacgcgtacgtaagctcggaattcggctcgaggtggaggcagcggcggaattccttaacaaggcagtgaaaccagtgctggttggtggtcctaaactgagggtggcaacagcatctgatgcctttgtcgaactggctgatgcgtgtggttatgcgcttgctgtgatgccgtcagctaaagggcaggttccagagcaccatccccattttatcggaacttattggggtgctgtgagcactgccttctgtgctgagattgtggagtctgcggatgcatacttgtttgctggtccaatttttaatgactacagctctgtggggtattcacttcttctcaagaaggagaaggcgatcattgtgcagcctgatcgggttgtgatcgcgaacggacctgcttttgggtgtgtgctgatgaaagatttcctcaggcac

SEQ ID NO: 253255 - DNA, 499 bp, Glycine max
  unsure (1)..(499): unsure at all n locations
ngggggcaatggttttgtatgagatgaaggggaaatgagaaacctcatagaagagctatgacgtcgcatgcacgcgtacgtaagctcggaattcggctcgagctcgagccgttcgccgtaaacagaagagagagagagagagagagagagtcctgaaacttgggtgcgattccttcactcacaacaacaacacatcactatggctcttctgagtcgagcctcttcacgcttccctcagctggtttcccctcaaagggtagtttcactccacacaacgctcccatctctgaacgcatccccatccacagtcacgcctacaccatatgccccgccaccgtctccgtccgcttcctctcccgccggcgtttcgaaagcggcggagttcgtgatctcgaacgtggacgatctgatgaactgggcccgtcgcggctccatctggcccatgaccttcggcctagcctgctgcgccgtcgaaatgatgcacaccggcgccgcccgt

SEQ ID NO: 253256 - DNA, 516 bp, Glycine max
ggagggtgaagtctgtgtattgatcaacgaataaatagcatcactctagaagagctatgacgtcgcatgcacgcgtacgtaagctcggaattcggctcgagcataagcacaagcacaagcacaagcacttctctaattccctttcacactctattacagatttcacaagtgcttacacttcaaatggctttggaagctcttcaatcacccaccacagccactccatcgtttagtccctttgaagaaaccagtctcagttacttagagacaccgtggacgaaaggaaagcgttctaagcgtagccgcacggagcaacaactgcaacacccttcatgcaccgaggaagagtacctcgctctttgtctcatcatgctcgctcgcggcggcgccggcagtgtctccaccgccaaacccgctgtctccgacaacaattctgcgccgctatccgccgccaaactgagctacaaatgttcggtttgcaacaaagccttctcctcttaccaagcactcggagga

SEQ ID NO: 253257 - DNA, 514 bp, Glycine max
  unsure (1)..(514): unsure at all n locations
gggaagaatcttgtgtatgtaaagcgggggaaatgatatatactcggagagacaagcttgcatgcctgcaggtcgactctagaggatcccctcggggaattccaattccacattttcaagaaataaggaggcaaaaatgttcatatatgaattggaattatttgttttcttattaggcctatcctgaagccaaaggaaatgagatcggaattcctcggggaattccaattccacattttcaagaaataaggaggcaaaaatgttcatatatgaattggaattatttgttttcttattaggcctatcctgaagccaaaggaaatgagatcggaattcctcggggaattccaattccacattttcaagacataaggaggcaaaaatgttcatatatgaattggaattatttgttttcttattaggcctatcctgaagccaaaggaaatgagatcggaattcctcggnggtaccgagctcgaattccctatagtgagtcgtattaaattcgtaatca

SEQ ID NO: 253258 - DNA, 512 bp, Glycine max
  unsure (1)..(512): unsure at all n locations
tgaggcagagtgntttggtggtgggggggtagatgggagacactctagaagagctatgacgtcgcatgcacgcgtacgtaagctcggaattcggctcgagctttccaccaacaagaaagaaaacagagagaaactttcatttcatagattttcatcatctcagcaaaggaatcaatcaatcaagccatggcaggcttcagtggcgacgaaaccgctcctttcttcggcttcctcggtgccgctgcggccctcgtcttctcctgtatgggagcggcgtatggaacggcgaagagtggggtgggggtggcgtcgatgggagtgatgaggcccggactggtgatgaaatcgatcgtgcccgtggttatggccggagtgtttgggatttacgggtngattaatgcggttattatcagcactgggataaacccaaaggctaagtcttactatctctttgatggatatgctcatttggtcctntggcctttgcctgtggcctatcttggctttttgct

SEQ ID NO: 253259 - DNA, 496 bp, Glycine max
  unsure (1)..(496): unsure at all n locations
gggagctttttgtaagtgggggagatgagaaatgctatagcagagctatgacgtcgcatgcacgcgtacgtaagctcggaattcggctcgagatgccttgaaaaacttccccgaggatgcaatgaatccagatacattgttaccactggcttattctatcaagatatccaagcgtttagaagaattaaaacaagagtatgagaagaagaatggaaagataagacgatcaagagaactttctgaaaatccaatacttcctagtgtccagggcaactgaagcaggagcatatgcagacaacatttgctagacatgtaaaacttttggtaaagctgagaggacctccgagtaaaggtctatcttttctgctggaaagtaatccagtgtgaaaatcataccctcaaattctgttgttaccatatgttgcatactatgtacaattgtattagttgctcactcttggtcaaaattcagtgttnntaagaagcttcaatgaag

SEQ ID NO: 253260 - DNA, 494 bp, Glycine max
  unsure (1)..(494): unsure at all n locations
tgtggagtttttgattttgaaagataagtaattctcggacagactagcttgcatgcctgcacgtcgactctagaggatcccctcggtgaattccaattccacattttcaagaaataaggaggcaaaaatgttcatatatgaatcggaattatttgttttcttattaggcctatcctgaagccaaaggaaatgagatcggaattcctcggggaattccaattccacattttcaagaaataaggaggcaaaaatgttcatatatgaattggaattatttggcatcttattaggcctatcctgaagccaaaggaaatgagatcggaattcctcggggaattccaattccacattttcaagaaataaggaagcaaaaatggtcatatatgaattggaattatttgntttcttattaggcctatcctgaagcccaaggaaatgagatcggaatttctcgggggtaccgagctcgaattccctatagtgagtcgctttaa

SEQ ID NO: 253261 - DNA, 494 bp, Glycine max
  unsure (1)..(494): unsure at all n locations
gaggaaagggttttttgaagggganggagacgagataatactcgagctatgacgtcgcatgcacgcgtacgtaagctcggaattcggctcgagcagaaagcaaatattgcctattccgcaatatggcggaaaatgcttcgattgagctgaacaagtttgtgttcttttgtttgttggtgctaatacaagtggcagtttctgaaatcatttttgaagagcgttttgatgatggatggcgaggtaggtgggtgaagtcagactggaaaagcagtgaaggcaaagcaggttcattcaagcacacagctggaaaatgggccggtgatccagatgataaaggtattcaaacatccagtgatgccaaacactttgccatctctgcaaaaataccagaattcacaaacaagaacagaacattggtccttcagtattctgtaaaatttgagcaagagattgaatgtggtggaggttacatcaagcttctctcttgatttgtt

SEQ ID NO: 253262 - DNA, 502 bp, Glycine max
  unsure (1)..(502): unsure at all n locations
ngggaggctgnatgtacgatcaagcatgtatcagcagacctcatagaagagctatgacgtcgcatgcacgcgtacgtaagctcggaattcggctcgagctgtgtgcactctctctctgtctacaacaagaatgcatctatccatttcagcccatcagcatggcgaacgagaagaaccacttggacaacacgaacatgatgccatgcaatgcagacgaggctcacttgcgaggagtccagaagcgcccctggggccgatatgccgacgagatccgtgaccctggaaagaagacccgcgtctggctcggcaccttcgacaccgacgaggatgccagaccgcgcctacgacgtcaccgtcagaaacttccgtggccccatgagtcaaaaccaacttccccttactgcccgacaacaacatcaacgttaacctcaacatgaagagcaacaacgtttacgtgacatgtgacagtcccagccagagcagcaccgtggagtactcaacc

SEQ ID NO: 253263 - DNA, 492 bp, Glycine max
  unsure (1)..(492): unsure at all n locations
tgaggtgtgtataggggggggggcgtaagagaaaacttctagaagagctatgacgtcgcatgcacgcgtacgtaagctcggaattcggctcgagttcaaccccttttctttctctctctgtctttcgcactttcattctctcttaaaaatctaaatcccttttggtcttcatctttgcctctgacccaggtatggcttcgaaacgcatcctgaaggagctcaaggatttgcagaaggatcctcctacgtcatgcagcgcaggtcctgtggctgaagacatgtttcactggcaagccacaatcatgggacctgctgatagcccatatgcaggtggtgttttcttagtttcaattcattttcctcctgactatcccttcaagccaccaaaggttgcttttcggactaaggtgttccacccaaacatcaacagcaatggcagtatatgtcttgacattctcaaggaacaatggagcccagctctaaccatntnca

SEQ ID NO: 253264 - DNA, 491 bp, Glycine max
agaggatttattaggagttttgggggaatggtatactcatagaagtgctatgacgtcgcatgcacgcgtacgtaagctcggaattcggctcgaggttggagaagggcgcgatcgcgaatcccgatgagagtcgcatggtgggacactattggctgagggaccctaagcgtgcgcccaactcgttccttaaaacgcagattgagaacactctcgacgctgtttgcaagttcgctaacgacgtcgttagtggtaagattaagcctccttcgtctccggagggtcgatttactcaaatattgtctgtgggaattggaagttctgctcttggaccacagtttgttgcagaagcattggcacctgataatcctccactcaagataagatttgtggacaacacggatcctgctggaattgatcatcagattgcacaacttgggcctgagctagcttcaacacttgtgattgtgatatcaaagagtggaggtactcct

SEQ ID NO: 253265 - DNA, 524 bp, Glycine max
  unsure (1)..(524): unsure at all n locations
ntgtaagaaaggctcgatgtaataattaacgaatatataagcatcactctagaagagtctatgacgtcgcatgcacgcgtacgtaagctcggaattcggctcgagtacaagtatgtaggatgaagagctcatgaagaaggttgaggccaaaaacgctctggaaaactatgcatacatcatgaggaacaccgtgtaggatgacacgatcggtgataaactagtctcgactgtcatgactaagattgaggatgcacttgagcatgcgatcataatgatatacagcatccagcttgcacatgcagaagagtcagaggacaatgcgaaagaatcgcaaagcatgtgcagtccaattagcgccaacatgtacacaaggtggtgatgatccagacttgtgtggtgctggcgcattagacgatgagtgtactgctgctgcttctggcgtaagagaatgttgggtcaaaaatgacgcaatcggacttgatgtagaatcttgtacttcaaatccatgtgctcataacttagcc

SEQ ID NO: 253266 - DNA, 517 bp, Glycine max
  unsure (1)..(517): unsure at all n locations
agggaaggagagttcgtttgtgcgatggggggtaaatgtgatacactatagaagatctatgacgtcgcatgcacgcgtacgtaagctcggaattcggctcgaggggtgtttgaatctggtgaaggatgtcaattgttccaatcaaccagggtgatgccaacggctccaaccccttcgcttcgtggggtcaattcgtggattttcctctccctccttccatctccggcttcttccccggcttggaattcggattcggattcggatcatccgtgaacacacgtgtggactggagggagactcccagagcgcacgtgtggaagctggtgcttcccggcttctccaacgaggacgtgctggttgagctccaagacgagagggtgctccaagtcagcgtggagagcggcaacttcgtcacgaggtttaaggtccccgacaacggtaacctagaacaactcaaagccaacatgcgtcacggngttctcgttgtcactgttcccaagtttcatcaacccactac

SEQ ID NO: 253267 - DNA, 495 bp, Glycine max
  unsure (1)..(495): unsure at all n locations
ggggggggggttttgtatgggggtggaaggaatgctatagcagagctatgacgtcgcatgcacgcgtacgtaagctcggaattcggctcgaggctaaggcgggtcctactggcgatagaactcatgtgtccactcaagtaatgggtactcaaggatatgcagcacctgaatatgttgcaactggtcgtttgacggccaaaagtgatgtctacagctttggagttgtgttgcttgaacttctatccggaagacgcgctgttgataaaaccataaccggcatggagcagaatctggtggactgggcaaaaccatatttgagcgataaacgaagactgttccggattatggataccaagttggagggccagtacccacaaaagggggccttcacggctgccacacttgctctacaatgccttaacagtgaggccaaggcaaggcctccaatgacagaggttntagcaactctggaacagatagaggcccccaaaactg

SEQ ID NO: 253268 - DNA, 503 bp, Glycine max
tgtaaagtgatctagtcacgacaagaaactgttacgctaacctcatagaagatctatgacgtcgcatgcacgcgtacgtaagctcggaattcggctcgagtgattacttacaggaagggctcaaagtctggggcttcaatgacctgtgctggttgccagggtactggcatgaaggtgtctattaggcaccttggtccttctatgattcagcaaatgcagcatccttgcaatgagtgtaagggtactggagagacaatcaatgacagagacaggtgccaacagtgcaagggagagaaggttgttcaggagaagaaagtacttgaagttgttgtggagaagggaatgcagaatggacagaagattacattccctggtgaagctgatgaagcggtatgttgagctttgatgctgacactgtaccagattatggaaaactattttttgagctattttttgttttgcagcctgatacagtcacaaggggatatggtcttttgtcctac

SEQ ID NO: 253269 - DNA, 500 bp, Glycine max
  unsure (1)..(500): unsure at all n locations
gggggaagaggttctgaaaagtgagagggagaaaatgagagaacttctanaagatctatgacgtcgcatgcacgcgtacgtaagctcggaattcggctcgagctcgagccgcgcaaattacccaatcctgacacggtgaggtagtgacaataaataacaataccgggctcattgagtctggtaattggaatgagtacaatctaaatcccttaacgaggatccattggagggcaagtctggtgccagcagccgcggtaattccagctccaatagcgtatatttaagttgttgcagttaaaaagctcgtagttggaccttgggttgggtcgatcggtccgcctccggtgtgcaccggtcggctcgtcccttctgccggcgatgcgctcctgtccttaactggccgggtcgtgcctccggtgctgatactttgaagaaattagagtgctcaaagcaagcctacgctctgtatacattagcatgggataacaccacaggattct

SEQ ID NO: 253270 - DNA, 496 bp, Glycine max
  unsure (1)..(496): unsure at all n locations
ggtngtgggctgctttagcgggggggggaaaagggagacctcatagaagatctatgacgtcgcatgcacgcgtacgtaagctcggaattcggctcgaggtcgtcgttccactcaactttcagtggctatggctccaccgcctccgcagtctcatcgatcgccctcaccgtcgcaaccgtcagggaagagtgaagtctccgatctgaaatcgcagctccggcagcttgctgggagccgagctccgggtgctgatgattctaagagggatctcttcaagaaggtgatttccaacatgactataggtattgatgtctcatctctatttggcgagatggtaatgtgctccgcaacgtcagacattgttctgaaaaaaatgtgctacctatatgttgggaactatgctaagggcaatcctgatcttgcgcttttgccgataaatttctacaaggagatggcaaggatgaggatccaatgattcggggactagcattgagga

SEQ ID NO: 253271 - DNA, 512 bp, Glycine max
ggaagaaagcgtttattatgataggggagaaatagcatcactctagaagagctatgacgtcgcatgcacgcgtacgtaagctcggaattcggctcgagggttcacttacatttaaaactccagataatgtaaagtatccatccatgaatcttgcctatgctgctggccgtgctggaggcacaatgacaggagttcttagtgcagcaaatgagaaagctgtagagatgtttattgatgaaaagattagctatttggatatattcaaagttgtggagctaacatgtgagaagcatcaaaatgaattgttatcctctccttcccttgaggaaatcattcactatgacctgtgggcgcgagaatttgctgctagtttgcaagactcttccagcttcactcctattcttgcatgaggatatgattaaactagggatgtggctgctggtgcttcccaattgcctgctttcaccataatttcttcaggcaattgaacaatttagaatgatgcattccct

SEQ ID NO: 253272 - DNA, 517 bp, Glycine max
  unsure (1)..(517): unsure at all n locations
agggaaggaggttttgacttgtgggacgttggggtgatgtgaacactccnnnnnttnnngacgtcgcatgcacgcgtacgtaagctcggaattcggctcgagagacattgaaagtgcatattgggaacttgtagtgaaggatatccaagatgcttgcaaattatttgaaccaatctatgatcaaacagatggtggtgatggctatgtttctgttgaagtatctcccaggctcgctgatgacactgagggaaccatagaagctgcaaaatggcttcataaagtggttgatcgccccaatgtgtatattaagattcctgctacagaggcatgtgtgccttcaattaaggaagttattgctaatgggataagtgtgaatgtgacgctgatattctctcttgcaagatatgaagctgtaatagatgcttacttggatggtcttgaggcatctgggttaaatgacctgtctagagttacaagtgttgcctctttctttgtcagtagagtggacactctcatt

SEQ ID NO: 253273 - DNA, 519 bp, Glycine max
  unsure (1)..(519): unsure at all n locations
ntgggagaagagcgtcgtgtatggaatgggggggaatatgggaaacactatagaagagctatgacgtcgcatgcacgcgtacgtaagctcggaattcggctcgagcggctcgagctgaatgttacccaggatatcaagaatataaccgtgagatagtggacagtgatgatgaagacgacttgtccaaaatggatatgggtggaagggcaaagggtcgtcttcatagatgggactttgaaactgaagaggaatgggcaacttacaatgagcagaaggaagcaatgccaaaagctgcattccagttcggtgtgaagatgcaagatggccggaagacccgaaagcaaaacaaggaccagaagctcaataatgatttgcacaagatcaataagatacttgccagaaagaagatggaaaaggacacgaatggtgaggggggtaaccattatgatgatgaaccaacacctggaaagaagcttacaaatatgaggtctagtaccacattgtaatgtttatagaatg

SEQ ID NO: 253274 - DNA, 520 bp, Glycine max
  unsure (1)..(520): unsure at all n locations
naggggaagcatggtnnnnnttttgaanctcttggcttttgtgaaactctnnaagagctatgacgtcgcatgcacgcgtacgtaagctcgggatttcggttgggctctacccgttcaagccgcattctaaagaatcatttggggacttaaaaaaccgaatgggatttgagaagcttaaagaatatattgagaaatgggagggtccagtggtagcaccatcacgccacaacctcaagctttttgctgacaaggagacatatgaatcaatggatgcattagcaaagcttcaaaacaagactgctcatcagttggccatggaagttatccgtaattatgttgcttccaaccaaaatggaaaaggcgaatgatttcatttttacttaacngaaggagatgtatgtgatgttgctntatngctgacaggaatggtggatatgcaacttgacacaaactctgtgntactgtggtgtaaactcggttcgacttaactaatgtttgggttttggttttttatccgaaa

SEQ ID NO: 253275 - DNA, 543 bp, Glycine max
taggtttgattaaagacatatatagtatcactctagaagagctatgacgtcgcatgcacgcgtacgtaagctcggaattcggctcgagcaaaacttatggttgagcctttttttgaggttttcagcgctgctttctcacaatggttcttcagaatgatattgatttgctgaatcctccagctgagttggagaagagaaaacacaaactcaagcgtcttgttcagtcaccaaactctttcttcatggatgttaagtgccagggatgcttcaacataacaactgtgtttagccactctcaaactgttgtggtgtgcggaaactgccagactgttttgtgccaaccaacagggggacgggcgaggttaaccgaaggttgctcatttaggaagaagggagattgaatggtttgttaaccagacttttctttgtcaatgatttgagattttcggttgttaggtttttgagatggaatcaatttcagttatgggatattaattttggtaaaatgtaagacaatattatctcagacttttacaaagggtt

SEQ ID NO: 253276 - DNA, 540 bp, Glycine max
  unsure (1)..(540): unsure at all n locations
tagtcntgaaagaggggtgaacgagacaagtatagctcagctatagacgtgacatgcactcgtccctaagctcggaattcggctcgagaacaaaacaatttagaagaagaaaggaatatgggtggagggtcattccaaggaacccttggcacggtggcgaaagcttttcagcgaggaaagccgacctggggtggtgtcgcccgtcgcaaagataaaacagctgacggcggagctggatcccgtcaccgcatacgggtcgacgccgtttaacccggacgagaggatccgaaccgggttcgcccacttcaagaacgagaaataccagaagaacccggaattatatggcgaacttgccaaaggccagagtccaaagtttatggtttttggctgctcaaactctcgagtttgcccattccacattctggatttcaaatcgggtgaaagctttggggtcgaaatatcgnccacatggtttcaccatttgacaagaccaagttttcaagaacccgggcgggcattgtatattcgcattttaattaa

SEQ ID NO: 253277 - DNA, 536 bp, Glycine max
  unsure (1)..(536): unsure at all n locations
acgttgattcagccccctacgtanttcattntctnntnngactannnatccacgcgcacgcgtacgtaagctcggaattcggctcgaggtggtttcagtgagtgatcggtgttcacttgatccgtcataagtcgtcatcatcatcatcatcatcaccgttgattgaagaagatgccgatcagaaacatcgccatcggaaggcctgaagaggctactcaccccgacacgttgaaggcggggttggctgagttcatctccacctgatcctcgtggtcgcccgttcaaggtccggcattggctacaacaagcttaccgacaacggcgccgtcacttccgtcgggctcatattcgctttcatagnccatgcgttcggcctcttcgtcggcgtgttcgtcggcgccaacattttcggggggccagttaaacccggcgtgaacttcgggggcttcctggggcggaaacataacctaactccggggattcgtatacgtaatcgcccaaattctgggttccatcgggggctccctcctcctggc

SEQ ID NO: 253278 - DNA, 547 bp, Glycine max
  unsure (1)..(547): unsure at all n locations
aagagggtattacgagggagatatacagcatcactctagaagagctatgacgtcgcatgcacgcgtacgtaagctcggaattcggctcgagacactttcgagttcgaactaagaaaaaaaaaaaggaaaacaaaatggtttcgtgggtgagaggcaagtgcgtcggtaacggcgcgtttggggttgtgaacgtggcgatttcgaaaagagataatcgcgttttcgcggtgaagtccgtggattgtggaagggggctttctggtcatcaggtggaggcgttggagaacgagattgggattctgaagcgggtggcttcgccgcacgtggtggcttatctcggagacgatgtcacgtgcgaaggaacggcgtcgttcaggaatcttcatctggagtacatgccaggtggcaccgtcgctgacttggaccgcgctgacgtggacgagcggttagtgaggcgctttgcgtggtgcctcgtgttcgcgctgcgtgacgttcacgcgcaaggcttcgtncactgcgacgtgaaaaggaggaacatgcttttctc

SEQ ID NO: 253279 - DNA, 502 bp, Glycine max
  unsure (1)..(502): unsure at all n locations
gagaagganctgtattttnttatgtggatatatgagatcactctagaagagctatgacgtcgcatgcacgcgtacgtaagctcggaattcggctcgagtggaaagaaagtattgagcatggcaccgggactagagcgtgtaaacattcttcctttcagggttgctgcatatgacaagactcagggtaaaatggcattctttgacccttcaaggcctcaggacttcctgttcatatcaggcacaaagatgcgcacactggcaaggaacaaagaaagtcctcctgatggatttatgtgccctggtggatggaaggtgctggttgattactatgatagcttagtactctcaagcaacggcaaagtgcaggaagctgttccagcttaatcttgtatcatatcataatgtatatatctcatgattgggagaaaccttaagcttatgtattctcctgctaagacatacttcacgaggatcctctggcccaatctaataataataataa

SEQ ID NO: 253280 - DNA, 515 bp, Glycine max
  unsure (1)..(515): unsure at all n locations
gagtatgggncgtaggatctgagcactgcatatantgtcactctctagaacagtctatgacgtcgcatgcacgcgtacgtaagctcggaattcggctcgagacctacctctttttcttctctctcaacaacttcaccttggtcctcctcgatcatgtctcacttcaagggcaagtaccatgatgagcttatcgccaatgctgcgtacattggcactcctggaaagggtattcttgctgctgatgagtcaacagggacaattggcaagcgtttggccagcatcagtgtagagaacattgaatccaacaggcgagctcttagggagctgcttttcactgctcctggtgttcttcaatatctcagtggtgtcatcctctttgaagaaaccctctaccagagcacagctgcaggcaagccctttgtgaatgtcttgaaagaagctggtgtgcttcctggcatcaaggttgacaagggcacagtcgagcttgctggaactaatggagaaaccaccactca

SEQ ID NO: 253281 - DNA, 505 bp, Glycine max
  unsure (1)..(505): unsure at all n locations
aagggagggncgtggaatctgagacatgacataaccgctagcatcgtaacactcatagaagagctatgacgtcgcatgcacgcgtacgtaagctcggaattcggctcgagcttcaataactaatgacatagctgttactgctgctcgaaggaagggtgaaggatgacccaaatatggtttcttgccattatctatatcatagcaggggttcctggagcatatgttctgtggtatcgcccattatatcgtgcttttaggaatgaaagtgctttgaaatttggatggtttttcctgttttatctgcttcacataggattctgcatcttagctgcagttgctcctcctatagttttcaaaggcaaatccctgacgggcattctggctgccatagatgtgctgggcgaccatgctttgatcgggattttctacttcgttggatttggattattctgcattgaaacgttgatcaacatttgggtcatttcacaagtatacatgtacttcc

SEQ ID NO: 253282 - DNA, 537 bp, Glycine max
tagatgtgtgtagggggggggggggaaggtatcctcagctatgacgtcgcatgcacgcgtacgtaagctcggaattcggctcgagccttccttttccttccttaccacctcttttcaacctaacccttttcccgagcggcccttttttttccttaaggcgcccttggacaactggcggtcccttggcggtcaaggcctcttcagggaggcttcggctggtgggaaccccggaccgggtttcggagccgaagctgtggttggccaggaggttattcacggtgaactatctgattacattgggaagaaatatgttgtgctcttcttctacccgttggacttcacttttggttgtgccacagaaatcactgctttcagtgaccggcatgcagagttcgaggcactaaatactgagatattgggtgtttcagttgacagtgtgttctcgcaccttgcatggatccaaacagatagaaagtcaggtgggcctggtgacttgaattatcctttgagttctgatgtcaccaaaaacatatggaa

SEQ ID NO: 253283 - DNA, 548 bp, Glycine max
  unsure (1)..(548): unsure at all n locations
ngaggttaaagtgtgaaaaaagaactatcagtatactcagcagagctatgacgtcgcatgcacgcgtacgtaagctcggaattcggctcgagggcctcttttcatatccaaaaatcaatccctgggcctgggcctggttttgcggacaactttgttaaaccctcccatggcacacttttttcccaattttaatgataaagtttgccctaaggatttgccggtattaagtcactgggttcaacatgcattatacgtgagcgacgcatcggagcatctattctgcgcttgcatatccatgacagtgtcgtgaatgggtgtgatggatcaatatagctagatgacacccgtaacttcactggcgagaagactgcttngtcaaatcttaattcagtcagaggtttatctgtggttgatgaaataaagctgctgtagacaaaagctgatacgccatgtgggctcatgtgcaaatatcttggccattggaggccctgattctataggccttatatgtgggtccacactatggtaccaagtattgttgtgcagaa

SEQ ID NO: 253284 - DNA, 545 bp, Glycine max
  unsure (1)..(545): unsure at all n locations
ataactgtttagaagaagggcgggtggaaaggtaatactactagaagagctatgacgtcgcatgcacgcgtacgtaagctcggaattcggctcgaggtgatgcccaaaccgagaccacttcgaaagagcgaaacgcagtgttagcattgttcctcaacaaaaaaaaaaaaaaaaaagaagaaaaaagactcagttgtgtatcgttgcagctctactagctagggtttcgcaagtgcgatcgaagaagaacgatggcgatggctgctgctctgcgtcgcgaaggaaggcgtttgacccaaccaatcaacgccctccgttcctctctcatctctcaagaccaatcccctcatggcgcgcgcttcatttccactcaagtggtgagaaaccgaatgaagagtgtgaggaatatccagaagatcaccaaagccatgaagatggttgccgcatccaagctgagagccgttcagaccagagctgaaaattcccggggcctctggcaaccgttcaccgntcttntgggggacaatcccaatgctgaagttaaa

SEQ ID NO: 253285 - DNA, 504 bp, Glycine max
  unsure (1)..(504): unsure at all n locations
gagtaaggngcttagagtgtggtttgagtggagttgggggggggaatgagtatagctctatgacgtcgcatgcacgcgtacgtaagctcggaattcggctcgaggaataatgatggatcactgaaaatctcaggagacagcttggagaatgtgtacaaatcatatgtgacagattatccaattgtgtccattgaggatccatttgatcaggatgactgggagcactatgcagaattaacagctgaagttggccagcaggtgcagattgttggtgatgatctccttgtcaccaacccaaagcgggtggagaaagcaatcaaggagaaggcttgcaatgcccttctgttgaaggtgaatcaaattggtagtgtaactgaaagtattgaagctgtgagaatgtctaaacaagctggttgaggtgtcatggctagccacaggagtggtgaaactgaggataccttgattgctgacctctcagttggattagaactagtcagatcaaga

SEQ ID NO: 253286 - DNA, 555 bp, Glycine max
  unsure (1)..(555): unsure at all n locations
tagaagtgttaaactaagaatagttagtatggctacttcagagctatgacgtcgcatgcacgcgtacgtaagctcggaatttgggctcgaggtccacacgcttgtgggccccaaccctgaaggccaaggtgtggaggatcaccccggttcaaaggcaaccccggtccgggcagaaaaccccgtttcagggncttcgtggtcgtcgggcgacatcaacggccacgtgggtctaggcgtgaagtgcagcaaggaagtggccaccgcaattcgtggcgcgattattctcgcgaagctttcggttattcccgtgaggaggggttactggtggaacaagattgggaagccccacaccgttccgtgcaaggttaccgggaagtgtgggtccgttaccgttaggatggttcccgcgcctaggggttccgggattgtggcngcttagggttcccaagaaggtgctgcantttgctggaattgatgatgttttcacctcctccaggggatccaccaagaacccttgtggacttcttttaaggcgtctcctgaatgggtcgagaa

SEQ ID NO: 253287 - DNA, 556 bp, Glycine max
  unsure (1)..(556): unsure at all n locations
gggttttaggagttgagtaaaagactatcagtatgctcttcagagctatgacgtcgcatgcacgcgtacgtaagctcggaattcggctcgagccgatgccaagttggttggtccgaggaaccaggccaagttgttaaggatccagtgggaaccttaggaaccagtggcttctttctgtcctgaaaacaaggttatgggaactatacaggaataaatgtgagggcccccatgaaatacaggaatactgcaagggttgatcagcggatcaggatttgggggttcatttttcttactgttttgtgtttatgcaaccagtttctacgcangagctagacttgtggatgctgtgaaggcaacattctcagatgttttccgggttttctttgcattaactatggcagctattggagtttcccaatcaagctcctttgctcctgactcaagcaaagccaagtcagctactgcttncatatntggaattattgataagaagtcaaagatagatcctggtgatgaatctggtatcacactgggcaacgtttaaggagaaaatttc

SEQ ID NO: 253288 - DNA, 549 bp, Glycine max
  unsure (1)..(549): unsure at all n locations
ngggtttggagttgtttaacgaggggggtggaacggcatcactctagaagagctatgacgtcgcatgcacgcgtacgtaagctcggaattcggctcgagctcgagccgaatcggctcgaggtggagttggtctcaatggaggcttcaacaaaggaatttactccaagcctggttttgccaatcttaacaacaatattaacctgaatatcaatcctaagggacacaagttcaaggatgaagatgagctttttcacccatccaaaccttccaagaaaaacaacaacatcaacaaaaagcatgggggcaacaccaataacgatgataacagcaaggattccaaggctgctggcgacaagagattcaaaacgctgcccccagcagagtctcttcctaggaatgaaaccattggaggctacatctttgtttgcaacaatgataccatggctgagaatctcaagagacaactctttggtctgccttcacgatacaaaaattctgttcgggccattactccggggttgccccttttcctttacaaatattacactc

SEQ ID NO: 253289 - DNA, 554 bp, Glycine max
  unsure (1)..(554): unsure at all n locations
ngggtttaggagaggttttactgaggagagtatacgagatcactctagaagagctatgacgtcgcatgcacgcgtacgtaagctcggaattcggctcgagcaaagaaggaagagatagctgctaggacatctttagtcatctcagcattgcaaggattggctggtctgaaaaaggattcattcaggaggtatattccacggttctttcacttactggtagatctcgtgaggagtgaacacacctctggagaagttcaacatgccctgagtaatatgttccgttcacctgttggccaaattataatggattgagttttagttttggcatactttggttttggacgttgctgaatatcaatcagcattttccttataagctaaagaacgagccattacatggtcatatcttgatttactcaccattgttgtgtagtgttactcttggttttttgtgattgtatgtgctattaatgtaaatgataaatttatttcaagcagaatactcaaagtccccanattggtaccgagaaaactctttttgcggcccccgttga

SEQ ID NO: 253290 - DNA, 550 bp, Glycine max
tagagtttaaactgaacagaactgtattagcatcactatagaagagctatgacgtcgcatgcacgcgtacgtaagctcggaattcggctcgagtgaagtggaagcagttgctaaaaagaatggaacagatgaaagttccattgaggatgagaaagaagagttgcctgagccagtaccagaaccaccaaaattggttcgtatggcaaatctgtgtgtcgtaggtggtcatgcagtgaatggggttgcagagatacatagtgaaattgtaaaagatgaagttttcaatgcgtactataagtagtggcctgagaagttccaaaacataacatatggtgtgacaccaaggagatggatcatgttctgcaatccagatctgagtaaaataataaccgagtggataggcactgacgattgcgtcctaaaaaaaagaacaaagggcggccgccgactagtgagctcgtcgacccgggaattaattccggaccggttcctgcaggcgtaccagctttccctatagtgaagtcgatttgagcttggcggaatcatgggg

SEQ ID NO: 253291 - DNA, 515 bp, Glycine max
  unsure (1)..(515): unsure at all n locations
gagtgagggcgtcaagtttgcatgatggacgggagaaatatgtagaactagctatgacgtcgcatgcacgcgtacgtaagctcggaattcggctcgagaaaaaaccacagttttgaaacacacacagagaaacagagagattcttccattactacaaaatagaaaaataaaacttcaattgcaccttttggtgtctttttcaattctcatcccaattggtgttcatttccccaattttgaccctttgtgatccttttctcaaatctcacactttgtttggaatctgggaaaaatggggttgttttctgggatatttctggggatggtactgggcatagcattgatggctgcgtggcaacgcatgatgacgtaccgtagcgccaagagaattgcaaaggcagttgacattaaactccttgggtcccttaacagagatgatttaaagaaaatctgtggggataattntcctgaatggatatcttttgccatatatgagcaggtgaaatggcttaacc

SEQ ID NO: 253292 - DNA, 544 bp, Glycine max
tagaacgctttgtcaccgactaattgcctcgctctatcatagctatgacgtcgcatgcacgcgtacctaagctcggaattccgctcgagcctgaacccttttcgctccgggaattcctcctaaggaattgggttgtccaggtttccttcctctccaatcaaggtctgctacctgcggctacttcttcttctccttcacccttctcttctcccttcttctccttcctcgtcttcatctccaggatgaagccctggtgtaactgcgatctttgcaagagctacttgactgcgagttggctgaaaaagttccccaatctctgcgactagtacactcatctcttgcgtaaatccccaaccggcaccatccacgttcacgtgctggggaacaccatcacctcgaatccccacaacgtggagcacattctcaagacgaatttccaaaacttccccaagggaaaaccgctcttcaccattctcggcgatcttttgggaagaggaatcttcaacgtccactgcgaatcgtggaaattccaacgcccgatggt

SEQ ID NO: 253293 - DNA, 546 bp, Glycine max
  unsure (1)..(546): unsure at all n locations
aggaaggtgtctctgtacaganatgatagncatcaccatagaagagctatgacgtcgcatgcacgcgtacgtaagctcggaattcggctcgagaaacaacacagtttttcttgtctctatattcttccggccacgcgcagatggcggcggagcacgacagctgctgctcgcgctgtgtcaccttcctaataaccataggcctcacagcgctcttcctatggctgagtctccgcgttgacgaaccaaaatgctacctcgactacatttacgttcctgccctcaacaaaaccctaaattccaattccactcacaacaaaaacaccacaatactcttcgctctcaagctcaccaacgggaacaaggacaaaggcatccaatacgacgacgttctcctctccttcagagtcttcgagagcgtcaacctcacgcgcccactcggcaacgccaccgtgcaaaggttctaccagggccaccagaagaaagccaccaagcacggaaacttcatcggcggcggcggaaacctcatccccgggggggctggtagaa

SEQ ID NO: 253294 - DNA, 551 bp, Glycine max
  unsure (1)..(551): unsure at all n locations
nggtttagtagttctttacgaggagggtggatagcatcactctagaagagctatgacgtcgcatgcacgcgtacgtaagctcggaattcggctcgagattatactctgcgaaataatttttgcgtttcattgtcttatgaattagcatggcctttgccgcagttaaagtgttcatgatattggggcttttagccaccgcgtgtgtagcacaagcccctggacctgcacccacgcaaccaccatcaacatccccatcaccgtccacgtcagcacccgccccatcaccaaccgcatacacccctcctcctgcggctgcacctgcacccgcaacacccacacccacacccgctccttcatctccaactccaacaacagctccatcccaggccccaggcccaaccaccttcttccctgccgcgccaggcccatcaggcccagcaccaggcccatcaggcccggctccagaccaaccagtcttcgagccttccttcgcagcgttctccataagcaagacatgcattgtcgccactgctggttttggaagcaacctc

SEQ ID NO: 253295 - DNA, 549 bp, Glycine max
taagaggatcttacgaaggagggtagatcagcatcactctagaagagctatgacgtcgcatgcacgcgtacgtaagctcggaattcggctcgagaaataatttcattcttcagcttcttattactttgtatctgtgtgtatatttgaaaatgaagaatatgaatatgaaactaaacaccattgcattgataattgccattgcattttctgtgtggtcttcaagctgcacagcagcacgtgtcagccactggaggaaactgaaagctgctgcatctgctacttcttttaatgtgttagactatggtgctaaaggtgatggacatgcagatgatacaaaggcctttgaagatgcatgggcagctgcttgtaaggtggagggttcaacaatggttgttccatctggttctgtatttttggtgaaaccaatctctttctcaggccctaattgtgagccaaacatttgttttcagttggatggcaaaatcattgcacctacaagctctgaaacttgtggctcttgtaccctttaacagcgtgtagtctctaaaa

SEQ ID NO: 253296 - DNA, 510 bp, Glycine max
  unsure (1)..(510): unsure at all n locations
gagggaggggcttaggtctgcaaatagaaagtaagggagaatcatgctagaagcagtctatgacgtcgcatgcacgcgtacgtaagctcggaattcggctcgaggaagcgattgttgcaaatttcctcggattaagcgctttggattcgagcaaaccgataattggatcctccggtgcaataccgttcctagttagaaccctaacgaatttaaacgatagtaaaagcacgtctcaatcccaatcgcaagtgaagcaagatgctatgcgagctttgtacaatctctcgatctgtcagagcaacgtttcagtagttttggaaacagatttggtttggtttctagtgtccacaataggagacatggaagtgagcgagagaagtctcgcgattctgagcaatttagtgtcgactccgganggtagaaaagcgattagcagcgttcgcgacgcgattcccaatcttgtggacgcgttgagttggacggactcggcggagtgccaagaaaaggcgt

SEQ ID NO: 253297 - DNA, 511 bp, Glycine max
  unsure (1)..(511): unsure at all n locations
nagaagggctcaggttgaatgggaagagagggaaatattgtanaacagctatgacgtcgcatgcacgcgtacgtaagctcggaattcggctcgagtctgtgtttgcggctgaggattccgaacgagtgaccttgttcgtttctcgcaaagtttaagtaatcatgggtaaggaaaaggttcacatcaacattgtcgtcattggacatgtcgactctgggaagtcaactaccactggtcacttgatctacaagcttggaggtattgacaagcgtgtgattgagaggttcgagaaggaggctgccgagatgaacaagaggtcattcaagtatgcctgggtgctcgacaagctcaaagctgagcgtgaaagaggaattaccattgatattgctttgtggaagtttgaaaccaccaagtactactgcacggtcattgatgctcctggacatcgtgactttatcaagaacatgattactggtacctnnccagccgactgtgctgtccttattattga

SEQ ID NO: 253298 - DNA, 508 bp, Glycine max
  unsure (1)..(508): unsure at all n locations
nagtgagggcgtcggatttgcatgtggagacgcggggaaatctgtagaagcagctatgacgtcgcatgcacgcgtacgtaagctcggaattcggctcgaggcggaactcgccggtggcgcacgccgtcggattttgggactaccagtcgttcatcgccgctgccgcgcttttcgagccgcaagggttcggcaccaccgggaacaagacgatgcagatgatggagattgcggcgttcctcggacacgtcggcagcaagacctcttgtggttatggagtggctaccggaggacctttggcctggggtctttgttacaaccatgaaatgagtcctatgcagtcatactgtgatgactacttcaaactcacatacccctgtacacctggtgctgagtactatggtcgttggagctattccccatttttgggaactacaactatggggctggttgaagaagctttgaaaatcgacctactcagccatccagaatacatagagcaggatgccac

SEQ ID NO: 253299 - DNA, 513 bp, Glycine max
gagtagggctcaggttgaaagagacgtgcggggaagactgtagaactcgctatgacgtcgcatgcacgcgtacgtaagctcggaattcggctcgaggctgaaacttttggattaaacattcatggtcggccaaaaggcaccatgtcgagtccaaggccgacgccggagcctacaaaacctaccctcagcaagccggtaccatccgcaagaacggctacatcgtcatcaaaggccgtccctgcaaggttgtggaagtttcgacttccaaaactggaaagcacggtcacgctaagtgtcactttgttggaattgatattttcactgccaagaaacttgaggatattgtgccctcttctcacaactgcgatgttcctcatgtgaatcgtactgattaccagctcattgatattgctgaggatggatttttgagtctgcttactgaaaatggtaacactaaggatgacctcaagcttccactgatgagagtctgctcactcagataaaggatggatt

SEQ ID NO: 253300 - DNA, 543 bp, Glycine max
aggaagtgtggtaaagaatgtatagttatgctcgtacagactagcttgcatgcctgcaggtcgactctagaggatcccctcggggaattccaattccacattttcaagaaataaggaggcaaaaatgttgatatatgaattggaattatttgttttcttattaggcctatcctgaagccaaaggaaatgagatcggaattcctcggggaattccaattccacattttcaagaaataaggaggcaaaaatgttcatatatgaattggaattatttgttttcttattaggcctatcctgaagccaaaggaaatgagatcggaattcctcggggaattccaattccacattttcaagaaataaggaggcaaaaatgttcatatatgaattggaattatttgttttcttattaggcctatcctgaagccaaaggaaatgagatcggaattcctcgggggtaccgagctcgaattccctatagtgagtcgtattaaattcgtaatcatgtcataactggtttctgcgtgaaaaaattattcgcccacc

SEQ ID NO: 253301 - DNA, 544 bp, Glycine max
tagaatggttaagaggggaggtggtaagctatactcgagctatgacgtcgcatgcacgcgtacgtaagctcggaattcggctcgagggtgaagatagctcttggtaccttggatgactcttttaacggtggctctcttaagggttatttcgcaaaggtccacgccactctgaatttcgtggtcgctggtgttggatcaaccatcggttaccacgagcctaccaaagatgccgccttggatccaacggggctggtggcaatagctgtggcacattcctttggaacggttggagggggcttcgttggcggccacatcctaagggggcatttggacccaacttgcaattttggaatggcccatggaagccaccataatcttaataacgggttcctaatacggaatggcccaattgttgggttctatagacgaatgcctcctcctcaatttggttaacggttagaacctttccaggcacattgccggctaatggggtgaacaattggcaaactgtaaggtttgagaatatggtcacaatttggggggg

SEQ ID NO: 253302 - DNA, 542 bp, Glycine max
  unsure (1)..(542): unsure at all n locations
nagaagttgtaaaggggggaggaaggtaagctactactcgagctatgacgtcgcatgcacgcgtacgtaagctcggaattcggctcgagctcgcaagccaaaaggaaggatcccaagccaaggaaaagaaggaagggaaaggaccaggtttgtccgttggaaccgaccaattcccccagaggacagccatttggaacggcggtccaaagccaaaacaacggcaaggactaccagaacccggtcccggtcccgttggttgacccgacggagttaacttaatggtcgtttaacaaaacagggttagcaaagtttgtggccacttttctgtttctctacatcactgtcttaaccgttatgggagtcgccggtgctaagtctaagtgtagtaccgttgggattcaaggaatcgcttgngccttcggtggcatgatcttcgccctcgtttactgcaccgctggcatctcanggggacacataaaccccgcggtgacatttgngctgtttttggccaggaattgtcgtttgccagggcgatttctcac

SEQ ID NO: 253303 - DNA, 544 bp, Glycine max
  unsure (1)..(544): unsure at all n locations
nagactggtttaacgagggaggatgtacggtatactctagaagagctatgacgtcgcatgcacgcgtacgtaagctcggaattcggctcgagaaactgcagagacaacatgttggtgctgaaagaaggactagagaaaacagggagattttcaattgtgtccaaagacaatggagtgcctttggtggcattcacactgaaagaccacacccactttgatgaattccaaatctctgacttcttaaggcgctttgggtggatagtgccagcatacaccatgcccccagatgctcaacatgtcacagtgcttcgtgttgtcatcagggaggacttctcgaggactctcgcagagcgcctcgtggccgatgttgagaaggttctgcatgagcttgattcacttcctgctagggtcataagcagcactagtgtgacagtcactgctgaagaaaatggcatggtagtggttgctaagaagagtgctatggagactcanagggaaatcacttgcatttggaaaaagttgtgttgagaaggaaaagaaccat

SEQ ID NO: 253304 - DNA, 548 bp, Glycine max
  unsure (1)..(548): unsure at all n locations
nagaagtgattttacgaagaggggtagaacggatacactctagaagagctatgacgtcgcatgcacgcgtacgtaagctcggaattcggctcgagaacacattgaacagtacttcagtcaagttgttgccacacatggctctgctaggaatttgcctcaatcgtgcacttcaagacttagcccaaggctgtgctttttcccacaatatttggtgtcacgtatcactacaccaatcttctttgtaaacgcggcttacgactcatggcagattaagaacattttggcaccgggtgttgctgatcctgaaggccattggcatagctgcaagcttgatataaacaactgctcacctgatcaacttgatctaatgcaaggcttcaggacagaatttttaagggctataactgtgctaggcaactcttcatctaaaggaatgttcatagactcttgctatgcccactgccaaactgaaatgcaagagacatggttgagaaatgactctccagagctgaaaaagaccacaatttgcaaggctgtagcagaatttt

SEQ ID NO: 253305 - DNA, 558 bp, Glycine max
  unsure (1)..(558): unsure at all n locations
tgtgtttagactagttgaccgccgatcgcatcactgncagcaccatataagagctatgacgtcgcatgcacgcgtacgtaagctcggaattcggctcgagctctttttgtttctagaattctcagatttgcggcgcgagaggattcagctgccaatacccggcatggcaccattcaccatgggccagcatcgcgtcgatcagtaccagcatcctacgtcgcagcaacaactaccctacgtcatgatgccgacgcaggcccaggcccatcaggccatgtgagccctctccgaccagccttcgcctcagcagcaggccgacagcgccgactaggtccgaaccctctggatcggcgatctgcagcactggatggactagaactatctctatacctgctttgctcacaccgtcgaggttacatcggttaaagtaattcgaagcatgcaaactagccaatccgaaagttattggtttattgagattaatagtccatctggaactgatagaattcttcaaacatttaatgggggaattatgcccaatggggggcatagttttaa

SEQ ID NO: 253306 - DNA, 501 bp, Glycine max
agtagacctaggattgacattgaaagaagacaagatcgtacaagctctatgacgtcgcatgcacgcgtacgtaagctcggaattcggctcgagcgtaaaggttatggaagtgcagctggattgctggacattcggaatttgcttgcatgagctattatatggtaaaaccccattcaaagggtcagggaaccgtgctacgcttttcaatgtacttggtcagcaactcacgtttcccgaatcaccggcaaccagttatgccagcagggatctgatccgtggcttgcttgtgaaggagccacagcatcgtcttggggttaaaaggggagcaaccgagatcaagcagcatccgttctttgaaggtgtgaactgggcgttgattaagtgcagcacaccggccagagttcccaaacctgtggaaaatgaaataccaaccaggaagggtggtggaccatgtgatccatgtggcgttggcagcactagtacgaggatcgtacgtactgc

SEQ ID NO: 253307 - DNA, 517 bp, Glycine max
  unsure (1)..(517): unsure at all n locations
nagtgagggcctcggggtgtgttaggggagacggggggaaatattgcaaaaccgctatgacgtcgcatgcacgcgtacgtaagctcggaattcggctcgaggtcgaaaccgtggctataccctgctccaacctatcgaacgatagagaccttctgggtcaccgatgaagacgcacccggccctcgctgtggccacaccctcaccgccgttgccgccaccaagactcaaggcccccgcttgatcctattcggcggcgcaaccgccattgaaggaggatcttcctctgcccccggcattcggttagcgggagtcactaataccgtccattcctatgacgttcaaagtagaaaatggactagtatcaaacccgccggagagccgccgtctnctcgggctgctcatgctgctgctgcagttggtaccatggttgtttttcagggtgggataggtcccagcgggcattctaccgatgatctctatgtgctggactngaccaatgattaatacaaatggcata

SEQ ID NO: 253308 - DNA, 513 bp, Glycine max
  unsure (1)..(513): unsure at all n locations
nagtagtncttagattgactattgaataaaagttagtatgctaagagctctgcgagcatgcatgcacgcctactttagatgataatttggctgaatgtcaatactttatcntttaacgaaatataggacgctataaatgtggtatatacgatattggaatcaacgagttaatactataaagggctattctgtaaccacaggaaatgagatcggaattcctaggcgaattccaagtccacattttcaagtaataaggaggccaacatgtacatatatgaaatggaattatgtgttctgttattaggcctatcctgtaactaatggaaatgatatctgtaatcctcagagaattccaattactcattttcaagacataaggaagccaaaatgttcatatattaattgtgattatatgggaacttattacgccgattctcttacccaagggaatgggatcggaaatccttcgtggtaccgaacttcaattccctattgtgagccggattaaaatca

SEQ ID NO: 253309 - DNA, 548 bp, Glycine max
  unsure (1)..(548): unsure at all n locations
taagaatgtgagtttccacgcctaantgntacgncatatcagagctatgacgtcgcatgcacgcgtacgtaagctcggaattcggctcgaggtggtttcagtgagtgatcggtgttcacttgatccttcatgagtcgtcatcatcatcatcatcatcaccgttgattgaagaagatgccgatcagaaacatcgccatcggaaggcctgaagaggctactcaccccgacacgttgaaggcggggttggctgagttcatctccaccttgatcttcgtgttcgccggttcaggttccggcatcgcctacaacaagctcaccgacaacggcgccgtcactcccgccggcctcatctccgcttccatcgcccatgctttcgccctcttcgtcgccgtctccgtcggcgccaacatctccggcggccacgtcaaccccgtcgtcaccttcggcgccttcgtgggcggcaacatcaccttactccgcggcatcgtctacgtcatcgcccagatcctcggcttcatcgtggcctccctncttctcgtcttgttaac

SEQ ID NO: 253310 - DNA, 542 bp, Glycine max
aaattgtgtaaggggggcatgagtatgctcatccgagctatgacgtcgcatgcacgcgtacgtaagctcggaattcggctcgaggaaaaatggatggaaaagaagaagatggttccttgggaacctaccaattcttaaaaaagccacccgattggaactgcggttaaaagccaagacgatggaaaggactacccaaagccacccccggttccacttttcgagccctccgaactcacttcttggtccttataccgagccggaataaccgaatttgtagccacttttctctttctctacataaccatcttaaccgtcattggtgtcaataagtccaagcttcagtgtgcctactgtggcattcaaggcattgcttgggcccttcgtggcatgaaccttggtctcgtttatgcacttgttgcattttttggggacacattaaaccccggtgtgacaattcgaattggcttttggcagggaattttcctttaaccaaggccctttttaaaaagggataccaagttttgggggccatactttgggcc

SEQ ID NO: 253311 - DNA, 555 bp, Glycine max
  unsure (1)..(555): unsure at all n locations
gggttttaggaagtttttaaagagggggagatgagatagctatactcgagctatgacgtcgcatgcacgcgtacgtaagctcggaattcggctcgaggcaacaaggaactcgttcagaatttgggttttgctttcctagtcggtctttcctcttcacttcaatatggccgtggtaccctacaacaacgggtttggaacttcttcttcttcttcctctaactttaagggttgcaccaaacctttaattccgattggaaccttaaacctggaattccttccgaacttgcaaaccctacctaacccctgaagtttaatggaaaggtcaccaccactttcaactgtcggtatgctaaccccatttcatcatgggcacgtattcaaatgatgccaatagggactcctaaagtcccctataggacacctggtgaaggaactngtcaatgggttgatgtatggaacgcccctttatcgagaacgtgttatcttcattggacaagagttagatgaagaattattaaccaaaatatggggactatgctgtattatgacaggata

SEQ ID NO: 253312 - DNA, 548 bp, Glycine max
  unsure (1)..(548): unsure at all n locations
taattgtttacaagcaacgaagtatgctctactgnacttgcttgcatgcctgcacgcctactctagatgatcccctcggtgaattccaattgcacattttcaagaaattaggatgcaaaaatgtggatgtgtgaattggaattatttggtttcgtaatagggctatactggagcccaatgaaatgagatcgggattcctcggggaattccaatttcacattttcaagaaactacgaagccaaaatgttcatatatgaattggaactatttgcgttcttattaggcctattctgaagcccaaaggaaatgagatcagaatttctaggtgaattccgactccacatttttcaagaaattaaganggcaaaaatgatcatattttgaatcgaattatttggtttactattaagcccattctggacccaaacgaaatgagatcggaatttactcgggggttaccggattcggatttccctttttgaggcccattttaaatcgggaacctggtgaaaaactttttccctgtgaaattgtgttcccgttaaaaa

SEQ ID NO: 253313 - DNA, 542 bp, Glycine max
  unsure (1)..(542): unsure at all n locations
taaggtttacgatggagatgtatgcatcactctagaagagctatgacgtcgcatgcacgcgtacgtaagctcggaattcggctcgagaaaatgatggagaaggcttcagaaatttggagcatgatatcacaaggagcttacatttatgtgtgtggtgatgccaagggcatggccagggatgtacaccgcgccctgcacacaattttgcaagagcagggttctctcgatagttccaaggctgagagcatggtaaagaatctacaaactactggcagatatttgcgcgatgtatggtgatgatatctgaatgcaagccgtgggggtgacgaagatattaataaaacatagagttgtggctagaggattttgaaagggccttatttgtgccacctttcattagtgccctcaaaattganggggggcgcttgttgccatcacgacgacatttcctacgattctttttcactatattttctaaaggattctttttgggtcgcgtaatttattatatactgtgtatacccatactatgaacaatttta

SEQ ID NO: 253314 - DNA, 544 bp, Glycine max
aaagtgtttaagaaagacgatgtatgcatcactatagaagagctatgacgtcgcatgcacgcgtacgtaagctcggaattcggctcgagcaaagatttatccgcaactatctgagttctgaaggcaatagaccaagcaatgctaaagtgaaccagttagcgaaagctgcagaaaaatacactcttgcaaaccatctattttgggggttgtggggacttatttcgagttatgtgaacaaaattgattttgactataaggagtatgcaaggcagaggtttcagcaatactggataaggaagcctactttattggactcaccaagcatcgtttccctagatgaaactgtgaatggattgatgccatccttcacgtgattttgcttcagatttcttataacctttttggagatgtaaggtgcgataccaaacatgcatttactggaagttaatcttagtatatatattaatatattaattacaccttgaaggtttatatgccacatcatatatgtgaacaatatgtgtattccctaaatatgtgattg

SEQ ID NO: 253315 - DNA, 524 bp, Glycine max
  unsure (1)..(524): unsure at all n locations
ngagttagatcctccgaggtgtgntttgatgggaaggtggggtaaaatgtgtataactgctatgacgtcgcatgcacgcgtacgtaagctcggaattcggctcgaggttgctatcagcgagtgagagtgagtgagtggttctcttgcagcaacaaggtttagtgacaccaaacagactggaaatgggtcgtggggtcagtgctggtggtggacagagttccttggattatctctttggcagtggggtacctgccagcagtgcaaatggtgctcgcactcaaaatgcaagtgctccttcaccaccggttgataagcaaagtccagcaccagcagcagcagcagcacctgcacctgcagcagcagcagcaccagcacctgcaccagcaccagcaccagcaccagctgataagcaaattccagctggaattccttgaagtctcaaaaacaattaccatcgcgctgatgggcaaaactgtggcaactttctcactgatcggncatctacccaaggtcatgnctgcccc

SEQ ID NO: 253316 - DNA, 512 bp, Glycine max
  unsure (1)..(512): unsure at all n locations
nagtgagggnctcaggatctgcatggggagatagggagaaatattgtagaagcacctatgacgtcgcatgcacgcgtacgtaagctcggaattcggctcgagcaaggagcttggaactgttatgcgttcattggggcaagagccaactgaggcagagctccaggacatgatcaatgaagtggatgctgatgggaatggtaccattgacttccctgagttcctaaatctcatggccaggaagatgaaggacactgattctgaggaggagctgaaagaggcattccgggttttcgacaaggaccagaatgggttcatctctgctgctgagctccgccatgtgatgaccaacctcggggagaagctcaccgatgaagaggttgatgagatgattcgcgaggccgatgttgatggcgatggccaaattaactacgaggaagtcgttaaggtgatgatggccaagtgatcatcacattatggccacaaaaacctaaatgaagaaatgttgattaaaa

SEQ ID NO: 253317 - DNA, 553 bp, Glycine max
  unsure (1)..(553): unsure at all n locations
nggtttaggagagttgatcacgaatatatagaatcancatatacgagctatgacgtcgcatgcacgcgtacgtaagctcggaattcggctcgaggagaaacatttcactaatagagagacataagcataatattgagaaataatggagggttgtacttattgtgtgaagttgctatgccttgttgggtttgtggtgcttgtgagtactattgcaggggtggagagtgctggtgaatgtgggaaatctaccaccccagataatgaggcttataagcttgcaccatgtgcctcagcagcacaagatgagaatgctagtgtttctcagagttgctgtgctcaggtgaagaaaattgggcagaacccaagctgcctctgtgcagttctgctctccaacacagccaaaatggctggtgtcaaccctcaagttgctgtcaccattcccaagcgttgcaacctggctaatcgccctgttggttacaagtgtggaccttacactctgtcttgaaagagtttangttgttgctgaaaacaaagattacaaggcggtaattcc

SEQ ID NO: 253318 - DNA, 552 bp, Glycine max
  unsure (1)..(552): unsure at all n locations
nggggttaagtgttaagcaggggagggagaacagtatcgctcgagctatgacgtcgcatgcacgcgtacgtaagctcggaattcggctcgagctcgagccgattcggctcgagcttctggaaccgttcacaaaggagcaacttcaatctctcgtcaagcaagccctggatatgtttcccgaattcgtcgatagcgtgcgccggcttgctgacgtggaccctgggcacaggaaaatcttcgtccatggccttggctgggacgccactgccgatactctaaccgccgtgttcgggaaatacggcgagatcgaggattgcaaggccggtaacgacaaagtctccgggaaatcaaaaggttacgcctttattctcttaaacacagggacgattctcgcaaggcgcttgaaacaccctaaaaggaagaacgggaacccgtaccacactgtgccaaattgtcttgtccgggcccgttcccggtcaaccgggcgaagttaccccgggttttaggtaaaccccaagggagaaatttttgagcacaatggaaacgccaaat

SEQ ID NO: 253319 - DNA, 550 bp, Glycine max
  unsure (1)..(550): unsure at all n locations
gggtttaggacagttagaaaagacgagaatagctatactctagcagagctatgacgtcgcatgcacgcgtacgtaagctcggaattcggctcgagcggctcgagctcgagccgtggcttttggagaatgacaggtatgtgctggctatagcgattntgtctagtttgtacactggagcccaagcgttccgtcaaattcaggaactctccactgcaaaacaattgcttcagccaagaatggcagctatgattgacttttttggagatcagatcattgcatatcttttgatatcatcagcatcttcagcaattccaatgacaaatagaatgagagaaggggcagacaatatattcacagactcttcagctgcagccattagcatgtcaatttttgccctcctgtgtctagcagtatcttgcctcatttcaggctacaaattatcaacttcaccctatatatgaagcttaacttttgcaaactcttctactacaggttcatacttctataccaaacactttttttgcttattaagggaaaaagggggccgccc

SEQ ID NO: 253320 - DNA, 555 bp, Glycine max
  unsure (1)..(555): unsure at all n locations
aagaacagtgtgtttactgacaagaagctgtattggcatcactctagaagagctatgacgtcgcatgcacgcgtacgtaagctcggaattcggctcgaggcgaaatcatccaaacacattccatctattaagattttagagagtgaaaatggattggcaaagcatgatgggcaacctggacccattccaaagaacaatcttaatcctcgtcccactaacactactcctgctgctgttactatctcgtacccgtccaagaccgccctatccaccaggccctaagggcttcccaatcataggaaacatgtttatgatggaccagctaacccaccgcggtctcgccaacctggccaaacactacggcggaatcttccaccttcgcatgggcttcctccacatggtcgccatctccgaccccgatgccgcgcgacaggttctccaagtccaagacaacatcttttccaaccgtcccgtcaccatcgncatcagctacctcacctacgaccgcgccgacatggtcttcgtccactactggcccttctgtggccgatgaag

SEQ ID NO: 253321 - DNA, 545 bp, Glycine max
taattgtgaacgagggagactgttatgcatcactatagaagagctatgacgtcgcatgcactcgtacgtaagctcggaattcggctcgagatggaatcaaaccacaccacacctcctcaacaacaagctcttaactctctagggtctttgaagaacttgaaggtgtttgtatatgatcttcctcagaagtacaacacggattggttatcgaacgagaggtgcagcaaacatttgttcgcgtcggaggttgcaattcacagggctttgttgaccagcgaggttcgcacgtttgacccatacgacgctgactttttcttcgtccccgtttatgtgtcttgcaatttcagcaccgtcaacggcttcccggcgattggccacgcgcgctcccttatcgcgtccgctgtcagcctcgtctcctcggagtaccccttctggaaccggagcagaggcttcgaccacgtcttcgtcgcctcgcacgattttggctcgtgttttcacaccctggaggaccttgcgatagcttattgcgttccacagaatattaa

SEQ ID NO: 253322 - DNA, 562 bp, Glycine max
tgagtttaggtagaggtctctatagccacgccatgtatcagcatcaccatagaagagctatgacgtcgcatgcactcgtacgtaagctcggaattcggctcgagctccacctaatgagcatgtacacccttcctactactaccacgcaccaccaccaccatccccatctccaccacctccttattattataaatcccctccaccaccatccccttctcctactcccccctactactatcactctccaccaccaccatctccttctcctcctactccctactactaccactctccaccaccaccatccacatcaccgacgtctccatattattacaaatcccctacacctccatctccacctcctgctcccaagtacatttacaaatcacctccacctccggtttacatctatgcttccccacctccacctatctacaagtaagctcaaattatgaaagcaccattcatgatgaatcatgttctagttttcatcgaggaataaaggcaagctctattttgagccaagtgaaacatctatcttcccgtcaaaaactttttataa

SEQ ID NO: 253323 - DNA, 510 bp, Glycine max
  unsure (1)..(510): unsure at all n locations
nagagagggnctaggtgtgcatgtggggacggggggaaatatgttagaactagctatgacgtcgcatgcacgcgtacgtaagctcggaattcggctcgaggttacgctcttcaaatcaatctcttctcagaaatgggtgtggctcaaaacattcccgatgcggaggagggaaccttggagattggaatggaatacagaactgtgtctggagttgctgggccattggtcattcttgataaagttaagggacctaagtttcaagagattgttaatattcgcttgggagatggaactactcggcgtggacaagtgctagaagttgatggtgaaaaggctgttgttcaggtctttgagggtacatctgggattgacaataaatttacaactgtgcaatttaccggagaggtgttaaaaactccagtatcattggacatgcttggccgcatattcaatggttctggaaaaccaattgataatggtccacccttattacccgaggcttacttggac

SEQ ID NO: 253324 - DNA, 556 bp, Glycine max
  unsure (1)..(556): unsure at all n locations
nggggtttaagtttgaaaaggggagaggagggaacagtatcactctntaagatctatgacgtcgcatgcacgcgtacgtaagctcggaattcggctcgagtctgcactcaccactgccacacttcaatcgcactaatggctgtcaccttctcagatctacacaccgaagagggcatcaaatccctcgatcaattcctttctgggaaaacctatatttctggggatcagttgacaaaggatgatattaaagtgtatgcagctgttgttgaaaagccaggggacacttttcctaatgctgccaagtggtacgatgctgtctcttctcaacttgctccaagctttcctggccacgctcaaggggtaagattcagtggcgctgctgctccagctgaagctgcacctgccaaagcggctgccactgctgaagaagatgatgatgatcttgatctctttggtgatgagaccgatgaagattagaaggcagcanatgaaaaggaagctgcttaaaaacctgtccagaaaaaagagagtggccagtcttttgtgcctttcgaaa

SEQ ID NO: 253325 - DNA, 550 bp, Glycine max
  unsure (1)..(550): unsure at all n locations
taagttttctaagagggagggtagaacgagatcactctagaagagctatgacgtcgcatgcacgcgtacgtaagctcggaattcggctcgaggtgggcaaccctaacaatgaggtcactgttaggcagcttgctgaaataatgattcaggtttactcaaaggtaagtggagaacaaactgctgaaacacctaccattgatgtgagctcaaaagaattttatggtgagggatatgatgacagtgacaagagaatccctgacatgaccataataaacaagcagcttggatggaatcctaagacttcactttgggacctgcttgaatccactctgacatatcagcacaggacatatgctgaagccgttaagaaagtcattgcaaaacccctcgcaagttaagcttttacagtgatggtgatgtgctacctttgaaaaggggtgttcttgcccaagtgttctgccatattttactggttggntttatataaaatcgccaaaatttctcctccttgggtttccttagcgccatggggatttataccccacataac

SEQ ID NO: 253326 - DNA, 509 bp, Glycine max
  unsure (1)..(509): unsure at all n locations
nagtgagggncgtaggtttgaatagaacatgtagcatcttgtagaagcagtctatgacgtcgcatgcacgcgtacgtaagctcggaattcggctcgagcgcgtcgctccgcaccagtttcaccgcacgaatatcttgttgtttggagcgatccgagaaaaactctgtaaacatgttggtttaccaggacctccttacaggtgatgagcttctctctgactccttccgttacaaggaaattgagaatggaatgctgtgggaagttgaggggaagtgggttgttaaaggagcagttgatgtagacattggtgcaaacccttctgctgagggtggaggagaagatgagggagttgatgatgcagctgttaaggttgttgacattgttgacacattcagacttcaggagcaacccgcattcgataagaagcagtttgttaccttcatgaagaggtttatcaagaatntgactcccaagctcgatgcanagcaacaggaagtgtttaagaggca

SEQ ID NO: 253327 - DNA, 522 bp, Glycine max
  unsure (1)..(522): unsure at all n locations
nagtaagggcttcagattgccattgacgtatgcgggaaaatgagagaacttctagaagagtctatgtacgtcgcatgcacacgctcggaattcggctcgagggcctatgaaatcagattcttcgccaccgccacagtcataataaagttttatttttccaaataaagggaatggcgactcctgttgagcctcctaacgggatcagaactgaagggaagcattattattccatgtggcaaaccctgtttgagtttgattcaaaatacgtgcccatcaagccaattggccgcggagcatatgggattgtgtgctcttctgtgaatagagagacaaatgagaaggttgccatcaagaagatacagaatgcctttgaaaaccgggttgatgcactgaggactntgcgcgaactcaagcttcttcgccaccttcaccatgagaatgtgattgctntgaaagatatcatgatgcctgttcataagaatagtttcaaggatgtctatctagtttatgaactcatggacc

SEQ ID NO: 253328 - DNA, 523 bp, Glycine max
  unsure (1)..(523): unsure at all n locations
nagttatggggcttcagttcnnnngatgtatgctctatgtaacattgtagaactcctatgacagttattagcacgcatgcacacgtacgtaagctggctctaggtttgaagcggcccctttggtttaagtgaaggactgaaagggtacagtggccaccaggaacttggaaaagatggcatccattgatgcacagcttaagcaattggctcctgccaaagtgagtgaagatgacaaactgattgagtatgatgctcttctgctggatcggttccttgatatccttcaagatttacatggggaggatctgaaggaaacagttcaagaagtgtatgaactttcagctgagtatgaaggaaagcatgaccctaagaaactggaagaacttggaaatttgataaccagtttggatgctggggactctattcttgttgccaagtccttttcccacatgctaaattntgccaacttggctgaagaagtccagatttctcgccgccgaagaaacaggttgaagaaggggat

SEQ ID NO: 253329 - DNA, 517 bp, Glycine max
ggggggtaaggttgggtctgcatatagtagcattactgctaattctatagactagctatgacgtggcatgctcgctgacgtaagcttgtaattcggctcgaggtttactgaagtcgaaaattacgggtgagcaagagccttgtcttggttccgttccgcgaccatgtctcaatggacatgcccttccgtaaagaacgtgcttcttttggattctgatgggaaacgtgtcgcagtcaaatactcttctgaagactgggcaacgaatagtgccaggaaaatcttgagaaagttgccttcaacagagactcagtaagaccgatgcccgcacagaagcggaaatagcaatgtttgagaataacattgttgattacaagtttgtccaagatcttcacttgtttgctaccggtggtgattatgaaaatgagcttatcttatccacagttctgcaggcattttttgattctgggggccttctgctcagaagccatgtggacaggaaggaagcactagaaaactg

SEQ ID NO: 253330 - DNA, 554 bp, Glycine max
  unsure (1)..(554): unsure at all n locations
gtagatatggtgatgatatatggtatggtaatgaatattttggaggatctcagattgactaagtaactcatagcnanctctctannacatctatgacgtcgcatgcaccctgcaggacgactctagaggatcccctgggtgaattccaattccacattttcaagaaataaggaggcaaaaatgttcatatatgaattggaattatttgttttcttattaggcctatcctgaagccaaaggaaatgagatcggaattcctcggggaattccaattccacattttcaagaaataaggaggcaaaaatgttcatatatgaattggaattatttgttttcttattaggcctatcctgaagccaaaggaaatgagatcggaattcctcggggaattccaattccacattttcaagaaataaggaggcaaaaatgttcatatatgaattggaattatttgttttcttattaggcctatcctgaagccaaaggaaatgagatcggaattcctcgggggtaccgagctcgaatcccctataatgagtcgtattaaattcgat

SEQ ID NO: 253331 - DNA, 550 bp, Glycine max
ggaaaggggtgagaagatataggagtagaatgtagtgggatgtagaggatgctgctgaagtatgataagtagtcctacagtaaacactatagaagagctatgacgtcgcatgcacgcgtacgtaagctcggaattcggctcgaggccaaatgtattttgtagggagctgcacacaaggagcggtctggatttgagggtccctggacctctaatcctcttattttcgacaactcatacttcacggagttgttgagtggtgagaaggaaggtcttcttcagctaccttctgacaaggctcttttgtctgaccctgtattccgccctctcgttgataaatatgcagcggacgaagatgccttctttgctgattacgctgaggctcaccaaaagctttccgagcttgggtttgctgatgcctaagcaacgtttaagggattgttgaagaggcatggtgcccataatatttctctaaaaaattgtatggtcatggtttttaatgccaatgtgggttccccagattttagatagctttagaatgtattttgctgga

SEQ ID NO: 253332 - DNA, 541 bp, Glycine max
  unsure (1)..(541): unsure at all n locations
nggtaagtatctgcttaatgaatatatagcatctctcnanaancgttntgacgtnnnatgcacgcgtgcgctcgtacgtaagctcggaattcggctcgagtgtggttatcatcttcttcttcctctttcttagatctcttgtttctctacgccgcacgccgaaaccatggccggaaaaggagagggtcctgctatcggaatcgatctcggaaccacctactcttgcgtcggtgtgtggcaacatgaccgcgttgaaatcatcgccaacgaccaggggaacagaaccacgccgtcttacgtcggattcactgacaccgagcgtctcatcggtgatgcggccaagaatcaagtcgccatgaaccccatcaacaccgtcttcgatgccaagaagtttgattggtcgtagaatcaggggattctnttggttcaaagtgttttcaaatggtggcctttcaaggtcattcctggtgctgttgacaggccaatgatcgggttaactacaagggtgaagagaagcaatttgccgcanaagaaatctctt

SEQ ID NO: 253333 - DNA, 538 bp, Glycine max
  unsure (1)..(538): unsure at all n locations
aggaggcttaggttgataggagagaggagagtagtctcaagaccagctatgacgtcgcatgcacgcgtacgtaagctcggaattcggctcgagcaagcacatgcaatggttccatagctgaatgcaatcaagaagatgagctggtgatggagtctgaaataagccgaaagtttctggagcagaagagatcatacatttccaatggagctttacagagagacaaaccagtttgtaatggtggtggctctggtgaagcttatagtaaaactggagggtgtcttccttcccccttaaattcttaaagtagaagctgctctaaatattatcngtgtaagtctgactcttgattacatcttcatgcaaacatctttaaagttgttcatgaatcaagccttttcacataatccttatgttgtccattaaacttgatgggaacttttgaaatttgaattatatgaaaatttccagannanaaaannnnnaaaaaaaaaagggccggcgccgactagtgagctcttgaccccggaattaaattcgg

SEQ ID NO: 253334 - DNA, 540 bp, Glycine max
  unsure (1)..(540): unsure at all n locations
agtnagagtgtctgnaatgaaggacgggggattatctgtaaaactcttnannagttatgacgtcgcatgcacgcgtacgtaagctcggaattcggctcgagcaacgtgatcggactcctgaacttcctgaccttcctcctcggcatcccgatcctggtggccggagtgtggctgagcaagcagggcgccaccgagtgcgagcggtggctggagaagccggtgatcgcactcggcgtcttcctcatgctcgtctcactcgccggcctcgtcggcgcgtgctgtcgcgtgtcgtggctcctctggctctacctcctcgtcatgttcgtcctcatcgttcttctcttcgccttcaccatcttcgccttcgttgtcaccaacaagggcgctggcgaagttgtgtctaatagagggtataaggagtataggcttggggattactcgaactggttgcagaagagggttaacaacactaagacgtggaacaggatcaggagttgcttgcaatctgggaaagtctgcactgagtttcaatccaagttt

SEQ ID NO: 253335 - DNA, 536 bp, Glycine max
ggataatgctcagatgatcatgacagacagtatctccaaacattatgacgtcgatgcacgcgtacgtaagctcggaattcggctcgagaggaaaactatagatcttcagacttgacttgagtgctatgagttcatggatccaatccaacacaaggtcgtcaacgttggtgctctcaagctccacgttgcctaaaccggtaccggtccaaacgccgtcggattcctgcacggcttcccggatatatggtactcgtggcggaaccagatgatagctctcgccggtgccggattcagagcggtttccttacattacagacgttacagtctttacgacccgctacgcgaacacgataagacctcttggtccgatcttctcagtgatctacttcatattcttgatgctctagctctctctaaagtgtctcttgttgggaaagactctggagctagtcctgcatatctatcttcaattctttaccctgtaaaggtctcgcgagatgtcacatttggagttcatatgttaccccaagcccctt

SEQ ID NO: 253336 - DNA, 517 bp, Glycine max
  unsure (1)..(517): unsure at all n locations
naggtagtaatcgtcggggttgtttcagtagacaagaacagtactgtagacactatagaagagctatgtgctacgcgtgcgtaagctcggaattcggctcgagcgttgctctgcttcaaccttgcggaagaagaagacgccgcagccatggtgaagtactccagagaacccgacaatcccaccaagtcctgcaaggccagaggcgctgacctcagagtgcatttcaagaacactatggagactgcctttgccatcaggaagttgccccttgttaaagctaaaagatacctggaagatgttttggcccacaaacaggccatccctttccgacgcttctgtggtggtgttgggaggacagcccaggctaagagcagacactccaatggtcaaagacgctggcccgtcaaatcagctaagttcatcctagatttgctgaagaacgccgagagtaatgctgaggtaaaaggtttggatgtcgatgctctgtacattttccatgttcaggttaatcaagcac

SEQ ID NO: 253337 - DNA, 556 bp, Glycine max
  unsure (1)..(556): unsure at all n locations
ggataatgagttgaagaataagatagtatggagnaaggtatatagatatgtgggaaaggagggtttactaaagagatgtatagtagtactatagacgagctatgacgtcgcatgcacgcgtacgtaagctcggaattcggctcgagctggagtcaaaacctgccatgacagtaataacaatgcctactttcttatcttactctctcctttacctcgcgttcttattcactctcaaataccttttccaaagaagcagagaagttcgaaacctgacacctggtccgactcctcttcctataatcggcaaccttaacctagttgaacaacctatacaccgtttcttccaccgcatgtaccaaaaatatggaaacatcatatccctttggttagggtcacgtcttgttgtggttgtttcatcacccacagcgtaccaagaatgtttcactaaacatgatgttaccttggccaacagggtacgctacctctcgggaaaatacatattctacgacaacaccaccgtaaggtcttgctaccacggcgagcactggggcaacct

SEQ ID NO: 253338 - DNA, 555 bp, Glycine max
  unsure (1)..(555): unsure at all n locations
gtagattatattnaatgagatgaggtaagtatanatnnatgatntggtagtaacctttaagttgtaatgagtatatgggggtaatatgagaacatcatcttgacgctacatgcacgcgtacgtaagctcggaattcggctcgagcggccgtttgctccccaaaaagggaagaagccgattctggcctttgaaatcaaccagaaaagatgtcaagtgaaaaagtaactggtgcaagtgaaggtcctgctacttcaatccaggtgagccaatggacatcatgactgctctacagcttgtgctgagaaaatctctggcctatggtggtcttgcacgaggtcttcatgaangtgccaaggtgatcgagaagcatgctgcacagctctgtgttctagcagaagattgtgaccaacctgattatgtgaaactggtgaaggctctttgtgcaaagcacaatgttagtcttttgacaattccaagtgcaaagacccttggagaatgggctggtttgtgtaaaattgattcanaggggaaaggctcggaaagtaactggttgct

SEQ ID NO: 253339 - DNA, 523 bp, Glycine max
  unsure (1)..(523): unsure at all n locations
ngggaagtatatnattgagagttgnttattgaanataagatagctcatcggtagacctcatagaagagctatgacgtcgcatgcacgcgtacgtaagctcggaattcggctcgagcgcggcataacctaaacctatctttcttctctctctgtgtgtgcgcttcaacggcaaccagaagcagccatggccactgcaaggactgtgaaggatgtttcacctcatgagttcgttaaggcgtactcctctcacctcaagcgatccggcaagatggagctgccagagtggactgatattgtgaaaactgcaagatttaaggagttggctccttatgatcctgactggtactatgtcagagctgcttccatggcaagaaagatctacttgagaggaggacttggtgttggtgcctttcagaggatttatggtgggagcaagaggaatggtagtcgccctcctcattnttgcaagagcagtggtgccattgctcgtcacattctttaacagttgcagaacatgaacctt

SEQ ID NO: 253340 - DNA, 557 bp, Glycine max
  unsure (1)..(557): unsure at all n locations
gtaagttggtgttaattttntgataggatgtantattagatgtantaatatagttgggaaggtgnatttatgatagggggttaatggtaaccttctagaagagctatgacgtcgcatgcacgcgtacgtaagctcggaattcggctcgaggatgaatccatctcttccatgaaggaggtcatttctttggggataagtgtaaatgccactctcatattctgcctccctaaatatgaagcagtgattgatgcttacttggatggccttgagtcttgtggcatgactgatctctctaaggtttcaagtgcagcagcattctacatcagtagagtggatgttacacttgacaagaaacttgagcaaattggtactactgaggctcttgatctcaaaggaaagggtgcggttgctcaagcagtcttagcataccaactttaccagaaaaaattttctggtccaagatgggaacgcttggagaatagaagtgccaagaagcagaggttgatgtgggcttcaacaaatgtgaaaaatccatcttaccctgacacattttatgt

SEQ ID NO: 253341 - DNA, 559 bp, Glycine max
  unsure (1)..(559): unsure at all n locations
tgtttgaggaggnaatatnagagaggatggtgagtgggatatttgggaagtatgttaaaagttgnttatgaanatggaggctttatagtaaaccttatanaagagctatgacgtcgcatgcacgcgtacgtaagctcggaattcggctcgaggaacaagaccatagatgtgctgctttacgtggatcgcttggatgtgtacagagtggacaacttggataagttagtcgccaaagctataacagataggtttggcaaaggaatatggaacaaggccattgtaacactcacacatgcccagttctctgcaccagatggattgccctatgatgaattcttttcacaaagatctgagtctctcttgaaggttcttaggtcaggtgccaggataaagaaagaagcctttcaggctgcttcaattcctgatgctttggtcgagaacagtgggagatgcaacaaaaatgacagtgatgaaaaggttctttcaaatgggactgcttggattcctaatctagtccagacagtcacagaaatcgcattggaccaaagtgagtctattc

SEQ ID NO: 253342 - DNA, 537 bp, Glycine max
  unsure (1)..(537): unsure at all n locations
agtaagtgaggtcgatgctacgcatggaagttactcgcagaacgctatgacttaggacgtcgcatgcacgcgtacgtaagctcggaattcggctcgagatgggagaaaggttgcagtagattcattaactttgtcagttcaggaaggagaatgttttggctttttaggaacaaatggagctggaaagaccacaactatttctatgctatgtggggaagaatgtccttctgatgggactgcttttatttttggcaaagatatatgttcccatccgaaggctgctcgccgatatattggatattgtccacaatttgatgctctattggaattcttaactgtccgagaacatcttgagctttatgctagaataaaaggtgttccagattttgcaatagacaatgttgttatggaaaagttaacagaatttgacttattgaagcatgctaataaaccatcattntcacttagtggagggaataaacgaaaactgtctgttgcaattgcaatgattggagatcctcctattgtcattcttga

SEQ ID NO: 253343 - DNA, 506 bp, Glycine max
aagtgggttttggaggtgtcatgagtttagctcacttcgtagaaccgctatgacgtcgcatgcacgcgtacgtaagctcggaattcggctcgagcgcccttctctcttccaatttctcttctctgtccaacgcaatcgattagtttagcttccgcggacagttcagggatcatggctagggttttagttcagtctactggtatgcctggcctactgagtgggcaaaggcacgggaagcataagggatcaggaaaatcgaaaagatctgtcaaaatgatgagcaccttacgaatgcctgctttaagaatgtcgagtttctccggattacgtactcttaatcctatggattctctgtcgagaccacgccacacttttccgttgaatacaacttctaagcgcgagagggctaaaagatgtgtacctaaagctatggttgagcgtttcacagagaaagcaatcaaagtcattattctagccccagaggaagccagacgactggggcacat

SEQ ID NO: 253344 - DNA, 507 bp, Glycine max
  unsure (1)..(507): unsure at all n locations
gagtagtaanttaagtgtaaggagtagggagctagaatgctagaaccagctatgacgtcgcatgcacgcgtacgtaagctcggaattcggctcgagtcggctttggcttcagagtttgtgtaaccaacttcacctttccttccttccttccttcttccgatttcgaagatggctgaagcagaggatgccgtacgacgccgtaatgcggtcgccgagtatcgaaagaaacttctccagcacaaggaattggaatccagagtccgatccgtcagggagaatttgcgagcttcaaagaaagagttcaataaaacagaagatgatttgaagtctcttcaaagtgttgggcagatcattggcgaagttctcaggcctcttgacaacgaacgccttattgttaaagcaagcagcggtcccaggtatgtggttggttgccgcagtaaagtggataaagaaaaattgacttccgggacaagggtggttctcgatatgacaacactcaccataatg

SEQ ID NO: 253345 - DNA, 514 bp, Glycine max
  unsure (1)..(514): unsure at all n locations
gagtgagaatcgtcggggttnanattganaattgaagcttatagtagacctcatagaagagctatgacgtcgcatgcacgcgtacgtaagctcggaattcggctcgaggtgcaacaaaccccgacttctggaagggatgcatttattagataaaaggtcaacacaggctctgcctgttgctttgatgattcatgataactcgtcggatcgcacggcctttgtgccggcgacgcatcattcaaatttctgccctatcaactttcgatggtaggatagtggcctaccatggtggtgacgggtgacggagaattagggttcgattcccgagagggagcctgagaaacggctaccacattcaaggaaggcagcaggcgctcaaattacccaatcctgacacggggaggtagtgacaataaataacaataccgggctcattgagtctggtaattggaatgagtacaatctaaatcccttaacgaggatccattggaaggcaagtctgatgccagcaacc

SEQ ID NO: 253346 - DNA, 556 bp, Glycine max
  unsure (1)..(556): unsure at all n locations
gaatggttttagatgatgattagagatgtgtttgttagagaatagtagtatctcagggttaatatggaatacggcgctttatggtagacctcatagaagagctatgacgtcgcatgcacgcgtacgtaagctcggaattcggctcgagttttgggaaaagagtgagagagagagaggagtgggaaatcgagaaaccctagtggagccggaagtggaagtgaagagagtaaatgacgatccattcggtggtgatacagaagctgcttagcaccaatgctcaggtgggtcgacgtgttgccgctcaccatttgaaggagttcacctatggcttccgcaacaaaatggccatcatcgactccgacaagaccctcatttgcatgcgcagtgcctgcaacttcatggcctncctcgcccgccacaacggccgcttcatgttcatcaacaccaaccctctcttcgacgaaatcttcgacctcatgaccaagaaggtgggctcctacagccccttcaccaactctctctggcgcaccggccggctttctcaccaatagcctca

SEQ ID NO: 253347 - DNA, 553 bp, Glycine max
  unsure (1)..(553): unsure at all n locations
ggagatgatggnataagagataggagagtatagggagagagagtaggggaacgaaaggtnaattttcgataagtagcttgtcagtaaacactatagaagagctatgacgtcgcatgcacgcgtacgtaagctcggaattcggctcgagctcgagccgctcgagccgattcggctcgagctttgcgagcaattcaaaaccctattggaattctccattcacacgttgaagcttttgacgtcatggctacaccattggtggcagggattgcagtggcggctgcagcttatgctggtagatatggtatccaggcttggcaagcattcaaagctagaccaccgagtatgcgtaaattttatgaaggtggtttccaggctaccatgactagaagggaagcagctcttatactgggtgttagagaacgcactccaacagataagattaaagaagcacataggagggtgatggttgcaaaccatccagatgcaggtggcatccattaccttgcatccaaaattaatgaagcaaaagatatgttacttggaaagaccaaag

SEQ ID NO: 253348 - DNA, 545 bp, Glycine max
  unsure (1)..(545): unsure at all n locations
aggtaggggaagatgtgcttacgtagtacgatgctaatcgtancaccatagaagagctatgacgtcgcatgcacgcgtacgtaagctcggaattcggctcgagggcaagaatatcaaattggtctcttgtcttcctcctcatcgctacactactccacatagagcccagcctctcaagcccaagcccaagcccaagcccaagcccgttcataaaatcctcctgcagcagcacccagtacccagccctctgcgtctcatccctctccgtctacgcctccagcatccaacaggaccctcaccaactggttcagacagcactctccctctccctgaaccgcacccaagccaccaaaaccttcgtggctaactgcaacaaattcagaggcctgaaacccagagagcacgctgcactcaaggactgcgccgaggaaatcagcgacagcgttgaccgcctcagccggtcgctgaaggagctcaagctatgtaaggttaagggtgaggacttcacgtggcacattagcaacgtggagacatgggtcaggttn

SEQ ID NO: 253349 - DNA, 555 bp, Glycine max
  unsure (1)..(555): unsure at all n locations
tataatttagtnataatgatagagagagtagattgtaatataaatgagtgggatcgtcggagttgctaagtaatcggacgctaatcgtcaatactactatgacgtcgcatgcacgcgtacgtaagctcggaattcggctcgagattgtcctctccatcttcctctctatcacactcacctatggctgccatctcaaaactcattcctttcctattcttaacaacccttttagtgtctctccaagttaatgccagagacagccaattcttcagcaaagtcacccctctcaacaacaacattaaagagactgaggttcccaaaaatgaaggccaagtaaacaagccatatcaacaaccagttttcaccccagaaacagaaaacagctatggtctatatggtcatgagactggtctgcacgcttccaccactacaattactaatgctgctccctacaccaccgccaccacctacaagccatacagaactaccacagctgaagaggacactgccaagtactccaacaacaactacttctacaacttcaaaaaggatgcc

SEQ ID NO: 253350 - DNA, 544 bp, Glycine max
  unsure (1)..(544): unsure at all n locations
gtataggagagnataggattaagtatgtgtagnatgagtgtgtggtggggaggttagtatgaatggaagtttatgtagcactctagaagagctatgacgtcgcatgcacgcgtacgtaagctcggaattcggctcgagtggcggtacctctgctctcgaagaagatcgtgaagaagagggtgaagaagttcaagaggcctcagagtgacaggaaaatttccgtcaagacaaactggcgtagaccaaagggtatagattcccgtgttaggagaaagttcaagggatgcactttgatgccaaacatcggttatggttcagacaagaagacccgccactatctccctaatggttttaagaaatttgttgttcacaatgtgaaggacttggaactgctcatgatgcacaacaggacttactgtgctgagattgctcacaatatatccacaagaaagagaaaagatatagttgagagagctgcgcaacttgatgttgttgtgacaaacaaaaccgccatatttacgcctcctgaggattaaatgtctaa

SEQ ID NO: 253351 - DNA, 554 bp, Glycine max
  unsure (1)..(554): unsure at all n locations
gtatgtgatgtnatgttgtgaagtagattgtatgtttgtttatgagtagttctttaaagtggttttgaataggggagtttatagtaaacctcatanaagagctatgacgtcgcatgcacgcgtacgtaagctcggaattcggctcgagcaaacttttaagaacttcagctgtgagaagaggtttatatgctggtgtgggcctcttaatcttccagcagtttgtgggaatcaacactgtgatgtattatagtcccaccattgttcagttggctggttttgcatctaacaggacagcattgcttctgtcactcatcacagctggcctcaatgcatttggttcaattctgagcatttacttcattgacaagactgggaggaaaaagcttgctctaatcagtttgtgtggtgttgtgttctcccttgctctcctaaccgtcgcttttcgcgaaagcgaaatccactcaccaatggttagtgccattcaatcctctcaattcaacaacaacaacacctgccctgattacaaaacagctttgaactctgctgaatggact

SEQ ID NO: 253352 - DNA, 533 bp, Glycine max
  unsure (1)..(533): unsure at all n locations
nggtaggggctagtggatagtgggggggatagacgttagactagctatgacgtcgcatgcacgcgtacgtaagctcggaattcggctcgagcaaggatgaagttttgctaagaattgactggagagaggcaggacctgaacctgacaacagggttgagtattaactttggaccaaccgccatgattaatgttgaacttggttccaataaccgaataatttcggggaaaaatttaaggggtaatctcaaaatcttgaaaggggcgggtataccttgttcaattcaaaactacataactngggtttggcccacaccctttcattctagcagtcagtgcaagtctcaatgtataaaccatgggagatattgtgctccagatccggagaaggattttggagagggatatgaagggaaggatgtggtgtatgaaaatttgaggcagctttgtgttcatagagttgccaatgagagcaaccgttcttgggtttggtgggattatgtgacagaatttcatgtcagatgttctatgaaaga

SEQ ID NO: 253353 - DNA, 556 bp, Glycine max
  unsure (1)..(556): unsure at all n locations
agagtgggagganatgaagaaataggatggagaagagaatgagaggtagaaggaccgtggggttgataaagaactatatggacctctcatagaactatctatgacgtcgcatgcacgcgtacgtaagctcggaattcggctcgagaaacttgctatagcagtaagctataactcatttgaggctctgtgagaattgagaaatggctaaagatgttgaggttcaagagcaaggaggagagtactctgccaaagactaccatgaccctcctccagcacctttgttcgacccagaggagctcacacagtggtccttctatagagccctcatcgctgagttcatagcaacccttctcttcctttatgtcactgtgctcaccattattggctacaaaaggcagactgatacaacggtaggtggcaccgactgtgatggggttggcattttgggcatcgcttgggcctttggtggcatgatcttcatccttgtttactgcaccgccggtatttcaggaggacacataaacccggcggtgacattcgggttgttcctaggacg

SEQ ID NO: 253354 - DNA, 543 bp, Glycine max
  unsure (1)..(543): unsure at all n locations
ggaggggaaagatttgagaggtatgttaatanagatattggatagatggctgtttggtatgatatgatgctatactcaagacgagctatgacgtcgcatgcacgcgtacgtaagctcggaattcggctcgaggatctatccactcacctgcctcttcctcacccctttctgcatctaacgagtaaagaaaaatggcgcgtaagaagatcagagagtatgactcaaagaagttgttgaaggagcactttaagagactttctggcaaggagttgccgatcaagtctgcacaaattactgcatcaactgatttcactgagctacaagagaaagaaccctggctttcatcttctaaattggttgtgaaacctgacatgttatttggaaagcgtggcaaaagtggtttggttgcctttaatttggattttgcacaagttgtttcgtttgtgaaagagcgtcttggaaaagaagttgagatgagtggatgcanaagacccataacaactttcattgtccaacttttcatcccacacaattgagaagttt

SEQ ID NO: 253355 - DNA, 550 bp, Glycine max
  unsure (1)..(550): unsure at all n locations
gagtagatgtgaattctatgaaggataatngatgaatgaattgagaggtgggcgtgtttggtacgatatagaatgtattgtcaagacgatctatgacgtcgcatgcacgcgtacgtaagctcggaattcggctcgagatgtaattcctccacccttgcttagagagtttaatgatgtctacatagccactgaactcatggatactgatcttcaccatatcattcgctccaatcaaaatctgtcagaggagcactctcaatacttcttgtaccagattcttcgtgggcttaagtatatacattctgcaaacgtaatccatagagatttaaaaccaagcaacctgctgctaaactcaaattgtgacttgaagattattgattttggtcttgcgagaccaactttggaaagtgacttcatgacagaatatgtagtcacaagatggtacagagctcccgaattgttgttgaattcctctgattacacctctgctatagatgtgtggtctgttggttgcatctttatggagccttatgaataaaaagcctctgtt

SEQ ID NO: 253356 - DNA, 553 bp, Glycine max
  unsure (1)..(553): unsure at all n locations
gtagagtgggggagagntgagtggaggagngatgaagagagtgtagtgggtaanagaagtgtttttgaatagagggtttaagagaaaccttatagaagagctatgacgtcgcatgcacgcgtacgtaagctcggaattcggctcgagcacgtgcctctacgaagtctcctacggcgacggatcctacaccgtcggagagttcgcgactgagactgtgacgctgggctccgcggcggtggagaacgtcgccatcggatgcggccacaacaacgaaggactgttcgtcggcgccgccggtttgctcggccttggcggcggaaagctctcttttccagcacaagtcaatgcgacgtcgttttcttattgcctcgtgaaccgcgactccgacgccgtttcaactctggagttcaattcaccgttgccgcgaaatgctgctactgcaccgttaatgcggaatcccgagctcgacactttctactatctaggattgaaaggaatcagcgttggcggtgaagctcttccgattcctgaatcgagttttgaagttgatgcc

SEQ ID NO: 253357 - DNA, 516 bp, Glycine max
gagtggggtacgacaagatttgatatagaagaaggaagctatcgcagacctcatagaagagctatgacgtcgcatgcacgcgtacgtaagctcggaattcggctcgagattgcggctagggtttaggtccttctttcaccgtctgcgttccttcaatcttcttattctctttcatctgtgatggagacgttgcgggtttagttctaaggggtggttctggccttgggtttttggaacgtacggcgtcgttctggggttgggaaaacaaattctgagagatggcaaccacgaacccttttgattcgttgggtgacgacgctgaggacccttctgagctcatcgtcgccgagcaactcaaggcggcggctgcggcctcggcggccgccgtggctcccaagaaggcgccggctcagcagaacaagccggctcagatacctaccaagccgtctgctacggctcacgctgtgagggatgccagagacgagccagttcgtggaagccgttgaagtggacaag

SEQ ID NO: 253358 - DNA, 543 bp, Glycine max
  unsure (1)..(543): unsure at all n locations
gagtaaggctcagtngcattgtgatgaagtaatgcatnactctnannttcttgacgtcgcatgcacgcgtacgtaagctcggaattcggctcgagatgcccctcttctctttcccacactacaaatccttttggagatcttcaattgcatttgcatttttcttaacatttctcactctccaaacccaatccactccaatcccatgcaacaaggacccctacaaggagctcaaccttatccctaacaaaaacggcaccgtcacgcgccccaacaaaccccccgagagcccgcccgcaccggatcccaacctcaacaccctcgtactctccaaagacatctccatcaaccaatcaaaaggcacatgggcgagagtctacctaccccgcgtggcactggatcacagctccaagctccccttattggttttctaccatgggggagggttcattttcctcggtgcggcctcaacaatcttccacaatttttgcttcaacatggcaaacgacgtcgttgcggtcattgctttcatagaataccgtctgg

SEQ ID NO: 253359 - DNA, 542 bp, Glycine max
  unsure (1)..(542): unsure at all n locations
ggagtatagagataagatagtggaagangagaatgagtaaagtagtacttaagttgataagagatgaagcaatctcatagaacagctatgacgtcgcatgcacgcgtacgtaagctcggaattcggctcgagcggctcgagttgcaacactcacacaccaatggcactcagacccatcgacaacgctcttccgacaacaaccccagagagacccaaaaaacaacctaaaatcgctgttgcaacccaaaaacaacaagatcgtgcttccgtcaacggcgaaaacgtagttccattgccatcatctgaggatgccactgttgactatgtctcctccgacaaccttaaacccttggcggaccccgaagttaagattcagagtttggtggaagatttggattcgaaaaattggatcaaggtttgtgaatcgttgaatgatgttaggcgcttctcgttactccactcctctcttctattcccaatcttgggtaaaattgggttggtggtggcgaagacaatgaggaaccctcgtagtgctctttgca

SEQ ID NO: 253360 - DNA, 554 bp, Glycine max
  unsure (1)..(554): unsure at all n locations
ggatggggagatgataaagatgagaggatggagtatgggatgaaagagagaggtaggacgaggttgnattatgattaaggagagtaatcgtcaagacgtactatgacgtcgcatgcacgcgtacgtaagctcggaattcggctcgaggagatatttcgaatttcgatactttgatcaaaaccacagcactccctcaatcctgaccgctggctcttcaggatccagtgtcgtggttcccaaggacttcagaatgctgggaggagctngaaaaaggagaaaaaagaatcggagatggacagtagctatggatggatgatggtgacgacatttacatgcgctcttgactgaaccattatggcccctatatactgtccatgaaggaggaattaatcaattgaagttgttttgtgataaagactacccagaaagcccccagtgttcggtttcattcacgaatcaatatgacttgtgttaatcatgaaactggagtgggttgaatcaaagaaatttggtcttcttgccaaattggcaaccggaggtttaccatggaaaaa

SEQ ID NO: 253361 - DNA, 563 bp, Glycine max
  unsure (1)..(563): unsure at all n locations
gtatatatgatggtnatgatgatgagagaatgttgatatggtagatgggtagagtgaggaacntnnagtcgtttatgattaaagagacttgatggaaacactatagaagagctatgacgtcgcatgcacgcgtacgtaagctcggaattcggctcgagtggctccactgaatttggaagaaattggcagcaggttaccaccaaaatgcagtggtagtgaaactgtgcgtatggctcggtcactcattgctgctcgtcatgctggtgagaggctattgagatgctggggtggagggactggttgggctgtggaggatgccaaggacaaaatcatgaagctcttagaagagtacgaaagtggcggggttgtgagtgaagcttgccaatgcatccgtgatctgggaatgcctttctttaaccatgaggtagtgaagaaagctttgattatggcgatggagaaaaagaatgatcatatgctagatctactgcaggagtgcttcagtgagggcctgatcaccattaatcagatgacaaaaagtttcaccccaataaaggatggtcttt

SEQ ID NO: 253362 - DNA, 562 bp, Glycine max
  unsure (1)..(562): unsure at all n locations
agagagatataatatgataagaatgttgnttggaatgagtaatagaggtgggtnatnaaaatgtgnttttatgaattgagggatataagagataccttcatagaagagctatgacgtcgcatgcacgcgtacgtaagctcggaattcggctcgagatcaaaacctcagaacgcactttgatcttcccttcccaccctccttttctccaacaccaccccttccctctctcccacctcgacactgatcccaacctccacctcaccttccgctacctccgcgcgtacacctcaacaacaacaacaacctccctcgaccccttccacgtcatctcctcctccctctcccacgcccttccccacttctaccccctcaccgccaccctccgccgccaacaaacctccccccaccgcctccaactctggtgcgtcgccggccagggcatccccctcatccgcgccaccgcggacttcaccctcgagtccgtgaacttcctcgacaacccggcctcgagcttcttggagcagttagtgcccgacccgggacccgaggaggggatggagca

SEQ ID NO: 253363 - DNA, 556 bp, Glycine max
  unsure (1)..(556): unsure at all n locations
ggattatgaaagaatgtgatgtgtggtggatgaatggntgagataaggggaggaccggggtttattatgattatgaactttatgtagcctctagaagatcttgacgtcgcatgcacgcgtacgttagctcggaattcggctcgagataccacacaacacaaaacgcaagtcaattggcgtcggcacgattcagagatttggttcgctgcctgaaacctaatggctccgaaggccaaaccggcgccatcgcagcctgctcctcctcctgccctcgaagatctcttcaccacgctcaaccgccacatccaggcttccgcatacgacaatgccgtcaagctcacagatcagattctcgccattgctcccggcgacgaggacgcgctccgatgcaaggtcgtcgcgctgataaaaaatgaccgcgtcgaggacgcgctctccgccattcattcctctaagaagcagcttgatgattttcatttcctcaaggcatactgcttatacagaccaaacaagttggatgaagccttggagtctttgaaaagacaagagagcaatg

SEQ ID NO: 253364 - DNA, 543 bp, Glycine max
  unsure (1)..(543): unsure at all n locations
agttagatccttagatctggttattgaatagaaagttatcttgcaagactctagcttgcatgcctgcaggtcgactctagaggatcccctcggggaattccaattccacatttttaagaaataaggaagcaaaaatgttcatatgtgaattggaattatttgttttcttattaggcctatcctgaagccaaaggaaatgagatcggaattcctcggggaattccaattccacattttcaagaaataaggaggcaaaaatgttcatatatgaattggaattatttgttttcttattaggcctatcctgaagccaaaggaaatgagatcggaattcctcggggaattccaattccacattttcaagaaataaggaggcaaaaatgttcatatatgaattggaattatttgttttcttattaggcctatcctgaagccaaaggaaatgagatcgggatttcttcgggggtaccgaacttcgaattccctatagtgagtcgtattaaattcgtaatcatgtcatagctgnttcctgtgtgaaattgt

SEQ ID NO: 253365 - DNA, 550 bp, Glycine max
  unsure (1)..(550): unsure at all n locations
ngagtaaggctcagtcacgatggggagggggagaaaatggaatcactctagaagagctatgacgtcgcatgcacgcgtacgtaagctcggaattcggctcgaggtcgtcgtggtcgtgtcgcagcaaaaccaagccacccactaacttgtttggtccaagacatggctctgatcctgcatgctaccaaaacaaacaagaatgccttcaagactctgattgcggcagagtacagtggcgtccaagtggaattggcccctaatttcgagatgggtgtctctaacaaaactcctgaatttctcaagatgaatcctattggaaaggttcctgttttggaaacgcccgatggtccagtctttgagagcaatgcaatcgctcgttacgttgctcgactaaagggtgacaacgctttgttctcatcttctgccattgataatgcccacattgaccagtggattgatttttcatccttggagatcgatgctaatctcatgaaattgctcctaccaagacttggatttgccccataccttcctccagttgaggagggtg

SEQ ID NO: 253366 - DNA, 560 bp, Glycine max
  unsure (1)..(560): unsure at all n locations
aatagagtngggaaggagatgagagggatggtntatggaatagagagagagtgtgaacnttcgggttgatttagaagatatgatagctaatcgtcatagaccagctatgacgtcgcatgcacgcgtacgtaagctcggaattcggctcgagcttgccatggcctcaaactccatggctggcttgatcaccggttcgaattctcacttctcgcgtgactccgatgagcatcagactcctcctacccgacaggcttcatcgaaaactacttgtcgagtttgtggcgatgagattggatacaaggaaaatggggagctgtttgtggcttgtcatgtgtgtggatttcctgtttgccgaccgtgttatgagtatgagaggagtgaagggaaccagagctgtcctcaatgcaacactcgctataagcgccacanaggttgtcctagagtagctggagatgaagaggacaactntgatgcagatgattttgatgatgaatttccgggtaaaaatcatcgtgaagatctagatcggaaccatgatgttaatcatgtggaaaatggng

SEQ ID NO: 253367 - DNA, 555 bp, Glycine max
  unsure (1)..(555): unsure at all n locations
tataatatgagatatgagataggagtaataaggtagattatgtgtagtatagaagctcgnttatagaataaggaactatatgtcaacacttactatgacgtcgcatgcacgcgtacgtaagctcggaattcggctcgaggaaccgtgtagttgcatcaatgttcaacacagtctcaagccaaaagaattccttatctgggattggccttcaagaaagacactggtgacactagggagacccctgccattgatgtatgccaggggctacttggtgataaggccaacctgagcatatacgatccacaagtaactgaggaccaaattcagagggatctatcaatgaacaagtttgattgggatcatcctatccacttgcagcccacaagtcctactactgtgaagaaggtcagtgttgtttgggatgcctatgaagcaacaaaggatgcacatggcctttgcattctaaccgagtgggatgagttcaagactctcgactaccagaggatatttgacaacatgcaaaaacccagcatttgtttttgatggcagaaacat

SEQ ID NO: 253368 - DNA, 510 bp, Glycine max
  unsure (1)..(510): unsure at all n locations
ggggatgtaataggagtgtngtcgaataaagaacttactgtagacctcatagaagagctatgacgtcgcatgcacgcgtacgtaagctcggaattcggctcgaggtaaaaacctgccatgacagtaataacaatgcctcctgtcttatcttactctcttctttccctcgcgttcttcttcactctcaagtaccttttccaaagaagcagaaaagtacgaaacctgccacctggtccgactcctcttcctataatcggcaaccttaacctcgttgaacaacctatacaccgtttcttccaccgcatgtcccaaaaatatggaaacatcatatccctttggtttgggtcacgtcttgttgtggttgtttcatcacccacagcgtaccaagaatgtttcactaaacatgatgttaccttggccaacagggtacgctccctctcgggaaaatacatattctacgacaacaccaccgtagggtcttgctcccacggcgagcactggcgcaacctc

SEQ ID NO: 253369 - DNA, 577 bp, Glycine max
  unsure (1)..(577): unsure at all n locations
ggagagaggatgttgaatgagtntgntgagtgagtgatgatatgtnatgattagatagtgggtatnagagggtctgatgcatgatagaaggaagctagttcgtnannccnatagaagatctatgacgtcgcatgcacgcgtacgtaagctcggaattcggctcgagctcgagccgaatcggctcgagaacctacctgtttttcttctctctcaacaacttcaccttcttcctcctcgatcatgtctcacttcaagggcaagtaccatgatgagcttatcgccaatgctgcgtacattggcactcctggaaagggtattcttgctgctgatgagtcaacagggacaattggcaagcgtttggccagcatcagtgtagagaacattgaatccaacaggcgagctcttaaggagctgcttttcactgctcctggtgttcttcaatatctcagtggtgtcatcctctttgaggaaaccctctaccagagcacagctgcaggcaagccctttgtgaatgtcttgaaggaagctggtgtgctttctggcatcaaaggttgccaggggcacaagtcagcttgct

SEQ ID NO: 253370 - DNA, 559 bp, Glycine max
  unsure (1)..(559): unsure at all n locations
gaggttagagctgaagtcgnttatgaagggatgggggggaaaacgagagacattatagaagagctatgacgtcgcatgcacgcgtacgtaagctcggaattcggctcgagaaactcatttctcatctcaatcaatccaatggactctcccaacgctttgtctaccgctccggcagcgggtagtaggaagaacgcgacgctaatttgcgtcccaataatgggagaatcagttgaaaagatggagattgacgtggacaaagcgaaagccggaggcgcggaccttgttgaaattcgattggattctttgaaaacctttgacccctatcgagatctcaacgctttcattcaacaccgttctttacccttgttgttcacttacaggcccaaatgggagggtggtatgtatgatggtgatgaaaataaacggctggatgcacttcggttagccatggagttgggagctgattacattgacattgaacttcaggtagcacatgagttctatgactctatacgtgggaagacattcaataaaaccaaggtcattggttcatctcaca

SEQ ID NO: 253371 - DNA, 538 bp, Glycine max
  unsure (1)..(538): unsure at all n locations
ngagtaaganctcggttgatagtgggaggagatatatgtcagactagctatgacgtcgcatgcacgcgtacgtaagctcggaattcggctcgagcagaattctctaaaagagatctttttctgctctttgaagaaagaagggtctttgcttgattttggagatgtctctgctctcagatctcatcaaccttaacctttccgataccaccgagaaggtgatcgcagagtacatatggatcggtggatcaagaatggacctgaagagcaaagcaaggactcttccaggaccagttagcgaccctttaaagctttccaagtggaactatgatggttccagcacaagtcaagctcctggtgaaaacagtgaaatgattttatacccacaagccattttcaggggtccattcagaaggggtaacaatatcttggntatctgtgatgcctacactnctgcttgagaaccctattccacttacaagaggcacgcttgttgccaggttttaagccttcctgatggtgttccttgaatggccatggt

SEQ ID NO: 253372 - DNA, 560 bp, Glycine max
  unsure (1)..(560): unsure at all n locations
ggtaagggcctgaatgtcgnttatgggcgaagggggggaaaatgagagacattatagaagagctatgacgtcgcatgcacgcgtacgtaagctcggaattcggctcgaggctgtctgctgttagatctgtacccgcctagccattgatttggaaaagtccaacttcaaggatgagtaagcttcagagtgatgctctaagagaagctatctcaggaatcatggctgattccaaggaaaagaacaggaaatttgtggagaccattgaactccaaattgggttgaaaaattatgatccccagaaggacaagcgtttcagtggctctgttaagaagcctcagtctcaacacagaagcagaaggaggagaagcagaaagaagagacgaagcaatggcgccgaagaagcccaaaaccacgtcgaggaaaccctgatttggtcaagggaattggcaanatattcgaggtcgcagatgtaccacangaggggcatctgggccatcaaggccaaaaccggcgggttttgcccctccacgatcccaagcccaaacccgaggccccggccc

SEQ ID NO: 253373 - DNA, 540 bp, Glycine max
  unsure (1)..(540): unsure at all n locations
gattgagttataatataattttatnattatgtaatggtgggagcttagtgnttatgatagaggactatatgctaaccttctagaagatctatgacgtcgcatgcacgcgtacgtaagctcggaattcggctcgaggtgactcgttcttcttcgtcgttatcttcttcttttggtgtttgtgtgtttgttttttctctcacctgaaaatgtcttgctgcggtggtaactgtggttgcggaagcgcctgcaagtgcggcaacggctgcggaggctgcaagatgtacccagacttgagctacaccgagtcaaccaccaccgagaccttggtcatgggagtggcaccagttaaggctcaattcgagagtgctgaaatgggtgttcccgctgagaacgatggctgcaaatgtggagctaactgcacctgcaacccctgcacttgcaagtgaggtgttggagagctaaagcttcaagcagagatggcccttagaaataatgataaaaactatatgtagtttcaaaacttcaaaattatgtagtatg

SEQ ID NO: 253374 - DNA, 508 bp, Glycine max
agaggatcagaggtcacttatgatactgatgtaatagccaacactatagaagagctatgacgtcgcatgcacgcgtacgtaagctcggaattcggctcgagcacacacctcacctattagaagtaacaaaagaccctgggtctcaaaagaataaacaagtataaaaaagaaggcacttccctcaaacagaaactaccctctatctctctcttttcaagccttaaatgagtaaaaaagagtgaagaaaggaaagaaaggagcaccatttttggtttgagaaacataattagcaagagagttcaaaatggggaagagagagtttaatggggtggtgttgatgatgctgtgtttgtgggtttgtggtgtcacagcctctgtgacttatgaccacaaagccattgtggttgatggcaagagaagaattttgatctctggctccattcattatcctaagaacacacctcatatgtggccagaccttattcaaaaggccaaagatggaggcctt

SEQ ID NO: 253375 - DNA, 544 bp, Glycine max
  unsure (1)..(544): unsure at all n locations
ngagtaagannctcagtttgatataagaatgagaagtattcgtcaaacctagcttgcatgcctgcaggtcgactctagaggatcccctcggggaattccaattccacattttcaagaaataaggaggcaaaaatgttcatatatgaattggaattatttgttttcttattaggcctatcctgaagccaaaggaaatgagatcggaattcctcggggaattccaattccacattttcaagaaataaggaggcaaaaatgttcatatatgaattggaattatttgtgttcttattaggcctatcctgaagccaaaggaaatgagatcggaattcctcggggaattccaattccacattttcaagaaataacgaggcaaaaatgttcatatatgaattggaattatttgctttcttattaggcctatcctgaagcccaaaggaaatgagatcggaatttctcggcgaattccaattncacattttcaagaaataacgaggcacaaaatgttcatatatgaattggaattatttgctttcttattagg

SEQ ID NO: 253376 - DNA, 567 bp, Glycine max
  unsure (1)..(567): unsure at all n locations
agtatgaggtantnttgagtcagannctgaggtgtgtaacgttgattagcataaaaagtagactctgagagatagctagcatgcctgcacgtcgactctagaggatcctctcggtgaattccaattctacattttcaagaaataaggaggcagaaatgtgcatatatgaattggaattatttgttttcttattaggcctatcctgaagccaaaggaaatgagatcggaattcctcggggaattccaattccacattttcaagaaataaggaggcaaaaatgttcatatatgaattggaattatttgttttcttattaagcctatcctgaagccaaaggaaatgagatcggaattcctcggggaattccaattccacattttcaagaaataaagaggcaaaaatgttcatatatgaattggaattatttggtttcttattaagcctatcctgaagccaaaggaaatgagatcggaatttcctggnggtaccgagctcgaatccctatagtgagtcgtattaaaatcggtatcatgtcatagctgttttctgggtgaaaatgtcatccg

SEQ ID NO: 253377 - DNA, 570 bp, Glycine max
  unsure (1)..(570): unsure at all n locations
ggatgaggggnntaggtaaggggcttaggtcnnccaatggatctcgtatgctattcttnanactcttnngaattngcttgcatgcctgcaggtcgactctagaggatcccctcggtgaattccaattccacattttcaagaaataaggatgcaaaaatgttcatatatgaattggaattatttgttttcttattaggcctatcctgaaaccaaaggaaatgagatcggaattcctcggagaattccaattccacattttcaagatataaggaggcaaaaatgttcatatatgaattggaattatttgttttcttattaagcctatcctgaagccaaaggaaatgagatcggaattcctcgggggtaccgagctcgaattccctatagtgagtcgtattaaattcgtaaatatgtcaatagctgttactgtgttaaattgatatccgatcacaattccacacgacatacgagccggaagcatagagtgtaaagccctgnggttgcctatgagtgagctaacttacattaattgcgatgcgctcacttgccgctgtncagaccggaacctgc

SEQ ID NO: 253378 - DNA, 530 bp, Glycine max
  unsure (1)..(530): unsure at all n locations
ggttttagagtttgtacagaaagaatagtactgctatagcgacatgcttgcatgcctgcaggtcgactctagaggatcccctcggggaattccaattccacattttcaagaaataaggaggcaaaaatgttcatatatgaattggaattatttgttttcttattaggcctatcctgaagccaaaggaaatgagatcggaattcctcggggaattccaattccacattttcaagaaataaggaggcaaaaatgttcatatatgaattggaattatttgttttcttattaggcctatcctgaagccaaaggaaatgagatcggaattcctcggggaattccaattccacattttcaagaaataaggaggcaaaaatgttcatatatgaattggaattatttgttttcttattaggcctatcctgaagccaaaggaaatgagatcggaatntcctcggggtaccgagctcgaattccctatagtgagtcggattaaattcgtaatcatgtcatatctgtttcctgtgtgaaaa

SEQ ID NO: 253379 - DNA, 545 bp, Glycine max
  unsure (1)..(545): unsure at all n locations
ggttnnaggtttagaaggttttntaatcgacatcggcgtgttatcagtcacactctataagacctcgcatgcacgcgtacgtaagctcggaattcggctcgagggagattggtaatgttgggaatttgtatatggatcaacgtgcgccatggtctctctttaagcaagggggtactgctgctgaagcagctgctaaggaccttgtaattatattagagacagtgaggattattgcaattgcactatttcctgttacaccaagcttgagttggagaatatatgcccaacttggctattccagggaccaatttgatgcagcaacctggagagacaccgagtggggtgggcttaagggtggccaagtcatggctcaacctaaaccagtctttgccaggattgaaaaccaaactgaagtggaagacaaaggagtcgcagttggaaagactaagaaaagcaaagcgaagccgaaacagcctcaagaagtcgtcggagcctagatacccatttttgacatttttccctttttgaaatgtaatggtgtcacc

SEQ ID NO: 253380 - DNA, 534 bp, Glycine max
  unsure (1)..(534): unsure at all n locations
ggtnntaaagttngtacagacgtgtatagttatactactatacgagctatgacgtcgcatgcacgcgtacgtaagctcggaattcggctcgagcaggctctggttttgcggttagggtagctctttctactcaaagcaaagcaaaacatcaatttctgtttcagttcgcggagatcaatatttgtcgctgaggtcgatcgtcgataaaaggcaatgtttttgtgggattggttttatgggattctagcgtcgcttggcctgtggcagaaggaggccaagatcttattcttgggcctcgataacgctggcaaaaccaccttgcttcacatgctcaaagatgagagattagtccagcatcagcctacccaatatcctacatcagaggagttgagtattgggaagatcaagtttaaagcttttgatctcggnggtcatcagattgctcgaagagtttggaaagattactatgcccaggtggatgcaatggtgtactcgggtgatgcttatgacacgggaaaatttgctgagtcaaaa

SEQ ID NO: 253381 - DNA, 543 bp, Glycine max
  unsure (1)..(543): unsure at all n locations
tgttntggtttaggtggtctgattacgaaactgtatgtntttcnannncctttaagagctatgacgtcgcatgcacgcgtacgtaagctcggaattcggctcgagtgagaattcaattattggaaatggattacgtaaccagtttaattggatgggtcgaatggtttcaaaaaatggagttctaacttccatttcttaattattattgaattaaccgatcaacttgctttgttatcgaacatttctttttgatttcaaaaattttccggaaaaaatttgaatctatttttatatgcgaatcaatcctactacttctggtcctgaggtttctgcgcttgaaaaaaaaaaatctgggacgtatcgcccaaataattggtccggtactagatgtagcttttcccccaggtaagatgcctaatatttacaacgctctgatagttaagggtcgagatactgttggtcaacaaattaatgtgacttgtgaagtacagcaattattatgaaataatcgaattagagctgtagctatgaatgcgacagaag

SEQ ID NO: 253382 - DNA, 539 bp, Glycine max
  unsure (1)..(539): unsure at all n locations
aggttnttaagagtgtgtttacgaacgggcgctgtattgccacactctagaagagctatgacgtcgcatgcacgcgtacgtaagctcggaattcggctcgaggggaattccagtgttatgaccaaaacatgctcagctttctcaagcaacatgctgaagcatctggaaatcctctgtgggggcttggtggtcctcatgatgcacctacctatgaccagcccccatacaatggcttcttcaatgatggggcttcttgggagtccacatatggggacttcttcctctcttggtattccaatcagctcatagctcatggagattgcctcctttcattggcatcttcaacttttggtgactctggggtgacaatctatggaaaacttccacttatgcactctnggtatgggactcgattccatccttcagagctaactgcagggttctataacccagttaacaaggatggctttgaaccanttggaccnaagtttgcgtcggacctctgccaaattttattaccccgggatgggcccctttga

SEQ ID NO: 253383 - DNA, 548 bp, Glycine max
  unsure (1)..(548): unsure at all n locations
agttataggtttagaacgtctggtcacgcgacgcagtgtcatangcannntctttnnnanttatgacgtcgcatgcacgcgtacgtaagctcggaattcggctcgagcgtagccgtcgcactttgcgttttctgcgtcatctccgattgcccgacaatggccacccaaatgagcaagaagagaaagttcgtagctgatggagtgttcttcgctgaactgaacgaggttctgacaagggagttagccgaggacggatactccggcgtggaagttagggttacgccgatgcgcaccgaaatcatcatcagagccaccagaacccaagccgttctcggtgagaagggaaggagaatcagggaacttacctcggtggttcagaagaggttcaagtttcccgagaacagtgttgaactttatgctgaaaaggtcaacaataggggtctttgcgctatagcacaggctgagtctcttcgctcaagctccttgggggcctaactgtgcccaaggcttgctattggggtttgaggtttgttattgagaatggtgct

SEQ ID NO: 253384 - DNA, 543 bp, Glycine max
  unsure (1)..(543): unsure at all n locations
nggttttataagtgtgtttacgtcaagacanatcattgtcaacactctagaagagctatgacgtcgcatgcacgcgtacgtaagctcggaattcggctcgagcggatcttcacgattaggagatggctaagtcgaagaaccacgccgctcacaaccagtcctacaaggcccacaagaatggcatcaaaaagccaaagaggcaccgccacacttccaccaaagggatggatccaaagtttctgaggaaccaaaggtacgcgaggaagcataacaagaagagcggtgaaacagccacggaagaagagtaaagtgtcactctcaaatggggctattaggatttgatttgctattcaagtcccatatgttttgtgtcaaatctatatttagtagtatagtcattttgatgagttaatttaatccagagagaatgcagtacttactcttatagcatcgttgctggtttttggttggtaaaagaccctttaattttataggtggggatatatatcagtggggaaaccctttaaaaaccgggtaatagag

SEQ ID NO: 253385 - DNA, 536 bp, Glycine max
  unsure (1)..(536): unsure at all n locations
gggttntctaagtgtgtaaaggcgggcgaatgatacaactacagacgagctatgacgtcgcatgcacgcgtacgtaagctcggaattcggctcgagatcaaaacaaccttctttctttcaggttcttgatcagtgtcaaaaccaaaagggtggttgcaaattgcaatggctaagcatgatgttgagggtggttccttcgctgcaaaggactaccatgatcctnctncagcaccattgattgatgctgaggaactcacacagtggtccttctacagggctttgattgctgagttcattgccacaatgctcttcctttacatcacagtgctcactgtgattggttacaagagccagagtgatgtaaaggctgggggtgatgtgtgtggtggagttggcattcttggcattgcttgggcctttggtggcatgatcttcattctggtgtactgcactgctggaatctcagggggtcacataaacccagcaatgacatttgggctcttcttggctctcaagtgtcttttattatagcaaaa

SEQ ID NO: 253386 - DNA, 541 bp, Glycine max
  unsure (1)..(541): unsure at all n locations
ggtttttngtttagaagttgattacggcatagactgtaatngcanntcctttannattatgacgtcgcatgcacgcgtacgtaagctcggaattcggctcgaggggctattctgtaccttttgatgacaacatcaactttcataagacaattgctggggccatcgttattggtattatacttcatgccggggatcaccttgcttgcgattttccaagacttgtaagtacgtctgaagaaagttatgaaaagtatttgaaaggcgtatttggtgatcgtaaacccagttatgtagacctagttaaaggcgtcgagggtgtgactggagttttgatggtggttcttatgataatagcatttacacttgctaccaaatggttccggagaaatctcattaagctgcctaaaccatttagtaggctcactggcttcaatgccttctggtattcacaccatttgtttgtcattgtctatgtcctcctaatcatccacggaataaagctttacctcgtgcataaatggtacctcaaaacgacatggat

SEQ ID NO: 253387 - DNA, 533 bp, Glycine max
gataagattttttacgacaagacatagtatagcatcactctagaagagctatgacgtcgcatgcacgcgtacgtaagctcggaattcggctcgagccaaaggcttcggcgaccgcccgtgatggataaagtcttcagcaagctccgcaatttggacgcttacccaaaagtcaatgaagatttttacaaccgcacgctcgccggcggcgttgtcaccgtcgtttccgccgccgtcatgctctttctcttcttttccgagctaagttaatacctttacacagttacggaaagtaagctttgggtggatacttcaaggggagataccttgcacatcaattttgatgtcacttttcctgctgttcgatgttcaatactcagcttaaatgcaatggatattagtggcgagcagcatcttgacatacgacataatatagggaagaaaagaattgacgctaaggggaatgtgatagaagaaaggaaggatggaattggtgcaccaaaaattttggagaccctttaagaaaccttgggggg

SEQ ID NO: 253388 - DNA, 552 bp, Glycine max
  unsure (1)..(552): unsure at all n locations
nggttntggggttttggaatggntgttactgaaacgagatcgtctatgcaanactctagaagagctatgacgtcgcatgcacgcgtacgtaagctcggaattcggctcgagagcatccccgcagtttgtttcctcaagaaggatgagtgtgtacgatccgatccaccagattagtatgtggggagaaggcttcaaaagtaatggaaatttaagtgcagccatgcctctaattgatgagacagacatgaagtttgatagtcagtcagaggatgcttctcatggtatactgggagagcctaataagtatgaccaagaagctaacaaacctactgataagatacaaagacgtcttgcacaaaatcgagaggctgctcgtaagagtcggttgaggaaaaaggcctatgtgcagcagttagaatcaagtcgtttgaagttgatgcagttggagcaagagcttgaacgtgcaagacagcagggaatttatataggcggtgggttggattctaatcatctgggttttgctggatcagtaaattcatgaattacaacctt

SEQ ID NO: 253389 - DNA, 530 bp, Glycine max
aatggttttaacggcgaagggtagaaggagaacactctagaagagctatgacgtcgcatgcacgcgtacgtaagctcggaattcggctcgagggaaaatggaagatcaacttcttatctacccaaaagtgggaaaatccactgatgggctggacatccactggggacccctactctcatgttggtgattctgccttgacttttgatagtgaagaagcagcaaaagcatttgcagagaaacatggttgggagtattcggtgaagaagccccacacaccattgctgaaggttaaatcatatgcggacaacttcaaatggaagggaccacccaaatctggtgaagagtgatttgttggtttgtattcatgttaatgcattccgtcttctggagtttaacgtgcagcagttttctctgcatcttttcttggaaaaaagaaagttttaatgtgaattactgattggaaataaaagggactgatctgccatttatttaagtttcttctatgatgtagatacttgatctgtttataa

SEQ ID NO: 253390 - DNA, 500 bp, Glycine max
  unsure (1)..(500): unsure at all n locations
nagtatggnctaggtctgaatgcgggtagggggggaaaaagtatacatcatagaagagctatgacgtcgcatgcacgcgtacgtaagctcggaattcggctcgagggcgcgttttgcatgctcagtttgggactctgcaatctgtacacacccctcaaaacggggtgcgttcaatctctcttacgatccaagttgggtattcgaacccagtcctgcatcagaatggaagggagtaacaccaccgtgcccagcattgttgtctatgtcactgttcccaacaaagatgcaggtaagaagttggctgaaagcatcgtcaaagagaagcttgctgcttgtgtcaacagggtaccgggtattgaatcggtgtaccagtgggagggaaagatccaaactgattctgaggaactcttataatcaagactaggcnatcccttctggaggcactgacagagcattgtcaggctaatcatgaatatgatgtgcccagagtgatctcctta

SEQ ID NO: 253391 - DNA, 510 bp, Glycine max
  unsure (1)..(510): unsure at all n locations
agtagtnttaagttgtatgaaatgcgggtaaatggaacactcatagaagagctatgacgtcgcatgcacgcgtacgtaagctcggaattcggctcgagaaagaataatttatggaggacggcgcaggaagaggtttggaatgccagaagactatggatgggaaggtgagtaacagtaatgggccagagaaggaaattccttcttgttgtctgaaggccaaggcttcaatccccgagtcagaggcaaaattccattccactgttgtttctgggtggttctcagcttctcaaacttgctctgggaaatctgggaaagctgtttatttcaacaacccaatgtggccaggagaagcccattcaatcaaagtagaaaagatcttatacaaggaaaagtcggagtaccaggaggtcttggtttttgagtcatcaacttatgggaaagtgcttgtacttgatggaatagttcatttgactgagaaggatgaatgtgcttaccaggagatgatggctc

SEQ ID NO: 253392 - DNA, 534 bp, Glycine max
  unsure (1)..(534): unsure at all n locations
nggttttagattgtaaagagggagggtgataatgctacatccgagctatgacgtcgcatgcacgcgtacgtaagctcggaattcggctcgagttagcctttcactctcccacacaacaacatcatgggcgtcaaaggttttgtcgaaggaggcatcgcttccatcattgcaggatgttccacacacccacttgatctcatcaaggtccgcatgcagcttcagggcgaaaacaatttgcccaaaccggttcaaaatctccgacccgcactcgccttccaaaccggttcgaccgtccacgtggcagcggctattccgcagacccgcgtgggtcccatcgcggttggggttcgcctcgtccagcaagaaggccttgcggccttgttctccggcgtctccgccactgtcctccgccagacgctctactccaccacccgtatgggcctctacgacgtcctcaagaccaagtggaccgacttcgtcaccggcaccatgccgctcaaccgcaagatcgaggccggtctcatcgtccggggc

SEQ ID NO: 253393 - DNA, 545 bp, Glycine max
  unsure (1)..(545): unsure at all n locations
ggggtggaggttaagtaggcttctaaggggcggagagggtaaagtaaagaccagctatgacgtcgcatgcacgcgtacgtaagctcggaattcggctcgagctggagaggcatgaactggaatagcagaactaatagctcttgagatgtcaaagcagacaaagacacctatagaggagactcgcaagaagatatggcttgtagactcaaagggtttgattgttggttcaagaaaggcttcacttcaacacttcaagcagccttgggctcatgagcatgagcctgtaggcagtctcttagaagctgttaaggtaatcaagcctacagttttgattgggtcatcaggagtgggaaaaacatttacaaaggaagtaattgaggctgtgacttctataaatgaaaaacctcttgtcctggctctctccaatccaacttcacagtctgagtgtacagctgaagaggcttatcaatggantgagggtcgtgcaatttttgctagtgggagttcaatttgatcctgtagaatacaagggcaaagtgttctat

SEQ ID NO: 253394 - DNA, 546 bp, Glycine max
  unsure (1)..(546): unsure at all n locations
ngtgngggggtttagacagttagttactgacaggcgcttactagcatcactctagaagagctatgacgtcgcatgcacgcgtacgtaagctcggaattcggctcgagccttgctcttgtttgttccttttattgtttctttcttgatcatgtcgcttgttggtaaaattagtactgaaattggggttcatgcaactgctgcaaagtggttcaacctctttgcaacgcagctccatcatgttcaaaaccttactgatagagtgcatgaaaccaagctgcatcatggtgatgactggcatcacaacgagtcgatcaaacactggacttgtacaatagatggtaagattacaacatgtctggagagtattgaatccgttgatgaaccgaacaaaacaatcacctacaagctcttcggaggagatattggtcataagtataaagtctttaagctcatttttcaagctattgacaccgatcatgggggtgttattatcaaatggaccgttgaatatgagaagattgatgagaatgttgatcctncgtatgg

SEQ ID NO: 253395 - DNA, 528 bp, Glycine max
gattgtttcgcgggagggtggtacggtatcactctagaagagctatgacgtcgcatgcacgcgtacgtaagctcggaattcggctcgagcttgtccctatttaaatagctatctagaaagtcctctctatgttccatttcatctcccatactcaaactcactctttctaagttttttctatctctttctctctctctgtctgccatggttctctccaaaaccacctccgaatccgacgtctctgtccactcaaccttcgcttctcgatatgtcagaacttcgcttcccaggtttaagatgccggaggagtcgataccaaaggaggcagcgtatcaaataataaacgatgagttgatgttggatgggaacccaaggttgaacttggcatcatttgtgacaacctggatggagccagagtgtgataaactcatcatggctgccattaataagaactatgttgacatggacgagtatcctgtcaccactgagttaccgaatcgatgtgttaacatgttagctcatcttttc

SEQ ID NO: 253396 - DNA, 504 bp, Glycine max
gagtgtgggcttaagtctcgatgtggtgtgggggggggaagagaaaactctataagatctatgacgtcgcatgcacgcgtacgtaagctcggaattcggctcgagaacacattataactcctgtttctttattaattgtctctttcaaatatatggcagaagatgcttcaattattccaacacacacaaaagcttggtactactctgaacatggtagtccaggtgatgttctcaaattagatcctaattggcccttaccccaacaactcaaagatgaccaagtgctcatcaaggtcatcgctgcatccattaatcccgttgattacaagaggatgcacggcgagttcaaggacactgaccctcatctgcctattgtgccgggttaatgatgttgctggcatagtagtgaaagtgggaggaggaagtaaaaaaatttaaaggttggagatgaagtatatggtgatatcaacgagcaaggcttgtcgaaccttaaggatcatggca

SEQ ID NO: 253397 - DNA, 516 bp, Glycine max
  unsure (1)..(516): unsure at all n locations
tggagggcnttaagttgntatgtaaatggggggtaaatgagatacatcatagaagagctatgacgtcgcatgcacgcgtacgtaagctcggaattcggctcgagagggtttgtagtgtagcaggaacaagcagcaatggcgccgaaggtaacacgcaaggttagcagaaaccccgaattgataaggggaattggaaagtactcgaggtcgcagatgtaccacaagaggggcatttgggctatcaaggccaaaaatggtggcgttttacctcgccacgaccctaaacccaaacctgaaacacccgctgaaaaaccacccaaattttaccctgctgatgatatcaagaagccccttgtcaacaagcacaaacccaaacccgctaagctcagggctagcattactccgggaacagtgttgattcttcttgctggtagatttaagggaaagagggtagtctttttgaagcagctttcttctggattgcttcttgtaactggtcctttcaaggttaatgga

SEQ ID NO: 253398 - DNA, 516 bp, Glycine max
gagtaggggcttaagttgatttgtcgtatgggggtatatagtaaacattatagaagagctatgacgtcgcatgcacgcgtacgtaagctcggaattcggctcgagcgcaagcaaaaagaaagaatcccaggcgaggagaaagatggaggggaaggagcaggatgtgtcgttgggagcgaacaagttccccgagagacagccaattgggacggcggcgcatagccaagacgacggcaaggactaccaggagccggcgccggcgccgctggttgacccgacggagtttacgtcatggtcgttttacagagcagggatagcagagtttgtggccacttttctgtttctctacatcactgtcttaaccgttatgggagtcgccggggctaagtctaagtgtagtaccgttgggattcaaggaatcgcttgggccttcggtggcatgatcttcgccctcgtttactgcaccgctggcatctcagggggacacattaacccggcggttacatttggcctgtt

SEQ ID NO: 253399 - DNA, 531 bp, Glycine max
gagttaaacgttttacgaggagagatgtaatgctacatccgagctatgacgtcgcatgcacgcgtacgtaagctcggaattcggctcgagtgatctcccaacacagcctgagaactatctccatcgtattggtcgtagtggaaggtttggtaggaaaggtgttgccattaactttgtcacaagggatgatgaaaaaatgctgtttgacatccagaagttttacaatgtgattattgaggagctgccttcaaatgttgctgaactcctttgatgagtttttttgttccatcatattagaggaaagttggtttctgaggtaagtgttatgtaatgtttcttgttcctttttgccccttttgttgtatttctgctcttaaaccttgtttgaccttcttaataggtgtagttatttaatttacatatcagtcgtctgaatgtcccaagtgatgagtacttgcaatgtggagtcacattattttctgaattgatgtattggtagttgttgcacctttctaacacaaaaaaaaaaaa

SEQ ID NO: 253400 - DNA, 557 bp, Glycine max
  unsure (1)..(557): unsure at all n locations
nggtgnnnggggggtttaagtagtagtgnctttactgaacagagcgttataatagcatcactctagaagagctatgacgtcgcatgcacgcgtacgtaagctcggaattcggctcgaggtgagaataggctgactaatgacttcataattctcgataatcatgtggaaacaaatgatgcattcccaaagaaggccaaattgttctttgctcatgctgcagacaaatgggatgctgagttttatgcgaaagtcaatgatgatgtctatgtaaatattgatgccttgggagctacactagctactcatttggacaaacctcgtgtttacatgggatgcatgaaatcaggggaagttttctctgagctgaaccataaatggtatgaaccagagtggtggaaatttggtgacaaaaaatcatactttcgtcatgcatcaggagagatgtatgttatatcacaagctttggctaaatttatatcaataaacagatctattctncgtacctatgcccacgatgatgtgagtgctggatcctgggttatcgggcttgatgtgaa

SEQ ID NO: 253401 - DNA, 515 bp, Glycine max
  unsure (1)..(515): unsure at all n locations
nagtaggggcttaggttgtatgtggatgcggggaaaatgagaaacattatagaagagctatgacgtcgcatgcacgcgtacgtaagctcggaattcggctcgagaaaagccaaagttgtgaccacttccttagagtacaatgggataaactgcagagctcacagtgcttcattgacagattttggtggtgttggagatggaaaagcatccaacacaaaggcatttcagtctgcaataagtcaccttagtcagtatgcttctgaaggtggctctcagctctatgttcctgcaggaaaatggctcactggtagcttcagcctcactagtcacttcacactttatcttgacaaagatgctgttctccttgcttctcaggatataactgagtggcctgtgctcgaacccctcccatcatacggtagaggaagagacgcaccggcaggaagattcacaagcctcatatttggaccaacccttacctgatgtattgtcacaggtgaaaatggcaccataga

SEQ ID NO: 253402 - DNA, 543 bp, Glycine max
  unsure (1)..(543): unsure at all n locations
ngggttagttaaagttgtgtactgacggtggaatagcactagtctagaacagctatgacgtcgcatgcacgcgtacgtaagctcggaattcggctcgagtcaaaaactaagttcatttcttgtgctttgctttattcctcggaaccaaacatgtcgaacacatgcggcaactgtgactgcgctgacaagactaactgcaccaagggaaacagctatggtgttatagtagagactgagaagagctacatcgagactgttgacatggatgttccagcagctgagcatgatgggaagtgcaagtgtggcactaactgcacttgcacggactgcacttgtggccattaaggaatatgtatgaaaatgtaattgccatgtgtttggcaatacaaatctccaaataatgtaatcttcgtatgaataaatgtgtgctgttatcctacttcaaggtctgtgtagtcatgcagtctgaatcatgtccagttcctgtcataggtattaacagccatgggtgtggcattctatatatgggggtataataaaaaa

SEQ ID NO: 253403 - DNA, 530 bp, Glycine max
  unsure (1)..(530): unsure at all n locations
ggtttggagtttgacgaggggaggagtaatgtatgaccagctatgacgtcgcatgcacgcgtacgtaagctcggaattcggctcgagcataatcagagttcaggccactatttcacaatcgcaagtgataagagtaatagaacaaccactcaccccctctccgatctaatggccaccgtaatcgacggcaaagccgttgcgcaaatcatccgatctgaaatcgccgacgaggtgcgcctgctctctcaaaaatacggcaaggttccgggactagcagttgtgatagtagggaacagaaaggattcacaaagctacgtgggaatgaagagaaaggcatgcgccgaattgggaatcaaatccttcgatgtggaccttcccgaacaagtctcccaagctgaactaataaaacaagttcacgagttgaatgttaaccctgatgtacatggtatattggttcagcttccgttgcctaagcacataaatgaagagaaagttctgactgaaatcagccttgagaaggatgtanatgg

SEQ ID NO: 253404 - DNA, 541 bp, Glycine max
  unsure (1)..(541): unsure at all n locations
nggtttagacatagttttgtacgaacgaagggtataacggcaacactctagaagagctatgacgtcgcatgcacgcgtacgtaagctcggaattcggctcgagtcttcatcttgttctatctgtgacgagcatcatggcctcaagagcagtgttattgttggctatgtgtgtgcttccggcgatggttgtggccattcgcccagcaaagaaccctttttgcgtgaagggtcgtgtctactgtgacccttgccgtgctggttttgagacctcagctaccacctacattgctggtgctgagattatgttgcaatgcaagagcagggttagcaacgaggttgtgtacacgaagaaggggtacaccgactcaaccggagcatacacaatgtacgtggatgaggatcacgcagatcagatctgcagtgccaagcttgtaagcagccctcaccctcaatgcaaggaagtcaccccaggccgcgacgaaaccgtcgtgattctcacccgctacaacggcattggctccgacgataaggttcgccatgc

SEQ ID NO: 253405 - DNA, 551 bp, Glycine max
  unsure (1)..(551): unsure at all n locations
gggtnnggnggggtagagagatgttgttactgaagaggatataacaggaacactctagaagagctatgacgtcgcatgcacgcgtacgtaagctcggaattcggctcgagcacaaacacacaaaaaatttctagagcgagaaagtgagaggagagagaaagtagctgatcctccatggcctccaccaaggaacgcgaaaactttgtctacaccgccaagctcgccgaacaagccgaacgctatgaagaaatggtggaagcaatgaagaatgtggcgaagctgaacgtggaattgacggtcgaggagcggaaccttctgtcggtagggtacaagaacgtggtgggtgctcgtagggcttcgtggaggattctatcgtcgattgaacagaaagaagaagctaaagggaacgatgtgagtgtgaagaggataaaggagtataggcagaaggtggagtctgagttgtccaatatctgcagtgatatcatgactgttattgatgaacaccttattacctctagctcctctgggggaaaccctggggtttttttaac

SEQ ID NO: 253406 - DNA, 540 bp, Glycine max
gggtttagagttgtaacgaagggggcgcgctaacagtatcactctataagagctatgacgtcgcatgcacgcgtacgtaagctcggaattcggctcgagctcacctatggctccaatctcaaaactcattcctttcctattcttaacaacccttttagtttccctccaagttaatgccagagacagccaattcttcagcaaagtcacccctctcaacaacaacatcaaagagactgagactcccaaaaatgaaggccaagtaaacaagccagaacaacaaccaacattcattcctgaaactgaaaacagttatggcctatatggtcatgagactggtctgcaccctcccaccactacaacaactaatgctgcaccctacaccaccacttacaagccatacaaaactaccacagctgaagaggacactgccaagtactccaacatcaacaacttctacagcttcaagaaagatggctacaacaccaaccaaaatgagttgagtgatacaacatgactcacaagcactttttacaccaacac

SEQ ID NO: 253407 - DNA, 503 bp, Glycine max
gagtagggctaagttgtttgagagaggggggaaaagagaaatctcggagagactagcttgcatgcctgcaggtcgactctagaggatcccctcggggaattccaattccacattttcaagaaataaggaggcaaaaatgttcatatatgaattggaattatttgttttcttattaggcctatcctgaagccaaaggaaatgagatcggaattcctcggggaattccaattccacattttcaagaaataaggaggcaaaaatgttcatatatgaattggaattatttgttttcttattaggcctatcctgaagccaaaggaaatgagatcggaattcctcggggaattccaattccacattttcaagaaataaggaggcaaaaatgttcatatatgaattggaattatttgttttcttattaggcctatcctgaagccaaaggaaatgagatcggaattcctcgggggtaccgagctcgaattccctatagtgagtcgtattaa

SEQ ID NO: 253408 - DNA, 519 bp, Glycine max
  unsure (1)..(519): unsure at all n locations
nagtgagggcttcaagttgcatgtgggttcgggggaagaatgtgaaaccttctagaagatctatgacgtcgcatgcacgcgtacgtaagctcggaattcggctcgaggcacattgctgcttatggagaaggcaacgaacgtcgtttgacaggacgccacgaaaccgctgacatcaacaccttcttatggggagttgcaaaccgtggagcttctgttagggttgggagagacacagagaaagcagggaagggatattttgaggacagaaggccagcttccaacatggacccatacgtggttacttccatgattgcagacacaaccattctgtggaagccatgagcaaaacctgcatgttttctccctttggatggaaaggaacagttatgcttttcttagtaggatttggtctctctctctttttaccttttgattggtactatggttggtgccttgttggttggtgcaactaactggncaggggtngttcattggtntcttctattccttttcctcgtt

SEQ ID NO: 253409 - DNA, 552 bp, Glycine max
ggagttaggtgggttagtaaagagttgtttatcggatagtactgtctctgtcaagacgagctatgacgtcgcatgcacgcgtacgtaagctcggaattcggctcgagctcgagccgattcggctcgagagctgtaaagaaacgatgaatgcttcagactcagagaaagaagacgcagaaattgaagcaacagaaactgcacccgatgaagagaatgcgaaattgaagaagaaagagaagaaaaagaagaagaaagcttcgtcgaaggatgcagagaagaagcgcggcgtgtgctatatgagtcgaatcccccctcacatggaccacgtcaagcttcgccacattctctctcagttcggcgatattcaacgaatttttctcgctcctcaagattcttctgtccaagtgtctgccaagaggtcacgtggatcccgagaccaagcatattcagaaggatgggttgaattcggtaataaaagtgttgctaaaaaggttgccaatatgttaaatggtgaacaaatatggggtgagaaaaagtcatcattctactatg

SEQ ID NO: 253410 - DNA, 528 bp, Glycine max
  unsure (1)..(528): unsure at all n locations
naggctgtgttaaagagggaagagggtaaagtatgctcagctatgacgtcgcatgcacgcgtacgtaagctcggaattcggctcgaggtccccttcagctactaaattggagcagaggagtggcggaggacgaagtctacggcgacaatggttaacgaaacggtgcggtggtgtgctttgttgtagtcgtctccgatcatcatcgagaatgcgcaatctggctgcacctcattccttgggggttttcatctttcgccccaataagcctgcttttctcactctaccctcactctctcgaagatctctgccttgcatccagtgcggtgcagttcaattccgaccctgcatcgatatccacacagggaaagtgaagcatattgtaaggtccacccttcaagactcganaggctccgatcccgtcaccaattatgagtctgataagtcagctgctgaatacgccacgctttacaagcaagatggactcaattgggggtaacgtatcatgcttggtgcgattctttgagcaaa

SEQ ID NO: 253411 - DNA, 549 bp, Glycine max
gggttttagagcatagtgttttgtaacgaccggcggggtagaacgagaaatactctagaagagctatgacgtcgcatgcacgcgtacgtaagctcggaattcggctcgaggggagatgtgctcaagaacaatttattgcacaaatatcgacaagaagcttactcaagcagatgtcaaacacttctttgaatctatttgcggagaggttcatcgcttgaggcttcttggggattaccatcattcaactcgaattgcatttgttgagtttgcactggctgagagtgcaattgcagctctgagctgtagcggtgtgatcttgggttcactgcctataagggttagtccatcaaagacaccagtgcgccctcgtgctcctcgtccccccatgcactgaaccatcctttcacatgtttctggggatgctgcttcttggagatatatctacatatttacatacataggaaacagatttatttctagggtaccaatggcgtttgggggaaaccttttggccctgaaacattcgcattggggatatcttttttttcc

SEQ ID NO: 253412 - DNA, 540 bp, Glycine max
  unsure (1)..(540): unsure at all n locations
gggtnttagagttgtaaagagtgcggcgatggtaatggtatcactctagaagagctatgacgtcgcatgcacgcgtacgtaagctcggaattcggctcgagcagaagcagactctgcatttttcaaggagattgaactattagctagacttcaccattgtcatttggttcctttgcttggatactgctccgagttaaaaggaaaacatgttcagagattactagtatttgactacatggccaatggaaatttgagggactgtttagatggagtttctggaaaacatatcgattgggccactcgtgttatgattgcaataggagctgcaaggggcttggagtatctccatgaagcagctgctccaagaattcttcatagagatgtcaaatcaactaacattcttctggatgaaaattggcaagcaaaaataactgatcttggcatggctaaaaacttgagatctgatgaacctcccagctgttcaaaatcttccaacaggatgcangggaacattggctattttgcacctgagtatttcac

SEQ ID NO: 253413 - DNA, 536 bp, Glycine max
tttagtgaagtgagttactgaaggggagtatatagcatcactctagaagagctatgacgtcgcatgcacgcgtacgtaagctcggaattcggctcgaggtttcatctagttttccctctgttcttcttccgccacagttgatctgtctcgaacctttgtgaccaaggttgagaaacgctcactggtgggctatgagtttgagatatggcagtgtggtcttggttgctttagtgcttctgccacacatggcttctgctgcttcaattgtgaagaacctaccgggttacaagggtgatcttccattcaaacttgaaactgggtacataggagtgggagaagaagaagaggtgcaaatatttcacttatttgtggagtctcagagaaatccattcattgatccactgttaatttggtttgttggaggtcctggttgctctgccctatctgcgttcttttttgaaaatgggcctttagtaatgaatgagaattaccatggaaacctttcacaacttgagttgtacccacatttatggtga

SEQ ID NO: 253414 - DNA, 514 bp, Glycine max
  unsure (1)..(514): unsure at all n locations
nagggaggggntaaagcgtcgtaagtgaatcggcggggaaatgagagacattctagaagagctatgacgtcgcatgcacgcgtacgtaagctcggaattcggctcgaggccacacgcctcagtagaccatggcctcattgggtgggttacaaaatctaagcggcatcaattttcttatcaaaaaagagggtccaaaagtcaatgcgaagttcgagctgaagccgccaccatatccactgaatggtttggagccggtgatgagccagcagacacttgagtttcattgggggaaacaccacaagacatatgtggaaaatctgaaaaaacaaattgttgggacagagcttgatgggaaatcactagaagagattatagtgacatcatataataagggtgacattcttncagctttcaacaatgcaacacaggtatggaacccatgacttcttctgggagtgcatgaaaccaggtggaggtggaaaagccatccgggagcttctagaactgattgaaa

SEQ ID NO: 253415 - DNA, 517 bp, Glycine max
  unsure (1)..(517): unsure at all n locations
naggaaggncctcnagttatatgtgagatgggggaataatgtgaatacttctagaagatctatgacgtcgcatgcacgcgtacgtaagctcggaattcggctcgagggcaggtctattgacataacacccgaatccaagtgaaacgaaaaacactcatcatcatggattcagttgcattaaatggcaaaagcaatgataagcctcttcacgttgccatgctcccatggctggccatgggtcacatatacccttacttcgaagtcgccaagattcttgctcaaaagggtcactttgttaccttcataaacagccccaaaaacattgaccgcatgcccaaaaccccgaaacacttagaaccattcatcaaactcgtgaagctacccttgccaaaaatagagcatctcccagaaggcgcagagagcacaatggacattccgtccaaaaaaaactgtttcctcaagaaagcttacgagggcctacaatacgccgtttccagttgctgaaaacgtcaaaccc

SEQ ID NO: 253416 - DNA, 509 bp, Glycine max
  unsure (1)..(509): unsure at all n locations
nagtaggggnttaagttcntaagtaaatggggggaaaagagaaacactatagaagagctatgacgtcgcatgcacgcgtacgtaagctcggaattcggctcgaggaaattatcatgaatccaattatttctgctgcttctgttattgctgctgggttggccgtagggcttgcttctattggacctggggttggtcaaggcactgctgcagggcaagctgtagaagggattgcacgacaaccggaggcagagggaaaaatacgaggtactttattgcttagtttggcttttatggaagctttaacaatttatggactggttgtagcattagcacttttatttgctaatccttttgtttaatcctaaaaaaatagaaattcatatccttttttccgtggacttgctttaccggtcttgctttttcgaattctatttatattaatatttcactcctataattctttatccgttcggacaagaacacaggggaaggactannatgaaagtgaa

SEQ ID NO: 253417 - DNA, 522 bp, Glycine max
  unsure (1)..(522): unsure at all n locations
nagtaagaagcgtcgaaggttgngattgaanattgcgggtctaatcgacaaccttcatagaagatctatgacgtcgcatgcacgcgtacgtaagctcggaattcggctcgagcgcacaacctctaactgggcccatagaattgttaatttctctgatcccattgtgaatttgtggggatctgaattgcggaggaagatgattcagcttctgttcacggtgatattttcggaggcttcgatgatagcgttgctgctgttcaagacccctttgaggaagctcgtgataatgggcttggatcggttgaagcgaggtcgtggacccttgatggtgaagaccgttgcagggaccgttctcgtggtgttgttgtcgagtgtgtatagcatgttgaagattcagaagcgtgggatccaagagggtgcttgtgttaaccccaccgatcaagttcttatggccaagcacctccttgagcaacgctcattggtgcttgcctttttcctgcacttatgattgacggactactt

SEQ ID NO: 253418 - DNA, 536 bp, Glycine max
ggtttagagagagttgttacaagaaagtatagttatactaagacgagctatgacgtcgcatgcactcgtacgtaagctcggaattcggctcgagacgcagccaatacaactactaacgacaaagattcttccccaagacaagggaaaaccggagcaacaaaaaaagtaacacacacgcacacactcatcatcgtataacatttgttttattttttttaaagagcgagtgttgtaacaaatggtgaagtcgaagagcgtggagaaacctgcggaggaacaacaacgaggtggtgtttcagcgtacagaggagtacggaagaggaagtgggggaagtacgtgtcggaaattaggctgcccaacagccgtcaaaggatttggttgggttcctactacagcgccgaaaaggctgcgcgtgcattctacgcggccatgttctgcttacatggcagccgttccaactttaattttccgagcgaacgggccaacatttattgcgggaggaacatgacacgctttcagatttaaaaatcgcggg

SEQ ID NO: 253419 - DNA, 547 bp, Glycine max
  unsure (1)..(547): unsure at all n locations
nggtttaggagcagagtggagtttactgaccggaggagtgtaacagccatcactctagaagagctatgacgtcgcatgcacgcgtacgtaagctcggaattcggctcgagcccaggttgtgatggccgcagcaccagcagctaccttcgctattggaaccaccggttccctcggccaaagaggaagctcgcttcctcaatcaaagtcctttgggttgaaattcaactctctgaatcatttgaagagcttctgtggcctcaaggccatgtcatccgtgagatgtgagtcggaatcctccttcttcggtaacaaaaccggtgctgctctacgggcgtcttttgcatccaaagctcaaaaggaaaacaaccacaactcgcagactcaggcttcgtacaaagttgcggttcttggtgctgctggagggataggtcagccgctctcgcttatcatcaagatgtcgcctttagtttccaacctgcatgtctatgatattgcgaatgtcacgggagtttctgctgatatcagtcactgtgacacaccctcccag

SEQ ID NO: 253420 - DNA, 547 bp, Glycine max
  unsure (1)..(547): unsure at all n locations
ggatttnggggttaggggaagtatgtgtacgaagggggtataacagcatcactctagaagagctatgacgtcgcatgcacgcgtacgtaagctcggaattcggctcgagtttctctctgccttgctcatttacacacctctccaacctttgactttcagctttatttgaatccctctctctcctttccaaatggccagcgttgaggttgcacatcaaacaccaacaacagttccagaaaatgaaacaaccgaggtaatcaagacccaggaaacaaccccggaaccagtaccagccactgaggctcctgcaacagaacaagcagcagctgaggttcctgctcaagaagaacaacaagcaactgaggttcctgccccagaatcaaccaccgaagcaccaaaggaagaaaccaccgaagcaccaacatcagaaacagtataaacaacaactacagaagaagccaagccagaggagcctaaagaagtgcagttgagacccgagaggtggtgacatatgagacagatgaagagaagccagcagcagaagaaa

SEQ ID NO: 253421 - DNA, 526 bp, Glycine max
gagtaggggcgtcgagatgttaaatggggagatggggggaataatgtgaaaccttctagaagagctatgacgtcgcatgcacgcgtacgtaagctcggaattcggctcgagatctgtatgcctatgcttgtttatcattttcttactttcctctcacgctctgccacaaaactccgtctccgcaataacggaataaaaaaacaagtttaattactattatggcgccgagggatcataagacaagcaacgcttaggctaacggtaaccgtaacagccgggttaaagaagtgcattttcgcggaatgaggaagaaggccttggggaaaatcccccgcggaattcagagatcccggcgagaaaagccgcgtctggttcggaaccttagacacggcggaggaggcagcgcgtgcatacgacgccgaagcacgagagtttcgcggccctaaggccaagacaaacttccctctccctttggaaaatgtaaagaactcgagccccagccagagcagcaacgtcgagtccttca

SEQ ID NO: 253422 - DNA, 514 bp, Glycine max
  unsure (1)..(514): unsure at all n locations
agtaggggtcaggttaaagggagaggggggggaaaggaaaactccnnaagatctatgacgtcgcatgcacgcgtacgtaagctcggaattcggctcgagcttttttttatgaaggcggtggagataagatcaagctacctccttcttgcttcgcagaactgtctgagcagggtacttttgataagagacagggacccttatactttcagttgtcgttagttcatgaagaaagcacttcaagcatccaaactactgataaagtgaaacaggggaggaccacccattctggagttttagaattcactgctgatgaaggttcagtgggtcttcctcctcatgtatggaataatttgttttctgaaggcactccaaaacctcccttagttgaaatccgctatgtttggcttccaaaagggacatatgcaaaacttcaacctgaaaatgtaggattttccgacttgcccaatcataaggctatnctcgaaacatgtcttccggaggatgctactctttt

SEQ ID NO: 253423 - DNA, 542 bp, Glycine max
  unsure (1)..(542): unsure at all n locations
ngtgttaggggtttagagaagttattaagaggggcgggggtaaagtatcactcagctatgacgtcgcatgcacgcgtacgtaagctcggaattcggctcgaggtcacacttcatcaatggcgggtagaggcaaaaccctaggatgcagcgccgctaagaaggccacctcaaggagcagcaaagccggccttcaattccccgtcggtcgtatcgccaggttcctcaaggccggaaagtactccgagcgcgtcagcgccggagcccccgtctacctcgccgtcgctctcgaatatctggctgctgaggttatggaattggctggaaacgctgcaagagataacaagaagactcgaattgatccacgccacatccaattggcggtgaagaacgacgaagagttgagcaagcttctaggagatgttaccattgctaacggcggtgttatgcctaacattcacaaccttcttcttcccaagaaagctgggggctcatccaagggtgctgctgcttgacgatgactcttaatagggagtcaccgttca

SEQ ID NO: 253424 - DNA, 524 bp, Glycine max
taatgtgttacgagagggggggaatataacactcgctatgacgtcgcatgcacgcgtacgtaagctcggaattcggctcgagttgtatattagatcacttgcttggacttgtcatgttcttcactactagaattggggctatgaaggtttttttaacagtggaatcaaatagaagtaatggccagttaactgcctgtgaagtcttgctctttcatcatgaagaaatgggcattccatgggagattgcaaaacttggagtaaggaaaggaatgtggggaactgttcagaagattgaacccggtttgcgagcttatcaagaagcaagagcttctggtgctgcactctctcattcagcctttatggcccaagtcaacacaaaaataggccctgagtacttgcaatcgatcgggggcgatgacaattcaacagaaaattgaaatgttgttgctttagagaaaccacaaggcgtggacattccccaaagcctaaccaatggggggccctttcgctttgctttaagcctt

SEQ ID NO: 253425 - DNA, 528 bp, Glycine max
agaaggtgtgttacgcgaggagtgttatgctaagacgagctatgacgtcgcatgcacgcgtacgtaagctcggaattcggctcgagggcgaagaacctattggttttgctggggctgggtttagctgggatagttctcatcaccagaaagctcaatacgtccgtcagagaggattctcggcgctttcattcataagcttcagctggttactcctccccagtcttctcctgccaaggctcctcatactctcacctcactcaccttcgcactttgcgacctatttcacatccatggacacgtgccctcgttcgggcatcctgactgggctaggactcacgaaccctcttcttccactgctcccgctgtttccgctctcgtcgagggcggtgcaacctgcgttgcaactactgttctcgacgacttagctctaggtattggcggcgaaaatcagcattttggaacgcctactaatcctggtggtcctgctcgagtaccgggtggctcctcaaggggtgctgctgtcaccgc

SEQ ID NO: 253426 - DNA, 531 bp, Glycine max
  unsure (1)..(531): unsure at all n locations
agaatgntgtaagaggggagggggtaactgtatcactctagaagagctatgacgtcgcatgcacgcgtacgtaagctcggaattcggctcgagtacaaaatcccctcatattatctctctctctcttaagccatgatgtcctccaccgcgcctcccgtcctccccatctccaactcccaaaccaccgcgggaaccaccggtgcaggcggcggcgccatcgaggctccggccaacaacccggccttccgcgctttcatcaacaacctctccaactccctccgccacggcctcgaccagcgccgtccctggtcggagctcgcggaccgctcagcgttctcgaaacccgagtccttctccgaagccacccttcgtgtccgcaaaaacttctnctacttncgcgtcaactactacgctgtcggttcactcatnctcgcaggctctctcctaaccaatcctttctcntttaatctctcggtggccctctggcctttgggaccttctctaacctttcgggccttgggtaaaaccctt

SEQ ID NO: 253427 - DNA, 539 bp, Glycine max
gggtttagaagtttgtttactgacagacgttgtattgtcatcactctagaagagctatgacgtcgcatgcacgcgtacgtaagctcggaattcggctcgagagaagatggcattgggtgttcctgctcttcccctgacatacgtggctcacgttctggcaattgttgccagcatcttggtcgtgctctgggtcctcaattttaggggtggcttggcttgggattctgataacaaggccctcatcttcaatcttcatccagttcttattgtcattggcttactagtccttgggggtgaagctattataagctacaaagcattacccctgaagaaggaagtaaagaaattgatacaccttgttttccatgccatcgcattaatacttggaatagttggaatttatactgccttcaagtatcacaatgaaagtgggattgccaatctctacagcttgcattcatggcttggaatatggggtattggcccttatggcatttaaagggtatatagggttgggatacccttcttttcccgggggg

SEQ ID NO: 253428 - DNA, 517 bp, Glycine max
  unsure (1)..(517): unsure at all n locations
gagggaggggnctttagtttgntttgtgtgatggggggtaaatgagagacactatagaagagctatgacgtcgcatgcacgcgtacgtaagctcggaattcggctcgagcgcacgaatatcttgttgtttggagcgatccgagaaaaactctgtaaacatgttggtttaccaggacctccttacaggtgatgagcttctctctgactccttccgttacaaggaaattgagaatggaatgctgtgggaagttgaggggaagtgggttgttaaaggagcagttgatgtagacattggtgcaaacccttctgctgagggtggaggagaagatgagggagttgatgatgcagctgttaaggttgttgacattgttgacacattcagacttcaggagcaacccgcattcgataagaagcagtttgttaccttcatgaagaggtttatcaagaatttgactcccaagctcgatgcanagcaacaggagttgtttaagaagcacatcgagggaacaactaatta

SEQ ID NO: 253429 - DNA, 528 bp, Glycine max
  unsure (1)..(528): unsure at all n locations
naggtgaggaggcgtcaggttttnnnattgaaactcttngtaancactctagaagccctatgacgtcgcatgcacgcatgcacacgcacgtaagctcggaattcggctcgagccaatatatttcattctctctgtggactgccagacctctaccttcaacatgcacttctacgtcaagacccttaccggcaagaccatcacccttgaggtgcaaagctctgacaccatcgacagcttcaaggccaagatccatgacaaggaaggaatcccctcggaccagcaacgtctcatttacgccggcatgcaacttgcggacagacgtacccttgctgactacaacattcagaaggcgagtactgttcacctaagccttagtattccttgaagcatgcaaaatctcgctacgacacttaaccggcagaccattacccatagaggttgaaggctcgacaacctttagtatcgttatggccaatatcaggaccaggtaggctttccgcctgaccaaggacggttgattttcggcgg

SEQ ID NO: 253430 - DNA, 522 bp, Glycine max
  unsure (1)..(522): unsure at all n locations
tagggtttnntacacgcatatacagtatcactctagaagagtctatgacgtcgcatgcacgcgtacgtaagctcggaattcggctcgagggacaaaagaagtgttgatgatgttgttcttgttggtggttctaccagaattcccaaggttcaacaactgctgcaggacttctttaatggaaaggagctgtgcaagagcatcaatcctgatgaagctgttgcatatggtgctgctgttcaggctgcaattttaagtggtgagggcaatgagaaggttcaggatcttctcctccttgatgtcacccctctatctcttggtttggagactgctggcggtgtgatgactgtcttgatccctatgaacactacaattccaaccaagaaggaacaggttttctcaacatactctgacaaccagcctggtgtgttgatccaggtctttgaaggtgaaagagcaaggactaaagataacaatttgttgggcaaaattgaacccttttggcatttttttttggcccaaggg

SEQ ID NO: 253431 - DNA, 518 bp, Glycine max
  unsure (1)..(518): unsure at all n locations
aaggtctnnttaaagaacgaatgaagatatcatcatgactatgacgtcgcatgcacgcgtacgtaagctcggaattcggctcgagctaggtcaaacttattaagatgatcctaattttgatttctggttaaacaagttcgatcgatcgaggttgggcaaacaactggaattgcagagaaaatgaacagcgccatcttcaaagcttcaaacagcaacaatctccattcctctctcagggccgcactcttccattccacctctcccttgcaacgtatacgccgcaatcattgggactccagagggagcaaccatacctcgagaaggtttagaagggtgcaagcgaaacacagagtaatgaacagtatcaatgattatgcagaatccctgtttcagagctggaagcaaggtattgatagggatgacccatcatcaagtctaggcacctcatgggttaaaaaacaatattctgatggggcctctggaaagtacccggatatcgctttagggtctagtgtttt

SEQ ID NO: 253432 - DNA, 523 bp, Glycine max
  unsure (1)..(523): unsure at all n locations
caggtctgagaacagaaactacagtatcactccagaagagctatgacgtcgcatgcacgcgtacgtaagctcggaattcggctcgagctcaaagaagatggctagtggtagtttgaagaacatgttgagtgtagcaatgaatcaaggagtggtggaagcacgagccaggatcttcggccaccaattgaaccccactggcatgaaaactccacacaagcttctccgcatgaagctcttcggtgaaaaagtcgctcagtggtaccctcacgacatcaagaaagacgaccctcttgtcatggcccgtcaagaacaagaacgcttatcaaagcttgaaatgttgaagcggcgaggaaaaggaccacccaagaagggccaaggaaggcgtgctgccaaacgcaacaaataaattatactttcacctntctctctctcctctctctcatctctctctctctggaattattttgtgggtactcttttgagagtaaaacacgtacttgggtatatatatgagatcactacg

SEQ ID NO: 253433 - DNA, 523 bp, Glycine max
  unsure (1)..(523): unsure at all n locations
cagtctctgagacagangtattatgatagtaccactctagaagagtctatgacgtcgcatgcacgcgtacgtaagctcggaattcggctcgagtgagatctcagattgcaattgcctcttctcttctcccagaatcggtgtaggttacaggtttaagggttttgttttcatttaggtcactaatccgatatcatgaagctcgatacgactagtctcgaatcgtttcccacactgattgcacctcaaaacgacgtcgccggagaactctccgccgctccgtcctttgaccttccgaattccaatgacttcgatgggttcttgaaagacgctattcagatggtgaagcccgcgaagggtactacaactcttgcttttatatttaaagagggtgttatggtagctgctgattctcgagctagcatgggaggatatatatcgtcgcagtctgtgaagaaaattatcgaaatcaatccgtttatgcttgggaaaaaaggttttggggcccttaattttcccaattttg

SEQ ID NO: 253434 - DNA, 520 bp, Glycine max
catgtttttgtaagagagtaaaggaaccactctagaagagtctatgacgtcgcatgcactcgtacgtaagctcggaattcggctcgagttaataacatgaagaaagggcttagacatggagaagcatgtccacttcttgataaaattgtgtttgacaaggtaaagcaaggtttagggggtagagtacgtcttattttgtctggagcagcacctttatctgcacatgtggaaggttacttacgggtggtgacttgtgctcatgtcctacagggatatggtctgactgaaacctgtgcgggaacctttgtctcattaccaaatgaaatagaaatgcttggaacagtgggccctcctgtaccaaatgtggatgtttgcctggaatctgttcctgaaatgggatacgatgccctagcaagtacaccaagaagagaaatttgtgtaaagggaaaaaccttttttgcaaggtacttccaacgtggaaacccttctctaaagaggttcagatggataaagggtcccc

SEQ ID NO: 253435 - DNA, 522 bp, Glycine max
aaggtatgtgacaagaacgtactatagtaccactctagaagagtctatgacgtcgcatgcacgcgtacgtaagctcggaattcggctcgagcttcctcaaagctcttcaccacttttcttttctcactaaacttagctctccttctccaaacatcttttggagccgaccctctcttccatttctgttcaaattctgagaacttcacagccaacagtccctatgaatcaaacttgaaaacactcatcaactcactcatctacaagaccccttcaactggttttggtgttggctctgtgggccaataccaaaaccaaaaggcatatgcgcttgccctttgccgcggcgacgtgtcggcctcagagtgcaaaacttgtgtctctgaggcacccaaagaaatcctcagtcgctgtccatacaacaaaggtgccatcatttggtacgactattgcatgttcaagtacttggacactgactttcctggcaaaattgacaacacacacacgttgtacacgtgtgaaact

SEQ ID NO: 253436 - DNA, 519 bp, Glycine max
cagtttctgtaaggggggtaaagggaatccctctagaagagctatgacgtcgcatgcacgcgtacgtaagctcggaattcggctcgagttgagtatcgacactgattttgatggttgcatgcagttgatcagagaggtcactgctgagttgcctatttatttggctaactctctcaacagtttgaggttggaagggcagaagactgctgctattgagattctgcagcagtttgattggcaggttcctgattgggtcattgtgcctggaggcaaccttggcaacatttatgccttttacaaagggtttaagatgtgtcaagagcttgggcttgtggataagattccaaggcttgtttgtgctcaggctgccaatgctgatcctttgtatttgtactttaaatccgggtggaaggagtttaagcctgtgaagtcgagcactacatttgcctctgccattcaaattggtgatcctgtttccattgacaaggcggtttacgcgctcaagaagatcgataggtt

SEQ ID NO: 253437 - DNA, 523 bp, Glycine max
  unsure (1)..(523): unsure at all n locations
agtntatctgaaatggggagtataatggtaacnctcnnncnnnntnnnntnnnnnnnntnnnatgcacgcgtacgtaagctcggaattcggctcgagattcattcaagattcagcaagtgcgtttcggaagcagagaccgaaatacttcgagatggcccgtacaaagcaaactgctcgtaagtcaactggaggaaaagctcccaggaagcagcttgcaaccaaggctgcacgtaagtctgctccaacaactggtggtgtgaagaagcctcatcgttatcgccctggaactgttgctcttcgtgagattaggaaataccagaagagcactgagctcctaatcaggaagcttcctttccagaggttggttcgtgaaattgcccaggatttcaagactgatctgcgtttccagagccatgctgtgcttgcattgcaagaggctgctgaggcataccttgttgggctctttgaggacactaactngtgtgccattcactgcaaggcgtgtgacttatatgcccaagg

SEQ ID NO: 253438 - DNA, 508 bp, Glycine max
attgtttctgatttggggaggagatgagaaatattatagaagagctatgacgtcgcatgcacgcgtacgtaagctcggaattcggctcgaggagggatctctctctctcactccttcttctctctcctctggcacccctaaagcttcttctgttctgtgcaggcagtttttctttggtttggttgcatcctttgatctgatcagcaaatttgagaattcagtttgggaagggccattcctctttagtgcaaaacagatcgcaagtgcctttgtgctgatggccactaatgaaaatcttccaccaaatgtaattaagcaacttgccaaggagttgaaaaatcttgatgaatctcctaccgagggcattaaagttgtggtaaatgatgatgatttttcgacaatatttgctgacattgaaggcccacctgtgacaccttatgagaattgaggttttcgaatggaactcttgctgtcccatgatttcccgcattctccacctaaaggtttt

SEQ ID NO: 253439 - DNA, 523 bp, Glycine max
cactggtgttctgacaaagcacaaacggtggcactactcaagagctatgacgtcgcatgcacgcgtacgtaagctcggaattcggctcgaggagagagagaacaaactcacacacacacaaagtgactcttccgatgaagttaatcggcgacggtgccggtggccggaaagttctcgtcggcgttaaattagatcctcgcagccgcgaattgctgacgtgggctctcgtcaaggtcgccgagcccggcgacctcgtcattgctcttcacgtccttgacaccatcactgagggaacggcgtcgctgttatctcttgtgaagacattcgattccgttctcgccgtctacgaaggtttctgcaacctgaaacaggttggtctaaggcttaaagtttgtcgcggtgactcggttcggaaggccttggtgcaagaggcgaaggcgtttggcgtttccaccgtgattttgggaacttcgaaatctcatcacactattcgggctttcgcgtgggtttgaaagatctgtgc

SEQ ID NO: 253440 - DNA, 517 bp, Glycine max
atgtttctgacaaagcaataaggtgaactcctcgaagagctatgacgtcgcatgcacgcgtacgtaagctcggaattcggctcgagtatctctctgttctcttctacctctcaagtttttgaagtatagagatggcagagacattcctatttacctcagagtcagtgaacgagggacaccctgacaagctctgtgaccaaatctctgatgctgtcctcgacgcttgcctcgaacaggacccagacagcaaggttgcctgcgaaacatgcaccaaaaccaacttggtcatggtcttcggagaaatcacgaccaaggccaatgttgactacgagaagatagtgcgtgacacctgcaggaacatcggctttgtctcaaacgatgtgggactggatgccgacaactgcaaggtcctcgtcaacattgagcagcagagccctgatattgctcaaggtgtacacggtcaccttaccaaataacctgaagaaatggtgctcgtgaccatagtcacatgttttgg

SEQ ID NO: 253441 - DNA, 519 bp, Glycine max
aatgttgatcacgcattatagtatcactccagaagagtctatgacgtcgcatgcacgcgtacgtaagctcggaattcggctcgagcaaccccactaatgctcccacaccgtgccaatgccaatgtcaaagttggaggctatgacattcccaaagggtccaatgtgcatgtgaatgtgtgggcggtggcccgcgacccggccgtgtggaaggatccattggagttccgacccgaaaggttccttgaggaggatgtagacatgaatggccatgactttaggctacttccattcgggtcgggtcgacgagtatgcccgggtgcccaacttggtatcaacttggcagcatccatgttgggccacctcttgcaccatttctgttggaccccacctgaaggaatgaagcctgaggaaattgacatgggagagaatccagggctagtcacatacatgaggactccaatacaagctgtggtatcttctaagctccccttacatttataccaacgtgtgcctggtgag

SEQ ID NO: 253442 - DNA, 524 bp, Glycine max
aaggtgtgtgtacacgcacgtactgaagtaatcactatagaagagtctatgacgtcgcatgcactcgtacgtaagctcggaattcggctcgaggcgcggctcacacagactcacacatttcgtcggaatgggaagggtgattcgcgcacagcgtaagggtgcggggtcggtgttcaagtcccacacccaccaccgcaagggtccggcgaggttccgcagcctcgacttcggcgagcgcaacggctacctcaaaggggtcgtcaccgatatcatccacgaccctggtcgcggtgctcctctagccaaggtggcgttccgccaccccttccgctacaagaagcagatggagctcttcgtcgccgccgagggcctctacaccggccagttcatctactgcggcaagaaggccaccctcgtcgtcggcaacgtcttgccccttcgatccattcccgaaggtgccgttatctgcaacgtttagcaccacatttgcgaccgcggggttttttccagagacccttgtgtga

SEQ ID NO: 253443 - DNA, 525 bp, Glycine max
catgtgtctagtatcagacatatagtgtatccactcatagaagagtctatgacgtcgcatgcacgcgtacgtaagctcggaattcggctcgagtctaccttccctctttttccgaatctgaatagaaatggcttcggagactgagacgttcgcttttcaggccgagatcaaccagctcctcagtctaataatcaacaccttctacagcaacaaggagatctttcttcgtgagctcatcagcaatgcctctgacgctttggacaagattcgatttgagagtcttacagacaagagcaagcttgatgctcagccagagttgttcattcacattattcctgacaagaccaacaacacattgtctatcattgacagtggtattggcatgactaaggctgatttggtgaataacctcggtactattgcaaggtctgggaccaaggaattcatggaagccctggctggtggtgctgacatgagcatgattgggcacttccgggtttgggtctacactgggtatatctgaaa

SEQ ID NO: 253444 - DNA, 523 bp, Glycine max
aagctttttaacgcgggggaacggaggcactcactctagaagagtctatgacgtcgcatgcacgcgtacgtaagctcggaattcggctcgaggaacaaaaagcacattacatgagttgacatttttccatgtactcatgttaggtatctgcagctgaactcaagtttcaatctttcacctatccatggcttcctctctctttctttgcagtaactacgtcttccccacttcccaaaaccccttcagaagcaaccatttagctcaattcagaccaaatgggccctccaattttcactcaaagcttcggtttcagagaccccacttggtcagagccatggtttctgattccaacacttccaggagacaaatagagattgtgtatgaccccgaaggaaggattaacaagttggctgatgaagtggacagggaaactcccctttcaaggcttactttgttctctccttgcaagataaatgttttcttgagaataacccacacgaggggaaataggtatcatgttttt

SEQ ID NO: 253445 - DNA, 512 bp, Glycine max
  unsure (1)..(512): unsure at all n locations
agatgttcatcgtttcattttncgtcgnncatttcatcatggtaggcgcaatcagaccgagtggatccaccgggcggcaggaattcggcacgagggttgttcaagacacgataagaggaggagtaaccgacgtttttctaactcttgggggggtcctttttcttcatgctcttttcatagaaaaagggcgtctagagacaacttgcgctgtcttgaggaacttcgtatataatgacgagttaaagctcaaggatgatattcttccagttccaaccaatcatgtccctcatcacactgtggagctcacaaatgaagctatcgactttatacgtgcgatctacctattgcatgacaatgataatgatggatctttacaaccttctccgtttgatgatatctatgtaactgcaccaaaaagtgggccttgatgacaactctggatccttcatattgtttccctaacttgatttgcattgcatctcaacttatccaactataacccttcattttcc

SEQ ID NO: 253446 - DNA, 511 bp, Glycine max
tggtatgtaatgtggggggaagatgagaaacactatagaagagtctatgacgtcgcatgcacgcgtacgtaagctcggaattcggctcgagcagaaaacagcatcgaacccgtcgtagcagaaaaacttgtcaccatggtttcttgcgacaaggatccacgagaggatgtccttcaagcctggtacatggatgatagtgatgaagatcaaagactcctgcaccacaaagaacccaaggagtttgtctcgttggaccaacttgctgaacttggagtccttagctggaaactagatgctgataaccatgaaaatgatccagagctgaagaagattcgtgaagagcgtggttacacctacatggatgtttgtgaagtctggccaaaaaaagttgccatattatgaacagaatatcaaaaagctttttgaaaagcatctttacactgatgaggagatcccgttatgtgcttctggaagtggctaatttggatgttaggataccgcatgaactttg

SEQ ID NO: 253447 - DNA, 513 bp, Glycine max
atgcatctgcgttgttggggggatggtgagataccttatagaagatctatgacgtcgcatgcacgcgtacgtaagctcggaattcggctcgagatccacacccaacattctcacaagtcacagccaaacaccatttcattaattcttgcagaatattgcttagttttgttttatctgaatttggaaacagcttttgaatggctttttcaagagttgcactgctaatatgcacggtcgggtattttgtgattgcctctgccggcaatttccaccaagattttgatatcacatggggagatggtcgggctaagatactcaacaatggagagcttctcactctgtcacttgacaaagcctctggctcgggtttccaatccaagaacgaatacctttttggcaaaattgacatgcaactcaaactagtccctggcaactctgctggcaccgtcactgcctactatttgtcttcaaaaggagcgacatgggatgagattgactttgaattcttgggca

SEQ ID NO: 253448 - DNA, 507 bp, Glycine max
agggtatccgaaggagggggaatgagagaacactctagaagagctatgacgtcgcatgcacgcgtacgtaagctcggaattcggctcgaggatggtttcagttatgcaagctttgagactgttgggtatgacttcaaagtggtgaatctgaacgaaatggttaagagggtattggcatgttttctcccaactgagttctctgttgcagttcatgtggatggtgcaagcaagttgtttgatcagacgtgttttctggatgttaagggatactgtcgcgaagagaggagccacgaagggcttggaatgggttgctctcttgtctaccaaaaatttgccaagacttgtgactgtggttcacctagatcaactctgaagtgctggaaagaggaagatgaagaagagtagttctcttaagtgtctttattatgtccttgcgaaaataagtccggttttccagacagtgattgtttttctttggtgttttttcccttttatgttagaccattg

SEQ ID NO: 253449 - DNA, 518 bp, Glycine max
aatgcttgtgtcaccgccattagctacacttcatagagtctatgacgtcgcatgcacgcgtacgtaagctcggaattcggctcgaggccgagttccttcaaacgcttcatttcaactctctccgactcgatgatgggtcggtcgtgaacatgtcagtgcccatcgtgctggctattgatgatgcccagaagcataagatcggggataacaaaagggttgctcttttcgattccaagggagaccctgttgcaattctcaatgatgttgagatttataagcattctaaagaagaaagaattgcccgaacttggggaaccactggccctggcctaccctatgttgaacaaactattaccaatgctggaaattggttgattgggggtgacctataggtcattgaaccaatccaggtcaatgatggacttgatcattttcggctgtcttcagcaaaacttcgtgccgagttcacaaaggcgcaatgcagatgccctgtttggctttaacttcaggattatgtt

SEQ ID NO: 253450 - DNA, 519 bp, Glycine max
cagctttgtgtcaccgaaatatagtgacactatcgaagagtctatgacgtcgcatgcacgcgtacgtaagctcggaattcggctcgagctgcattgcatgtatctgcatcgagaatgatgttctggttgtcactgatcaagtctatgacaagtgggcttttgatatggagcacatatcgatggcttatttgcctgtaatgttcgaaaggacagtgacattgaactccttggggaagacattctccttaacacgatggaagattggttgggccatagcacccgcacacttatcatggggagtgctacaggcacacgctttgctgactttcgcaactgcccattcttttcagagtgctgctgcagcatctatgagagcaccagactcttactatgtagagctgaagagggattatatggcatatagagctattttgattgaaggattgaaggctgttggcttcaaggtatttccattcagtgtaacctactttgtggttggaaatctcacacattttggga

SEQ ID NO: 253451 - DNA, 518 bp, Glycine max
tatgtgtgtacagaaaataagttatactccagaagagctatgacgtcgcatgcacgcgtacgtaagctcggaattcggctcgaggttctgcaaaagcaaaaatggaagcagagcatcatcaccagacctcaaacgctggtggtattattggaggcctttacgtcaaagttatgaccgacgatcaaatggaactgctcaggcaacagatttctgtctatgccaccatctgtcaacagctcgttgagatgcacaaggccgtaactatccaacaggacctcgcagggctgaggctgggtaatttgtactgtgatccgttgatggcgtgctctggacacaagataactgcgaggcagcgctggactccaacacctttgcagcttcaagtacttgagcgtatttttgacgagggaaatggtactccgagcaagcagaagatcaaggacataaccattgaacttggccaacatggccaaatatcagagacaaatgtgtataactgggtccagaacaaaaaagcc

SEQ ID NO: 253452 - DNA, 525 bp, Glycine max
taggttactgttaaaagaacatcattagtatcactctagaagagtctatgacgtcgcatgcactcgtacgtaagctcggaattcggctcgagagaacacttaccttaatttcgccaaatcaaccaaagacaaaaaaaaagaatccaaaggaacagaagagaaagcttgaagctatggggaacaccatgggaaggagtaaaaaggccaaggtgatgaaggtggatggagagacgttgaagctgaaaacaccagcgagagcaaacgacgtcgtaaaggactacccgggccacgtgcttctggactccgaagcggtgaaacatttcgggcttcgggccaaacctcttgagccgtaccaggaactgaagcccacaaagatttactttctcgttgagttacccaagattcagcccgaagaggaaaaaacggcgctaccgaggagggtgcgatccagtgggatacgcggcatgaacgccttcgataggcttcaaattttcatgcgtttcaaaaactcttggtttgagcacc

SEQ ID NO: 253453 - DNA, 508 bp, Glycine max
agtgtatctgttggtgggaggaggtgagtgatactatagaagagctatgacgtcgcatgcacgcgtacgtaagctcggaattcggctcgagagaaaatggcggtgcctctgctctcaaagaagatcgtgaagaagagggtaaagaagttcaagaggcctcagagtgacaggaaaatttccgtcaagactaactggcgcagaccaaagggtatcgattctcgtgttaggagaaagttcaagggatgcactttgatgccaaacattggttatggttcagacaagaagaccctccactatctccctaatggtttcaagaaatttgttgttcacaatgtgaaggatttggaactgctcatgatgcacaacaggacttactgtgctgagattgcccacaatatatgcacaagaaagagaaaagatatagtcgagagagccgcgcagcttgatgttgttgtgacaaacaaaacggccagattacgctaccaggatgatggataggctaaatgac

SEQ ID NO: 253454 - DNA, 516 bp, Glycine max
gggaatggttgtctgataggggagggacggaagagaaacattctagaagagtctatgacgtcgcatgcacgcgtacgtaagctcggaattcggctcgagctcgagccgaatcggctcgaggtgatttcagtgagtgatcggtgttcacttgatctcatcataatcgtcagcgtcaattgaagaagatgccgatcagaaacatcgccgtcggaaggcctgaagaggcgactcaccccgacacgttgaaggcggctttggctgagttcatctcaaccttcatcttcgtgttcgccggctcaggctccggcatcgcctacaacaagctcaccgacaacggcgctgccacccctgccggcctcatctccgcctccatcgcccatgcattcgccctcttcgtcgccgtctccgtcggcgccaacatctccggcggcacgtcaaccccgccgtgaccttttgcgcctttgttggccgcaaccataaccttcttccggggattcgttacgtcatggccagttc

SEQ ID NO: 253455 - DNA, 521 bp, Glycine max
atggttctcttccagtcgtctactgtcactacagaagagctatgacgtcgcatgcacgcgtacgtaagctcggaattcggctcgagctcttgcgtgtttgggctttagcgcagcttctcctagactcaaggaagatcggttcggaaaaggttcacatcactattgtggttattggccatgtcgactctgtgaagtccactaccactgtccacctgatctacaagcttgtaggcattgactagcgtgtgatcgagagatatgagaaggatgctcctgagatgaacaagaggtcttccaagtatgcctgggtgctagatatgcttaaggctcatcgtgaaagatgaatcacacttgatatcgccttgcaggaagtttgaaaccaccatgtactattgcacagtcattgatgcccctggtcacaaggatctcatcaagtacatgatcactgggacatgccaagctggctgggctggtcctatcaatgattcccactaccgggggttttaaacctgaaactccaa

SEQ ID NO: 253456 - DNA, 522 bp, Glycine max
  unsure (1)..(522): unsure at all n locations
aagtgtcnnctgtacgagtctcatagtgtgacactatagaagagctatgacgtcgcatgcacgcgtacgtaagctcggaattcggctcgagcggctcgagggtcagagtgagaaagagaaagagagaattcgtaaaccctaatttcggaaagatcggcgatgactgcctccaaggatcgcgagaacttcgtctacatcgccaaactcgccgagcaggccgagcgttacgaagagatggtggaatcaatgaagaacgttgcgaatctcgacgttgaactgacggtggaggagcggaatttgctttctgttgggtacaagaatgtgattggtgctcgcagagcgtcctggaggatcctgtcttccattgagcagaaggaagaaacaaaagggaacgagttgaatgcgaagcggattaaagagtacagacagaaggttgaattggagctatcgaacatctgtaatgatgttatgagagtgattgatgagcaccctatacctctgggtgtaactggtgaaaaccca

SEQ ID NO: 253457 - DNA, 522 bp, Glycine max
  unsure (1)..(522): unsure at all n locations
agggtctctatttcagtctctcactgnagacactacagaagagctatgacgtcgcatgcacgcgtacgtaagctcggaattcggctcgaggattgttgttatataccaaaactccaatattgagattcatacttttaaccagagccagtatcctcgattggttgctgaggactttttgccattgccttccaaagggcatactgacaaggatggatggtaccctcctggccatggagatgtctttccatcattattgaacagtggcaaacttgatgcactattgtcacagggtaaagagtatgtatttgttgccaattcagataacttgggagctatagttgacttgagtatccttatttaagtttcattggttctttctgtattgtttgtaatgagctttggccacattacttattattacataaaatcagtgtctttctttagtgccatcagtgtacttgactcattgatgtagaaatcttaaatcatttgatccataacaagagtgtataccgtgttggg

SEQ ID NO: 253458 - DNA, 522 bp, Glycine max
  unsure (1)..(522): unsure at all n locations
agtgttctcttcatgtagtcgactcaggtgacactatagaagagctatgacgtcgcatgcacgcgtacgtaagctcggaattcggctcgaggttcctctttccttctctagcacaatttacaatctcaatggctggaatttgctgtggtgttgttggagaaggtgacactccggctccactcgagcccactcctcgcccctccaggcgccggagtttggacatcttacctttaaaatatatcgccgacatgcccatgccgccgccggagggtttacggaagcgtcccaagctcaacctcagggactgcgataacgcaattgaaaattgcgacgaatccactggacacaaggtgacgaagaaggaatccaaagtagactacgacgacgacgtcgtttcggaaactaagaacgtaactgtttcggaagttgaagaagaatctcccaagttcggcgtgacgtccgtttgcggcangagaaaagacattgaaatttcctgtttgggcgggccctggttacacacag

SEQ ID NO: 253459 - DNA, 508 bp, Glycine max
atgttttcttatagggggagatagaagagaaatcattatagaagagctatgacgtcgcatgcacgcgtacgtaagctcggaattcggctcgagcccaatttatctatggacactgcctatcagactaacgttgttgtttaattagtccatgcatctgcatcttgggcaccataagattgtatataaaataaattatggtgtgttgtgtatgttgtgcaagacctggaacttcacctttctacgtacgtgtgctgttaggatgcagtgtgctttgatgatgctttgatgaatatgcagtgtgcttttttaagtctattattttcttttattctcttttcataaggactttagttcttccaccgtgcttgattggtgtctcgattataactaaatttccgttatttaagaaaattaaaaaaaaaaaaaaaagggccggccgcgacttatgaactcgtcgacccgggaattaattcccgacccgtacctggaagcctaccaattttccttt

SEQ ID NO: 253460 - DNA, 519 bp, Glycine max
  unsure (1)..(519): unsure at all n locations
catgatctgaaataagcaaaaacagtgacatctcgaagagctatgacgtcgcatgcacgcgtacgtaagctcggaattcggctcgagagaaaatcctcaattttctgagcagccaaacactctctctctgtctctcgaaaattctcagtttgcagagaaaatctgaatcatgtcgtggcaagcgtatgtcgacgatcaccttctgtgtgacatcgaaggtaaccacctcactcacgctgctatcatcggccaagacggcagcgtttgggctcagagtaccgacttccctcagttcaaacctgaggagataactgccatcatgaatgactttaatgagcctggatcacttgctccaactggattgtatctcggtggcaccaaatatatggtcatccagggtgaacccggtgctgtcattcgagggaagaagggtcctggtggtgttactgtgaagaagaccggtgcggncttgatcattggcatttatgatgaaccaatgactccagggcaatgcgacac

SEQ ID NO: 253461 - DNA, 522 bp, Glycine max
caggtctggataaagaaaatatagtaacactctcgaagagtctatgacgtcgcatgcacgcgtacgtaagctcggaattcggctcgagcttcagatcaaacgcacacagttacgctcttcaaatcaatctcttctcagaaatgggtgtggctcaaaacattcccgatgcggaggagggaaccttggagattggaatggaatacagaactgtgtctggagttgctgggccattggtcattcttgataaagttaagggacctaagtttcaagagattgttaatattcgcttgggagatggaactactcggcgtggacaagtgctagaagttgatggtgaaaaggctgttgttcaggtctttgagggtacatctgggattgacaataaatttacaactgtgcaatttaccggagaggtgttaaaaactccagtatcattggacatgcttggccgcatattcaatggttctggaaaaccaattgataatggttcacccatattacccgagggttactttggcatat

SEQ ID NO: 253462 - DNA, 531 bp, Glycine max
agttgtcgatgtcaatggtgcattgtcacgattctacattatggacatcgtacgcaggcgtacgtaagctgtggattcggctcgagcttcagatcatactcacacaggttcgctcttcaaatcaatggcttctcagaaatgggtgtggctcataacattcccgatgcggaggagggaaccttggacattggaaaggaatacagaactgggtctggagacgccgggccatcggtcattcttgataaaggtaagggacctaagttgcaagagattggaaagagacgccagtgagcatgaactacgccgtgctcacaagtgacggaggctgatggcgaaaaggcatgcttgcatgactatgagggtacatagggcgaatgaccatggatttacttgctgtgcaatataaccgaaaaggagtcatgaatcttcagatagaatcctacatggctttaacaattagtattcttgggtacggaaaaaccttttgcgttctggttgcaacgtttatagcctctatgctatatgtcgatc

SEQ ID NO: 253463 - DNA, 523 bp, Glycine max
cagttttgcgtacagaccgataaaagtgacactctcgaagagctatgacgtcgcatgcacgcgtacgtaagctcggaattcggctcgagcggctcgagcatcaacaccgtcttcgatgccaagaggttgattggtcgtagattcagtgattcctctgttcagagtgatatcaaattgtggcctttcaaggtcattcctggtgctgctgacaagccaatgatcgtggttaactacaagggtgaagagaagcaatttgccgcagaagaaatctcttccatggtgctcatcaagatgcgtgagattgctgaggcttacctaggctccacagtgaagaatgctgttgtcaccgtccctgcttacttcaatgattctcagcgtcaagctaccaaagacgctggtgtcattgctggtctaaatgtgatgcgaattatcaatgagcctactgcagctgccattgcatatggtcttgataagaaggccacgagtgttggtgagaaaaatgtgttgagtttttgcacttggg

SEQ ID NO: 253464 - DNA, 516 bp, Glycine max
cgggtatgtggtaagcgatagtacgtatcgtatacatatctaggacatccgccgcacgcgttcatcaggggggtattcgggtggagctctctcttatcgaacgtgttacaaacgactctgcggggcgaattatggcatcgggcaggggcatgggcaaccttacctactccgagccgtatatcaattacagtcactttcgctcaccacttaaaatttccaacatcccctctctgcagaacgcttcgcataaagtacttatgcgcgataagactgtacaggtaaccgtcagagccggcaacatcgacagccacacggtccttgagctctagctcggaggtttcagagccgtcgacctcgacaacctggagaaatcctccgaggttgccatccacagagtcatggaactcgacggcgaatttggaacaaccttatctttcacaatgtggacctacgagacagagctgctttaaaccaaatattctgttgcccacaaatttataggtgggattcatgtgg

SEQ ID NO: 253465 - DNA, 509 bp, Glycine max
  unsure (1)..(509): unsure at all n locations
agtatattctagnntcgaaaacnctacgnatcaatntccttggtggcagctaacgaccgagtttatcaactgggcggcatgaattcttcaccagcacataaccactctcgaggaaatttctgttgtatgctgctattaaacatgcagggactccaacaactgcgttcaacaggctagttcagtgacattagcatttacattgagggtcaaggtctcattgctcgggctcataaagtcattctcgggatatatagcgtcctattaacaaagatgttcacaaatggaatgtgtgagagcaactcacctgaggtttgtttaaaggatgtgtcttcagcagcattgaatgctatgcttgaattcatgtactgtatggatctcaagtattgagcataatgatgacttgggaccattgtactccaacttcctctgttatctgacatattcttaatcttttttcttcattcatatattcttcaaattccttatttaatgctctttatatggacttg

SEQ ID NO: 253466 - DNA, 518 bp, Glycine max
  unsure (1)..(518): unsure at all n locations
cagttttggaaacgcaatatagtaacactaccgaagagctatgacgtcgcatgcacgcgtacgtaagctcggaattcggctcgagaaactttcttccaaacgaacgtgtcacaaaattctcgccttctccgaatatggcatcgcgcgtcagcattggcaaccttacctcctccgcgccgtatattaattcccctcactttcgctcaccacttaaaatttccaacaacccctctctgcaaaacgcttcgcataaggtacttatgcgcgataagactgtactggtaaccggcggagccggttacatcggcagccacaccgttcttcagctcttgctcggaggtttcagagccgtcgtcctcgacaacctcgaaaattcctccgaggttgccatccacagagtcagggagctcgccggcgaatttgggaacaacctctnctttcacaaggtggacctacgggacagagctgctctagaccaaatattttctttcacacaattcgatgctgtgatacacttt

SEQ ID NO: 253467 - DNA, 516 bp, Glycine max
  unsure (1)..(516): unsure at all n locations
catctcctgtccacgcagtacagtatantctagagactagcttgcatgcctgcaggtcgactctagaggatcccctcggggaattccaattccacattttcaagaaataaggaggcaaaaatgttcatatatgaattggaattatttgttttcttattaggcctatcctgaagccaaaggaaatgagatcggaattcctcggggaattccaattccacattttcaagaaataaggaggcaaaaatgttcatatatgaattggaattatttgttttcttattaggcctatcctgaagccaaaggaaatgagatcggaattcctcggggaattccaattccacattttcaagaaataaggaggcaaaaatgttcatatatgaattggaattatttgttttcttattaggcctatcctgaagccaaaggaaatgagatcggaattcctcggnggtaccgagctcgaattccctatagtgagtcgtattaaattcgtaatcatgtcataactgtttcctg

SEQ ID NO: 253468 - DNA, 512 bp, Glycine max
aagagtcttcttacgagggaggaagatagtaatcactctagaagagtctatgacgtcgcatgcacgcgtacgtaagctcggaattcggctcgagattttcctttcgtttcctttcattttccctcactttctcgctccccaaacgcccctctctctcctccaatggccgaccagctcaccgacgaccagatcgccgagttcaaggaggccttcagcctcttcgacaaggacggcgatggttgcattactaccaaggaacttgggactgttatgaggtcacttggtcaaaacccaactgaggcagaactgcaggatatgataaacgaggttgatgctgatgggcacggaaccatcgatttcccagaattcctcaacctgatggctcgcaggatgaaagacaccgactcagaggaggagcttaaggaggctttccgtgtgtttgacaaggatcagaatggtttcatctctgcagctgagcttcgccatgtcatgaccaaatctggggagaagct

SEQ ID NO: 253469 - DNA, 512 bp, Glycine max
  unsure (1)..(512): unsure at all n locations
agctcntatctgttaaggggaggtagacgagaaacactatagaagagctatgacgtcgcatgcacgcgtacgtaagctcggaattcggctcgagctggtattttggcagatatgagaaagcttttcccatttgagctatttcacttgggtggtgatgaagttaatacagattgctggagtagtacttctcatgtaaaggaatggcttcagagtcacaacatgaccactagagatgcttatcaatattttgtactgaaggcccaagagatggctgtttcgaaaaattggagtccagtgaactgggaggaaaccttcaatacgtttccatcaaagctccatccaaaaaccatagtgcacaactggttgggccctggtgtttgtccaaaggttgtcgcaaaaggtttcaggtgcatttacagtaaccagggtgtctggtatcttgaccatctggatgtaccttgggatgaagtatatacagcttgaccactacagggaatacatacaagtttcga

SEQ ID NO: 253470 - DNA, 506 bp, Glycine max
atgatatctaagaaaggggaaggggagatatctctagaagagctatgacgtcgcatgcacgcgtacgtaagctcggaattcggctcgaggccaagtctgcatttgcaacaaaggccaaagttcgccgagctattgaggctgaaggaattcccttcacttatgtgtcaagcaacttctttgctggttacttcctgcccaacttgtcacagcctggagccacagctgcccccagagacagagttattatcctaggagatggaaaccccaaagctgtttttaacaaggaagaggatattggaacttatacaatcaattctgtggatgatccaagaaccttgaacaaaattctctacattagaccaccagctaataccttgtcgtttaatgagcttgttactctctgggagggaaagattggtaaaactcttgaaagaatctatgttccaaaagaacaactcctgaagcaaattgaagagtccgcaccacccgtgaatgtgatactgtca

SEQ ID NO: 253471 - DNA, 518 bp, Glycine max
  unsure (1)..(518): unsure at all n locations
atgtttgtgtacagacaataaagtacactctcgaagagtctatgacgtcgcatgcactcgtacgtaagctcggaattcggctcgaggtgactgctgcaaccatacagttcaaggaaatgggtggaagcaggtggcctgctgaagcagtgaaaccaaatgaacagcctacagaaagaaagaaaggttttggtgattggatgaatcttattaaacctgccaatgaagagaaggatcattgggtaccagatgaagccgtctcaaaatgtacagcatgtggtactgattttggggcttttgttcgcaggcatcactgtaggaactgtggtgatattttctgtgacaaatgtacatatggtagaattgctctgactgctgatgagaatgctcagcctgtacgagtttgtgaccggtgcatggcggaagtgtctcagcggctgactagtgcaaaagagtcatcaagtaaacctgcattgcanagtcatgaggatctttcaagggaactttangaggagctcgag

SEQ ID NO: 253472 - DNA, 525 bp, Glycine max
  unsure (1)..(525): unsure at all n locations
aagctgntagacacacgaaatacagtagcactctcgaagagctatgacgtcgcatgcacgcgtacgtaagctcggaattcggctcgagcttgggttatctctaaggtcctaaacaatcctctttcaaaaacataccgagaaaagtgtggaaatgacgacaccatcattggtagagtctctagttcttcaactccatgagatctcagctgtcaaatttggcaacttcaagctcaaatctggcatcttctcaccaatctacatagacctccgcctcatcatatcttacccttctctcctccaacagatctctcaaacccttatttcttcagtctcttccacttcctttgacctcgtatgcggtgtcccttacactgccttacccattgctacatgtgtctctcttgctcagaacattcccatggtcatgcgccgcaaagaaatcaaagattatggcactgctaaagctattgaaagcgatttcaagcctgtgccaaagttggtaaacactgtggggattgggtcccc

SEQ ID NO: 253473 - DNA, 516 bp, Glycine max
  unsure (1)..(516): unsure at all n locations
tagttctgacggggggaacggggaactctctagaagagctatgacgtcgcatgcacgcgtacgtaagctcggaattcggctcgagcacatactcaccatggaggctaagttggccaccaccataatacttattttctccgtaatttggcttatgagggtgaatggcatagacccttgtgcctctcaagcggataattccgacctgaacgtgattcccatctacagcaaatgctcaccgttcaaaccaccaaagtcagactcatcgtgggacaacagaattataaacatggcctcaaaagacccactccgattcaaatacttgtccaccttagtgggccaaaagaccgtgtccacggccccaatcgcttcgggccagaccttcaacatcggcaactacgtcgtcagggtcaaattgggaacccctggtcaacttttgttcatggtcctcgacaccagcaccgacnaggcccttggtccatgctcgggctgtacgggctgttccgaaaccactttttt

SEQ ID NO: 253474 - DNA, 517 bp, Glycine max
aggttaaatggtgtatcttatagggaggagatgggaaaacttctataagagctatgacgtcgcatgcacgcgtacgtaagctcggaattcggctcgagggagataaaaaagtggaggaattgttgttgctggatgtgatgccacttagtcttggatttgagggtgctggtggtgttatgtcagtgttgatccccaagaacaccatgatccccaccaagaaggagaggatttgttctaccttctatgacaatcagaaatcttttaatgtcaaagtgttcgagggagaacgagttaagacaaaggataacttctttctcggcaagtttgtcctcaaagggttcgatccattaccaaagggagtgccacaaatcaacgttatctttgatgtggatgctgatggcattgtggaagtcaccgcagaagataaagccacaagaatagaaaagaagatcacaatcaacaacaagcacggaaggctgaacccggaagagataagaagaatggtgagagactcaaa

SEQ ID NO: 253475 - DNA, 510 bp, Glycine max
  unsure (1)..(510): unsure at all n locations
aatgtgtatctaagggggggaggggggaaaattctaagagctatgacggtnnaatgcacgcatgcgtacgtaagctcggaattcggctcgagctcgagccgtttccatgctaatgaggataagccagtggtatttcatcagtcctttgttcaaccgaacactgcaacacagtatgcaagtttggttgcaccttcatttgatctaactggtcttggagttgctgaggatggacagaacatgattagtgaccttatgacaatctatgatacgaatgttgtaagaaacatgaacttaagttcctccaactgtgtagctgtagaaactgataacctgtctcatgccagcttacatcaacaagaaagctatttgcctaggtcaggaatggtgttggaagggaacttatttgcacgagaggaagggtcatttgaccggttcaaggacaccatgaacatgaacactcataccccttttgataccaaccatagcaacaattataatatgcatttgatg

SEQ ID NO: 253476 - DNA, 517 bp, Glycine max
gggtgggaggtttgtctgatatgggaggagtataagtatcctcggagagactaagcttgcatgcctgcaggtcgactctagaggatcccctcggggaattccaattccacattttcaagaaataaggaggcaaaaatgtgcatatatgaattggaattatttgttttcttattaggcctatcctgaagccaaaggaaatgagatcggaattcctcggggaattccaattccacattttcaagaaataaggaggcaaaaatgttcatatatgaattggaattatttgttttcttattaggcctatcctgaagccaaaggaaatgagatcggaattcctcggggaattccaattccacattttcaagaaataaggaggcaaaaatgttcatatatgaattggaattatttgttttcttattaggcctatcctgaagccaaaggaaatgagatcggaattcctcgggggtaccgagctcgaattccctatagtgagtcgtattaaattcgtaatcatgtc

SEQ ID NO: 253477 - DNA, 506 bp, Glycine max
  unsure (1)..(506): unsure at all n locations
atttcataatgggattggggtatgtgatcactcnnnttnatctatgacgtcgcatgcacgcgtacgtaagctcggaattcggctcgagcggctcgagccatccaccactttcataatggcactgttgaatcccctccagaagaacccttttaccctatggcctcacttgtgtatttccaattcacttttgctgctattacccttattttgttggctggctctgtcctcggccgaatgaacatcaaggcttggatggcttttgtgcctctttggttgatcttttcctacactgttggggcttttagtctttggggtggtggctttctctaccaatggggggttattgactattctggcggctatgtcatccacctttcttctggaatcgctggtttaactgctgcttactgggttggaccaaggttgaagagtgacagggagaggtttccaccaaacaacgtgctacttatgcttgctggtgctgggttgttgtggatggggtggtc

SEQ ID NO: 253478 - DNA, 526 bp, Glycine max
atgtctgattataagaacatatgaagtagtcactcatagaagagtgacgtcgcatgcacgcgtacgtaagctcggaattcggctcgagtgaatttgtaaacgcatccaggaacggcgtcgtattggtgctacagctgcacccgtttcgtgcacctctctgtccaaagcaccatcgcctgcccccactgtcaaagcggtttcgtcgaagagatccgtgccggctccggagccgaagcctcgcctcgccatcgactaagtcctttccccgatgatcctatattgctccggcgacagggcttccgtcgccgtaggagagaagcttccggcaaccgctccccgttcaaccccgttatcgtcctccgcggccccggcgactacttcgtcgtctccgaccactactgcgtcagcacgttcgagctcttctacgacgactgcgactgcaccgggcttcgacctattgcttccaccatgtccgaattgctcctcgggtctggctttgacagacttttctaacacatttcgcaca

SEQ ID NO: 253479 - DNA, 520 bp, Glycine max
tatgttgtggtcacgccactatagtatcactaccgaagagctatgacgtcgcatgcacgcgtacgtaagctcggaattcggctcgagttcttcttcttcttcttcttcgtcggtgggggttgggtttcaagatccaaacctcttcccaatgaagaacctctctttcttcctcatcaccaccctattcgccgccttctccgccgtcagatctgatccctcagatcaccgctacaaagaaggcgactccgtccctctctacgccaacaaagttggccccttccacaaccctagcgaaacctaccgttacttcgaccttcccttctgtgaaccaggtgatttgaaagagaagaaggaggcgctcggggaggtgctgaatggggaccgtttggttagcgcgccatacaagctggagttccagcgcgacaaggagtcgatttccgtgtgcaataggaagctcttcaaacaggacgtatcgcgggtcagatccgcggtgagggaaggctactactttcagatgtcg

SEQ ID NO: 253480 - DNA, 529 bp, Glycine max
  unsure (1)..(529): unsure at all n locations
aatggggnnnnaattgtagaanatcgtagaactcactcatagaactatcacgtcgcatgcacgcgtacgtaagctcggaattcggctcgaggcacctctcacttctcgtgggtctcagcaatatgtctcccttactgtcccagagctgactcagcanatgtgggatgccaaaaatatgatgtgtgctgctgatccccgacacggccgatacttgactgcatctgctatgttcaggggaaagatgagcaccaaagaggttgatgaacaaatgatcaatgtgcagaacaaaaactcgtcatactttgttgaatggattcccaacaatgtgaagtccagcgtttgtgatattccacccaggaatttgaagatgtcatccacatttattggcaactcaacatcgattcaagagatgtttaagagggtcagcgagcaggtcactgctatgtaccggcccaaagccttcttgcacctgtcaactggggaggggatggccacatatgaattaacccgggccaaaaggttattttaa

SEQ ID NO: 253481 - DNA, 523 bp, Glycine max
cactgttactgtccacgccactatagtgtatctacatagaagagtctatgacgtcgcatgcacgcgtacgtaagctcggaattcggctcgagggaatattttgcaatcttgattgaatatgagagtggtgatggtgacctagacaaagttgaactcagggaagcacatgcttgcgtccaatggtactgcatgcagcgatcatggggtgcagtttggaaacttgacaaagggtcagcacttgtggcaccattctccatcaagctaaccactctcaaatctggcaagaccattgtggctaacaatgtgatccctgctgggtggattattgatcagacttatagatcaattgtcaatttttaattccaataatcgaagttgtccatttgtttggatctatcatcagcttgtggttgtcctacttaatataatatatgaataagaagataattaatcttaaaaaaaaaaaaaaagggcggccggccaatattgagctcgtctaaccggtaattaatttcggggcccc

SEQ ID NO: 253482 - DNA, 521 bp, Glycine max
atgtgtctgaatacagaatataatgtaatccactctagaagagtctatgacgtcgcatgcactcgtacgtaagctcggaattcggctcgagctcgagccgcttctgctacttcctactccaaccgcacttctgttccgcaattatcatgggcaaggtcaagatcggaatcaacggatttggaagaattggccgtttggtagccagagtggctctgcagagagacgatgttgaactcgttgccgttaacgaccctttcatcaccaccgattacatgacatacatgtttaaatacgacagtgttcatggacactggaagcatcacgatgtcaccgttaaggacgagaagacccttctcttcggtgacaagccagtcactatttttggacacagaaaccctgaagagatcccatgggggtcaactggagctgacatcatttgtgagtcccacggagttttcaccgattaggacaaggccgtcgcacatttgaagggtggtgcacagaagggtattaatttggcc

SEQ ID NO: 253483 - DNA, 512 bp, Glycine max
  unsure (1)..(512): unsure at all n locations
cagtatcttcttagtggggaaggtgggagggtgatactatagaagagctatgacgtcgcatgcacgcgtacgtaagctcggaattcggctcgagggtactgatagaggcagccaatacggaccgctgctcaggctgcagactacagagagccaccgacggcgcctctcttcgaaccgggagagttgtcatcggggtccttgtatagggctggcatagcagaggccgtggccactttcttgctcctctacatcacacagctgactgagatgggtgtgctcaaatctacgagcacgtgtagcactgtgggtatccaaggcatagggtggggattttggaggaatgatctttgctctcggatattccactgctggcatctaatggtgacatattaacccagctacgacgcttgggctgatcatggcacgctagctctctctgacgagggcgattctttacatgatcattcagtggtttggagccttatgccgagcttctgtangtaaggggttcg

SEQ ID NO: 253484 - DNA, 543 bp, Glycine max
  unsure (1)..(543): unsure at all n locations
agggctnntatccngaagctcagctgcactacagtaacaccatagaagagctatgacgtcgcatgcacgcgtacgtaagctcggaattcggctcgagaaaaaaccaattcaagatgaagataaagtctcatttttccgtctccctaatgtttcttataggcatagccattagccacacacatgtttctttagcagaatgtgacaatgtgaaggactattgccctacaattcctccccaaaagcaaaccatattcctcaatggcttcccctgcgagaacccaaataacacaattgcacaatgatttcaagagcatggaactaagcaagccaggttcaagaaacaagttaaggtcattagttaaaattggtacagcttccaagtttccggggctcaacgcactcggccttgcgattggtagaagtgacattgaagtggatggccttgtgaacctncacaatcatccaagagccactgagatgatctatgtcagccaaggtgatgtagtcgctgcgtttcttgacactcggaaccagctcttccag

SEQ ID NO: 253485 - DNA, 530 bp, Glycine max
  unsure (1)..(530): unsure at all n locations
agtgtgntttctgangataagtacatcattgtgacactctagaagagctatgacgtcgcatgcacgcgtacgtaagctcggaattcggctcgagccgggttggattgggatctaaaaccgtggttttggcttaatggaacctactaaatggttgccggccaaaaactacgactacttggtcaagctggtcctcatgggagactccggcgtcggcaggtccaaccttttgtcccgattcacccgaaacgagttcagcttggagaccaattccaccatcggcgtcgaattcgccactctgagtgtcccggttgatagcaagctcgtcaaggcacaaatctgggacactgcaggccaggaaagatatcgtgcattacaagtgcatactactgaggagccttgggtgctttgatcgtgtacgatgtaacccgacacgtgacattcgagaacgttgagaagattgtggaagaaccttcggaatacaacgaagcataacgtgtggtcatgcttgtgggatacaaaactcgaccctc

SEQ ID NO: 253486 - DNA, 532 bp, Glycine max
aggtgtgtctgatcacgtagcactacgtgacactctagaagagctatgacgtcgcatgcacgcgtacgtaagctcggaattcggctcgagatttcatcgtgcattcaatggccaccacagcagctctatccggaaccatggtgagcacctccttcatgaggaggcaacctatgaccaccacaagcctaaagacattccccaacgttggtgaagctctttttggtctgaaaagtggacgaggtggtcgtgtcacttgcatggcctcgtacaaggtgaagctcataaccccagaaggagaagtggagtttgaatgcccagatgatgttttcattgttgacaaggcagaggacgaaggcattgaacttccctactcgtgcaaggccggttcttgcgtttcctgtgttggcaaaattgtggaaagtaacgtggaccagtcagatggtagcttccttgatgatgagcaaatagatagtggctgggttctcacctgtgttgctcaacctaggtcagacgttgtcattgagacacacaa

SEQ ID NO: 253487 - DNA, 516 bp, Glycine max
  unsure (1)..(516): unsure at all n locations
aggtgttngacatggatcacttagtaacactctagaagatctatgacgtcgcatgcacgcgtacgtaagctcggaattcggctcgagattctctctgtgtatttccctaactctcccttcaagatgcagatcttcgtcaagaccctcaacggccagaccatcacccttgaggtggaaagctctgacaccatcgacaacgtcaaggccaagatccaggacaaggaaggaatccccccggaccagcaacgtctcattttcgccggaaagcaacttgaggacggccgtacccttgctgactaccacattcaaaaggagaggactctttaacttgtgcttcggtctccgtggtgcatgcagatcttcgttaagacactcaccggcaagaccataaccctagaagttgaaagctccgacaccatcgataacgtcaaggccaagatccaggacaaggagggtatccccccggaccagcaacgtctgatcttcggcggaaaagcacttgaggacggccgaacc

SEQ ID NO: 253488 - DNA, 496 bp, Glycine max
attatctgaatgggggggatggtggactttccagagctatgacgtcgatgcacgcgtacgtaagctcggaattcggctcgagattccataccttaataacctttcttttaactttttgcttaccgtttcgagggaaaaatatggcggaggacacagatgccaggcaccgcgcttctgcgccaacaattgccggttctttggcagccctgccacgcagaatatgtgctccaagtgctaccgcgatttccagctcaaggagcagcaatcttccaacgccaagatgtttctcaatcaatcgctggttccttcaccgccaccggcggtgatttctcagccgtcgtcttcttcttcggccgcggtagatccgtcatcggcggtggttgatgacgcgccaagccagtccgaagaagttaaagcgccggaacagaaccggtgtatgacgttcaagcggcgcgttgggctcacagggttcaagtgtcggtgcgggatgatgctg

SEQ ID NO: 253489 - DNA, 519 bp, Glycine max
  unsure (1)..(519): unsure at all n locations
gagtnttttcnccaatgtgagctttattggtaacactctagaagagctatgacgtcgcatgcacgcgtacgtaagctcggaattcggctcgagcagcacaaagcgggttactgtctgttcaagctaccatctctctctctctttcttagtgcctccttgccagaagttaaaatggcccaagaaactttcctattcacatctgaatcagtgaacgaggggcaccctgacaagctctgtgaccagatctccgatgctgtgctcgatgcatgcttggagcaggaccctgacagcaaggttgcctgtgaaacctgcaccaagaccaacatggtgatggttttcggagagatcacaaccaaggccaacgtggactatgagaagattgtgcgtgacacatgcaggaacattggttttgtctctgatgatgttgtcttgatgctgacaactgcaaggtcctcgtcaacattgagcaacagagtcctgatattgctcaaagtgtgcacggncacctttacaaagagg

SEQ ID NO: 253490 - DNA, 512 bp, Glycine max
  unsure (1)..(512): unsure at all n locations
tatgctgttatgtatgagggggcgtggggggaatatctaagagctatgacgtcgcatgcacgcgtacgtaagctcggaattcggctcgagcttaatttgttctcttcagccatggcgatggtgcaagatgaacgatgcgttcagaaaagctactggattgaacatacgacggacttgtccgtagagtcaatgatgctcgattccaacgcctctgatctcgacaaggaggagagacccgaagttttgtccctactaccaccatatgaaggaaaatcagttgtagaacttggagcaggtattggaagattcacagttgaattggccaagaaagctggccagttacttgctgtggatttcattgagagtgctataaaagaggaatgaaagcattaatggacaccacaagaatgtcaagttcaatggtgctgatgtcacttctccaaacttggatatttctgaaagatcggntgatctgatattctcaaattgtttactcatgtatctntcaaata

SEQ ID NO: 253491 - DNA, 534 bp, Glycine max
  unsure (1)..(534): unsure at all n locations
tggtgntgtctgatgtatgtagcactacgtgacactctagaagagctatgacgtcgcatgcacgcgtacgtaagctcggaattcggctcgagatgaactccacttacaatgtgacatcaagtacattgcgtgtgatgtcagatgagtttcgaaggggaagtgaaatatgtgaggctatggaggctagcaaggctgattgggatactctttttgagccttatccctttttttgaatcatacaagaattatctacagatagatataacagcagagaatgcagatgaccttagacaatggaaaggttgggttgagtctcgtctccgccagttgacattgaagattgagaggcacacttatggtatgcttcaatgtcatccacatcctggtgaattctcagacaattctagaccctttcaccactgttactttatgggtctgcagcgtaagcaaggagttccagtgaatgaaggtgaacagtttgatataaggctaactgttgaagaatttaaacattctgtcaatgcttacactctn

SEQ ID NO: 253492 - DNA, 533 bp, Glycine max
agatgtgtttctgaagattaagcacatcatagtaacactctagaagagctatgacgtcgcatgcacgcgtacgtaagctcggaattcggctcgagcaagtctttccttttctatttaattcctaaaatcccattcttcttcgctcattcctctgcactgccatcatccccaacttcctcacaaggttacaaggactaaagagttgtgccaccatgtcggacgatgaaagggaggagaaagagttggatctctcttctgccgaagttgtcaccaaatacaaaaccgctgctgagatcgttaacaaggccttgaagctagttatttcagaatgtaaaccaaaggcgaagattgtggatatttgtgagaaaggggattcatacattagagagcaaactggaaatgtgtacaagaatgtgaagaggaagattgagagaggtgttgctttcccaacatgtttatcaatcaacaacgttgtctgccatttctctccactagccagtgatgaggccgtgttggaagaaggtgatatattg

SEQ ID NO: 253493 - DNA, 519 bp, Glycine max
  unsure (1)..(519): unsure at all n locations
attgttttgtccagaaatattgcatactcgaggactgcttgcatgcctgcaggtcgactctagaggatcccctggggaattccaattccacatttcaagaaataaggaggcaaaaatgtgcatatatgaattggaattatttgttttcttattaggcctatcctgaagccaaaggaaatgagatcggaattcctcggggaattccaattccacattttcaagaaataaggaggcaaaaatgttcatatatgaattggaattatttgctttcttattaggcctatcctgaagccaaaggaaatgagatcggaattcctcggggaattccaattccacattttcaagaaataaggaggcaaaaatgttcatatatgaattggaattatttgtcttcttattaagcctatcctgaagccaaaggaaatgagatcggaattcctcggaggtaccgagctcgaattccctatagtgagtcgtattaaattcgtaatcatgtcatagctgnttcctgtgtgaaaa

SEQ ID NO: 253494 - DNA, 516 bp, Glycine max
  unsure (1)..(516): unsure at all n locations
aggcnttcttcttactaaaggggagtgaaagagagacattatagacgatgacgtcgcatgcacgcgtacgtaagctcggaattcggctcgaggttctgcaaagggaagatgacctgaatgaaattgttcagcttgtgggcaaggatgctttagctgaaggagataagatcaccttagaaactgcaaagcttttgagagaggattatcttgctcaaaatgcctttacaccatatgacaaattctgccccttctacaagtctgtttggatgatgcgcaacattatccatttctacaatttggcaaatcaagcagtagagaggggagctggttcaaatggtcagaagatatcttacacccttatcaagcatcgtatgggagatctgttctaccgattagtgtctcagaaatttgaggatccagcagaaagggaagctgctttggttgcgaaatttcagaagttacatgaggacctgactaatggtttccgcaaccttganggacgaacccgatgattga

SEQ ID NO: 253495 - DNA, 508 bp, Glycine max
  unsure (1)..(508): unsure at all n locations
atggttatgaaatagggaggcgatgggtgagaatatataagagctatgacgtcgcatgcacgcgtacgtaagctcggaattcggctcgaggtgagatttgcgaatctgagaaatggcggattcttctcgggaggagaacgtttacatggcgaaattggcggagcaggccgagcgttacgaggagatggttgagttcatggagaaggttgcaaagactgtggaggttgaggagttgactgtggaggagaggaatctcctctctgtggcttacaagaacgtgattggtgcgaggagggcttcgtggaggatcatatcctgcattgagcataaggaggagagcaggggcaatgaggaccacgtggccattataaaggagtccagggcaaaaattgaggctgaactaaccaggatctgtaatgggattttgaccctccttgagtccaacctattccctncgcttgatttccgagagcacagtcttttaccctaaaaatgaaggtgattacca

SEQ ID NO: 253496 - DNA, 514 bp, Glycine max
atgtgttttcttatgagggggggatgtaaggatatctctcaagagctatgacgtcgcatgcacgcgtacgtaagctcggaattcggctcgagttgaatctcacaattctctaaaagagatctttttctgctctttgaagaaagaagggtctttgcttgattttggagatgtctctgctctcagatctcatcaaccttaacctctccgataccaccgagaaggtgaacccagagtacatatggatcggtggatcaggaatggacctgaggagcaaagcacggactctcccaggaccagttagcgacccttcagagcttcccaagtggaactatgatggttccagcacaggtcaagctcctggtgaagacagtgaagtgattctatacccacaagccattttcagggatccattcagaaggggtaacaatatcttggttatctgtgatgcctacactcctgctggagaacctattcccactaaccagaggcacgcttgttgcaaggtttcaaccat

SEQ ID NO: 253497 - DNA, 512 bp, Glycine max
tatgtatctgaatgaggggggatgggtggtaatctctcaagagctatgacgtcgcatgcacgcgtacgtaagctcggaattcggctcgagatgattttggttatttgcatagttgttccctccctcagaatttgcgtagcaaatgattctataaacgtgctccagtctatgagtgatggggagagattggtgtcaaaaggtggaaattttgaacttgggtttttcagcccaggtagttcccagaaacgttatgtgggaatttggtacaagaatatcccaactcagacagtgggttgggttgctaatggggcaaaccccatcaatggttccctaagcatcttaacaactaacaccacaagcaatcttgttctcacacaaaatggttctattgggtggtacaccaacaactctcacaaacaagcacagaatccggtggtggagctcttggacagtggcaatcttgtcataagaaatgatggaggatcaaacccagaagcgtatttgtggcaaag

SEQ ID NO: 253498 - DNA, 513 bp, Glycine max
gtgtgtgtgtatgttggggagagggggggaaatcctaagagctatgacgtcgcatgcacgcgtacgtaagctcggaattcggctcgaggagacattctcggtggatggaaaggttttggttttggacgaatccaacttcgattccgccatagcctccttcgatcacatcttggttgacttttacgctccctggtgtggccactgcaagcgtctctctcccgagttagatgcagccgcccctgtacttgcaaccttgaaggaacccataatcatagcaaaagtagatgcagacaagcatacccgccttgcgaaaaaatatgatgttgatgcatatccgaccattttgctgtttaatcatggcgtccccacagaataccgtggaccaaggaaggcagatttacttgttcgttatctgaagaaattttctgcttctgatgtttccattctggattcagattctgctgtgaatatgttcgttgaagaagcaggcacttttttcccgatttatatagg

SEQ ID NO: 253499 - DNA, 532 bp, Glycine max
  unsure (1)..(532): unsure at all n locations
tgatgtgttttctgatcctcagttcatactagtatcactctagaagagctatgacgtcgcatgcacgcgtacgtaagctcggaattcggctcgagaatcaattaaagtgagggttttagctttgagcctaaagcctctgcttctcctccttctccttttccttcttctccttttccttgtatagtaccgatgttgacactcacttctccttccatggccttatccatggattctcttcccaaattgcgccacccttccccatttcccactcccttatcctcttccatctccttccgatctttgccgccacctcactttccctcttcctcctcctcctcgtttaggttacactccatcagaccctncttnccaaaaccacccctcgtttcgcaccccctccntccccctctccttcaaccctaacctncttcctctcccccgtcgtcgaaaccacctgcatcgtcatcgccgccgctgccttattcttcatgcgcttncaccacacacccnccgccatcgccgccccgctcac

SEQ ID NO: 253500 - DNA, 510 bp, Glycine max
  unsure (1)..(510): unsure at all n locations
ggaatggtttttgatgaggggaagggggggatatctcagagctatgacgtcgcatgcacgcgtacgtaagctcggaattcggctcgagcggctcgaggcctcatctaaatctagagcccccaaaaacggaactacattgcactttcagatattttggtcggtactctcttttttttttgcgacaccccaatttcaaaaacacaaaccagtggccttaatctggactctgaaactcaaccttcnttcttctcttctctctcgtgtttaactgttcanggcatcctagtttctctcagttagccaaaatggtagctgcaaatgagaaggtcgtcgctgtgatcatggttggaggacccactaaaggtactagattccgaccattgtcattcaacgtacccaagccactttttccattagcaggacaacccatggttcatcatccaattttctgcttgtaaaaggattcctaatttggctcagatttatctgcttggtttctacgaggaacgc

SEQ ID NO: 253501 - DNA, 512 bp, Glycine max
gggaatgcatctgagtagtggagatgatgagtgtcactctccaagagctatgacgtcgcatgcacgcgtacgtaagctcggaattcggctcgaggccaaatattaatgcagctagctagcatagtaattcacgagcatgaagaaggtaagtaatttgttgcatacgttgaaaccagacatcttaatggtgtttgtgcagattgcatttgctgctgtgaatgtgatgtacaagctggccataaatgatggaatgagcatgagggtagcttctgcatatcgccttgcttttgcttcggctttcactgtccctgtggctctcgtctttgataggaagaagagaccaaagattacttggagggtgcttttattggcatttctgtgtggattggtttggggaagtttatttagtaacctttacctcgaagccatggcttttacgtcagcaacgtttatgttggccatggtcaaccttatccctggcattaccttcatttttgccatatccttcggat

SEQ ID NO: 253502 - DNA, 518 bp, Glycine max
gatgtgtgtcatcttatagagaggattgtgtgactctacaagagctatgacgtcgcatgcacgcgtacgtaagctcggaattcggctcgagtcggaagaaaccctagccactctcccggcgtcacgatgcagatcttcgtgaaaaccctaacgggtaaaacgatcacgttggaggtggagtcttcggacaccatcgacaacgtgaaggccaagatccaggacaaggaaggcatccctccggaccagcagcgcctcatcttcgccgggaagcagctggaggacggccgcaccctcgccgactacaacatccagaaggagtccacgcttcacctcgtcctccgcctccgtggcggcgccaagaagcgcaagaagaagacctacaccaagcccaagaagatcaagcacaagcacaagaaggtcaagctcggcattcttcagttctacaaggtcgacgattctggaaaagtccagaggctccgccaggagtgccccaacgccgagtgcggcgccggcacctt

SEQ ID NO: 253503 - DNA, 515 bp, Glycine max
  unsure (1)..(515): unsure at all n locations
tatgttttatctattggggggtgaaggggggatattatcaagagctatgacgtcgcatgcacgcgtacgtaagctcggaattcggctcgagttttcgttcaggtgggtgatccaatctctgaccacaattgttgggaaaggcctgaggacatggacacaagcaggacagtgtatgctgttgatgcaccaaacccagcttcagatgtagctggtgaaactgctgcggcactagctgctgcatcaatggcttttcgttcatcggatcctggttattcagacactttgcttcgaaatgctgctaaggcctntcaatntgcagatacctataggggtgcctacagtgacaatgctgatgttaggaatggtgtttgcccatattattgtgacttcgatggttatcaagacgaattgttatggggagccgcatggctaaggaaggccactcaggatgaaaatttcctcaactacattcaaagcaatggtaaaacccttggtgctgaagacaatataaatga

SEQ ID NO: 253504 - DNA, 510 bp, Glycine max
  unsure (1)..(510): unsure at all n locations
atgtatctgagtgtggagaagatgggtgtactatacaagagctatgacgtcgcatgcacgcgtacgtaagctcggaattcggctcgagaaaaaataaaaaatggggataggggtactatttgttgggtttttcttgctatcttgtgttgtgtgtgtgaagggtgtggagccaaaagcctcacccacttgtacatttccggcagtttacaactttggggactcaaactcagacactggaggcatatcagcttcatttgtgccaattcctgcaccttatggcgagggcttctttcacaagccttctggaagggactgtgatggccgtctcattgtagatttcatagctgagaagctaaacttgccatacttaagtgcttatctgaattcccttggaaccaattaccggcatggggcaaattttgccactgngggatccaccattaggaagcagaatgaaaccatatttcattatggaataagtccttcttctctggacattagaatggtgca

SEQ ID NO: 253505 - DNA, 509 bp, Glycine max
atgatatgtatgggggagggaaggaggagatttctcaagagctatgacgtcgcatgcacgcgtacgtaagctcggaattcggctcgagtttgaagttgcttcatgcatgagatactgtagccggttattgcggaatatgcctatgacacctgactctgcattgctttatctggagcttccttctagtgtcttaatggctgatgcaatccaaccattaactgatgctgcgaaaccagtatcttgctggtcgatacaaggatataaccaagttccaagaagaagttattgcctttgcccctagctggagtagaggcaatactgtctagtgatgatctccaggtcgcatcagaagatgctgtatatgattttgtgttgaaatggtctcgacagcagtacactaaactggaagacaggcgagaagtcctgggtacccggcttgcacaattaattcgctttccttacatgacctgccgaaagcttaagaaggtcttgacctgttctgactttgc

SEQ ID NO: 253506 - DNA, 513 bp, Glycine max
  unsure (1)..(513): unsure at all n locations
ntgtctctgagtaggggaggggatgggtggaaatctctcaagagctatgacgtcgcatggccgccttccttaacctcggatttcggttcgggctggaggacctttttaccgaaggtccaaacctggtccagggtggaacccgcttcttcctcctcttccgccgccgccaacgccatggggtgacgttcaaatccacaggaccaaactctgcatcatcggaagcggtccccttcgcccacacagccgccgtctacgccgctcgagccgagctgaagccgatcctcttcgagggctggatggccaacgacatcgtccccggcggccagcttaccaacaacaccgacgtccagaactttcccgggttccccgacggcattcttggccgcgagctcatggaacgcttcccgaaccagtcgcttcgcttcggcaccgagatccacaccgagaccgtctccaaggtcgatttctcgaaccgtcctttcagggttttcaccgattcccgaaccgtcgagg

SEQ ID NO: 253507 - DNA, 512 bp, Glycine max
ttgaatctgagtttgtggaagaaaggttatacttcccgagacttgctagcatgcctgcacgtcgactctagaggatcccctcggggaattccaattccacattttcaagaaataaggaggcacaaatgtgcatatatgaattggaattatttgttttcttattaggcctatcctgaagccaaaggaaatgagatcggaattcctcggggaattccaattccacattttcaagacataaggaggcaaaaatgttcatatatgaattggaattatttggtatcttattaggcctatcctgaagccaaaggaaatgagatcggaattcctcggggaattccaattccacattttcaagaaagtaagacgcaaaaatgttcatatatgaattggaattatttgttttcttattaggcctatcctgaagccaaaggaaatgagatcggaattcctcggaggtaccgagctcgaattccctatagtgagtcgtattaaattcgtaatcatgtcatagc

SEQ ID NO: 253508 - DNA, 513 bp, Glycine max
  unsure (1)..(513): unsure at all n locations
aaaggtttctgaaatgttaggtgaacggtaacactacccaagagctatgacgtcgcatgcacgcgtacgtaagctcggaattcggctcgagacggccgctacctcactgcctcagccatgtttagaggaaagatgagcaccaaggaggtcgatgaacaaatgatcaatgtgcagaacaagaactcctcatactttgtggaatggattccccacaatgtgaaatccacagtctgtgacattcccccaaccggcttgaagatggcttcaacattcattggcaactctacctccattcaggagatgttccgtagagtgagtgagcaattcactgctatgttcaggaggaaggccttcttgcattggtataccggggaaggcatggacgagatggagttcactgaggctgagagcaacatgaacgatcttgtgtcagagtatcaacagtaccaggatgccactgctgatgaggatgagtatgangaggaaagagaagaagaggagtatggccaacan

SEQ ID NO: 253509 - DNA, 523 bp, Glycine max
tatgtgtatctgattagggggtataagagaacactctagaagagctatgacgtcgcatgcacgcgtacgtaagctcggaattcggctcgagggcggagaacggtgaaagccgcgaggagtacctgttcaagagtagtcctgatgggggactccgcggtggggaaagttcaacctcctctcgcggttcgcgcggaacgagttcgatagcaactccaaggccaccattggggtcgagttccagacgcagctcgtcgagatcgacggcaaagagatcaaggcgcagatctgggacactgcgggacaagagaggtttcgagctgtcacctctgcttactacagaggcgctgttggtgcgctcgttgtttacgatatcagcaggaagggcaccttcgacagcatcaagcgatggctccaagaactcactactcaaaatgatagcaccgtagcaagaatgttggtgggaaataaatgtgactgggagaatattagagaggtgagcacagaagagggcaaaagttttgca

SEQ ID NO: 253510 - DNA, 530 bp, Glycine max
  unsure (1)..(530): unsure at all n locations
tagtgtatctgaaaagaggggtaaacagtaacacttctagaagagctatgacgtcgcatgcacgcgtacgtaagctcggaattcggctcgaggcgaaatcattcaaacacattccatctattaagaatttagagagtgaaaatggattggcaaaacatgatgggcaacctggacccattcccaagaacaatcttaatccctcgtccactaacactactcctgctgctgntactatctcgtacccgtccaaagaccgcctatccaccaggccctaagggcttnccaatcataggaaacatgtttatgatggaccagctaacccaccgnggtctcgccaacctggccaaacactacggcggaatcttccaccttcgcatgggcttcctccacatggtcgccatcttcgaccccgatgccgcgcgacaagttctccaagtccaagacaacatcttttccaaaccgcccgncaccatcgncatcagctaccttacctacgaccgcgccgacatgngccttcgccactacngncc

SEQ ID NO: 253511 - DNA, 501 bp, Glycine max
  unsure (1)..(501): unsure at all n locations
ctgttttttagnttcattntntgactnntgcttatccgtggtggtcgctactatactagtggatccaccgggctgcaggaattctgcacgagctcatactactttggaggaaatttctgttgtatgctcctattaaacatgcagggactccaacaattgcgttcaacattctatttcagtgacattatcatttacatttagtttcaagttttaattgctcttgctcataaagtcattctcgggttatatagagtcccatttacaaagattgtcacgaatggaatgtttgagagctacttacctgatgtttgtttaatggatgtgtcttcagcatcatttaattcttattctttatttatttatttttttgtttttattttttttttttttttatttttattaatttttttttttttattttttttatttattttttatatttttttatatttttttaatttttattttttttttttttttatttttattttttttattctt

SEQ ID NO: 253512 - DNA, 513 bp, Glycine max
gagaagtatctgaatggggggtaaacggtagacactactcaagagctatgacgtcgcatgcacgcgtacgtaagctcggaattcggctcgagcccaaatggatatctggaagtacatatttgggtttgtggaactggcagtgataaaatgtgcgattgagcttggcatagctgaagccatagagaagcatggaagtcccatgacactatcggagatatcatcaagtttagggtgtgatacttcacatctgaagcgcatcatgaggttcctggtgcaaagaaagatattcaaaggcgacgggtgcagcaggggctattctcaatcagctctgtctcgtcgattgatgagaaacggcgaacacagcatggctagttttctcttgctggagagtagtcctgtaatgctggcaccttggcacagtctgagtgctcgcgtcatggccaatggccaccccctcatttggcaaaggctcacggggaaaaacgtgtggcgctatgctgccgcaaatctcga

SEQ ID NO: 253513 - DNA, 510 bp, Glycine max
  unsure (1)..(510): unsure at all n locations
ttgttctgaatgtggggggaagggtgtaatcctcgagacatgcttgcatgcctgcaggtcgactctagaggatcccctcggggaattccaattccacattttcaagaaataaggaggcaaaaatgttcatatatgaattggaattatttgttttcttattaagcctatcctgaagccaaaggaaatgagatcggaattcctcggggaattccaattccacattttcaagaaataaggaggcaaaaatgttcatatatgaattggaattatttgttttcttattaggcctatcctgaagccaaaggaaatgagatcggaattcctcggggaattccaattccacattttcaagaaataaggaagcaaaaatgttcatatatgaattggaattaattggtttcttattaggcctatcctgaaaccaaaagaaatgagatcggaaattcctcgggggtaccgagctcgaattccctatagtgagtcgtattanattcgtaatcatgtcatagc

SEQ ID NO: 253514 - DNA, 513 bp, Glycine max
atgttttctggatggggggggatgggtggaattctcaagagctatgacgtcgcatgcacgcgtacgtaagctcggaattcggctcgagggcagatttcggtctttctagactagggatgaccgaaatatgccacatttcgacaaccccacaaggaacccccggctacgttgatccacagtaccatcaagactttcacctctctgacaagagtgatgtatatagcttgggtgttgttcttgttgagatcataacaggattgaaagtggtggacttttcacgtccgcataatgaagtgaatctagcttctcttgctgcggacaagatcgggaaagggcttttaaatgaaattatagacccattccttggacctggagtaagaagtgatgcttggaccctttcattcatacacaaagtggcttgactcgcattcagatgcattgcgttccatagggacatgaggccttcaatgacagaagtggcttcagagttagagcaacttaagttgagtaggt

SEQ ID NO: 253515 - DNA, 511 bp, Glycine max
  unsure (1)..(511): unsure at all n locations
tagttttttctattgatgggggatggaggtgaatcctcaagagctatgacgtcgcatgcacgcgtacgtaagctcggaattcggctcgaggtcttgaggcatctgggttaaatgacctctctagagttacaagtgttgcctctttcttcgtcagtagaatggacaccctcattgacaaggcccttgagaaaattggcaccccaatggcccttaatctacgtgggaaggcaacggtagcccaagcagcattggcttaacagctctaccaaagaaattttctggtccaaagtgggaagctctagttaaaaagggggccaagaagcaaaggctcctctgggccttaaccagtgtaaagaatcctgcctattctgacaccttatatgttgctcctcttattggacccgacactgtatcaacaatgccagaccaagcccttcaagcatttatcgatcatggtaccgtatccaggacaatagactcanatgcatctgaagctganggatatancatg

SEQ ID NO: 253516 - DNA, 532 bp, Glycine max
  unsure (1)..(532): unsure at all n locations
atgtgntatcntgaaaagagagggtatatgatgaatactacagaagagctatgacgtcgcatgcacgcgtacgtaagctcggaattcggctcgagtattattctcctcattccttcatttttaaacctagctccatgtccctccaatcaccataacatggcatcagaagcaaatgctggcaacaccaacttttgtgtaaaaggtagcaacaatggctacattagtgctaatgaccccttgaactggggtgcggcggcggaagctatggctgggagccacctcgacgaggtcaagcgcatgctagaggagtaccggaggcccgtcgtcaagctcggtggagagaccctgaccatctcgcaggtcgcggcgatcgcggcccacgaccagggggtgaaggtggagctggcggagtcctccagggccggtgttaaggccagcagtgactgggtgatggagagcatgaacaagggcactgacagctacggcgtcaccaccgggttcggtgctaccttccaccggagaaccaaacaag

SEQ ID NO: 253517 - DNA, 522 bp, Glycine max
  unsure (1)..(522): unsure at all n locations
aggtntgtctgcaatggggagtttatgggatacttctagaagagctatgacgtcgcatgcacgcgtacgtaagctcggaattcggctcgagtgaatctcaagattctaagagagattttgctgctctttgaagaacggtgtttgcttgattttggtgatgtcgctgctctcagatctcatcaaccttaacctctcagacactactgagaaggtgatcgcagagtacatatggatcggtggatcatgaatggacctgaagagcaaagcaaggactctcccaggaccagttagcgacccttcaaagcttcccaagtggaactatgatggttccagcacaggccaagctcctggagaagacagtgaagtgattatatacccacaagccattttcagggatccattcagaaggagcaacaatatcttggttatctgtgatgcttacactccagctggagaacccattcccactaacaagaggcacgatgctgccaaggttttcagccatcctgatgttgctgctga

SEQ ID NO: 253518 - DNA, 526 bp, Glycine max
  unsure (1)..(526): unsure at all n locations
tagtgtgtcntgtcccaccncactacgnacaccatagaagagctatgacgtcgcatgcacgcgtacgtaagctcggaattcggctcgagcaatgtcccatttcatcagtggctacacagccctggttgctgggacagaggatggtataaaagaaccacaggctacattctctgcttgtttcggggcagcgtttataatgatgcaccctaccaaatatgcagcaatgctagccgaaaagatgcagaagcatggggctactggatggcttgtcaatactggctggtcaggaggaagttatggattaggcaatcggattaagttagcgtatactaggaaaatcatngatgctattcactctgggagccttttgaatgcacagtacactaagactgaagtgtttgggcttgagatcccaacagcactaaaaggagtcccttctgaaatcttggaccctgtgaatacttggtctgacaagaaggcctatcaagatacacgcttgaaactagcaagcttattcaaaaaaaac

SEQ ID NO: 253519 - DNA, 513 bp, Glycine max
gggtaagaggtttctttttgaatgattgtaaccttctctcagagctatgacgtcgcatgcacgcgtacgtaagctcggaattcggctcgaggtacagtgcttgcatattgggtgcatttggccttgaagatgagcttcaacaaggcgtgctagaatgcattgaatgtctaaggattgcaggccttaaagtatgggatctgacttgcgacgaccatgatactgccatcatcatggacttctcctcagatctgctaaccagcaacatgactcacattattatctatagctcgagcagagaatcatgcaaagaaagcttgcaggatggacttgacatgtggacctgtgggcttgacgacactgctggaggaaggtttcatggtactacagtatccatgaataatgatcgtaccatcctagtgcatattctcgacagcgaacttgatgaacagatatttcaactcgcgagtaggtgctctgccgttctatgttgccgtgatcgttccgatgaacaag

SEQ ID NO: 253520 - DNA, 511 bp, Glycine max
ctggtatctgatgtggggggatggagggatattctcagagctatgacgtcgcatgcacgccttccttagcctgggatttgggttgaggcccattcaaaatggagccttggattttaaaacattttctaaggtggttcgctttggttctggtggttagcggaaccaccttttgcactggtggcccttacaacaacccaaaggcaaccaagaaacctttggcaaacaaattcccttaattccccagaacgcggcacgtgcggtgctgaggctgcggccattggtgtgggactccaaattagcacactacgcgcaatggtatgccaaccagaggcgcaacgattgtgccctagagcactccaacggaccttacggtgagaacattttctggggcagtggcacggggtggaagccagcacaagctgttagtgcatgggttgaagagcgccaatggtacaattattggcacaattcttgtgccaatggacagatgtgtggacattacactcagatt

SEQ ID NO: 253521 - DNA, 512 bp, Glycine max
  unsure (1)..(512): unsure at all n locations
ttgttttctcctttgtggggcgaatggttatacttcacaagagctatgacgtcgcatgcacgcgtacgtaagctcggaattcggctcgagggtgtacagagtcaacttgtctgttctgggtgtagaaaccttctagtgtttccagttggagccacctccgtgtgctgtgctgtttgcaatgctgtcacagcagtgccacctcctggcacagaaatggcccagttagtatgtggaggttgccatactttactcatgtacatccggggcgcgacaagtgtgcaatgttcatgttgtcacactgtcaatctagctttggaagcaaatcaggtggcacatgtcaactgtgggaactgcaggatgctactggcgtaccaatatggagcaagatccgtgaaatgtgcagtttgcaattttgtaacatcagttggggccacagcaagcaccactgagcagaagttcagcacctaaaacatacaaaatagcaaggtcattatagactctacaaccttggn

SEQ ID NO: 253522 - DNA, 523 bp, Glycine max
  unsure (1)..(523): unsure at all n locations
agggtgtgtctganctcgtagccctacgtgacactctagaagagctatgacgtcgcatgcacgcgtacgtaagctcggaattcggctcgaggaaacatttcactaatagagagacataagcataatattgagaaataatggagggttgtacttattgtgtgaagttgctatgccttgttgggtttgtggtgcttgtgagtactattgcaggggtggagagtgctggtgaatgtgggaaatctaccaccccagataatgaggcttataagcttgcaccatgtgcctcagcagcacaagatgagaatgctagtgtttctaaaagtgctgtgctcaggtgaagaaaattgggcagaacccaagctgcctttgtgcagttctgctctccaacacagccaaaatggctggtgtcaaccctcaagttgctgtcaccattcccaagcgttgcaacctggctaatcgccctgttggttacaagtgtggaccttacactctgccttgaaagagttgaagttgttgctgaaaa

SEQ ID NO: 253523 - DNA, 523 bp, Glycine max
  unsure (1)..(523): unsure at all n locations
aggggtnnttttnnccctcgtatgcttancgtgacactctagaagagctatgacgtcgcatgcacgcgtacgtaagctcggaattcggctcgagcggcgccactggttgacccgacggagtttacgtcatggtccttttacagagcagggatagcagagtttgtggccacttttctgtttctatacatcactgtcttaaccgtcatgggagtcgccggggctaagtctaagtgcagtaccgttgggattcaaggaatcgcttgggccttcggtggcatgatcttcgccctcgtttactgcaccgttgccttttaaggggaccccttaaccccgccggtaacattgggcctgttttggccaaggaagttgccgttgccaagggagattttacacattgaagcgcagcgctggggcgctatttgtggctctcgcgtggaaaagggtttcgaggggaacacaaaactcggcacgtaaaatggtggcgacaactttgttgcccgtgtatacaccaggggtgatggtc

SEQ ID NO: 253524 - DNA, 515 bp, Glycine max
  unsure (1)..(515): unsure at all n locations
ggggaattgtcctcttaggaggaggggatggatgagaacactatagaagagctatgacgtcgcatgcacgcgtacgtaagctcggaattcggctcgagctcaagccgtttccatgctacttaagataggccaatggggttcaatggttggtagccacactgctgattgccctgttgggtggtgcacaagctggtgtggtatggtacatcgacttaaggcaacctaacttgggtcgtgcttcaagtacctggtcaaacccttcaacaaccgattgaaaaattgtgtgcaatttattcgccaagccaatttcccttgcctctgcagatacaggtctattcttcctttaattggaatataacccgaaaaggctttggccttgcctggtaaatgtggtctccaatcccctgctaaatgttgaggtaatcatctttagttgtaatacagcttcaacatacaggctctttttggatataagcttctctattaacacttancagattaaaacataagaagaa

SEQ ID NO: 253525 - DNA, 511 bp, Glycine max
  unsure (1)..(511): unsure at all n locations
cggatgtgaaaaaagaatatataggtacactctacaagagctatgacgtcgcatgcacgcgtacgtaagctcggaattcggctcgaggaaggtattatggccgcagcagcagcagcaaccactctcgcctcttccctttccaaaccctcctctcttacatttcaaacccactctttccccataaccctacccactccccctcgcgccgccgccaaaccccctcttctcgtcttctccaaaaacccaatttccgacatcgtctcctccaccttctcacgcgccgaagaaggcgcgtgggacgacgagaagccgcgcgaggagtgcggcgtggtcggcatatacggcgaccctgaggcctcgcgcctctgctaccttgccctgcacgcgctccagcatcgcggccaagaaagcccccggatcgtcacccgtcaacaccacgtcctncaatccatcaacgggcgttggcctcggctccgaagtcttcaaccaatcaaaactcgaccagctcccc

SEQ ID NO: 253526 - DNA, 516 bp, Glycine max
gggatatggtttctgattgtgggggtataaggtaacactctacaagagctatgacgtcgcatgcacgcgtacgtaagctcggaattcggctcgagatcgaaggaggatttgaaggaagtgacccacaaggtttactttgatgttgagattaatggaaaagaagcaggtcgtattgtgatgggtctttttggaaaggctgttccaaaaactgcagaaaactttcgagctctttgcactggggaaaagggaactggtaaaagtggcaagcctctccattacaaaggtagctcattccatagaattattcctagctttatgctccaaggaggtgattttacacatggcaatggtatgggtggagaatcaatttatggagagaagtttgctgatgagaacttcaagttaaagcatactggaccaggacttctatcaatggcaaatgctggtcctgacaccaatggctcacaatttttcatacaaccgtgacaactagctggtgggacggaaggcatgtgt

SEQ ID NO: 253527 - DNA, 512 bp, Glycine max
  unsure (1)..(512): unsure at all n locations
ggaatcttttttaaatggagggagagggatgagaattactcagagctatgacgtcgcatgcacgcgtacgtaagctcggaattcggctcgagcggctcgagggcgaggtagtagtagtaacttgctgaagggacaaagcagatatataaaatatttctggtaaataaaaattgatagacagttttggttccgcatataaagcttctctggcgcttgggcttagcataacccttacctttggtatagagaagaagaatagagagtgatggagtgcgtattcggattggtgggtaatggattcgcgatcgtggtggctgattcatcggcggtgcacagcatcctcgtccacaagtccaacgaggacaagatcatgcttctcgattcccacaaactcatcgccgctagcggcgagcccggagacagggttcaattcactgagtacattcagaaaaacgtcgccttgtatcagttccgtaacggcatccctctcaccaccgncgncgncgncaatt

SEQ ID NO: 253528 - DNA, 514 bp, Glycine max
  unsure (1)..(514): unsure at all n locations
aatggttttcttcgatgctggggcagtcgatgtgagataatatagacgatctacgacgcatgcatgcactgcttacgctcggaattcggctcgaggtttgttgtatgaagaggaatcttgagaaatggcaggggacagcaagagcaagattctgttcatcggagggactggttacatcggaaaattcatcgtggaagccagcgccaaagctggccacccaactttccttttggtgagggagtccactctctccaaccccgcaaaatcacccctcatcgacaatttcaaaggcctcggtgtcaatcttgttttaggagatctatacgatcaccaaagtttggtgagtgctataaagcangtcgatgtggtaatttctactgtaagacacctgcagctagctgatcaagataagatcatttctgcaattaaagaagcaggaaatgttaagaagttctatccatctgagttttgaaatgatgtggaccggactcatgcagtgaaccagccaaagttg

SEQ ID NO: 253529 - DNA, 531 bp, Glycine max
  unsure (1)..(531): unsure at all n locations
tgggggctcntcttctgatgccctgccnccctacgtgacaccatagaagagctatgacgtcgcatgcacgcgtacgtaagctcggaattcggctcgaggaagaagatggctttaggtgttcctgctcttccgttgacgtacgtggctcacgttctggcagttgttgccagcgtcttggtcgtggtctgggtcgtcaatttcaggggtggcttggcttgggattctgataacaagtccctcatcttcaacattcatccagttcttattggtattggcttactagttcatgggggtgaagctattataagttacaaagcttttcccctaaagaaggaagtgaagaaattgatacaccttgttttccatgccatcgcattaatacttggaatagttggaatttatactgcctttaagtttcacaatgaaagggggattgccaatctctacagcttgcattcatggcttggaannngggtatggtcccttatggcattcagtggatatatgggtttgtgatcttttccttcctgg

SEQ ID NO: 253530 - DNA, 508 bp, Glycine max
  unsure (1)..(508): unsure at all n locations
atgtatgtgtccatcgaatgatcagtcgctatctcnagagttatgacgtcgcatgcacgcgtacgtaagctcggaattcggctcgagggaaccttgttgcagagctttctacgccgtcggattttggagccgcgagaccggccaagccatcgatcgcctcggctctcgtctccaaggcaactacctctttcaagaacagctatctaggcatcgacctctgatgaatctgttcgacaaagctccctcggttcacagggatgcatttgtggcccccagtgcctccctcctcggcgatgtccacgttggcccagcttcctccatttggtatggatgcgttctcagaggtgatgttaacagcattactattggaacctggacctaatttccaggccaatcctctggttcatgttgcccagtctaatttaagtggaaaagtcttgccaactatcattggagataatgtcactgtaggtcatagtgctgtgttacaaggatgtactgttgaggt

SEQ ID NO: 253531 - DNA, 510 bp, Glycine max
  unsure (1)..(510): unsure at all n locations
taggtatatgaaagtggggcgatgggagaaattcctcgagacttgctagcatgcatgcacgcctactctagatgatcctctcggtgaagatcaattacacattttcaagatgtaaagatgcttaaatgctgatatatgaattgggattatatgtatagttattaggcctatcctgaagcctaatgtaatgagatcggtatttctcatggaatttcaatagcacattttcaagagatactgaggcaaaaatgttcatatatgaactggaatgatgtgatgtcttattacgcctatgctgatgccaaaggaaatgagatcggaattcatcggagaatacgaattgcacatttttatgatatcaggaagctcatatgtacagatctgacttggaatgatgtgattgctcatgatgcctatcctgaagccaagggtactgagatcggaactctttgtggtacagagctcgaatttcctatagtgagtcngactaacatcgtgatcatgtcatat

SEQ ID NO: 253532 - DNA, 526 bp, Glycine max
  unsure (1)..(526): unsure at all n locations
cagtgntatcnctacgntttcaggggncttcnnacgtacnancatagatagagcatcttgcacgcacgcgtacttaagctcggactctagctcttatattcattactttttttccagatacaaatatgcataattggtcacgtatcaactgtaattatatgtatactcatcatgcctatcctgaatccaaacataattatatctgtattcctcattgaatatcaataccacattttcaataaataactacgcaaaaatgttcatatatgaactgcacattatttgacatcttatcacgcctatcctgcagccaaaataattgagatcgccattcctctgagaataccaattgcacatttttatgaaatcaggcatctcatatgtacatatcttaattggaatcaatttgatttctcattaatgccaattccttgagcccaaggtacatgactatcggaaattctatctgggacccaaactttcaatccactatattgaaccatattaacttcgtaatcatctcatg

SEQ ID NO: 253533 - DNA, 516 bp, Glycine max
  unsure (1)..(516): unsure at all n locations
agagaagtgtctctgagccatgcacacttagtatcactctagaagagctatgacgtcgcatgcacgcgtacgtaagctcggaattcggctcgaggttcgtgccttggagaatgagatgctcaaccgcatcaagaagcaaggccttgatatcacccctcgtattctcattattactcgtcttctccctgatgcagtaggaactacctgtggccaacgtctagagagggtatatgatactgaatattgtgacattctccgagttcctttcagaaccgaaaagggaattgttcgcaaatggatctcaagattcgaagtctggccatacctagagacttacactgaggatgttgcccttgaacttgccaaggagttgcaagccaagccagatctgatcgttggaaactacagtgatggaaacattgttgcctctttgttagcacatanattaggagtaactcagtgtaccattgctcatgctctagaaaagaccaagtaccctgagtctgacatttactg

SEQ ID NO: 253534 - DNA, 508 bp, Glycine max
  unsure (1)..(508): unsure at all n locations
aggggntnnnnaatgattgagaggatagagatatatagactacacgtcgcatgcacgcgtacgtaagctcggaattcggctcgagtacaaggaaagaaatggatggatagaatcacgtttaaaaggaatgaaaagatcatcaccaactgcattgaaaatagcattaagatcggttcgtgaaggaaggaatcaaacactacctgaatgcttaaaaaaggaattcagattaacaatgaatatactgcgaactacaatatctaaggatatgtatgagggtattagagctctcaccattgacaaggattatacttccaagtgggaaccttcatcgcttgacaaagtanaggaatgaaaagttgaactggaccttcaacccttttagaagaatttggagcttcaaattccagaaagtgaggaatacaagtgggatggttaatatgagaattcagcttatgctcttncaaattgaggnattcctatgtctgntaaatgttgcttcttttagaaa

SEQ ID NO: 253535 - DNA, 524 bp, Glycine max
agttaaagtatgtgtataggaagaggatataataggaacactctagaagagctatgacgtcgcatgcacgcgtacgtaagctcggaattcggctcgaggcaaaaagcactttcaaattttacggctgcagaatggttggatggaggggagaaggagtaccattgtcaacggtgcaaacagaaagttagggctctcaaacagctaacaattcataaggcaccttatgtgctaacgatccacttaaagcggtttcacgcccatgatcctggacaaaagattaaaaagaagattcaatttggctgtgcactggacttgaaaccttttgtcagtggctcgtatgatggagatgtaaagtactctctatatggcgttctggttcatgctggttccagcactcattctggacactattactgctatgttcgcacttcaaaataacatgtggtattaccttggatgacaacccgggtaagtcatgtcagtgagccgggaagttttaaaccagcaggcatacattgtgttta

SEQ ID NO: 253536 - DNA, 527 bp, Glycine max
  unsure (1)..(527): unsure at all n locations
gggttaatagtcatctgtgttgtgagggacatgatataacttcagacagagctatgacgtcgcatgcacgcgtacgtaagctcggaattcggctcgaggcatactctcaacttcaaaaggtggaagctaatgtgcacatcaaggcttctgctgatcagttccataatgttttatgcaacaggacacaccatattgccaacattttccctggaaaagtacagtctgttgaaattcataaaggtgaatggggcactgagggatccgtcatctcctggaattatttacatgagggcaaagtttgtgtggctaaggagatggttgaaggcatagacatgaaaaacaataaaatgacctttaaggtcatagagggagacctgctgggacattacaaaagcttcaagtttttattgcaagttactccaaaggaaaagggaagcgttgtgaattgngtcctggaatatgagaaacaaaatgacaatactcctgacccttattacctattngaatngacagttgaaatgagcaaa

SEQ ID NO: 253537 - DNA, 518 bp, Glycine max
  unsure (1)..(518): unsure at all n locations
aagggtttctncaaatgagcgctttatgttaggaacactatanaagagctatgacgtcgcatgcacgcgtacgtaagctcggaattcggctcgaggtcatcctcaaatgcctaagcaaattgaggatgctaaaattgctatcctcacttgcccctttgagcctcccaagccaaagaccaagcataaggttgatattgatacagtggagaagtttcagacgttgaggttgcaggaacagaagtattttgatgacatggttcagaaatgcaaggatgtgggtgcaacccttgtcatttgccaatggggttttgacgatgaagcaaatcatctcttaatgcacaggaacttgcccgctgtcagatgggttggtggtgtagagttggaattgatagctatagcaactggtggaagaattgttcctaggttccaggagttatctccagaaaagttgggaaaaggctgtatggttcgagaaaagtcctttgtacaacaaaggaccgaatgctgtacattgaacc

SEQ ID NO: 253538 - DNA, 519 bp, Glycine max
  unsure (1)..(519): unsure at all n locations
nagtgggttcntctatgcgggggtgaatgtgtgatacctctagaagagctatgacgtcgcatgcacgcgtacgtaagctcggaattcggctcgagatgaacatgataaggaactcacagctttgtgggcaggctatgattgcttatctacagcagaagggctttcctgaggttgcactgcattttgtgaaagatgagaaaattcggttcaatttggctttagagagtgggaacattcaaattgcagttgcttcagcaacagcaattgatgagaaagatcactggtaccgattaggggttgaggctcttcgccaaggcaatgctggtattgtagagtatgcataccagagaacaaaaaattttgagagattgtctttcctttatcttgtcactggtaacatggagaaactgtccaagatgttgaaaattgctgaagtcaagaatgatgtgatgggccagtttcacattgccctatatatgggtgatgttcgagaacgtgtcaagatatgggaaaatgtgg

SEQ ID NO: 253539 - DNA, 514 bp, Glycine max
ggagggtgtatctgttgttggggggaggtggggtatactatagaagagctatgacgtcgcatgcacgcgtacgtaagctcggaattcggctcgagccacgttgttgtccgctctgtggctctctacatttcatcattcatcggaaaaatggctctcgaggttgctgttaaggctgctggtggtgctccaaatgttctcggagattgtccattttcccaaagggtcctcttaactttagaggagaagaaaatcccttacaaactccacctcatcgatctcagtagtaaacccgaatggtttttgggtgtgaatcccgaagggaaggtgccagtggttctttatgatggcaaatgggtggctgattctgatgtgattgtggggatactcgaggaaaagtacccagaaccctctctcgtcactcctcctgaatttgcctccgtgggatcaaagatattcgggtcttttgtgagttttttgaagagcatggatacaaacgatggaactgatcaaacgt

SEQ ID NO: 253540 - DNA, 512 bp, Glycine max
  unsure (1)..(512): unsure at all n locations
ngggtagtttttnngttattgtcgtggggggaggaagagtatcactcanctgcttgcatgcctgcacgtcgactctagaggatcccctcggtgaattccaattccacatttttaagaaataaggaggcaaaaatgttcatatatgaattggaattatttgttttcttattaggcctatcctgaagccaaaggaaatgagatcggaattcctcggggaattccaattccacattttcaagaaataaggaggcaaaaatgttcatatatgaattggaattatttgttttcttattaggcctatcctgaagccaaaggaaatgagatcggaattcctcggggaattccaattccacattttcaagaaataaggaagcaaaaatgttcatatatgaattggaattatttgttttcttattaggcctatcctgaagccaaaggaaatgagatcggaattcctcgggggtaccgagctcgaattccctatagtgagtcgtattaaattcgtaatcatg

SEQ ID NO: 253541 - DNA, 514 bp, Glycine max
  unsure (1)..(514): unsure at all n locations
gtgagatgatgttttatagggaggggganggtatcggtatcactactagaagagctatgacgtcgcatgcacgcgtacgtaagctcggaattcggctcgaggctatggataacgtggtgaggactcatccaaagttggactggttctgtagtgaaagcaccgctgacactataatgaagcatggttcaaattcgttcatggcaaatattgaggattcacgagcaatcatggaatccaaggacggcaatgactgcatggtggcaatcaacttgaccattgattggaagcatgatctgccaagggcagcaaatcgaatgacacagtgcatgggtagggcattcgcattacaagatgagccataagttcataaggtatggctgacttttgatgatgcaccatgactagcaatggctagagcgttcggagattactggttgaaagaatatggagagatttctattgcgtgaaattgttatccgctggtaactgcccaagatcaagtaactggtcgtgt

SEQ ID NO: 253542 - DNA, 514 bp, Glycine max
  unsure (1)..(514): unsure at all n locations
gagttttatctgataggggggaggagtatgggaaacactatagaagagctatgacgtcgcatgcacgcgtacgtaagctcggaattcggctcgaggtcttccgaattcgaagttaatttgcaagatggctaaggaaaaggctcagatcaacattgtggtggttggtcatgtggaccctgaggaggcaaccaccattaacgagctgaagaagcctgttgtggagaaagaagctccagggcatgccatatgagggcatgcacgtacggcctcggaggggaaccagaaaattatgttaacaaaataatctggaaccctaatgtatcagtgtcatcatcagtgtgtagtttaagctagctttgctatggttacgttctttgagatgagagtcttgatgaacagtaccattctgatgtattgctttccttgaaagttaatgcatgcttcttaatctctgtctaaaaaaaaaaaaaaaaagggcggccgncgactagtgagctcgtcgacccgggaatta

SEQ ID NO: 253543 - DNA, 517 bp, Glycine max
  unsure (1)..(517): unsure at all n locations
taggtatcatctaagagaggaggatggaaagtataactcnncttnatcttgacctcgcattcacgcctacctaagctcggaattcggctcgaggttgggattgtgttcttcggagaagttttccggggcatatggaatggcacagatgttgctatcaaggttttcctagagccagatttaactgctgaaaacatggaagatttctgcaatgagatatccattctcagccggctccgacatcctaatgttatcttatttcttggtgcatgcacaaagcccccacgcttgtcaatggtgactgaatacatggagaatggatctttggtttacttgattcatgtgagcggtcagaagaagaagcttagcttgcggagaagactaaagatgttgcgagacatatgccggggcttaatgcacatacatcgtatgaagattattcaccgggatgtgaaaaaggccaattgtcttgtggacaagcatttgataagtgaaataatggattttggactttcaagaa

SEQ ID NO: 253544 - DNA, 528 bp, Glycine max
  unsure (1)..(528): unsure at all n locations
ngggtnnaagaggtttctttatgtgcgggggagtgaacgaggacactatagaagagctatgacgtcgcatgcacgcgtacgtaagctcggaattcggctcgaggcgcaaccctgcacctgcacccgtaccgcagtgacaacatcggcgtgcataaactctaaaccctactatgtccgaagacaagtacgacgtgctcctgtattacaagtacgttgaaattcccaacctaaacgacctcctcaccttctaccactccaactgctcctgcctgagacttctcggacgtgttcgcctttcttctcacgacgtcaatgtcaccgttggcggcaacttatcctctctcaagaatgacatcgaagccctcaaagcctacagaaccttgtttcaccacactgatttcaagctcgacactagtcatcatccatgtaacgacaaagtagcctatgaatgtggattcactttcctatctattcgaatcatccacgaaacttgtactttaaagttccaatccctgtaaagtaaccgga

SEQ ID NO: 253545 - DNA, 511 bp, Glycine max
gggtgaggcttcgtatgggggaggggtggtacggtaacactctagaagagctatgacgtcgcatgcacgcgtacgtaagctcggaattcggctcgagggaaagggagattgaattcgatcctgggacgttaacgttgtttcaattcaattgtggtcctgtcggtgccctatctcagacgacgatgtcatctttatatagaggggaatccaggaggtacaacaataaaccaagaggacgtcataatttgacaacgcagaagaagcaagagattaaggaagcctttgagttatttgatactgatggctcaggtactattgatgccaaggagctgaatgttgctatgagggcccttggatttgagatgacagaagagcaaatcaatcaaatgatagcagatgtggacaaggatggaagtggagcaattgattatgaagaatttgagtacatgatgacagccaaaataggagaaagggacactaaagaggagctcatgaaagctttccatattat

SEQ ID NO: 253546 - DNA, 517 bp, Glycine max
  unsure (1)..(517): unsure at all n locations
ggggagagtgcctttattatgattgggaggagtgaaagagataactatagaagagctatgacgtcgcatgcacgcgtacgtaagctcggaattcggctcgagcatttacatgcgctcttggactggcaccattattggcccccataatactgtacatgaaggaagaatttatcaattgaagctgttttgtgataaagactacccagaaaagcccccaagtgttcggtttcattcacgagtcaacatgacttgtgttaatcatgaaactggagtggttgaaccaaagaaatttggtcttcttgcaaattggcaaagagagtacaccatggaggacatactgacccagctgaagaaggaaatggctgctcctcataaccggaagcttgtccagccttcggaaggtacctacttttagcatccaacaagatggtataaatgtcggatcgtattgcatatgctgcatgcaatatnatagtgtgtatgtgtttggtagatccttccttctgaattcaagaca

SEQ ID NO: 253547 - DNA, 521 bp, Glycine max
ggtttaggggatgtgtaatggaggggatacggtaatagtatagaagagctatgacgtcgcatgcacgcgtacgtaagctcggaattcggctcgaggagaatccgaggcgaagagaagagaaaaattaagatggaggggaaggagcaggatgtgtcgctgggagcgaacaagttcccggagagacagccgattgggacggcggcgcagagccaagacgacggcaaggactaccaggagccggcgccggcgccactggttgacccgactgagtttacgtcatggtccttttacagagcaaggatagcagagtttgtggccacttttctggatctatacatcactgtcttaaccgtcatgggagtcgccggggctaagtctaagtgcagtaccgttgggattcaaggaatcgcttgggccttcggtggcatgaccttcgcctcgttacttgaacgttgcatcttaggggacacataaacccggcggggacatttgggctggttttggcgaggaaagtgtccgtg

SEQ ID NO: 253548 - DNA, 512 bp, Glycine max
  unsure (1)..(512): unsure at all n locations
tatgtatttcaatgtggggcgtgagggggatactttagaagagctatgacgtcgcatgcacgcgtacgtaagctcggaattcggctcgaggtggttattcctgattggagcagtgctgccagttcccatttgggtgttgagcaaaatcttccctgagaagaaatggataccactgatcaacataccagttataacctacggctttgctggaatgccaccagcaactccagccaatattgcaagctggctagtgactggaatgatcttcaattactttgtgttccgctacaacaaacgctggtggcagaagtacaattatgtactatcagcagcactggatgcaggcacagcttttatgggtgttttaatattctttgccctgcaaaatgctggccataatctcaaattggtggggaagtgaattggaccattgcccattggccacttgcccaactgcaccaggaaatgangttgagggcctgtcagttttcaaatggacaagaaccataatg

SEQ ID NO: 253549 - DNA, 511 bp, Glycine max
agcattttaatgggggggagggggggaatattatagaagagctatgacgtcgcatgcacgcgtacgtaagctcggaattcggctcgaggtcgagccgattacgttagagagtggacggcattggattcacagagtacaggtcgatatacgagtgcctctggtggggaggtggttagaactgcatagaggatgcatactaggttgattctgaataaggaatctgctgctaggtcacagtcatgatgacaggcatacgcacatgaactggagattaaagtgtcacgattagaagatgcgaatgtaaggattaaaagactaaatgaaatggagagcgcattgacatctgtgccaacagctgaacctagaccgaagctacagcttatcagaactagtatacgcatctttctgatacgtaaatggcaatgaagtcctaattcttgcccatgctatcacattccctgaggttaaagtgcatagtactccgggcgttttaaaggttgttcataaatag

SEQ ID NO: 253550 - DNA, 522 bp, Glycine max
aggggatctcgtatgggagagtaactgctatactactagacgagctatgacgtcgcatgcacgcgtacgtaagctcggaattcggctcgaggcaccatagatggtcagggtgagttttggtggcagcaatttcacaggaagaagttgaagtacactcgcccatacctgattgaattgatgttctcagacaacattcagatctcaaatctaactctcctcaattccacatcatggaatgttcatcctgtttacagcagcaatattattgtgcaaggcatcaccattattgctcctgtcacatctcctaacactgatggcatcaacccagattcttgcacaaatgtaagaattgaagattgctatatagtctctggtgatgactgtgtggctgtaaagagtggatgggatgagtacggcataaaaaatgcgtggcccaccagacagctaatgataagaaagctaacatgcatttcaccatacagtgcaaccattgccttgggaagtgagatgtcacgtggaatc

SEQ ID NO: 253551 - DNA, 519 bp, Glycine max
aggggaggagcgtgtcttaatcggcagggagggtataacggcgacactctagaagagctatgacgtcgcatgcacgcgtacgtaagctcggaattcggctcgagacagggcttccgccgccgtaggagagaagcttccggcaaccgctccccgttcaaccccgttatcgtcctccgcggccccggcgacgactccgccgacgccgaccacgacggcgtcagcacgttcgagctcttctacgacgacggcgacggcaccggccttcgccctcttcctcccaccatgtcggagttgctcctcggctctggctttgacagacttctcgaacagttcgcgcagatcgagatgaacggattcgggcggccggagaatccgccggcgtcaaaggctgcgatcgagtccatgccgacggtcgagatcgaagaaacgcacgtggaaaccgaagcgcacttcgccgtgtgcaaaggagcggttgaacttgacgcctatgcgcgtgagttaccctgcaagcccatatcc

SEQ ID NO: 253552 - DNA, 526 bp, Glycine max
  unsure (1)..(526): unsure at all n locations
nggtnaggaggtgttttagacggaggggggataaaggtaaagatgagctatgacgtcgcatgcacgcgtacgtaagctcggaattcggctcgagggcaaagctgagagaggtggcatctttggagggacatgttcttttgaaaaagctaagagatgcattagaatctttaagaggacgttttgcaggaataaacaaagaggatgtggagaaagctatctctatggtggaagctttagcagttaagttaactcaaaacgaaggtgaattgattcaagagaagtttgaagtgaagaagcttgtaaactttctcaaacaggcttctgaagatgctaaaaagttggttaatcaagagaagtcttttgcttgtgccgaaattgaaagtgctagagctgtggtgctgagaattggggaggcgcttgaagaacaagaaaaagctttccaagcttctaaaccacaggatgtggatggactaattggagaagttcaagaagctagaagaatcaaattggtgcattagccaagcca

SEQ ID NO: 253553 - DNA, 514 bp, Glycine max
  unsure (1)..(514): unsure at all n locations
tagtnttcttcngttaggtaggggatcggtgggagatcactatagaagagctatgacgtcgcatgcacgcgtacgtaagctcggaattcggctcgagggacggcgtctacgtcctctcgctctccctcggtggcggttccgcaccgtacttccgcgacacaatcgccatcggcgcgttcgccgccatggcgaaaggtatcttcgttgcatgctccgccgggaacagtgggccccagaaggcctcgcttgccaacgtggcaccgtggataatgacggttggtgcaggaaccctagatcgtgatttccctgcctacgcttctctcggtaacaaaaaaagattctccggtgtttctctctatagtggaaaaggaatggggaacgaaccggttggtttggtttatgacaaaggctttgaaccagtcaggtagcanttgctggcccggttcgcttgaaccgggtctgggtcgngggaaagtggtggttgcgaccgggaatcaagcgcgggtggagaaag

SEQ ID NO: 253554 - DNA, 511 bp, Glycine max
gggggaggtctatatgggggggataagatataactatagacgagctatgacgtcgcatgcacgcgtacgtaagctcggaattcggctcgagctctaacctacctctttttcttctctctcaacaacttcaccttcttcctcctcgatcatgtctcacttcaagggcaagtaccatgatgagcttatcgccaatgctgcgtacattggcactcctggaaagggtattcttgctgctgatgagtcaacagggacaattggcaagcgtttggccagcatcagtgtagagaacattgaatccaacaggcgagctcttagggagctgcttttcactgctcctggtgttcttcaatatctcagtggtgtcatcctctttgaggaaaccctctaccagagcacagctgcaggcaagccctttgggaatgtcttgaaggaaacctgtgtgctttcttgcattaaaggttgacaagggcacagtcgagcttgctggaactaatggagaaaccaccactcc

SEQ ID NO: 253555 - DNA, 529 bp, Glycine max
gggttaagatgctttttattgaggggaggatgtaatgaggacactatagaagagctatgacgtcgcatgcacgcgtacgtaagctcggaattcggctcgagcccaaacgttaactcagacgaagcaccaacagaagaagaagaaacaaaaccgaacctctctaaactctccaacgtcgccacccgattcatcgcatttcgcaggctgcaatggcgacgttcgaactgtaccgcaggtcgacgattggaatgtgcctgacggagacgctggacgagatggttcagaacggcactctaagccccgagctcgcgattcaggttctggtccagttcgataagtccatgactgaggctctggaaacgcaagttaagagtaaggtctccatcaagggacatctccatacatatagattttgtgacaatgtttggaccttcatcttacaagatgctttgttcaagagcgaagacagccaagagattgttggacgggttaaaatagtggcgtgtgactcgaagttgctcacacatta

SEQ ID NO: 253556 - DNA, 525 bp, Glycine max
ggttaggttttttttatgtgatggaggatataaggtacactatagaagagctatgacgtcgcatgcacgcgtacgtaagctcggaattcggctcgagcccttttcctttacaactattctactcaccaacttcatggaatctttgaggctgcaagttttggagggacaaatattgatccatcagcttgggaggataagaagtgccctggtgaatctcgtttccccgctcaggtacgagtgataactaggaaaacttgtgaaccactggaggaagattccttcaggccaatccttcaccactatgatggtcccaagttccgtcttgagctgaatgtgcccgaggcgttgtctcttctggatatttttgcagaacaagacaccttcaatgacgctttcgaggctttgccggcataaaaggagattaatagcaaaaaatgcaacaagaatatcactcacagagacaatagataattagaggtttcggttggtttgaaagttatattaagtatggacttaagaagaggg

SEQ ID NO: 253557 - DNA, 513 bp, Glycine max
gggggggggtgcgttaagcggggggggtgaagagatacactatagaagagctatgacgtcgcatgcacgcgtacgtaagctcggaattcggctcgagccgagtcgcgaactcggccacgccacataatcatcacgccctctcttccacttctatcatcctcggatcgcataaattccccaatggggctttcgcggaagtccaagcttccaaatttaactgactttttcacctctgaaacccgcttttcttgtttcattggaaatggccgaatctcgagacgccgccgccgccgatggggttcccggaacgcccgccataagggaagtgagacccgagtcgggaacccatgcgggaatcgggtcgggtggtattcggagggttaatttccgagcggagattgacacgtcgccgccctttgggtcggtgaaagaagccgtgacccgttttggaggtagcggtccttggatacccttttttaacaacaattgagattttgacttaaagaaaagtga

SEQ ID NO: 253558 - DNA, 524 bp, Glycine max
  unsure (1)..(524): unsure at all n locations
gttaaaaggtgtgataagagaggggagggatagaagtatagatgagctatgacgtcgcatgcacgcgtacgtaagctcggaattcggctcgagagagaatccgaggcgaagagaagagaaaaattaagatggaggggaaggagcaggatgtgtcgctgggagcgaacaagttcccggagagacagccgattgggacggcggcgcagagccaagacgacggctaggactaccaggagccggcgccggcgccactggttgacccgactgagtttacgtcatggtccttttacagagcacggatagcagagtttgtggccacttttctgtttctatacatcactgtcttaaccggcatgggagtcgccggggctaagtctaagtgcagtaccgttgggattcaaggaatcgcttgggccctcggtggcatgatcttcgncctcgtttactgcaccggttgcattttaaggggacccattaaccccgccgtgacctttgggctggtttttgccaggaagatgtccctt

SEQ ID NO: 253559 - DNA, 516 bp, Glycine max
  unsure (1)..(516): unsure at all n locations
gggggaggtttcttaaagagcgcggagtataaggcatcactatagaagagctatgacgtcgcatgcacgcgtacgtaagctcggaattcggctcgaggcaagttaaagtgagtaaaggaagcccacttgtcacttgtctccttgaaggttcccgtggaagtggtaaaactgcactttcagctactgttggtgttgacagtgacttcccatatgtcaagatagtttcagctgaatcaatgattggtctacatgagagcaccaaatgtgcacagattattaaggtttttgaggatgcatacaaatcaccattgagtgtcatcattcttgatgacattgagagattattggagtatgtgcccattggttctcgattttcaaactttatttctcagacactactggtgctgcttaaaacggcttnctncaaaggggaaaaaactcatgggtattgggcccaccagtgaaacctaaatctttggaaccaattgaatttgtgggaaacctnccttggaacta

SEQ ID NO: 253560 - DNA, 514 bp, Glycine max
taggtttctgatttgatgggggagatggtgtgagatcactatagaagagctatgacgtcgcatgcacgcgtacgtaagctcggaattcggctcgagaaaagatggaagctgctaagtcggtgtctagtgatccaagtgagagaccagacacataccgagtcgcttacataattcatttcttgcttggtgctggcaacttgcttccttggaatgccttgatcactgcagcggattactttgcctacctctatccaacaaaacacatagaaaaggttttctctgtggcctatatgatttcatcagtgatggtgcttcttgggatgatcagttgtgggggttggagcaaaacaacattgaagctgacaatgaacttggggttctccatgtctgttatgtctcttatggtagcaccagtcatagactggacctcaagcagcaccaagctcaatgagagaccctatggcgcctaaagcttgacggttccggcactggtgaactgggggttaacaaaaga

SEQ ID NO: 253561 - DNA, 517 bp, Glycine max
  unsure (1)..(517): unsure at all n locations
tggttaagagcatctatttatttgcatgtattgcgacactctagacagagctatgacgtcgcatgcacgcgtacgtaagctcggaattcggctcgagctcgagccgctcgagccgctcgagccgctcgagccgctcgagccgctcttcttcatattcttcttcttcttcttgttcttgttctatctgtgacgagcatcatggcctcgagagcagtgctattgttggctatgtgtgtgcttccggccatggttgtggccattcgcccagcaaagaaccctttttgcgtgaagggtcgcgtctactgtgacccttgccgtgctggttttgagacctcagcaaccacctacattgccggtgctgagattatgttgcaatgcaagagcagggttagcaacgaggttgtgtacaccaagaaagggtacactgactcaactggagcatacacaatgtacgtggacgaggatcacgcagatcanatatgcagtgccaagctttgtagcagnccttaccctcatg

SEQ ID NO: 253562 - DNA, 534 bp, Glycine max
  unsure (1)..(534): unsure at all n locations
nggttnaaggggatcncgtgatagaagggagggaggtattgctaagatcagctatgacgtcgcatgcacgcgtacgtaagctcggaattcggctcgagctctctctcaactcccaattactttgttgcatttcacacaccaacttcccatagaagagagaagagagaagagactcttccttccatcctgcaactcaaatcatcatgcaagactccagctcaatgaagatctcccctctggatctcatgtccgccatcttcaagggcaagctcgacccctccaacgtctcctcctccaccaacgccgccgccgccgccttcctcctcgagaaccgcgacttcctcatgctcctcaccacctccgtcgccgtcctcatcggctgcgtcgtcgtcttcatctggcgcagatcatcctcccccaaggccaagcctctcgagcctnctaaacgcgtcgtcgagaagcttcccgaaatcgaagtcgacgacggcacccaggaaggtcaccatcctctttcgcactcaaacccgcaaccgc

SEQ ID NO: 253563 - DNA, 530 bp, Glycine max
  unsure (1)..(530): unsure at all n locations
ggttaagaatgatgtnatatgtaggggaagggggtatggtaacgctcagctatgacgtcgcatgcacgcgtacgtaagctcggaattcggctcgaggagagatctatctatctatcaagatggcgttgttggttgagaaaacaagcagtggaagggagtacaaggtgaaggacatgacgcaagccgatttcggaagattggaaatcgagctggcggaggttgaaatgcccggcctcatgtcctcccgcaccgagttcggcccctctcaacccttcaagggcgctaggatcaccggctccctccacatgaccattcaaaccgccgtcctcatcgagaccctcaccgncctcggcgccgaagtccgctggtgcttctgcaacatcttcttcaaccaagaccatgccggcggcggcatcngccgcgacagcggcttcgtcttcgcctggaagggtgagacccttcaggaatacttgtggtgcaccgagcgcgccctcgacttggggccccgcggcggccccgatctcatcgtc

SEQ ID NO: 253564 - DNA, 516 bp, Glycine max
tatgttttttctgataggggggaggtggaagggaaataatatagaagagctatgacgtcgcatgcacgcgtacgtaagctcggaattcggctcgaggcgactgcgcttcacgatgggtgcttacaagtatgtttcggagctatggcgcaagaagcagtctgatgttatgagattcttgcagcgggtgaggtgctgggagtaccgccagcaaccttctattgtccgtttgacaaggtctactcgcccagacaaggctcgccgcttgggtttcaaggctaagcagggttatgtgatttaccgtgttcgtgtacgaaggggtggccggaagagaccagttccaaaaggtattgtttatggtaagcccaccaaccaaggtgttactcaactgaaatttcagcgcagcaagaggtctgttgccgaagaacgagctggaaggaagttgggtggcctcagggttctcaattcatactgggtgaatgaggactcgacttaccaaatatttggaggccattttgg

SEQ ID NO: 253565 - DNA, 513 bp, Glycine max
  unsure (1)..(513): unsure at all n locations
atgtgntatctgatgtttgggggaggatgagaaacactatagaagagctatgacgtcgcatgcacgcgtacgtaagctcggaattcggctcgagcaaatgggaaatgtacatggtcgcgttgatggtgctaatgcaaatgctgaagctttattgattggatctcacatggacactgttgttgatgctgggatgtttgatggatcactaggaattgtctctgcaatatctgccttgaaggctatgcatgtcaatggaaagctacaaaagctaaagcgccccgttgaggtgattgcatttagtgatgaagagggtgttagatttcaaactactttcttgggcagtggtgctatagctggtattttgcctggcacaacattggagatatctgataagagggaggtgatgattaaagattttcttaaggagaactcaatagacattacagaagaaagtcttttaaagctcaaatatgacccaaaatcttgtttggggctatgttgaggttcacatta

SEQ ID NO: 253566 - DNA, 510 bp, Glycine max
  unsure (1)..(510): unsure at all n locations
tagtcttcttcatggggaggggatgtgtggaattactttagaagagctatgacgtcgcatgcacgcgtacgtaagctcggaattcggctcgaggcaaaaagaaagaatcccaggcgaggagaaagatggaggggaaggagcaggatgtgtcgttgggagcgaacaagctccccgagagacagccaattgggacggcggcgcagagccaagacgacggcaaggactaccaggagccggcgccggcgccgctggttgacccgacggagtttacgtcatggtcgttttacagagcagggatagcagagtttgtggccacttttctgtttctctacatcactgtcttaaccgttatgggagtcgccggggctaagtctaagtgtagtaccgttgggattcaaggaatcgcttgggccttcggtggcatgatcttcgccctcgtttactgcaccgctggcatctcagggggacacattaacccngccgtgacatttgggcctggtttggcgaaga

SEQ ID NO: 253567 - DNA, 530 bp, Glycine max
  unsure (1)..(530): unsure at all n locations
ngggtngggcgctttagtatgtgcggagcgtgtaatggtcacactctagaagagctatgacgtcgcatgcacgcgtacgtaagctcggaattcggctcgagctcgagccgtcctgagcttccattgtgctcactcatctcttacaacgaaaccctcttcatcttgttctatctgtgacgagcatcatggcctcaagagcagtgttattgttggctatgtgtgtgcttccggcgatggttgtggccattcgcccagcaaagaaccctttttgcgtgaagggtcgtgtctactgtgacccttgccgtgctggttttgagacctcagctaccacctacattgctggtgctgagattatgttgcaatgcaagagcagggttagcaacgaggttgtgtacacgaagaaggggtacaccgactcaaccggagcatacacaatgtacgtggatgaggatcacgcagatcagatctgcagtgccaagcttgtaagcagccctcaccctcaatgcaaggaagtcaccccaggccgcgac

SEQ ID NO: 253568 - DNA, 518 bp, Glycine max
  unsure (1)..(518): unsure at all n locations
gtgataaggtatctgtaaagggggggataagatatagcttcagacgagctatgacgtcgcatgcacgcgtacgtaagctcggaattcggctcgagcgggcattgagaaggaaggacgctttcagaggcgaaaggccatggggagataccgtctgtgatccatggatctccgatcgggaaaccgtatccaagctccgcggctagtctgcgctctttggacttttaaaacttagcgaactgaaacatcttagtagctaaaggaagggaaatcaaccgagaccccgttagtagcggcgagcgagagcggattggggtttgaagaanaacanacacgaagcttcgtttctctttcgagtatgataaattcctcagcaacaaagtgttcacttctttttcgccaggtttcattcggatttgtgtggattggatgatggaaaaaccagcaagcccctttcattgaaagggcgcaagtgactgtaattgtgaaaaggttgggagatcctgccaaagaaggtgata

SEQ ID NO: 253569 - DNA, 520 bp, Glycine max
  unsure (1)..(520): unsure at all n locations
gggaaatgctgntttatagataggagggtagaaagagatacactatagaagagctatgacgtcgcatgcacgcgtacgtaagctcggaattcggctcgaggaagcatctctcacctttcccttggcgacgccgtgagaaacgaaaagcgaacaaaaaaaaaacagagtggggtgggaggcacacgcacaaacgcagagtcagaatctccaatcttcaatcggagacaaagctagctcgaacgaacgaagtagagtagtgtgctacgaaaaatgtggcggtgcatcgcacgtggtctccgtggacctgcttccaccagatccacctccaatcactcacttggatctcaactttctagattcttctctagtggggcgaactcctcgtacaccgtggtggatcatacttatgatgctgttgtcgtaggagctggtggcgcgggattgagagctgttattgaacttttaagaccacggtttcaatactggtggaattaccaagtttttccaaatggttaaaacc

SEQ ID NO: 253570 - DNA, 522 bp, Glycine max
gtggtagaggcttcgtgaaaggcggaggggtgaatgagatacactatagaagagctatgacgtcgcatgcacgcgtacgtaagctcggaattcggctcgagggcactttgatttcttacgaaggaagggttcagcttttggaaattgcacaagtcccagatgaacatgtcaatgagttcaagtcaatagagaagttcaaaattttcaacacaaataatttgtgggtgaacttaaatgcagttaaaaggcttgttgaagctgatgctcttaagatggaaattattcccaatccaaaggaagttgatggaataaaagttcttcagctggaaactgcagctggtgctgcaataaggttctttgacaaggctattgggattaatgttcctcgatcacgattccttcctgtgaaggcaacttcagatttgcttcttgtccagtctgacctctacactttggaagaatgatttggcatatcgaacaaaactagggccaaatcttgaaacccttctattgaacttgggc

SEQ ID NO: 253571 - DNA, 531 bp, Glycine max
  unsure (1)..(531): unsure at all n locations
nggttnaggtgtttctgatttgtaaggaggggacgtaatggtatcactctacaagagctatgactgcacgcgtacgtaagctcggaattcggctcgaggttcattctgttttccagttgaagtctttccctagccaatggccactgatcgtttgacccgggttcacagtctccgtgagaggcttgatgaaaccctcactgccaacaggaacgaaattttggcccttctgtcaaggatcgaagctaagggcaaggggatcctgcaacaccaccaggtcattgctgagtttgaggaaatccctgaggagaacaggcagaagcttactgatggtgcctttggagaagtcttgagatctacacaggaagccatagttttgccaccatgggttgctctggctgttcgtccaaggcctggtgtgtgggagtacctgaaagtgaatgtgcacgctcttgttgttgaggagttgcaacctgctgagtaccttcacttcaaggaaagaactngtgatggaagttctaatggcaaccttgt

SEQ ID NO: 253572 - DNA, 513 bp, Glycine max
  unsure (1)..(513): unsure at all n locations
taggttttctcgattgaagtcgggggagggtgaatactctagaagagctatgacgtcgcatgcacgcgtacgtaagctcggaattcggctcgagcggatgaaaacatgcagccggattcgttcggtcgtatagtgtgggctttcaggtggtgaatggattccattggtacgagaacggacttgacacttgtgacatttggggtagcactttgcatgatgtgaaccatgcattgcttgctgggtcgtatggagtctaaaatggcgtgccatattgtgtgataacttgttcatggagagatagatgatgtgagaatggctactatagagtggacttgacgaagaacatgagtgatgtagcatcttgtgcgtcttatgcagttgtgagcatagattgcatagtgaatattgtcacatgatgactaccgacctgatatgcttcatgatgtgatagatgagtgtcagngtctaatgcaaattgctcctatttgacttgtatgatgccctaaataaggt

SEQ ID NO: 253573 - DNA, 516 bp, Glycine max
aaggttttctctgataggatggagacggaagggaaatactatagaagagctatgacgtcgcatgcacgcgtacgtaagctcggaattcggctcgagcaaaactcaagctaaattctcactctcacaacttcaatctctttctctctctctctctctctctctctctaccaaaaaaatggctttggaaactctcaactcaccaacaacaaccgccccatctttccccttcgacgacccaactattccatgggccaaaagaaaacgttcaaagcgttgttcacgcgaccacccttcggaggaagagtacctcgctctctgcctcatcatgctcgctcgcggcggcaccacccgccgcgtcagcactccaccgccgcaaccgactccagatccttccaccaagctcagttacaaatgctccgtttgcaacaaaactttccctttttaccaacccctcggtggacccaaggccgtcacccgaaacctggttgcttccgccggcaaaaaccaaccaaccac

SEQ ID NO: 253574 - DNA, 520 bp, Glycine max
  unsure (1)..(520): unsure at all n locations
ntgttaaatggtatctgtgatggggggcgaatgatgaaactatagaagagctatgacgtcgcatgcacgcgtacgtaagctcggaattcggctcgaggcgaagagaagagaaaaattaagatggaggggaaggagcaggatgtgtcgctgggagcgaacaagttcccggagagacagccgattgggacggcggcgcagagccaagacgacggcaaggactaccaggagccggcgccggcgccactggttgacccgacggagtttacgtcatggtccttttacagagcagggatagcagagtttgtggccacttttctgtttctatacatcactgtcttaaccgtcatgggagtcgccggggctaagtctaagtgcagtaccgttgggattcaaggaatcgcttgggccttcggtggcatgatcttcgccctcgtttactgcaccgctggcatctcagggggcaccttaacccgggcgtgacaattgggctggttttggccagagaaatttgccttgccaa

SEQ ID NO: 253575 - DNA, 534 bp, Glycine max
  unsure (1)..(534): unsure at all n locations
aggttgggtgttttnaatttgttggggtggggagaatggtaacactcagttangactnnngacgnngnatgcacgcgtacgtaagctcggaattcggctcgagctcatttcaatttgcatttgcatttgcgtttcatttggcgttttgtttctttctggaagcttcgttcgggcatcaatggcgtccttcgatgaagctcctcccggaaactccaagaacggcgagaagatcttcaaaaccaagtgcgctcagtgccacaccgtcgacaaaggtgccggccacaaacaaggacccaatctgaatggtttgtttggaagacaatctggtacaactcctggatattcctattctactgctaacaaaaacatggccgtgatttgggaggaaaagaccctctatgattacttgctcaaccccaaaaagtatattccaggaacgaagatggtatttcctggtcttaagaaacctcaggaacgtgcagatcttattgcatatcttaaagaatctactgcttaatgattaaatnntcatac

SEQ ID NO: 253576 - DNA, 520 bp, Glycine max
  unsure (1)..(520): unsure at all n locations
nggtaagaagctgtgtctatgtaggcgggtgtatgagaacactatagaagagctatgacgtcgcatgcacgcgtacgtaagctcggaattcggctcgagggccaggcaagccccactcaaccaccacacctctcctcgttcacgctacccctttctgctcttcttctacctttcaagttttaaaagtataaagatggcagagacattcctatttacctcagagtcggtgaacgagggacaccctgacaagctctgcgaccaaatctccgatgctgtcctcgacgcttgcctcgagcaggacccagacagcaaagttgcctgcgaaacatgcaccaaaaccaacttggtcatggtcttcggagaaatcacgaccaaggccaacgttgactacgaagagatagtgcgtgacacctgcaggaacatcggcttcgtctcaaatgatgtgggactggatgccgacaacttgcaggtccttgtcaaccatgaacaacaaaaccctgatattgctcaaggtgtacac

SEQ ID NO: 253577 - DNA, 548 bp, Glycine max
  unsure (1)..(548): unsure at all n locations
gttttgggtntntanngaggttgaaggggtnnnnnttttgaatcgatgccattngtcananccnnnnanaattatgacgtcgcatgcacgcgtacgtaagctcggaattcggctcgagacgaaaccctcttcatcttgttctatctgtgacgagcatcatggcctcaagagcagtgttattgttggctatgtgtgtgcttccggcgatggttgtggccattcgcccagcaaagaaccctttttgcgtgaagggtcgtgtctactgtgacccttgccgtgctggttttgagacctcagctaccacctacattgctggtgctgagattatgttgcaatgcangagcagggttagcaacgaggttgtgtacacgaagaaggggtacaccgactcaaccggagcatacacaatgtacgtggatgaggatcacgcagatcagatctgcagtgccaagcttgtaagcagccctcaccctcaatgcaaggaagtcaccccaggccgcgacgaagccgtcgtgattctcacccgctacaacggcattgcctccgac

SEQ ID NO: 253578 - DNA, 535 bp, Glycine max
  unsure (1)..(535): unsure at all n locations
ggtatttgggtggggntnnnnatgaatcntggcatggcattttctattccagctatgacgtcgcatgcacgcgtacgtaagctcggaattcggctcgagacgaaaccctcttcatcttgttctatctgtgacgagcatcatggcctcaagagcagtgttattgttggctatgtgtgtgcttccggcgatggttgtggccattcgcccagcaaagaaccctttttgcgtgaagggtcgtgtctactgtgacccttgccgtgctggttttgagacctcagctaccaactacattgctggtgctgagattatgttgcaatgcaagaaccgggttagcaaccaaggtgtgtacacgaaaaaggggtaccacgaactaacccgaaccttcaccatgtacgtggatgaagatcacgcagatcagaatttgaatgcccaacctggtagcaagccttaaccttaattgcagggagttaccccaggccgtaaccaaacccgtgtgattctaacccgttaaaacgggatttgccttcgaccattt

SEQ ID NO: 253579 - DNA, 513 bp, Glycine max
  unsure (1)..(513): unsure at all n locations
cggttntagtctgttgggggggtatgatgagaacactatagaagagctatgacgtcgcatgcacgcgtacgtaagctcggaattcggctcgagctttgagagagagagagggaggagggagagtgttgacgctccatcaagatgggtatttctagggattccatgcacaagaggcgtgccactggtggcaagaagaaggcatggagaaagaagagaaagtatgagcttgggcgtcaggccgcaaacaccaagttatcaagcaacaaaactatccggaggattcgtgttcgaggtggcaatgttaaatggagggcattgaggttggataccggcaattactcatggggtagtgaagcagttactcgcaagactcgtattctagatgttgtttacaatgcctcanacattgagcttgtgccaactcagaacctggtcaagaatgccaatggtccaggtgatgccggtcctttaaagccagggacctttagaactatagggtgtggaaattggtaa

SEQ ID NO: 253580 - DNA, 371 bp, Glycine max
ggctggacagcattctgatattctagagtctctgtcgcccaatgtcaggaagcgtgtggaggttcttagagagatccagggtcaacatgatgaattagaggcataattttttgaggagagagctgctcttgaggccatataccaaaaattgtatcaaccactttacacaaagcggtatgaaatagtaaatggtgctactgaagttgaagaaggggcagtgaaagaaacatcaccagatggtgaggaggatcaagagaaaggagtgcctgcattttggcttactgccatgaaaaacaatgaagtgttggctgaggagatctcagagcgtgattaaggtgctcttaagtatctcaaagatatcaagtggagca

SEQ ID NO: 253581 - DNA, 382 bp, Glycine max
cttgaagcttcacgagaacattgctcgcccttaacgcgctgacttctacaaccctaaagctggtcgcattagtaccctcaacagcctcaccctcccagccctccgccaattccaactcagtgcccaatatgttgtcctctacaagaatggaatttactctccacattggaatctgaatgcaaacagtgtgatctatgtgactcgaggacaaggaaaggttagagttgtgaactgccaagggaatgcagtgttcgacggtgagcttaggaggggacaattgctggtggtaccacagaacttcgtggtggcggagcaagccggagaacaaggattcgaatacatagtattcaagacacaccacaacgcagtcactagctacttg

SEQ ID NO: 253582 - DNA, 385 bp, Glycine max
gtgcgccacaatccgccggtgccggaggtccggcgccgttccttctgaagacctacgacatggtggacgatgcctccaccaacgacatcgtttcgtggagctctaccaacaacagcttcgtcgtgtggaaccctcccgagttcgctcgcctccttctcccgacctatttcaagcacaacaacttctccagcttcatccgtcagctcaatacctacggatttcgaaaaatacatccagagcgatgggaatttgctaatgatgagtttctgaaagatcagaagcatcttcttaagaatatatatcgcaggaaacctatccacagtcatagtcatcctccaggttcacttgtagatccagaaagggcagcatttgaggaagaaataga

SEQ ID NO: 253583 - DNA, 354 bp, Glycine max
aaactcaattataaaaacaatgcaaaaaagaacaaaaccgaatattatagaaaaccaaaaaaatggaggacgatgcctacaaccaacgacatcaattaataaaggtctaccaacaacaactgtcctcgtgtgccaccctatcaagttcggtcgggtccttgtagggacctattttaagcacatcatctgctccatcttaattcggcatctcaatacctacagatttcgacagatacatacagagcgatgggaatatgctaatgatgagtttctgccagatcctaaacatgttattccgaatatacatagcaggaaacctatccacagtcataggcattctgcaagttcacttgt

SEQ ID NO: 253584 - DNA, 518 bp, Glycine max
  unsure (1)..(518): unsure at all n locations
gagtagtgttttgtaaggagggagagtgtactgcatttcttttagagacaagcttgcatgcctgcacgtcgactctagaggatcccctcggggaattccaattccacattttcaagaaataaggaggcaaaaatgttcatatatgaattggaattatttgttttcttattaggcctatcctgaagccaaaggaaatgagatcggaattcctcggggaattccaattccacattttcaagaaataaggaggcaaaaatgttcatatatgaattggaattatttgttttcttattaggcctatcctgaagccaaaggaaatgagatcggaattcctcggggaattccaattccacattttcaagaaataaggaggcaaaaatgttcatatatgaattggaattatttgttctcttattaggcctatcctgaagccaaaggaaatgagatcggaattcctcggnggtaccgagctcgaattccctatagtgagtcgtattaaaatcggaatcttgtcaaac

SEQ ID NO: 253585 - DNA, 330 bp, Glycine max
ggaatttactctccacattggaacttgaacgcgaacagtgtgatctatgtgactcgagggaaaggaagagttagagtggtgaactgccaagggaatgcagtgttcgacagttagctaaggaagtgacatattgctagtggagcagatgaagttgctgatatgttcatataggaattgacatgatttgttatattattaggcctattctgaagccaaaggtaatgagaacggaattccttggggaattacaatttcacattttcaagatataacgaggcaataatgttcatatgtgaattggaattatgtggtctcttattaggcctattc

SEQ ID NO: 253586 - DNA, 332 bp, Glycine max
aagagaggtttttttggtcctcactgaccaagccatggcgatgagaaccaaactttctttagctatctttttcttttttcttttagccttattttcaaacctagcctttggcaaatgtaaagaaaccgaggtagaagaagaagaccctgagctcgtaacatgcaaacaccaatgccaacagccacagcaatacactgagggtgacaagcgggtatgcttgcaaagatgtgacaggtatcatcgtatgaagcaagagcgagagaaacaaattccagaggaaactcgtgagaagaaagaagagggaagccctgaaaggggagaagaaccaccag

SEQ ID NO: 253587 - DNA, 370 bp, Glycine max
aaggttgtttcctcaggccaagagcttggaaaattagcctcacaaaagcaaagatcaaacaaaccaaggacgagaacacgatgttgcttgaacttgcacttggtttattggttttggctctgtttctgcacttgcgtcccacacccactgcaaaatcaaaagcacttcgccatctcccaaacccaccaagcccaaagcctcgtcttcccttcataggacaccttcatctcttaaaagacaaacttctccactacgcactcatcgacctctccaaaaaaacatggtcccttattctctctctactttggctccatgccaaccgttgttgccttcacaccagaattgttcaagctcttcctccaaacgcacg

SEQ ID NO: 253588 - DNA, 352 bp, Glycine max
aaggctgtatatctaagccaagagcttggaaaattagcctcaggaaagcatagatgaaacaaaccaaggacgagaacacgatgttgcttgaacttgcacttggataattggttatggctctgtttatgcacttgcgttccacacacactgcaaaatcaaaagcacttcgacatcatccaaacccaccaagtccaaagcctagtcttgccttcataggacaccttcatctcttaatagacaaacttcttcactacgcactcattgacctcttcaaaaaaacatggtcccttattctctatgtactttggctccatgccaaccattgttgcctccacaccagagttgttcaagc

SEQ ID NO: 253589 - DNA, 372 bp, Glycine max
ctcgagccgaatcggctcgagattttagcctctcttaattcataattcctcaccttcaaatctccattctgcttcattttctgcaaagaacaaacccctttctgaagaaagaatatagtcttcagctggacaaggatcatttattttgaaagacaagtttgtgtgacaatcttatagttctaagaagggtgcaagtgagagctttgctgtgatggcaacccgtagatattcttttggaagggctgatgaggccactcatccagactccatgagggccactttggctgaatttgcatccactttcatctttgtctttgctggagaaggctctagccttgctttggttaagatttaccaggattcagctttctc

SEQ ID NO: 253590 - DNA, 385 bp, Glycine max
cttaattattaacacttccttagttcaatatggggaagcccttcactctctctctttcttccctttgcttgctactcttgtcgagtgcatgctttgctattagctccagcaagctcaacgagtgccaactcaacaacctcaacgcgttggaacccgaccaccgcgttgagtccgaaggtggtttgattcaaacatggaactctcaacaccctgagctgaaatgcgccggtgtcactgtttccaaactcaccctcaaccgcaatggcctccacttgccatcttactcaccttatccccggatgatcatcatcgcccaagggaaaggagcacttggagttgcaattccaggatgtcctgagacgtttgaggagccacatgaacaatc

SEQ ID NO: 253591 - DNA, 388 bp, Glycine max
  unsure (1)..(388): unsure at all n locations
gagattcatgaaaaagttgtattgaatctctccaaactgcaccagcttgtggggaaaagcctcaaaattgatggtgtagtttggagagattcaggaaaaagttgtattgaaattttcacaagaggaatttcttacagcttggtcaactcaggtgcgtcctgcaacaactctgttggctgatgggtgtccatatttgtatgctatggtgcatgatagttcagtgtctacaataccaggtgattttgtcattggtgttaagttgacaaccataaacaatatgtgtgcatatgggctcaatcctggtatttcaggttctcgtcttttgggcaccattcctcagtctatttcacagcanactgtttggaatcaaatggcaacagtgagaaca

SEQ ID NO: 253592 - DNA, 375 bp, Glycine max
tggagaagcatcaacaacaagcaccatctaaggaaacaaaggcacagagtgatgaatcagttaaagaaagcagcactgaagggcttccaatggaggatagtccctatgtgaaatacaaggatttggaggattataagcgtcagggttatggtacacaaggtcatcaagaaccaaagacaggtcgtggagctggagccactgaagcacccactctctctggtgctgcagtttcatctgatgcacaagtcgctgccactgatgccattaacagtaaaggagtcccttaattattcacacttcctagaatagatcgttcctttgctaataagaaatcgttttcttaatttggggtggccgtttttaaatgtgtgaaca

SEQ ID NO: 253593 - DNA, 178 bp, Glycine max
caccagggaaggttagggaacactccatgcccaccaccaaagtctcctgcgcaagctacgtgccccattgacacgctcaaacttggtgcctgtgtggatcttcttggagggttggttcacattggtttgggtgaaccctgtgcgaaccaatgctgccccgggcttcaaggggcttgtg

SEQ ID NO: 253594 - DNA, 369 bp, Glycine max
caacacctttaattttctaaaagtaattcagcggctgaataccaagcggagaagatgagtcaggagcagccacggcgtcccaaaggccaaaaccccatcaaatacggcgacgtttttgtcgtctccggcgaccttgcacagaagcccgtcgcaccggaagatgctgccatgatgcaaagcgcggaaactcgagtgctcggacaaacccaacccggcggagcagcttccgtcatgcaatctgccgtcaccaggaatgaacaggctggccttgtcggtcaccgggacgtcaccgacgttaccggcgaccgtggcgtcacagtcacagaaactaaagtccctggaagacgcattataaccgaggctgttggt

SEQ ID NO: 253595 - DNA, 396 bp, Glycine max
  unsure (1)..(396): unsure at all n locations
tcggggaattccaattccacattttcaagaaataaggaggcaaaaatgttcatatatgaatgggaataattggttctcttattaggcctatcctgaagccaaaggaaatgagatcggaattcctcggngaattccaattccacattttcaagaaataaggaggcaaaaatgttcatatatgaattggaattatttgttttcttattaggcctatcctgaagccaaaggaaatgagatcggaattcctcggggaattccaattccacattttcaagaaataaggaggcaaaaatgttcatatatgaattggaattatttgttttcttattaggcctatcctgaagccaaaggaaatgagatcggaattccttcggggtaccgagctcgaattcccta

SEQ ID NO: 253596 - DNA, 338 bp, Glycine max
aggacgaagatttattttctaccaacctagaagcaaatatgggcatatatgaattggaatttttagatcacttattaagcctatactggaaaccaaaggaaatgagatcgggacttcctcgggaattccaaatgccacattttcaagaaatacgggaggcaaaaatgttcatctatgaataggaattatttgctctcttattaggcctatcctgaagccaaaggaaatgagatcggaattcctcggcgaattccaattccacattttcaagacataacgaggcataaatgttcatatatgaatcggaattatgtggtgtcttattaggcctatcctga

SEQ ID NO: 253597 - DNA, 378 bp, Glycine max
cggctcgagcaactacaagaaagaacttccttataaccaaaaccaacaacaactatggcaagttatcagaagcactacgatgatcagggtcgcaaggtcgacgagtatggcaatgttgagaggcaaactgacgaatatggcaacccggttcatgccactagtgtcacttatgtagccaccaaaagtgttggtggctacaatgatgacgctaataagcaacatgatattactggtgtctatcccgagaaagacaccggtagacatcattttggtcgtggttacgacggtgacactaacaagcaacatgatgctactggtgtttatcccggaatagacattggtagagatcatgggactaccggtgtttatggcctaaac

SEQ ID NO: 253598 - DNA, 422 bp, Glycine max
  unsure (1)..(422): unsure at all n locations
ggaagatgaggatgaggagcagcagcgagagagcgaagaaggtgaagaatttgaggtaccaagacctaagaataagaacccttttctctttgggtttaacaaggtcgaaacttttttcaaaaaccaatatgggcgcattcgcgttcttcaaaaggtcaacccaaggttcccaaaactttagaatcttcgagactaccggattttgggagtcaaactccaaaccaacaaccttccttctccccaccatgctgacgctgattaccttatcgttatccttaacgggactgccattctttccttggtgaacaacgacgacagagactcctacagacttcaatctggtgatgccctgagagtccnctcaggaaccacatactatgtggtcaaccctgacaacaacgaanatctcagattaataacac

SEQ ID NO: 253599 - DNA, 371 bp, Glycine max
ggatggaaactttgttgccattaaaaggttgacaagagggtgccaagaagaaatgactgcagatttcttgtctgagcttggcattatagtgcacgtggaccacccaaacatagctagattgattggatatggtgttgaaggaggaatgtttcttgttcttcaattgtctccacatggtagcctgtcatccatactttatggacccagagagaaactgaattggaacctcagatataagattgctttggggactgctgatggccttcgctatctgcatggagagtgtcaaagaaggatcattcacaaagacatcaaagcttctaatattcttctctcagaggattttgagcctcagatatctgattttgggc

SEQ ID NO: 253600 - DNA, 258 bp, Glycine max
gtttgttaatgtttcaggttatgaagctgaaatgaattccatgttctctcagattgagtcccctaacagatcacttcatgatcatataattgaagctcttggcaagctcactgttgaacaaggaattcctcctacatcagattcttgggttttgagcaccattttggaaccggcactgctatctcaggctggttctgatttgaataagtccgtttttaaggagccattttggaaggaattaagattggtgccattgat

SEQ ID NO: 253601 - DNA, 380 bp, Glycine max
  unsure (1)..(380): unsure at all n locations
gttttcctcttctgaatccaccgccaccgcagcgtggacggaatcagagtgcagccatagcagcagcagcagcagcagcagcagcagtcattgaagtgctgctctagtttgaggcacaatgagattggagaaatgctggttttgctcttcaaccgtataccctggacatggaatccagtttgttcgtaatgatgcaaagatttttcggttttgtagatcaaaatgccacaagaactttaaaatgaagagaaatcctcgtaaggtaaagtggaccaaggcatatcgtcgagtgcatggaaaggatatgactcangactcaacctttgagtttgagagaaaacgaaacaggcctgaaagatatgacaggaatcttgcggaga

SEQ ID NO: 253602 - DNA, 318 bp, Glycine max
gttttacttttattaatcaaccgccaccgcaccgtgacgggaagcacatagcagccttagcagcagcagcagcagcaccagcagcagtcattgaagtgctgctctagtttgaggcacaatgagattgcagaaatgctggttttgctcttcaaccgtataccctggacatggaatccagtttgttcgaaatgatgcacagatttttcggttttgtagatcaaactgccacaggaactttaaaatgaagagaactcctcgtaaggtaaagcggaccaaggcatatcgtcgagtgcatggaaaggatatgactcacgactc

SEQ ID NO: 253603 - DNA, 86 bp, Glycine max
aaaaaaaattattttaaaaaaaaaaaaaaaaaaaaaaaaaaaaaaaaaaaaaaaaaaaaaaaaaaaaaaaaaaaaaaaaaaaaaaa

SEQ ID NO: 253604 - DNA, 349 bp, Glycine max
gttggagaatttttttaacagggccggattttgaccgaggagtcaacaccttttcccccgaaggacgttggtttcaggttgagtttgcaatcgaagccttcaagctgggatcaactgcgatggggttgaagaccaaagagggtgttgtcctcgcagttgaaaagcgcataacttcgccgttcctggagcctagtagtgttgagaaaattatggaaattgatgaccccataggttgtgcaatgagtgggttgattgcaaatgctcgaacacttgttgagcatgcacgggtggaaactcagaatcataggttctcctatggtgagccgatgactgttgagtccaccaccca

SEQ ID NO: 253605 - DNA, 394 bp, Glycine max
aaaatgacctagttcacaatcctcctcatctctcttctcttctgcatcgcccacacttgcagcgcctccaaatggcagcaccagcaagatagctgccgcaagcagctccagggggtgaacctcacgccctgcgagaagcacatcatggagaagatccaaggccgcggcgatgacgatgatgatgatgacgacgacaatcacattctcaggaccatgcggggaagaatcaactacataaggaggaacgaaggaaaagacgaagacgaagaagaagaaggacacatgcagaagtgctgcacagaaatgagcgagctgagaagccccaaatgccagtgcaaagcgctgcagaagataatggagaaccagagcgaggaactggaagagaagcagaaga

SEQ ID NO: 253606 - DNA, 396 bp, Glycine max
  unsure (1)..(396): unsure at all n locations
gtcttgctgcggtggtaactgtggttgcggaagctcctgcaagtgcggcaacggctgcggaggctgcaagatgtacccagacttgagctacactgagtcaaccaccaccgagaccttggtcatgggagtggcacctgttaaggctcaatttgagggtgctgaaatgggtgtgcccgctgagaacgatggctgcaaatgtggaccaaactgctcctgcaacccctgcacttgcaagtgaggtgttgggagagcaagcttcaagcagagatagcccttaattaggaataatgataaactattaatgtgtagctaaaaacttatgtattatgtctgtgatggttttcgtgcactctggtgttttgtgttaaacaaacatncttagaataaagtggtcat

SEQ ID NO: 253607 - DNA, 283 bp, Glycine max
aaattaactttgctaacaagaacacccataactcgcctaggttaaatcgaccacaggcgaggcaacgcaacgaggaagaaccaggaacatagcaggcgcaagcaacgccaagacccgatcctaaaccgctacgagaaggacatcaacgagaacatcccacagaaggccaatgaccaggatgatgctgacgacaaccatcacacggacacgaccatgcatgagaagaaccaaacacataaggacgaacgaaggaaaacacaaagacgactaaaaagaaggacac

SEQ ID NO: 253608 - DNA, 399 bp, Glycine max
gggtgacttttatttcctgggagaaaaagatgagccacggctggtacgccgttcgtgcatttttgaggtgccgctgtcatgtttgggcgttgtgcaccaaggtggagtgataactccaaatattatgatattctcgggatttccaaaaatgccagtgtagatgaaatcaagaaggcctatagaaaggcggctatgaagaaccatccagataagggaggagatcctgaacagtttaaggagttaggtcaagcatatgaagctctaagtgatcctgagaagaaagaactgtatgaccagtatggtgaagatgcccttaaagaagggatggggggaggaggctcgtttcataatccatttgatatatttgaatcattttttggaggagcaagcttttgttgt

SEQ ID NO: 253609 - DNA, 406 bp, Glycine max
  unsure (1)..(406): unsure at all n locations
ttgaaggggttccttttcttccttggagaaaaaggagaagccacggttggaacgccgttcgtgctttttgaaggtgccgttgtaatgtttggccttggtggaccaaggaggattgataactccaaatattatgatattctcgggatttccaaaaatgccagtgaagatgaaatcaagaaggcctatagaaaggcggctatgaagaaccatccagataagggaggagatcctgaaaagtttaaggagttaggtcaagcatatgaagttttaagtgatcctgagaagaaagaactgtatgaccagtatggtgaagatgcccttaaagaagggatggngggaggaggctcgtttcataatccatttgatatatttgaatcattntttggaggagcaaagctttgtggtg

SEQ ID NO: 253610 - DNA, 379 bp, Glycine max
aaaacactcaagttaacttcaacacctttaattttctgaacgaaattcagccacagaatatcaaagggagcgaagatgagtcaggagcagccaaggcgcccccaaggccaagaccccatcaaatacggcgacgtttttgacgtctacggtgaccttgcacagatgcccattgcaccggaagatgctgccatgatgcaaagcgcggaagctcgagtactcggaaaaacccaacccggcggagcttcttccgtcatgcaatccgccgccacaaggaatgaacaggctggtcttgtcggtcaccaggacgtcaccgacatcaccggcgaccatggcgtcacagtcacagaaactacattccatggaagacgcataataaccg

SEQ ID NO: 253611 - DNA, 512 bp, Glycine max
  unsure (1)..(512): unsure at all n locations
ngagtagttgtaacagacggggatggatcgataacatatagaagagtctatgacgtcgcatgcacgcgtacgtaagctcggaattcggctcgaggcaaaggattctacccgccgctcgatgggaattgcgcttcaaggcgtctcgtagggctaatccgcctcacgagggtcaccaacggcacgtgcctttggggggccgaggccccctactgctggtcggcaaacggacggcgggcgcacgcgtagcttctagcccggattctgacttagaggcgttcagtcataatccaacgcacggtagcttcgcgccactggcttttcaaccaagcgcgatgaccaattgtgcgaatcaacggttcctctcgtactaagctgaattactattgcgacactgtcatcagtagggtcatactaacctgtcttacgacggtctaaacccagcttacgttccatataggtggctgaacaatccaacactttgtgaattctgcttcacaacggtaggaggagcc

SEQ ID NO: 253612 - DNA, 385 bp, Glycine max
  unsure (1)..(385): unsure at all n locations
acgcgcttcccacttaccagaccatgatcaacaaccttgatggagtgaaagatgacagcggcacgagcccgagcccgtgggccgtgtggacccgggcctggaccgccgaggaaaacagacacggggatctgctcagaacttatttgtatctctctgggagggttgacatggctaaggtcgaaaagaccgtacattacctcatttcagctggcatggaccctgggacagacaacaacccatatttggggtttgtgtacacgtcattccaagagcgagcaacatttgtggcgcacgggaacacggctcggctcgcgaaggagggcggngatccagtgctggcgcgcctatgcgggaccatcgcagcggacgagaagcggcacgagaa

SEQ ID NO: 253613 - DNA, 394 bp, Glycine max; identical to SEQ ID NO: 233404

SEQ ID NO: 253614 - DNA, 565 bp, Glycine max
  unsure (1)..(565): unsure at all n locations
gaggtnntnatgtaatcatgatgcctancggtcgnctnccaatagctatgacgtcgcatgcacgcgtacgtaagctcggaattcggctcgagatgcccgctagtcccatgcatcctttctggtggtcaacaaccaaccacaagtcaatcgaatgaattcttcaagactccggactctctttctgtcccgagggaatcattggttctcaatcaatcatgcctcaactggataaattcacttattttacacaatttttctgggtatgccttttcttctttactttttatattttcatatgccatgatggagatggagtacctgggatccacagaattctaaaactaccccacccactgggttcaaaccgggggaacaaaatcaggagcaacgacccccagagtttggaagatatctttagaaaaggttttagcaccggtgtatcctatttgtacctctagttattcgaagtttcanaatggggtaacgccgtcgacttattgggaaaaaggaggaaatcacttttctctcttggttcggagaaataagtggctcacgaggaatggan

SEQ ID NO: 253615 - DNA, 465 bp, Glycine max
ctcgagccgattcggctcgagaaaattcttccaccaagttatgggtttccttgtgttgcttcttttctccctcttaggtctctcttctagttccagcatatcaactcatcgttccatattggaccttgacctaaccaagtttaccacacagaaacaggtgtcttcactgttccaactatggaagagtgagcatggacgtgtctaccataaccacgaagaagaggcaaagagacttgagattttcaagaataacttgaactatatcaaggacatgaatgcaaacagaaaatcaccccattctcatcgtttaggattgaacaagtttgctgacatcactcctcaagagttcagcataaagtacttgcaagctcccaaggatgtgtcgcagcatatcataattgccatcatgataatgaagaaggacaatattcttgtgaccatccacctgcatcatgggattggagg

SEQ ID NO: 253616 - DNA, 377 bp, Glycine max
  unsure (1)..(377): unsure at all n locations
aaaaaatcctaaccttggcacccatttctactgttcaaccaagaggttcctactcctatggaacctcctatggagcaccctttggaaccacctatgagaccaacagcagcattaacaaccctccttcacgccaaaccgtgaagttcataactgctgcaactattggcatcacactcttactcctgtctgggttgaccctcacaggcactgtcataggnttgatcattgcaacccctcttcttgctatcttcagccccatccttgtccctgctgcgtttgtgctgttactggttgcttctggctttttgttctctgggggctgtagtgtggctgccattgctgctttatcttggatttacaactacgtttctgggaac

SEQ ID NO: 253617 - DNA, 386 bp, Glycine max
agaaaaaagtataagaagatgggtttgaagaacaacatggtggtgctaaaggtgtgtttggtgctacttttccttgtggggggtactactagtgccaacttgaggctgagtaagcttggcctgctcatgaaaagtgatcatcatcaacactcaaatgatgatgagtcttcaaaaccatgctgtgatcaatgcgcatgcacaaagtcaaaccctcctcaatgccgctgttcagatatgaggctgaattcgtgccattcagcttgcaaatcttgtatttgcgcattatcgtatcctgcacagtgtttttgtgttgacataaccgatttctgctatgaaccttgcaaacccagtgaggatgacaaggaaaactactaatgaacaagtgt

SEQ ID NO: 253618 - DNA, 270 bp, Glycine max
actaaagctgataagaaacatttatcaagtatgggtttggacctttcgcaagggaaaatcagaaacaacttgtaggccggagtcattgagcctgcaatgagcaaagtaaaaatcattcagtgcgcaactgaagctgctattaccatcattcgaattgataacatgatcaagctcgacacggatgtcagtgcacatgctcatagctgaacaacggtttataccgatgattactattatcggatccttcgaaactttcaagtttctatgatc

SEQ ID NO: 253619 - DNA, 405 bp, Glycine max
taaattatgtgttcataaattatgcaccagcaactcacacaagttttgcatctttaccaggaatgtgggacagaactcttactgtgaatggattttccaaggcctttgcaatgactggttggcggcttggatatattgctggtccaaaacattttgttgcagcatgtggaaagatccaaagtcagttcacttcaggggccagtagtatagctcagaaagctgcagttgctgcattaggactaggccatgctggtggggaggcagtttctaccatggtgaaagcatttagggagcgaagggatttcttggtaaaaagttttagagaaatagatggtgtcaagatatctgaaccccagggagcattttatctattccttgatttcagcttctattatggaagagaag

SEQ ID NO: 253620 - DNA, 372 bp, Glycine max
  unsure (1)..(372): unsure at all n locations
taaatnatgtttgcttaaattatgcaccagctactcacacgggtgttgcatctttaccaggaatgtgggacagaactcttactgggaatggatttttcaagggccttgcaatgactggttgtcggcttggatatattgctggtcccaaagcattttgttgcaacatgtggaaagatccatagtcagttcacttcatgggccagtagtatagctcagaaagctgcagttgctgcattaggactatgccatgctgatggggaggcagtttctaccatggtgaaagcattttaggagcgaaaggatctcttggtaaaaagtcttagagaaatagatggtgtcaagatatctgaaccccagggagcatttcatcta

SEQ ID NO: 253621 - DNA, 416 bp, Glycine max
gttcagcatcgcgcagagaggctcttcctcacaaagcacacacctcttgaaaagttggacaggaagcattttgctaagggtgcatgtggtgtagaaaagaatggggttgctgcagttccacaagaagatggaaattctaaagaaattgcattgatggaagccaaaatgacaaaactttgtcatttgttagaggagacaattgctcgaacaaaagacaatgttgtaaagaagcaagccctaacatatgaggaaatggaagcagaacgtgaggaggaagagacacaagaggactctgaaagcgaagatgaggagcagcagatatataatcccctaaaattaccaatgggatgggatgggaagcctataccttactggctgtataagctacatggtctgggtcaggatttaaagtgtga

SEQ ID NO: 253622 - DNA, 416 bp, Glycine max
gttcttcatcgcgcagagaggctcttcctcacaaagcacgcacctcttgaaaagttggacaggaagcattttgctaagggtgcatgtggtgtagaaaagaatggggttgctgcagttccacaagaagatggaaattctaaagaaattgcattgatggaagccaaaatgacaaaactttgtcatttgttagaggagacaattgctcgaacaaaagacaatgttgtaaagaagcaagccctaacatatgaggaaatggaagcagaacgtgaggaggaagagacacaagaggactctgaaagcgaagatgaggagcagcagatatataatcccctaaaattaccaatgggatgggatgggaagcctataccttactggctgtataagctacatggtctgggtcaggaaattaagtgtga

SEQ ID NO: 253623 - DNA, 408 bp, Glycine max
caaacagcatcagtacagagcattttgatgcatgtaagtggacaaaatcggaaccacattcctgggaattgatcttcccaatagaggtatgtggtcctaataatggttttgaaatgtggagttctgagtgggcaaatcaaacttcatggcatttgagtttccttattgacaatcccaaacagtctacagtttttgatattctcttgggaatttctcaagattttgaaattgctggtaatactcttatgccagctttttctgttccacaggctactgccagatcttctgaaaatgcggaatcctctgcatgatctggaacttgtgttctctttcgcttgttcgtttgtttaattcaataaaggaaattaggcatgaccctcttgatgagtatgctctgcctatttgaaa

SEQ ID NO: 253624 - DNA, 443 bp, Glycine max
gcttaagccttttaaaaacctgttatggcctatttcttgaaggtgtacaatcacaaaaaaaaaatcgtctccttttctctctgcatttgagcaaagccaaaccacgtctgagtgagtgagttccgttggatggcgacgagcaccaccagcagcggtggcggcggcaccggcacccaaacattcaagccgtaccgtcacctgaaaaccctaaaagaccacgagaacgcggtatcgtgcgtgaagttctcgaacgacggaaccctcctagcctcggcctccctggacaaaaccctaatcatatggtcctccgccaccctcaccctctgccaccgcctcgtgggccactccgagggcatctccgacctggcctggtcctccgactcccactacatctgctccgccttcgacgaccacacccttcgcatctgggacgccaccggcgg

SEQ ID NO: 253625 - DNA, 404 bp, Glycine max
ccggtcggcggcatcctcctgctcctggcaggactgaccctggctggaactctcaccgggctggtggtggcaacaccgctcttcatcatcttcagcccggtgctgattccggccacggtcgcaattggcctggccgtggccgggttcctgacgtcgggagtctttgggctcacggcgctgtcgtccttctcctggatcctgaactacatccgggagacccagccggcgtcggagaatctggccgctgcggcgaagcaccatctggcggaggcggcggagtacgtggggcagaagaccaaagaagtagggcagaaaaccaaggaagttgggcaggatattcagagcaaggcacaagatacaagggaagcagctgcaagagatgcaagagatgcaaggggagcagc

SEQ ID NO: 253626 - DNA, 509 bp, Glycine max
  unsure (1)..(509): unsure at all n locations
gagaagctttaaaagggggcacagaaagcttcgccagactagcttgcatgcctgcaggtcgactctagaggatcccctcggggaattccaattcctcattttcaagaaataaggaggcaaaaatgttcatatatgaattggaattatttgttttcttattaggcctatcctgaagccaaaggaaatgagatcggaattcctcggggaattccaattccacattttcaagaaataaggaggcaaaaatgttcatatatgaattggaattatttgttttcttattaggcctatcctgaagccaaaggaaatgagatcggaattcctcggggaattccaattccacattttcaagaaataaggaggcaaaaatgttcatatatgaattggaattatttgttttcttattaggcctatcctgaagccaaaggaaatgagatcggaattcctcggnggtaccgagctcgaattccctatagtgagtcgtattaaattcgtaatcatgtcatagc

SEQ ID NO: 253627 - DNA, 414 bp, Glycine max
  unsure (1)..(414): unsure at all n locations
agagagactcgtacaggaaccaagcatgccacgctcgttgcaacctccttaaggtggagaaagaagaatgtgaagaaggtgaaattccacgaccactaccacgaccacaacacccggagagggaacctcagcaacccggtgagaaggaggaagacgaagatgagcaaccacgtccaatcccattcccacgcccacaacctcgtcaagaagaagagcacgagcagagagaggaacaggaatggcctcgcaaggaggaaaaacgcggagaaaagggaagtgaagaggaagatgaggatgaggatgaggaacatgatgaacgtcaattcccattcccacgcncacctcatcagaaggaagagcgaaagcaagaggaagatgaggatgangagcaacagcgagagagcgaagaaagtg

SEQ ID NO: 253628 - DNA, 371 bp, Glycine max
aaacaatttaattcaatctgcctcgatcatggagaggaaaacatttgggtttttgttcttgctcctacttgtcttagcttctgatgtgacggtgaagagagcagaggctaaagattgcttgacaaggaggcacgggttccagggtagatgcttattcgacaggcaatgtgcacatgtgtgcatgagcgatggtttcatcggtggtcagtgccgaggccctcttcgcaaatgcttttgcagcaggccatgttgatcgaaattactactgccaaagaggccatgaaatatacagacagacatatagatcaatagctctaaccgacacatatgtacgtagtgtcggagttctagctagctaggtagcgacgtgt

SEQ ID NO: 253629 - DNA, 379 bp, Glycine max
gttggagatctcgtctttgaagtttctaagatgacttctccctacattaaatgtacagtctctttcttcatagcatttggaaatttggctgatgacaccatcaattttgaggcttttccccacaagctggtgcagtttggagagattcaggaaaaagttgtattgaaattttcacaagaggaatttcttacagcttggtcaactcaggtgcgtcctgcaacaactctgttggctgatgggtgtccatatttgtatgctatggtgcatgatagttcagtgtctacaataccaggtgattttgtcattggtgttaagttgacatccataaacaatatgtgtgcatatgggctcaatcctggtatttcaggttctcgtcttt

SEQ ID NO: 253630 - DNA, 568 bp, Glycine max
  unsure (1)..(568): unsure at all n locations
aaggtcnnttttcttgatccatgccagtancgnntngactcgcgatacatgcttgcatgcctgcaggtcgactctagaggatcccctcggggaattccaattccacattttcaagaaataaggaggcaaaaatgttcatatatgaattggaattatttgttttcttattaggcctatcctgaagccaaaggaaatgagatcggaattcctcggggaattccaattccacattttcaagaaataaggaggcaaaaatgttcatatatgaattggaattatttgttttcttattaggcctatcctgaagccaaaggaaatgagatcggaattcctcggggaattccaattccacattttcaagaaataaggaggcaaaaatgttcatatatgaatnggaattatttgntttcttattatgcctatcctgaagccaaaggaaatgagatcggaatttcctcgnggtaccgagctcgaattccctatagtgagtcgtattaaattcgtaatcatgtcatagctgnttcctgtgtgaaatnngtatccgctcacaatccacacaacatacgag

SEQ ID NO: 253631 - DNA, 581 bp, Glycine max
  unsure (1)..(581): unsure at all n locations
gctatgaccgtcgcatgccacgcgtaccgtaagcctcagtgaattcggcttcgagtactatacctatgcatgtagaagtgcgagttgtccttttgttaggtagttgcttagggaactaggttttcctaggccattcagtttgtagtcttcatctaaagggtgaagagacggatgacgaagtaacccgtttctacccttgatgaagctctaacccagcttccaaacctcttctttgagaacccaaaacgagtgcgcattcgtcgtccttccagaagattcagaccaaaccgctttccccgacaacttggagaaccccttcgagaactacccggattagtcccaaagtttcagtcatgaaacccaacaccaagtccttcttcccccaaccatgccctgacgccgatttccttcctctttggtccttatgcgggatgagcncanntacttaccttaggtgaaccaacgaccgacatgagaccctcctacaacnncttcaccctgggcgattgcccanngagaatcccagcttggaacccacttnactatnttggggttaaccctcacgacccaccaggaatctc

SEQ ID NO: 253632 - DNA, 300 bp, Glycine max
tatcacacgcactccacacgtagctcgcaattcaactcgatagtatcccattatcttaaaactgaataccctaaaaccatatgaccgtattattttaaagtatgatcattcatacctgcaaccctaacaacaatccatatcataataccacattttccctctatccctgcaaccataaacacaatgcccttattagacctacctacacccacattccccaatacacatacatacaacaatgtaaagatatttattgcatcataatcccaacttttcctaacacttaatcacaaccataat

SEQ ID NO: 253633 - DNA, 366 bp, Glycine max
gccagatccaaaagctgaatgccctcaaaccggataaccgtagagtcggaaggtgggatcattgagacctggaaccctaacaacaagccattccagagtgccagtgttgccctctatcgctgcacccttaaccgcaatgccctacggagacctttctacaccaacggtccacaggacatctacatacaacaaggtaatggtatttttggcatgatattcccgggttgtcctagcacttatcaagagccgcaagaatcttagcagcgaggacgaagccagaggcctcaagaccgataccatacggtacatcggttcagagagggtgatttgatcgcagtgcctactggtgtagcatggaggatgcac

SEQ ID NO: 253634 - DNA, 369 bp, Glycine max
  unsure (1)..(369): unsure at all n locations
agctagtgatcaatcatcaacacagagctgagtgtgttggtctgtgaatccaccttcttcttccattggaggaccatttcctcctggaatagaaatactaccacacttttcttttttcacttctctaagttgctaagttaattgctccttcattttttcactcttcgttctcgcgtacccgtgtcacggtaactcgtggtgaagtgttcgaaaatgactgtcacacctaagatctcagttaacgatgggaaacttgttgtccatggtaagaccattctgactggagtgccagacaacgttgtgctgactccaggttctggaaggggtcttgtgactggntgcttttgtggtgccacagcttcacacagc

SEQ ID NO: 253635 - DNA, 377 bp, Glycine max
agctagtgttcaatcatcaacacagagctgagtgtgttggtctgtgaatccaccttcttgttccattggaggaccatttcctcctggaatagaaatactaccacacttttcttttttcacttctctaagttgctaagttaattgctccttcattttttcactcttcgttctcgcgtacccgtgtcacggtaactcgtggtgaagtgttcgaaaatgactgtcacacctaagatctcagttaacgatgggaaacttgtcgtccatggtaagaccattctgactggagtgccagacaacgttgtgctgactccaggttctggaaggggtcttgtgactggtgcttttgttggtgccacagcttcacacagcaaaagtct

SEQ ID NO: 253636 - DNA, 346 bp, Glycine max
aaagcttcatcatcatcttcttcttctctgcatcatcacgagtggctgaagtacgttcacaacaacaacaaccccagcatgtgcaagtccacgcaaccacaacacacaccccacaacaccatggcggtgaaggtggcagcggcattctgaacctcatcccggagatgtccctcacgggttcccaactcctagctctcctcgccggcgttccccttggtgcaatgctgctcctcctctccggcatctcgctcatcgccagcctcttggggctggcggtggcgacgccgctcttcatcttcttcagcccgctgctggtccccgccgccttcgccataggaatggcggt

SEQ ID NO: 253637 - DNA, 370 bp, Glycine max
gcctgcatgtctactctggaggatccccttggggaattccattactttattctcaagaaataaggaggcaaaggtgggcttatatgaattggaagtatgtgttttcttattaggcctatcctgaagccaaaggaaatgagatcggaattcctcggggaattccaattccacattttcaagaaataaggaggcaaaaatgttcatatatgaattgcaattatttgttctcttattaggcctatcctgaagccaaaggaaatgagatcggaattcctcagggaattccaattccacattttcaagaaataatgaagcaaaaatggtcatatatgaattggaattaattgtattcttattaggcctatcctta

SEQ ID NO: 253638 - DNA, 419 bp, Glycine max
  unsure (1)..(419): unsure at all n locations
aataaagatgagtttgaagaacaacatggtggtgctaaaggtgtgtntgttgcttcttttccttgtgggggttacagctgcacgcatggaactgagcttcttcaaaagtgatcagtcatcaagttatgatgatgatgagtattcaaaaccatgctgtgatctctgcatgtgcacacgctcaatgcctcctcaatgcagctgtgaagatattaggctgaattcatgccactcagattgtaagagctgtatgtgcacacgctcacagccaggacagtgtcgttgtcttgacaccaacgacttctgctacaaaccttgcaagtccagagatgactagaaaaactaatagctctctcaaatggacgaagcccctttaggcttttgttgtatgttaggggagacaaattaaacaagaaataaaa

SEQ ID NO: 253639 - DNA, 371 bp, Glycine max
gcccgcatacctactctggaagatcccctcgagtaattccaatacctatattgtcacgacaataatgatgctaaagtgggcatatatgaatcggaagcatgtgttatcttattatgcctatcctgaaaccaaaggaaatgagatcggaattcctcgcagaattccaattccacattttcaagaaatcatgctgcaaacatgtccatatctcactcgcaattatttgtcatctcattaggcctatcctgaagccaaatgaaatcagatcagaattcctcagcgaattccacttacacattctcaagaaataatgacgcaaaaatgaccatatatgaattggaatcatacgttttcttattatggctatcctg

SEQ ID NO: 253640 - DNA, 234 bp, Glycine max
ctactgggattcttcaaatcaaatggcacgtatgtcactgagaaagggaagttcttcttgacctggtattctaacaaattgctgaatcatggtgatcaaatactagatgaagccaacaaagctttcctgggctgtaaagtcaaattagcaatcaaagtatctggaattcactggtggtacaaagttgaaaatcatgctgcagagcttactgctggatattacaaccttaatgat

SEQ ID NO: 253641 - DNA, 507 bp, Glycine max
ggtaggtttgttacgacgagtttaagtagtctcggagagacaagcttgcatgcctgcaggtcgactctagaggatcccctcggggaattccaattccacattttcaagaaataaggaggcaaaaatgttcatatatgaattggaattatttgttttcttattaggcctatcctgaagccaaaggaaatgagatcggaattcctcggggaattccaattccacattttcaagaaataaggaggcaaaaatgttcatatatgaattggaattatttgttttcttattaggcctatcctgaagccaaaggaaatgagatcggaattcctcggggaattccaattccacattttcaagaaataaggaggcaaaaatgttcatatatgaattggaattatttgttttcttattaggcctatcctgaagccaaaggaaatgagatcggaattcctcgggggtaccgagctcgaattcctatagtgagtcgtataaaaatcgtaatcatgtcat

SEQ ID NO: 253642 - DNA, 311 bp, Glycine max
aaaaatgactggagagacagtgaacccaaaagcttacccgttggccgatgcgcaactcgcaataacaatcttggatcttgtgcaacaagctgccaactacaagcaactaaaaaagggtgctaatgaagcgactaatacactgaacagaggcatttctgagttcgtagagatggccgcagacactgagcctcttgagattctttatcatcttgctctccttgctgaagataagaatgttccctatgtattcgttccatcataacaagcacttgggcgagcatgttgagtctcactgacagggaatgcatggt

SEQ ID NO: 253643 - DNA, 438 bp, Glycine max
tcggggaattccaattccacattttcaagaaataaggaggcaaaaatgttcatatatgaattggaattatttgttttcttattaggcctatcctgaagccaaaggaaatgagatcggaattcctcggggaattccaattccacattttcaagaaataaggaggcaaaaatgttcatatatgaattggaattatttgttttcttattaggcctatcctgaagccaaaggaaatgagatcggaattcctcggggaattccaattccacattttcaagaaataaggaggcaaaaatgttcatatatgaattggaattatttgttttcttattaggcctatcctgaagccaaaggaaatgagatcggaattcctcggggaattccaattccacattttcaagaaataaggaggcaaaaatgttcatatatgaattggaatta

SEQ ID NO: 253644 - DNA, 402 bp, Glycine max
agtttctgtctcatttggcattgcgtattgggaaaagcagaaccccagtcacaacaagtgcctccgaagttgcaatagcgagaaagactcctacaggaaccaagcatgccacgctcgttgcaacctccttaaggtggaggaagaagaagaatgcgaagaaggtcaaattccacgaccacgactacaacacccggagagggaacgtcagcaacacggtgagaaggaggaagacgaaggtgagcagccacgtccattcccattcccacgcccacgccaacctcatcaagaggaagagcacgagcagaaggaggaacacgaatggcatcgcaaggaggaaaaacacggaggaaagggaagtgaagaggaacaagatgaacgtgaacacccacgcccacaccaacc

SEQ ID NO: 253645 - DNA, 401 bp, Glycine max
agcggttctcggcctctgtatccgatgatgctcgagagccctgaactgcggtggtcgttcatcagaaaagtgtactccataatcgccatccagttgctcgtaaccatcgtcgtcggcgccgtcgtcgtcaccgtccgcccaatcagtgtcttcttcgccaccaccggcgccggactggctctctacatcgtcctcatttttgttccctttataacgttgtgtccactttactactattcccagaagcatcccgtcaattacttgctcctaggggttttcactgtgtctcttggatttgtcgttggattgagttgcgcctttactagcgagaaagttattctggaagctgtcatattgactgctggtgtggtggattggtctgactctatacacattttggc

SEQ ID NO: 253646 - DNA, 403 bp, Glycine max
agcaaaatgtaccaagttcacaatcctcctcatctctcttgtcttctgcatcgcccacacttgcagcgcctccaaatggcagcaccagcaagatagctgccgcaagcagctccagggggtgaacctcacgccctgcgagaagcacatcatggagaagatccaaggccgcggcgatgacgatgatgatgatgacgacgacaatcacattctcaggaccatgcggggaagaatcaactacataaggaggaacgaaggaaaagacgaagacgaagaagaagaaggacacatgcagaagtgctgcacagaaatgagcgagctgagaagccccaaatgccagtgcaaagcgctgcagaagataatggagaaccagagcgaggaactggaggagaagcagaggaagaaa

SEQ ID NO: 253647 - DNA, 403 bp, Glycine max
caaaaccatttgcgttgtcgcagtcgcagtcaaaggccaaggcaaaaccctaaattgtctcacactttcgtcggaatccgcttttggctttttccgtgacaagatgccggcgaaggacgacggctccgacaaggagaagtgccttgatctctttctgaaaatcggcttagacgagcgcaccgctaaaaacaccgtcgcaaacaacaaagtcaccgccaatcttactgcagtcatctacgaggccggtgttattgatggatgcagccgagcggttggaaatcttctttacacggttgcaacgaagtaccctgcaaatgccttgccacatcgcccaacattgctacagtacattgtctcgttaaggtgaaaacaactgcacagttagatgcagcattatcatttc

SEQ ID NO: 253648 - DNA, 381 bp, Glycine max
cacagcgtatcctctgctctcgaagatggctcctcccagaggtggtggtgggttcaggggtggtaggggtgacagaggtagaggaaggggtggcggtggaggaagaggaggagacaggggtacgccgttcaaagctagaggcggtggccgtggtggccgcggaggaggcaggggtggtggccgtggcggcggcagaggtggaatgaagggaggtagcaaggttgtggttcagccccataggcatgatggcattttcattgccaagggtaaagaagatgctcttgttactaagaatcttgttcctggtgaagctgtttacaacgagaaaaggattaccgttcagaacgaagacagttccaaagatgagtacagagtttggaa

SEQ ID NO: 253649 - DNA, 328 bp, Glycine max
gaagagggctcgcgggttacttgagcggcaagaaagaggaaactaaagagatggctacggagaccgccgaggcgacagctaataaggcaggtgagatgaaagaggcaacaaagaacaagactgcggagaccgcagaggcagccaataataaggctggccagatcaaggacagagccgctgagacggccgacgccgcaagtgcaatgaccggagagaccgcggatgtggttcagactcatatgcatgatagcattatgattgccaaagataaagaagatgctcttgctactaagaatcttgttcctggtgaagctgcttacaacgagaa

SEQ ID NO: 253650 - DNA, 513 bp, Glycine max
  unsure (1)..(513): unsure at all n locations
tgtgtttttatacggcgggggatggaaggagacattatagaagagctatgacgtcgcatgcacgcgtacgtaagctcggaattcggctcgaggaacagttgtaaaacaaagtggcgaacgggtgcgtaatgcgtgggaatctgccgaacagttcgggccaaatcctgaagaaagctaaaaagcgctgtttgatgagcctgcgtagtattaggtagttggtcaggtaaaggctgaccaagccaatgatgcttagctggtcttttcggatgatcagccacactgggactgagacacggcccggactcccacggggggcagcagtggggaatcttggacaatgggcgaaagcccgatccagcaatatcgcgtgagtgaagaagggcaatgccgcttgtaaagctctttcgtcgagtgcgcgatcatgacaggactcgaggaagaagccccggctaactccgtgccagcagccgcggtaagaccggnggggcaaggtgtccttcgaatgactgngcg

SEQ ID NO: 253651 - DNA, 383 bp, Glycine max
gtccttaaacactcatcagtcatcaccatggccaagctagggttttccctttggtttctgcttttcagtggctgctggttcgctttcagttccagagagccgcctcagcaaaacgagtgccagatccaaaaactcaatgccctcaaaccggataaccgtatagagtcagaaagagggctcattgagacatggaaccctaacaacaagccatttcagtgtgccggtgttgccctctctcgctgaacctcaaccgcaacgcccttcgtagaccttactacaccaacggtccccaggaaatctacatccaacaaggtaagggtatttttggcatgatatacccgggttgacctagcacatttgaagagcctcaacaaccttaacca

SEQ ID NO: 253652 - DNA, 386 bp, Glycine max
actaactaagaaagtcttccatagccccccaaaaatgaagagcaccatcttctttgctctctttctcttttgtgccttcaccacctcatacctaccttcagccatcgctgatttcgtgctcgataatgaaggtaaccctcttgaaaatggtggcacatattatatcttgtcagacataacagcatttggtggaataagagcagccccaacgggaaatgaaagatgccctctcactgtggtgcaatctcgcaatgagctcgacaaagggattggaacaatcatctcgtccccatatcgaatccgttttatcgccgaaggccatcctttgagccttaagttcgattcatttgcagttataatgctgtgtgttggaattctaccgagtg

SEQ ID NO: 253653 - DNA, 300 bp, Glycine max
acaaacatttatttcctacatagcctcccaaaaatgaagagcgccatcttgtttgctctcgtatctcttttgtgccttcaccatctcatacctaccttcagccatcgctgatttcgtgctcgattatgaatgtaaccctcttgaaaatggtggcacatattatatcttgtcagacataacatcatttggtggaataagagcagccccaacgggaaatgaaagatgccctcttactgtggtgcaatctcgcaatgagctcgacaaagggattggaacaatcatcttgtccacatatcgaat

SEQ ID NO: 253654 - DNA, 352 bp, Glycine max
gaaagctgttaacctatttcccaacaaaacattggctaagcagttgtttctagttgatgcatttaggaaaaatccagtttccgatttgcttgattgaggcatattcagtattctgcaagggttgtcaatactacatttttacatgctactgttattattatgtagatatatgagttatagttctttgaggtcttattgagtctatcctgaagccatgcgaaatgagatcggaattcctcgcggaattccaatatcacattttcaagaaataatgtggctaagatgttcatatatgaattggaattatttgttttcttattaggcctatcctgaagccaaaggatatgagatc

SEQ ID NO: 253655 - DNA, 512 bp, Glycine max
  unsure (1)..(512): unsure at all n locations
caggtatctgacgagcggggtaacggagacattatagaagagctatgacgtcgcatgcacgcgtacgtaagctcggaattcggctcgagccggtgtgcaccggtcggctcgtcccttctgccggcgatgcgctcctgtccttaactggccgggtcgtgcctccggtgctgttactttgaagaaattagagtgctcaaagcaagcctacgctctgtatacattagcatgggataacaccacaggattctgatcctattgtgttggccttcgggatcggagtaatgattaacagggacagtcgggggcattcgtatttcatagtcagaggtgaaattcttggatttatgaaagacgaacaactgcgaaagcatttgccaaggatgttttcattaatcaagaacgaaagttgggggctcgaagacgatcagataccgtnctagtctcaaccataaacgatgccgacccaggatcagccgattgtggttttaggaactccgtggcaccttatgaan

SEQ ID NO: 253656 - DNA, 406 bp, Glycine max
gaatgttgctgttaaggatctcaagcgtggttatgttgcctcgaactcaaaggatgatcctgccaaggaggctgctaacttcactgcccaggttatcatcatgaaccatcctggtcagattggaaatggctatgcccctgttcttgactgccacacttcccacattgctgtcaagtttgctgaactcatgaccaagattgacaggcgatctggcaaagagcttgagaaggaacccaagtttttgaagaatggtgatgctggttttgttaagatgattccgaccaaacccatggtggttgaaactttctctgagtaccccccacttggtcgctatgctgtcagggatatgcgtcaaactgttgctgtgggagtcatcaagaacgtggagaagaaggatcctactgga

SEQ ID NO: 253657 - DNA, 342 bp, Glycine max
cgctgcaattggcaacggagctgggcgtatttgacgtgttgcaagaagcgggggctaagctctctgcgaaagagatagcatccaagctttcctgcgacaacaaccctgaagcagactcaatgctggatcgtcttctagcccttctagcctctcacttcattcttaactggtctctcattctcgaccaccaaaacctggggacctttcagaggctctacaccatcactcccgtcgccagattctttgctcgcaattctgatggggtgtccttgggacccttgatggccttgcttcaagacaagatctttctacatagctggtcggagctgaaagattcaattc

SEQ ID NO: 253658 - DNA, 378 bp, Glycine max
gaaaaaagttacctgtttgcgatctcattacaatctccccagtttctaatctcagctaagaaaaaccaaaagatgtctctgattccaggtttcttcggtgcccgaaggagcaacgtcttcgatccattctcactcgacatttgggatcccttcaaggattttcatgttcccacttcttctgtttctgctgaaaattctgcattcgtgagcactcgtgtggattggaaggaaaccccagaggcacacgtgttcaaggctgatattccagggctgaagaaagaggaagtcaaggttcagattgaagatgatagggttcttcagattagcggagagaggaacgttgagaaagaagacaagaacgacacgtggcatcgcgtg

SEQ ID NO: 253659 - DNA, 395 bp, Glycine max
ctgaatcgaacacacgtgagtatgtctgatcacgaagaccatgcagactacgcagacaatgaatcctttgcaaagcgtaggttcagggataggtccaaggaggcattgtccaaacaagccgttaagttagccaaacaagctgaagagcatgaaaggttcatcaacaaggtgactcatcttttgggggttcttggctttggttggttttgcttcatctttggggcaaggccacaagccgttcccttggtatattgtttgttctatgtggtatttgttcctctccgttggatatattacaggttcaagaaatggcattactatctcctggatttttgctattatgccaatacaatcttcttggtttacctccttttctacccaagcaatgaaaagct

SEQ ID NO: 253660 - DNA, 519 bp, Glycine max
aggggaagctttgtgtagtagaagcatgtattgtatactcgagagacaagcttgcatgcctgcacgtcgactctagaggatcccctcggggaattccaattccacattttcaagaaataaggaggcaaaaatgttcatatatgaattggaattatttgttttcttattaggcctatcctgaagccaaaggaaatgagatcggaattcctcggggaattccaattccacattttcaagaaataaggaggcaaaaatgttcatatatgaattggaattatttgttttcttattaggcctatcctgaagccaaaggaaatgagatcggaattcctcggggaattccaattccacattttcaagaaataaggaggcaaaaatgttcatatatgaattggaattatttgttttcttattaggcctatcctgaagccaaaggaaatgagatcggaattcctcgggggtaccgagctcgaattccctatagtgagtcgtattaaattcgtaatcatgtcataactt

SEQ ID NO: 253661 - DNA, 367 bp, Glycine max
aagcagatgtctaatggtaggtttgtggctcctgaggacaaggcgagtttatggtcacaacttcattatgtttcgtgtaataatctggaaatgcaagaagcttatcttgtcaatctcgtaaatgtgttacgagaattgtatttgcacagtccaaaagaagctcgccaattgaaaaggaaagctctctctcgtattgaatggctgcaaaaagctgatgtgcctaccataacacagattgaagagtttcattcgatgcagaggatgatgaatgctcctgattcaaatgataatattgatctactgttgagcattgatttggtgggtttacaaggagcaagtaaaagctttttcaaaccaggattgtttt

SEQ ID NO: 253662 - DNA, 356 bp, Glycine max
  unsure (1)..(356): unsure at all n locations
gttgtggatggagctacatgtcaaaaacagggagaagcgtctcacatcccttcgtcaacacctctccgactcttctcgttctctccatggcttcgtcctccttcaaggtggcgaggagcaaacgcgttacgacaccgatcacttggagctcttcaggcaagagagttacttcgcttacttgtttggagtcatagagcctggattctatgcagctattgacgttgcaactgggaattctatcctatttgctcctaggttaccttctgagtatgctgtttggttgggggagattaagccactctcctactntaaggaacactacatggttaccacgtgtngcttctcagatgaaaatg

SEQ ID NO: 253663 - DNA, 390 bp, Glycine max
  unsure (1)..(390): unsure at all n locations
attttctcaagagaaactttaagcagatgtctaatgttttgtgggtggctcctgaggacaaggcgagtttatggtcacaacttcattatgtttcgtgtaataatctggaaatgcaagaagcttatcttgtcaatctcgtaaatgtgttacgagaattgtatttgcacagtccagaggaagctcgccaattgagaaggaaagctctctctcgtattgaatggctgcaaaaagctgatgtgcctaccatagcacagattgaagagtttcattcgatgcagaggatgatgaatgctcctgattcaaatgataatattgatctactgttgagcattgatttgttgggtttacaaggagcangtaaagcttttcaaacaagattgtttttgatga

SEQ ID NO: 253664 - DNA, 365 bp, Glycine max
  unsure (1)..(365): unsure at all n locations
aaaaaccgccacacctttccgccatggcgctgccatggccggtttttaacaacactgattattatcattggtacctccaatgttgtaatttagcaactcaccactaagctgcattccaatttttctcttaaacaattgggtaaacttgactattttcttggtattgaaatcaaattggtggctgatgggactattctactgactcaaagcaaatatatcagagatttgctttagaaaaccaaaattgtagaagcacaacctatttctttccctatgactgctaattacaagttgaccaaagttggctcgaatntattcagtgattcatctctctataggtctgttgttggtgctcttcaatacac

SEQ ID NO: 253665 - DNA, 338 bp, Glycine max
cttttactttgtttaaaagtaaaagagcatataataggtagggccatcagactacggcggtccactggctgatgcttcgctgtcaggtccagagagcacgctcagctaaacgagtgccacatccaggggctcaatgccctcacaccggatgaccgcatagagacagacggagggctccttctgacagggcaccctaagcccacgccattgcagcgtgccagcgtcgccctctctcgctgcaccctcaatcgggacgcccttcatagaccttactacaacaactggccccaggcaatctacatgctacacggtaagggaattagtggcgcgatataccc

SEQ ID NO: 253666 - DNA, 423 bp, Glycine max
caaaacaaaaagtttacgttacaaatcgcataataaccgtcctaagtttattgagagaattttgcaagtgtgagaaacatggcatctcgtcaaaacaacaagcaagagcttgatgaaagagcaaggcaaggagagactgttgtcccgggtggaactggtggcaagagcctggaggctcagcaacaccttgctgaaggaaggagcaagggagggcaaacaaggaaggaacagctgggtacagaagggtaccaggaaatgggacgcaaaggagggttgagcactgtggacaaatcaggagaagaacgtgctcaagaggaaggcattggcatcgatgagtccaagttcaggactggtaataacaagaaccagaatcagaacgaagaccaagattagtgataatgtaacacccttcactaacatgtg

SEQ ID NO: 253667 - DNA, 423 bp, Glycine max
aaagcatataagagatggggttagaagggaaggaaacgccgtcgtttatgagggattttctcgataagtgtggtggctgcgccgttattgacggtggttttgccactgaacttgaaaggcatggggcggacctcaatgacgaactctggagtgccaaatgccttattagctccccacatcttgtccgaagggttcacctagattacctcgatgcaggagcaaacataatattaacagcatcttatcaggccactattcaaggttttgaggccaaagggttctctagagaagaaggtgaaactatgcttagaagaagtgtggagattgcacgtgaggcacgagaaatttattatgataggtgcaccaaagattcttctgactttatgagagatgaaagatataggaaacgtcccattttaattg

SEQ ID NO: 253668 - DNA, 409 bp, Glycine max
gatgagaacaataagctgattctggcaatattggacaatcaaaatcttggaaaacttgcagaatgtgcccagtaccaagctcagcttcaaaagaatttgatgtatttagctgcaattgctgatgcccagcctcaaacaccagccatgcctccacagatggcaccacaccctgccatgcaaccaggattctatatgcaacatcctcaggctgcagcagcagcaatggctcagcagcagcagcaaggaatgttcccccagaaaatgccattgcaatttggcaatccacatcaaatgcaggaacaacagcagcagctacaccagcaagccatccaaggtcaaatgggactgagacctggaggaataaataatggcatgcatccaatgcacaatgagggcggcaacagcggtg

SEQ ID NO: 253669 - DNA, 334 bp, Glycine max
ctcgagccgttcgagccgattcggctcgagccgacagccgtgggctgcggtgaccaccacttgggaatgggatgggtttccagcacgtgcaaggggaccattgctgattgcctgggaggggaggagtacgagttggattcggagatcaaccggcgcatcttagccaccaacaagtacatcagctacgttgcgctgcagaggaacactgctccctgctctcgccgcggcgccttctactacaattgccgacccggagcacaggccaatccttacagccgtggctgcagcgccattacgaggtgcaggagctgaattttccctttttttaaaattt

SEQ ID NO: 253670 - DNA, 382 bp, Glycine max
  unsure (1)..(382): unsure at all n locations
agccccccaaaaatgaagagcaccatcttctttgctctcgttctcttttgtgccttcaccacctcatacctaccttcagccatcgctgatttcgtgctcgataatgaaggtaaccctcttgaaaatggtggcacatattatatcttgtcagacataacagcatttggtggaataagagcagccccaacgggaaatgaaagatgccctctcactgtggtgcaatctcgcaatgagctcgacaaagggattggaacaatcatctcgtccccatatcgaatccgttntatcgccgaaggccatcctttgagccttaagttcgattcatttgcagttataatgctgtgtgttggaatcctaccgagtggtctgttgtggaggatct

SEQ ID NO: 253671 - DNA, 329 bp, Glycine max
cccatactccatggaatggagtatgggttgattccaacttgacaactaagcttgtcccttttcttcataatgaacccatactccatggaatggactggtttggccaatagattactgagtaagggcaacgatattctgtgttgcgattatgctagttttgatggtttgattaccaagcaagttatgagcaaaatggcagaaatgataaacagtctttgtggtggtgatgcaaaattgatgcgtgaaaggacacacctgctgttggcttgttgttcaaggatggcaatttgtaagaaagatgtttggagagttgaatgtggaatcccttc

SEQ ID NO: 253672 - DNA, 535 bp, Glycine max
  unsure (1)..(535): unsure at all n locations
cggaatgtgatctttactagaccatcgataagtatactatagtagatctatgacgtcgcatgcacgcgtacgcaggctattcatctcgagcccatactctatttaacggaggatgggttgattccaactggagaactaagcttgtccctttgcttcataatgaacccatactccatggaatggactggtttggccaatagattactgagtaagggcaacgatattctgtgttgcgattatgctagttctgatggtttgattaccaagcaagttatgagcaaaatggagatatgataaacagtctntgtcgtggtgatgcagacttgatgcgtgaaaggacacacctgctgttggcttgtagttcagggatggcaatttgtaagacagatgtttggacagttgaatgtggaaaccctttctggatttccgcttacagttattttgcaataaccattttttaaatgaggatgcttcatttagatataagctagtgaaaaaatttacttgcgcccaggcctaagaacttcccaagccn

SEQ ID NO: 253673 - DNA, 337 bp, Glycine max
  unsure (1)..(337): unsure at all n locations
ctcgagccgaaatgaccaagttcacaatcctcctcatctgtcttctcttctgcatcgcccacacttgcagcgcctccaaatggcagcaccagcaagatagctgccgcaagcagctccagggggtgaacctcacgccctgcgagaagcacatcatggagaagatccaaggccgcggcgatgacgatgatgatgatgacgacgacaatcacattctcaggaccatgcggngaagaatcaactacataaggaggaacgaagganaagacgaagacgaagaagaagaaagacacatgcagaagtgctgcacagaaatgagcgagctgagaagccccaaatg

SEQ ID NO: 253674 - DNA, 330 bp, Glycine max
ctcgttcctagaagaccaagttcacaatcctcctcatgtctcttctcttctgcatcgcccacacttgcagcgcctccaaatggcagcaccagcaagatagctgccgcaagcagctccagggggtgaacctcacgccctgcgagaagcacatcatggagaagatccaaggccgcggcgatgacgatgatgatgatgacgacgacaatcacattctcaggaccatgcggggaagaatcaactacataaggaggaacgaaggaaaagacgaagacgaagaagaagaaggacacatgcagaagtgctgcacagaaatgagcgagctgagaagcc

SEQ ID NO: 253675 - DNA, 283 bp, Glycine max
cagcctattacgccccttccttctacaacaaacacacactccctctcgagccgtgttatcttctcgagatgcaacacttgcaacgcctacaaacggcactaccagcaccatacctagagtaagcacctccatcgatagaacctgacgccctgctacaagcacatcatggataatatccaatgccagtcatgatcacaaatgatcataatgactaccacaaccacattctcatgaccatgcactgaagaatcaactacctcacgagcaactaacgaaaagacca

SEQ ID NO: 253676 - DNA, 321 bp, Glycine max
ggaagaccttatcatctccgaatttcattttcagaagcctctttgggaatcaaatccgaagcatgatgcattgtgcgagcattgtctcggctccgtcctacgcgttcccttttctctctggctccgcttccactactccaactgcgatctcgctcactaagcgcagttggaagccacctccgagcatggcaaaaggcccagtcagagccaccgtttctatagagaaagagaccccggaggccaatcgtcccgaaacgtttctcagaggagtggacgaggcccagtcttccacttcggttcgggcccgcttcgagaagatga

SEQ ID NO: 253677 - DNA, 398 bp, Glycine max
cttgaactcgtttatatactatggcaaatgacgtggttctgcgagagttctgtccaaatccattctggatgaaggtcaggattgcacttgctgaaaagggtatcaaatatgagtccaaagaagaggacttgcagaacaagagccctttgctcctcaaaatgaacccggttcacaagaaaattccagttctcatccacaatggcaaacccatctgttaatctctcgttgctgttcagtacattgaagaggtctggaatgacataaatcccttgttgccttctgacccttaccagagagctcaagctagattcttggctgactttgttgacaataagatattttatcttggaagaaagatttggacatcaaatggagaagacaaaaaatctgcccaaaaa

SEQ ID NO: 253678 - DNA, 373 bp, Glycine max
gaagtttttaaattttgtgaggttcattatgaagaaaagggacaagcttagttgtcaagttggaatcaacccatattctatggaatggactggtttggccaatagattactgagtaagggcaacgatattctgtgttgcgattatgctagttttgatggtttgattaccaagcaagttatgagcaagatggcagaaatgatcaacagtctttgtggtggtgatgaaaaactgatgcgtgaaaggacacacctgctgttggcttgttgttcaaggatggcaatttgtaagaaagatgtttggagagttgaatgtggaatcccttctggatttccgctcacagttatttgcaatagcatttttaatgagatgctc

SEQ ID NO: 253679 - DNA, 376 bp, Glycine max
  unsure (1)..(376): unsure at all n locations
tgataacactcgccatacccgttaacanacccggtagatgtgagagtttcttcctatctagcactcaagctcaacagtcctacttgcaagggttcagcaagaatattctagaggcctcatacgacaccaaattcgaggagataaacaaggttctgtttggtagagaggaggggcagcaacaaggggaggagaggctgcaagagagtgtgattgtggaaatctcaaagaaacaaattcgggaactgagcaaacatgccaaatctagttcaaggaaaaccatttcttctgaagataaacctttcaacttgagaagccgcgaccccatctattccaacaagcttggcaagttgtttgagaataccccagagaaaaaccc

SEQ ID NO: 253680 - DNA, 345 bp, Glycine max
tgacaaatttgcttgctactgtcttgatcttcctaattgtgatatacttccaaggtttccgcgtggtcttgcctgtaagatcaaagaatgctcgtggacagcagggttcatatccaatcaaattgttttatacctccaacatgcccatcattcttcagtctgcccttgtttccaatctctacttcatctcccagctgctccaccgtaagtacagcggaaacttcttcgtagatctattgggaaaatggaaggaatctgaatatggaggtggtcagtctgttcctgttggtggcattgcatactatatcactgcaccatccagcttagctgatatggcagccaatc

SEQ ID NO: 253681 - DNA, 522 bp, Glycine max
gacggagggctatgtgtagtataagatgtattgtcataacggagagactagcttgcatgcctgcaggtcgactctagaggatcccctcggggaattccaattccacattttcaagaaataaggaggcaaaaatgttcatatatgaattggaattatttgttttcttattaggcctatcctgaagccaaaggaaatgagatcggaattcctcggggaattccaattccacattttcaagaaataaggaggcaaaaatgttcatatatgaattggaattatttgttttcttattaggcctatcctgaagccaaaggaaatgagatcggaattcctcggggaattccaattccacattttcaagaaataaggaggcaaaaatgttcatatatgaattggaattatttgttttcttattaggcctatcctgaagccaaaggaaatgagatcggaattcctcgggggtaccgagctcgaattccctatagtgagtcgtattaaattcgtaatcatgtcataactggt

SEQ ID NO: 253682 - DNA, 410 bp, Glycine max
acacatggcataaagcaagctcatcctagagttttaaaaatggcagcagcctcctccatggctctctcttccccatccttggctggcaaggccgtgaagctgggcccatcagcccccgaagtcgggagggtcagcatgaggaagaccgtcaccaagcaggcctcctccggaagcccatggtacggcccagaccgcgtcaagtacttgggcccattctctggcgagcccccgtcctacctcactggcgagttcccaggtgactacggctgggacactgctgggctttcggccgacccagaaaccttcgccagaaaccgtgagctcgaagtgatccactccaggtgggccatgctcggggccttgggctgcgtcttccccgaactggtgtcccgcaacggggtcaagtttgg

SEQ ID NO: 253683 - DNA, 298 bp, Glycine max
gcgagaacacttttgattttagatcctagcacgcagagcttgggtcggttttctattgaccttgttggtggatgaattttagtggacagaactggagattggatcacacttatacaaaattctccagttagtaacttgttgatgagttgctgcttggaagaaaggctgcttaatggctaagattgcgacgtctgagaatgcaacaagcacaaggagtgattgggcctcattggtacaagggactctaacaaacagcaacaatgcatagcattttgatgcatgtcagtggactaaatcg

SEQ ID NO: 253684 - DNA, 400 bp, Glycine max
taagaaatgaagagtactatcttctttgctctctttctagtttgtgccttcaccatctcatacctgccttcagccaccgctcagttcgtgctcgacactgatgatgatcctcttcaaaacggtggcacatactatatgttgccagttatgagaggaaagggcggtggaatagaagtagattcaactggaaaagaaatatgccctctcactgttgtgcaatcacccaatgagctcgataaggggattggactagtctttacatctccattacatgccctttttatcgccgaaggctatcctttgagcattaagtttggttcatttgcagttataacgctgtgtgccggcatgcctactgagtgggctattgtggagagagagggtctacaagctgttaaac

SEQ ID NO: 253685 - DNA, 408 bp, Glycine max
tgcgatctgttgagtactatcttctttgctctctttctagggtgtgccttcaccatctcatacctgccttcagccaccgctcagttcgagctcgacactgatgatgatcctattcaaaacggtggctcatactatctgttgccagttctgagaggaaagggcggaggaatagaagtcgattcaactgggaacgaaatgtgccctatcactgctgagcaatcacccactgagctcgatcaggggattggactaggctctacatgtacattacatgccctttttatcgtcgtaggctatactctgagcattaagtccgagtcattagcagctataacgctgagtgcccgcatgcgctactgagtgtgctattgtggacagagagggtctacaagctgataaacttgctgg

SEQ ID NO: 253686 - DNA, 343 bp, Glycine max
atgggaactatttttcctcctcactctctctctccactcctcaacatcaaaccttcaccctcaagaattctcttggctccctctccgcaacccaagtcaaattctctcttttgctcgaaacccattgtttctagtctcagaaagaaccaaactttatctcctaaaccttcatcaggcacaagctggttggctcatgctcaacaaggcctagcagctttggctatctccttggcactcaactttagcccagttttgttcaatggcaatgcactggcatctgagtttgatgtacttaacgagggtccacccaaagattcttatgtgtttgatgatgcaagagtgc

SEQ ID NO: 253687 - DNA, 408 bp, Glycine max
gagagagcgagcagtttcagacacagagagaggggtttgggattggagggattgacgctgcgtctcttcctcttctctttcgatccatccctcattcctaatcctccaatccaaccacctcagcctcacactcacatatacacatatctgaacgcgtatcgtccctcctatggcttcaaagcgcatcctcaaggatctcaaggacttgcagaaagacccaccaacttcttgcagcgctggtccagtagctgatgacatgttccattggcaagcatcaataatgggtcctgctgatagtccttatgctggacgtgtattcctagtcactattcacttccatacggattatcctttcaagccttctaaggttgcctttaggactaacgtgtttcacccgaacatcaatag

SEQ ID NO: 253688 - DNA, 400 bp, Glycine max
aacattctgttgacggatacattgactcaaaccggggaaggtttactagatgcttaccttatttatgcggacacacactctgctctcttggagctctttcaccaccccacattctatggactaaagtataataccagaacatgttgtggctatggaggcggtgtctacaactttaaccctaaaattttgtgcggtcatatgctagcaagtgcttgtgatgaaccccagaactatgtgagctgggatggcatccatttcacagaagcagcaaacaagattgttgcacatgccattctaaatggctctcttttttatcctcctttccctcttcataaacactgtgatctccaacctattggttgatccagtgcttgcagctaggggtctttcgtatttaccg

SEQ ID NO: 253689 - DNA, 405 bp, Glycine max
  unsure (1)..(405): unsure at all n locations
ctgccagcgtggcagagagagaaactagagagagagagagagcgaacacaccgttcatttctccttcgtcgtcgtcgtcgtttcgccgtcgcattttccggcgaggtttctctgttttgtttaaccgaaatggaggatccgtacgttctcggttggattctgtgctccgtcctgagcctcttggcgctctacagcctggccttcggcggagcgggccgtcgccgcgcttcgccggagaagaggaacgagttatcggagaccgtgacgacctncgccggagaatgcagatcggagaaacgaaacggcgacgctgacgtcatcattgtcggagccggcgtcgccggcgcctgcctgtcgcacactctcggaaaggatgggcgtcgagtacacgtcattgaaagagac

SEQ ID NO: 253690 - DNA, 346 bp, Glycine max
  unsure (1)..(346): unsure at all n locations
gaagatccctagctcgtaacatgcaaacaccagtgccaacagcaacggcaatacactgagagtgacaagcgaacatgcttgcaacaatgtgacagtatgaagcaagagcgagagaaacaagtcgaagaggaaactcgcgagaaggaagaagaacatcaagagcagcatgaggaggaggaagaccaaaatccctacgtttttgaagaagataaggatttttcgaccagagtcgaaacagaaggtggcagcattcgggttctcaagaagttcactgagaaatccaagcttcttcaaggcattgagaatntncgtttggccatcttagaagctagagcacacacgttcg

SEQ ID NO: 253691 - DNA, 348 bp, Glycine max
gaagatccctagctcgtaacatgcaaacaccagtgccaacgagcaacggcaatacactgagagtgacaagcgaacatgcttgcaacaatgtgacagtatgaagcaagagcgagagaaacaagtcgaagaggaaactcgcgagaaggaagaagaacatcaagagcagcatgaggaggaggaagaccaaaatccctacgtttttgaagaagataaggatttttcgaccagagtcgaaacagaaggtggcagcattcgggttctcaagaagttcactgagaaatccaagcttcttcaaggcattgagaatttccgtttggccatcttagaagctagagcacacacgttcgt

SEQ ID NO: 253692 - DNA, 348 bp, Glycine max
aacaaactgttgagggatacattgactcaaaccggagaaagtttagtagatgcttcccttatttatgcggacacacactctgctctcttggagctctttcaccaccccacattctatggactaaagtataataccagaacatgttgtgggtatggaggcggtgtctacaactttaaccctaaaattttgtgcggccatatgctagcaagtgcttgtgatgaaccccagaactatgtgagctgggatggcatccatttcacagaagcagcatacaagattgttgcacatgccattctaaatggttctcttttttatcctcctttccctcttcataaacactgtgatctc

SEQ ID NO: 253693 - DNA, 438 bp, Glycine max
ccgaacggctttatccttctgctcctggcaggactgacccgggctggaactctcaccgggcaggatgtggctacttattacgcctatactgaaacccaagggcatgagatcgtaattcctccggtaattcctatttcacattttcaagaaataaggaggcaaaaatgttcatatatgaattggaattatttgttttcttattaggcctatcctgaagccaaaggaaatgagatcggaattactcggggaattccaatttcacattttcaagaaataaggaggcaaaaatgttcatatatgaattggaattatttgttctcttattaggcctatcctgaagccaaaggaaatgaaaacggaattcctaggggaattccaattccacattttcaagaaataaagaagcttaaatgatcgtatatgaaatggcattatttt

SEQ ID NO: 253694 - DNA, 408 bp, Glycine max
cactcactcacactctcttctgtcatagctgtaccacgtttgtcttctccatctcagcctctgtcccaacaccattctcatggctgctctagctctagcactgcttcttctggctttcactggcacttcaagtgctacatggtgcgtttgcaaggatggaagcgacgcgatcctgcagaaaaccttggactatgcttgtggagctggtgctgactgtaatcctctccaccaaaacgggccttgtttccagcccaacaccgttagggcccactgtaactacgccgtgaacagctacttccaaaggaagggtcaagctcaagggtcctgcgactttgcgggaacagccattgttactgcatctgaccccagctctggcggtacttgtgtctacccttctagtgtcagcgc

SEQ ID NO: 253695 - DNA, 391 bp, Glycine max
atcgagaaagagaagaagcatatatatcaaaatggctgcagagatggagagggagtcattgataactgaagctcctaatgcaccagttactgcacagagaagggtcagaaatgacttagaaaattctctaccaaaaccatacttgccaagagcattgaaagctcctgatacgggtcacccaaatggaacagcaggccacaggcaccacaacttatctgttcttcagcagcattgtgctttttttgatcaagatgacaatggaatcatttacccttgggaaacttacatggggctgcgttctattggatttaatgttgttgcatctgttattatggctattgttatcaatgttggattgagttaccccactctacctaattggttcccttct

SEQ ID NO: 253696 - DNA, 307 bp, Glycine max
ggccgctttgctggcgtaattacataggctacgtatatcctgacgagcatcagagaaatcgacgctgcaatcagtaagctgcgatcctgacgggactataactgtaccaagcagggtcagatgtgagctacaatatgcgctactatagtcatactctgaagagcatcgaagctgtgatctgttacctaaagaagcatgacgctacatatacctcacgctatatgttattcaacatcattgtacgtcgttcgatcaaaactacgctgtgatcacgtacccttgggaaactcacatcgctctgcgttat

SEQ ID NO: 253697 - DNA, 409 bp, Glycine max
ggaagagtgcgaaagaaagatcgttctcgatgacagaggggaacggtgacaaaactctgcgaaagatcgcagacgcattcaatgaccttgcaaacgttttcaccgattctcagagcgcagaagcagaggtcaaggttgctcccttctctcatgcctgctctctcgtctcccctctcttcggttgcttgggcgtcgccttcaagttcgccgaaatggattacgtcgccaaggttcatgatctggcaaaggcgttcaagtctattcagaatctgcagtctctgattgagctggatgtgcaagctaacactgttaggaaaggaagtagccatacgcggaatctgctcagagtgaaacgcggacttgacatggtcagagtgctccttgagcagattctagttacagagtatgt

SEQ ID NO: 253698 - DNA, 387 bp, Glycine max
gttgaattgaatcaggttgtctatgctaaaacagacataactgctggggtcaaaaaggctttactgcattcaatcattgaaaagggaatggcctggaattcaatactgcccaaaaatggattaacttggaatgcgaggaagtgatacgtgtgagcttgtctttgagaattgctttgttccagacgaaaatattcttgggaaagaagggaaaggagtctatgtcatgatgtctgggctggatctggagagacttgttttggcagctggtcctcttggtattatgcaagcatgtcttgatgtcgtccttccttatgttcgacaacgagagcagtttggtcgtcctattggggagtttcagtttatacaggggaaaattgctgacatgta

SEQ ID NO: 253699 - DNA, 410 bp, Glycine max
caaaagtgttccacttgagtgaaaagtagtgtgttaagaactaaacaatttttcaatggcgtccaagaaacaagaggagcgagctgaggcagctgcgaaagttgctgccaaagaactcgaacaagtcaacagagaaagaagagaccgtgatttcggtgttgttgctgaacaacaacaacaacatcatcaggaagatcaacaaaaacgtggtgtaatctggtccatgtttaaggcggtgcaagacacctactagatcgccaaggaagctgtcgttgtcaagaaagaagctactaataacgcgtacagtaatacagaggttattcacgatgttaacattcagcccgacgacgtgtcgactacgggggaagtaagggacatatcatccacatagactgatgatatctacgatt

SEQ ID NO: 253700 - DNA, 205 bp, Glycine max
aagaaatgaagagtactatcttctttgctctctttctagtctgtgccttcaccatctgatacctgccttcagccaccgctcagttcgtgctcgacactgatgatgatcctcttcaaaacggtggcacatactatatgttgccagttatgagaggaaggggcggtggaataaaagtagattcatctggaagagaaatatgccctct

SEQ ID NO: 253701 - DNA, 284 bp, Glycine max
tggaaatgcaagaagcttatcttgtcaatctcgtaaatgtgttacgagaactgtatttgcacagtccagaggaagctcgccaactgagaaggaaagctctctctcgtattgaatggctgcaaaaagctgatgtgcctaccatagcacagattgaagagttccattcgatgcagagaatgatgaatgctcctgattcaaatgataatattgatctactgttgaacattgattttgtggtttacaaggagcaggtaaaagcttttccaaataagatcgttttgatg

SEQ ID NO: 253702 - DNA, 377 bp, Glycine max
tggaaatgcttgaagcttatcttgtcaatctcgtaaatgtgttacgagaactgtatttgcacagtccagaggaagctcgccaactgagaaggaaagctctctctcgtattgaatggctgcaaaaagctgatgtgcctaccatagcacagattgaagagttccattcgatgcagagaatgatgaatgctcctgattcaaatgataatattgatctactgttgagcattgatttgttgggtttacaaggagcaggtaaagcttttccaaataagattgtttttgatgataagctcgtgttggctaacacacaggaattctttgatggaaattttccagtggattcttggttaccaatttttgtgaatggtctttatcct

SEQ ID NO: 253703 - DNA, 403 bp, Glycine max
ctcacttctgatgaacatgatgatagactcactcagttgactaatcaatctcctgaataccctccaaatttcagggttataatacaagagtatattcaagagatggaaaagctgtgctttaagctgttggagcttatagctttgagcttaggcattgaagcgaataggtttgaagaatttttcatcaaaaaccaaactagctctattcgactcaaccactatcctccttgcccttaccctggccttgctcttggagttggtcgacacaaggaccctggtgccttgaccattcttgcacaggatgaggttggaggacttgaagtgaaacgtaaagctgatcaagagtggataggagtgaaacccaccctagatgcttatattatcaacgttggtgatattattc

SEQ ID NO: 253704 - DNA, 422 bp, Glycine max
cactttccttagttcaatatggggaagcccttcttcactctgtctctttcttccctttgcttgctactcttgtcgagtgcatgctttgctattacctccagcaagttcaacgagtgccaactcaacaacctcaacgcgttggaacccgaccaccgcgttgagtccgaaggtggtcttattgaaacatggaactctcaacaccctgagctgcaatgcgccggtgtcactgtttccaaacgcaccctcaaccgcaacggcctccacttgccatcttactcaccttatccccaaatgatcattgtcgttcaagggaagggagcaattggatttgcatttccgggatgtcctgagacgtttgagaagccacaacagcaatcaagcagaagaggctcaaggtcgcagcagcaactacaagacagtca

SEQ ID NO: 253705 - DNA, 422 bp, Glycine max
gcgctgcttcactattctccctatggagtttaatcttgtggtccgtcaaaagtttttaaattttgtgaggttcattatgaagaaaagggacaagcttagttgtcaagttggaatcaacccatactccatggaatggactggtttggccaatagattactgagtaagggcaatgatattctgtgttgcgattatgctagttttgatggtttgattaccaagcaagttatgagcaagatggcagaaatgataaacagtctttgtggtggtgatgaaaaattgatgcgtgaaaggacgcacctgctgttggcttgttgttcaaggatggcaatttgtaagaaagatgtttggagagttgaatgtggaatcccttctggatttccgctcacagttatttgcaatagcatttttaatgagatgctca

SEQ ID NO: 253706 - DNA, 422 bp, Glycine max
ctcgagccgaatcggctcgagcttaagcttgctactgagttgccacactgcataccttaggtcttccgaattcgaagttaatttgcaagatggctaaggaaaaggctcagatcaacattgtggtggttggtcatgtggaccctgaggaggcaaccaccattaacgagctgaagaagcctgttgtggagaaagaagctccagggcatgccatatgagggcatgcacgtacggcctctgaggggaaccagaaaattatgttaacaaaataatctggaaccctaatgtatcagtgtcatcatcagagtgtagtttaagctagctttgctatggttacgttctttgagatgagagtcttgatgaacagtgccattcttatgtattgctttccttgaaagttaatgcatgcttcttatcttcaggct

SEQ ID NO: 253707 - DNA, 232 bp, Glycine max
gcaatggtgagagagtgtttgatggagagctgcaagagggaggggtgctgatcgttccacaaaactttgcggtggctgcaaaatcccagagcgataactttgagtatgtgtcattcaagaccaatgatagaccctcgatcggaaaccttgcaggggcaaactcattgttgaacgcattgccaaaggaagtgattcagcacacttttaacctaagaagccagcaggccagcca

SEQ ID NO: 253708 - DNA, 404 bp, Glycine max
  unsure (1)..(404): unsure at all n locations
tgataagcttgtgttggctaacacacaagaattctttgatggaaattttccagtggattcttggttaccaatttttgtgaattgtctttatcctgtaagtcaattaccttcagaagctgtcgttgtaaatgtcacatgtggtagtggacgtgtggtttacccaccactgcttggattagttctgcagttaacaatcgctcctcagatatcaacaaaaggattcgcacagcacttgggaaaggtaagaaaattgtttttcttactagagttgacccttttccagtagctttactggctgttctttttggtgttaagaatgaaattctgagttctaacgccactaatcctatgctgacgcgacttcttgaaaactgtaagagtctcaaatatctggntgatgagtg

SEQ ID NO: 253709 - DNA, 409 bp, Glycine max
tcgagacttgctagcatgcatgcacgcctactctagatgatcctctcggtgaagtccaattcctcattttcaagaaatactgaggcaaaaatgtgcatatatgaatcggaattatttggtgtcttattaggcctatcctgaagccaaaggaaatgagatcggaattcctcggtgaattccaattgcacattttcaagaaataaggatgcaaaaatgctcatatatgaattggaattatttgtggtactcattaggcctatactgaagccaaaggagatgagatcggaattcctcggagaattccaattccacattttcaagaaataaggaagcgaagatgttcatatatgaattgcaattatttgttttcttattaggcctatcctgaagccaaaggaaatgagatcgg

SEQ ID NO: 253710 - DNA, 359 bp, Glycine max
cgctgcaattgtcaacggagctgggcgtatttgacgtgtggcaagatgcgggggctaagctgtctgcgaaagagatagcatccatgcttacctgctacatctaccctgaagcagactcaatgctggatcgccttctagcccttctagcctctcacttcattcttaactggtctctcattctcgaccaccaaaacctggggacctttcataggctctacaccatgaataccgtcgccagattctttgctcggaattctgatggggttttcatgggacccttgatggccctgcgttaagacaagatctttctacataactggtcggagcttaaagattcaattcgggaatggggtattcca

SEQ ID NO: 253711 - DNA, 242 bp, Glycine max
cactatcctagtataccttaataaataatttaagatactatgatgagagcacggttcccattactgttgctgggacttgttttcctggcttcagtttctgtctcatttggcatcgcttactgggaaaaagagaaccgctgacacagcaagtgtctccagagccgcaatagcgacagagactcatgcaggaaccaagcatgccacgctcgttgcaacctacctaacgtggagaaagaagaatg

SEQ ID NO: 253712 - DNA, 528 bp, Glycine max
gggggaatggtttcattatgaaggcaaagaatattgtaaagctcacagcttgcatgcctgcaggtcgactctagaggatcccctcggggaattccaattccacattttcaagaaataaggaggcaaaaatgttcagtatatgaataggaattatacgatgaattattaggcctatcctgaagccaaaggaaatgagatcggaattcctcggggaattccaattccacattttcaagaaataaggaggcaaaaatgttcatatatgaattggaattatttgttttcttattaggcctatcctgaagccaaaggaaatgagatcggaattcctcggggaattccaattccacattttcaagaaataaggaggcaaaaatgttcatatatgaattggaattatttggtttcttattaggcctatcctgaagccaaaggaaatgagatcggaattcctcgggggtaccgagctcgaattccctatagtgagtcgtattaaattcggaatcatgtcataactggttcctgggg

SEQ ID NO: 253713 - DNA, 383 bp, Glycine max
agacaacaagaagtttacatttgcagggaaggacaacattgtgagttctctggacaacgttgctaaggagcttgcctttaactatccttctgagatggtgaacggagtattcgaccgaaaggagagtttctttttcccttttgagttgccgagagaggagcgtggtcgtcgcgctgatgcgtgagaggtttagaacaatcaagaaaaggtgtgcatgtggctgaagatcacggggaatgtattaagcttcagagactctttaaattaaattttctgtattttgtgttatatgttactagttctttaaattagccagatggagtttatgtgtatctaaatgcagggatgctaatggaataaaatggccacttgtattgttagct

SEQ ID NO: 253714 - DNA, 389 bp, Glycine max
caacacccatgccgctgttgccgcaacaagaacgcttatatcatgggtggccatactcggtcttgcttcaatattcctctatgccaatatgcttagacttttgggcaaggaaccaccgaacttgttggggttggaagtgagtgaaaaaacaacaacgagaatagcacacacagttcgagcatggattgaagaaggaataaggtggttgttccttgtgggcgcagagaaagagtggcccgtgtttgtgggggctgtggctggattgttatcactatcttatttaggaagttgcatggacctcctaacactagtttatatgggtacgttagtgggaatggcagttccattaacttatgtgaagaacgaggacaagattaaaaggtttgtgg

SEQ ID NO: 253715 - DNA, 408 bp, Glycine max
aatcggtcggcactgatattaagaagcatttatacacctagaaatgagagcactactggtcgtatcttctacttggggctttaacttatacctacctttcggcaacggccaagacgtgcttgacgtggatggcgatccgattcggaacgggttcatataccacggtttggcggcaattagaagaaaccgtggccgaatagaacgagccgcacttgggaaagacacttggcctataactggaatggcaatctcccaatccaaactctaaggggttagaaattaagttggaatctgcatacccggcctattacataaacgaaaccctaattttgcaaataaagttcagttacccacagcagtgtgaaagaaagaatccttggtgggccatttctaaggatatatctgaag

SEQ ID NO: 253716 - DNA, 410 bp, Glycine max
  unsure (1)..(410): unsure at all n locations
ctcgagccgttccattctctctgtgtatttccctacctgtcccttcaagatgcagatcttcgtcaagaccctcaccggcaagaccatcacccttgaggtggaaagctctgacaccatcgacaacgtcaaggccaagatccaggacaaggaaggaatccccccggaccagcaacgtctcattttcgccggaaagcaacttgaggacggccgtacccttgctgactacaacattcagaaggagagtactcttcacctcgtcctccgtctccgtggtggcatgcagatcttcgttaagacactcaccggcaagaccataaccctagaggttgaaagctccgacaccatcgataacgtcaaggccaagatccaggacaaggagggtatccncccggaccagcaacgtctcatct

SEQ ID NO: 253717 - DNA, 404 bp, Glycine max
ctcgagccgtttcattctctctgcgtatttccctacctgtggcttcaagatgcagatcttcgtcaagaccctcaccggcaagaccatcacccttgaggtggaaagctctgacaccatcgacaacgtcaaggccaagatccaggacacggaaggaatccccccggaccagcaacgtctcattttcgccggaaagcaacttgaggacggccgtacccttgctgactacaacattcagaaggagagtactcttcacctcgtcctccgtctccgtggtggcatgcagatcttcgttaagacactcaccggcaagaccataaccctagaagttgaaagctccgacaccatcgataacgtcaaggccaagatccaagacaaggagggtatccccccggaccagcaacgtc

SEQ ID NO: 253718 - DNA, 337 bp, Glycine max
tgagatgctcattagatatagctatgaaaaattactgcgccaggctaaagctccaagtatgtttttacaatctttcaaaaattttgtttctttgtgtgtgtatggtgatgataacttaattagtgttcatgaatatgtcaagccttactttagtggttctaaattgaaaagctttctagctggtcataatatcaccattactgatggtattgacaaaactagtgcaactttgcaatttagaaagttagcagattgtgattttctcaagagaaactttaggcagatgtctaatgttttgtgggtggctcctgaggacaaagggaagttatggtcacaa

SEQ ID NO: 253719 - DNA, 379 bp, Glycine max
tggtccttaaacactcatcagtcatcaccatggccaagctagttttttccctttgttttctgcttttcagtggctgctgcttcgctttcagttccagagagcagcctcagcaaaacgagtgccagatccaaaaactcaatgccctcaaaccggataaccgtatagagtcagaaggagggctcattgagacatggaaccctaacaacaagccattccagtgtgccggtgttgccctctctcgctgcaccctcaaccgcaacgcccttcgtagaccttcctacaccaacggtccccaggaaatctacatccaacaaggtaagggtatttttggcatgatatacccgggttgtcctagcacatttgaagagcctcaacaacc

SEQ ID NO: 253720 - DNA, 407 bp, Glycine max
gctacttcggctccatcttctccgatctcctcaaactctatgagcgcagaaccaagcctctatcaccatggggaagacacatggaatgggagctgcccgcaagctgaagtctcaccgtaggagacaaaggtgggctgacaagtcatacaaaaagtctcatctgggaaatgaatggaagaagccttttgctggttcatcccatgccaagggtattgttcttgaaaagattggtattgaggctaagcagcccaactctgccattcgaaaatgtgccagggttcaactcatcaaaaatgggaagaagattgctgcatttgtgccaaatgacggttgcttaaattatattgaagagaatgatgaagtcttgatagctggatttggacgaaaaggtcatgccgtgggtgata

SEQ ID NO: 253721 - DNA, 347 bp, Glycine max
catgaaggaaggaagcagcattatcaacacgacatcggtgaatgcatacaagggaaatgcgaaactattggactacacgtccacgaagggagcaattgtggcctatacaaggggacttgctcttcagttggtgagtaagggaattcgggttaatggggtggctcctgggcctatttggaccccattgataccctcctctttcaaggaggaagaaacggctcaatttggtgcccaggtgccaatgaagagagctggccagcctattgaggttgctccgtcttatgtttttcttgcttgcaaccaatgctcctcttacataactggacaagtccttcaccccaatggtg

SEQ ID NO: 253722 - DNA, 385 bp, Glycine max
tcggggaattccaattccatattttcaagaaataaggaggcaaaaatgtgcatataatgaattggaattatctgctttcttattaggcctatcctgaatccaaaggaaatgagatcggaattcctcggcgaatgccaactccacatgttcaagatacatagtctcaccattcgtcatatatgtgatgtctttattcgttcctgtagaagccctatgctccatcctgaacattttccacatgactttcaacattcttgtgagtgtcgcactgtacaatgtatgttactcaatctactacttcaatgcaatgcttgatctttaccaatgcagtagtattatcttatctctggttttgacttattgtgtaattctcttgatgcaagtt

SEQ ID NO: 253723 - DNA, 214 bp, Glycine max
aactattaactcgcattcaccccttcctaaaccccgaaatccgctccagaaaaaaattaaagatattctcaacttaaaaaaaaaaaaaaaggggaaaaaaaaaaaaaaaaaaaaaaaaaaaaaaaaaaaaaaaaaaaaaaaaaaaaccaaaaaaaaaaaaaaaaaacaaacaaaaaaaaaaataaaaatatacccaaaaaataaaattattaaa

SEQ ID NO: 253724 - DNA, 318 bp, Glycine max
gttcaatatcctagtataccttaataaataatttaagatactatgatgagagcacggttcccattactgttgctgggacttgttttcctggcttcagtttctgtctcatttggcattgcttactgggaaaaagagaaccccaaacacaacaagtgtctccagagttgcaatagcgagagagactcgtacaggaaccaagcatgccacgctcgttgcaaccttcttaaggtggagaaagaagaatgtgaagaaggtgaaattccacgaccacgaccacgaccacaacacccggagagggaacctcagcaacccggtgag

SEQ ID NO: 253725 - DNA, 331 bp, Glycine max
cttgtactgtgcatgtaactgaggttgaatgggaccaatagaaagaagcagctcacatgggtaaggcagaggagtatgtcgtgtatctcaatcatgctgaggaactgcatttcatgaccccaaagtctgaaccactccaatttactattcaaccttgcacttttgagatctacaactttgtcccagttgaaaagctaggtggcagcatcaaatttgcaccaattgggctcacaaacatgttcaacagtggagggacaattcaagaattggagtgcgttgaggaaggtgcaaaggttaacgttaaaggtgatgggagattccttgcttactc

SEQ ID NO: 253726 - DNA, 375 bp, Glycine max
ctctttctccgagaacaaaacaaaaacaaataaaaatccgcgattcgctcttctcttggaaaagtgaaatccagaagtacgaacgaaagacatgagatcagcgatttagaagtgagagaagatggggttgtcgttcacgaagctgttcaccaggttgtttgcgaagaaggaaatgaggattctgatggtgggtctcgatgctgctggtaagacaaccatcttgtacaagctcaagcttggagaaatcgtcaccactatgcctaccatcggatgtaatgctgagactgtggagtacaagatcatcagcttcactgtgtgggatgttggtggtcaggacaagatccgtccactgtggaagcattatttccagaacac

SEQ ID NO: 253727 - DNA, 290 bp, Glycine max
aattgatgaggcacttgctaaagaaattcgagaatttagaagccccacagatggggagacaaggatgttttatgaaatagtggttgcgcccagctatacagagaagggacttgagattctctgtggaaagtctaagactctaaggattcttgaagcgaagaagaatgaagctggaaagctttcactcagacaagttggtggaggatggttagctcaggattcagatgacttaaccccacaggacatcaagttcaacgtagtctctgagaaggctccacaggatgatgagc

SEQ ID NO: 253728 - DNA, 366 bp, Glycine max
gatgctcattagatatagctatgaaaaattattgcgccaggctaaagctccaagtatgtttttacaatccttcaaaaattttgtttctttgtgtgtgtatggtgatgataacttaattagtgttcatgaatatgtcaagccttactttagtggttctaaattgaaaagctttctagctggtcataatatcaccattactgatggtattgacaaaactagtgcaactttgcaatttagaaagttagcagattgtgattttctcaagagaaactttaagcagatgtctaatgttttgtgggtggctcctgaggacaaggcgagtttatggtcacaacttcattatgtttcgtgtaataatctggaaat

SEQ ID NO: 253729 - DNA, 390 bp, Glycine max
ctgaatcgaacacacgtgagtatgtctgatcacgaagaccatgcagactacgcagacaatgaatcctttgcaaagcgtaggttcagggataggtccaaggaggcattgtccaaacaagccgttaagttagccaaacaagctgaagagcatgaaaggttcatcaacaaggtgactcatcttttgggggttcttggctttggttggttttgcttcatctttggggcaaggccacaagccgttcccttggtatattgtttgttctatgtggtatttgttcctctccgttggatatattacaggttcaagaaatggcattactatctcctggatttttgctattatgccaatacaatcttcttggtttacctccttttctacccaagcaatgaa

SEQ ID NO: 253730 - DNA, 136 bp, Glycine max
tttctttcgcttgttcgtttgtttaattcaataaaggaaattaggcatgaccctcttgttgagtatgctctgcctatttgaaaatttccacacctcttttaattgtcgtaatgatgtgtgaagtgtgtgttatttt

SEQ ID NO: 253731 - DNA, 58 bp, Glycine max
aaaaaaaaaataaaaaaaaaaaaaaaaaaaaaaaaaaaaaaaaaaaaaaaaaaaaaaa

SEQ ID NO: 253732 - DNA, 387 bp, Glycine max
cttgaactcgaatattcactatggcagatgaggtggttctgctagatttctggccaagtccatttgggatgagggtcaggattgcacttgctgaaaagggtatcaaatatgagtccaaagaagaggacttgcagaacaagagccctttgctcctcaaaatgaacccggttcacaagaaaatcccggttctcatccacaatggcaaacccatttgtgaatctctcgttgctgttcagtacattgaggaggtctggaatgacagaaatcccttgttgccttctgacccttaccagagagctcaggctagattctgggctgactttgttgacaataagatatttgatcttggaagaaagatttggacatcaaagggagaagaaaaagaag

SEQ ID NO: 253733 - DNA, 317 bp, Glycine max
cttgtactctttttatttactaaaacagcatatgatattcaggtggagttcttaccaagtccattttggatgatggtcatgatttctcttgctgaaaaaggtattaaaaatgagtccacacaagaagactctcttaacaagagccctttgttcctcaaaatgaaccccccttacaagaaaaaccccgatctcatacacaattacgcacacacttttgaataactcgatgctattcaaaacacttaggaaatctctaatgacccaaatccctagttgacttctgacacttatcacaaagctcatactaaatatttggc

SEQ ID NO: 253734 - DNA, 269 bp, Glycine max
ctagtggaagcaactagttgtatcaaaatatgagtgttattaatagctttttgtgtatctaaatataagggtatgcttgtgttttcttttgtttttgcaaccacccttttgcttgagtggccactaggctcctgcatgtgcatttttatttttcttgttttggggtcacaactgccaaagcctagttgagtgtgtagctgttgtattttgtcttctacacatattgaataaaatgtgtgaaaccctattttgtatagggatgctaaaaa

SEQ ID NO: 253735 - DNA, 417 bp, Glycine max
atccttttcctgataaatgactgaactttaaggccacttgccatagagttgagtttgccacatcctcagggagatcaatctggtgcttttagtcaagtttttctgcctgcagatgaaggtgttgaaagttctatttggctgctagcaaaggcttatgtagttgtgaatgactcgtgctatcatcaacttgtcagccattggttaaacactcatgcagttgttgagccattcatcatagcaacaaacaggcatctcagtgttgttcaccctatttataaactccttcaccctcactatcgtgacaccatgaacataaatggccttgctcggttatcactggtcaacgaccgtggcgttttagaacaaacatttttgtggggaaggtattctgtggaaatgtctgctgtaatttacaag

SEQ ID NO: 253736 - DNA, 327 bp, Glycine max
ggaaatggctgaagcacaactacgagaccagcatggcaaccctgtcccactcaccgatcaatacggtaatccggttatcttaactgacgagcgcggtaatcccgtccaactcactggtgtcgctaccaccgctaccggcacagcaggttctgggtttgggtcctatggtaccggtgcttacggtggtggtgcaagtgcaaccaccgttgcagatcttttggcaacccaaccaaggagtggcagggaggctagagagcttcgtcgttcctccagttcaagctctagctcgtctgaagatgaatggcaaggtgggaagaagaagaaagg

SEQ ID NO: 253737 - DNA, 388 bp, Glycine max
caagaaataacgaagcacaaggctgcatatataaattggaatgatttgcacacttattaagcctatccttaagccaaaggaaatgagatcggaattcctctgggaattccaattccacattttcaagaaataaggaggccaaaatgttcatatatgaattggaactatttgttttcttattaagcctatcctgaaaccaaaggaaatgagatcggaattcctccgggaattccaattccacattttcaagaaataaggaggcaaaaatgttcatatatgaattggaattatttggtatcttattaagcctatccttaaaccacaagaaattagatccgaaatcctctggtgtacccagcttcaatttcctatttttgagtccatttaa

SEQ ID NO: 253738 - DNA, 402 bp, Glycine max
  unsure (1)..(402): unsure at all n locations
gtgagaacaccattgaattttgatcctagcaagcagagcttttgtcaattttctattgaccttcttggtggaggaattttagtggacaaaactggagattggatcacacttatacaaaattctccaattagtaacttgttgagagttgctgcttggaagaaaggctgtttaatggttaagattgtgatgtctgggaatgcagcagtcaaaaggagtgattgggcctcattggtacaagtgtttctaacaaacagcaacagtacagagcattttgatgcatgtaagtggacaaaatcggaaccacattcctgggaattgatcttcccaatagaggtatgtggtcctaataatggttntgaaatgtggagttctgagtgggcaaatcaaacttcatggcatttg

SEQ ID NO: 253739 - DNA, 367 bp, Glycine max
gcaagactagtccactacccgtgcttaaggaaatcttccgaactgatggtgaacaggcccttaagtttactcctactaaagtaattcaagtgagtaagtctgcatggatgactgatgaagaatctgcaagagaaatgcttgctgctgtaaatccaaacttgattcgctgtcttaaggatttcccttcacgaagcaagctaggtagccaagtctatggtgatcatactagtcaaatcaccaatgatcacctagagcccaacttataagggctcactgtagatgatgcaattcactacaagagattgttcctactcgatcatcatgacccaatcatgccctatttgaggcgaatgaatgcgacctccac

SEQ ID NO: 253740 - DNA, 390 bp, Glycine max
agaacctgtcaatcttcagtttggtttttatgggatcagtgcatggccaagtgatggtggcactagtcgtgctggaagtgttgatgagtctagagctgatgggactgatactggtagtagatatgtatcctcttgctgtagctcgccaaggatgtcggatgttgctgcaaaggagctcaaggaagatttctcagtgcatggtagtgatgaagagattgacgatcaaccagaggtgggcagtgatgaggattttagtgatgatggcggcaaacatgcccttgaagaggtaggatcagttgatgaggaatcaacaaaatccgacgaagagtatgatgatcttgcgatgcaagacgtgctggaaactggatattggtcagatgatgaagagta

SEQ ID NO: 253741 - DNA, 419 bp, Glycine max
  unsure (1)..(419): unsure at all n locations
tgcacaaattatatctgctagcattgccggcgatttagttcttgctacagcatattcacatgagctgccacgatatggtcttgaagtaggacttacaaattatgcagcagcttattgcactggtctcctgttggcccgaagagtcctcaaaacacttgaaatggatgaggagtatgaaggaaatgttgaggctactggagaggattattcagtggaacctgccgagagcaggaggccattccgtgcactccttgatgttggtcttgttaggactacaacaggaaatcgcgtctttggtgcccttaagggagctctggatggnggtttggatattcctcacagcgacaagaggtttgctgggtttgataaggagaagaaagagcttgatgctgaggttcatcgcaaatatgtttttggtg

SEQ ID NO: 253742 - DNA, 438 bp, Glycine max
cggtatttctagatatataactaaaaagaatcgacagaatacgcctagtcgattggaattgagaaaattttgtccccgttgttgcaaacatacaattcacgcagaaataaagaaatagatcaaattgatcgcttgtgtgttacccttcgaaccaaagaacttaacatgtaaaatgatctatttttcttatctatatagatagatctatctgtattctatcatttacagttgaatatatacgaatatcagtatataacaacatatattaaaaaaatgacaacgtatattaaaaaagtcagaatataaaaaccaatcctttatagtattcttggaattaaatgggttttttgaaatagggattaataacccatggaaaaatctaggcgactctctatgaaatccaagcgatctttttcgaggcgattgcccccgatccaa

SEQ ID NO: 253743 - DNA, 327 bp, Glycine max
caagtacttccttacaatcaaaaccaacaacaactatggcaagttatcaaaagcactacgatgatcagggtcgcaaggttgacgagtatggcaacgttgagaagcaaaccgacgaatacggcaaccctgttcatgctgctagtgtcacctatgtagccaccagaactgctgctggtggttacagtgatgacattaataagcaacatgataccaccaatgcctacggcgtagacactggtagacagcattctagtggtggctacgatggtgacactaataaacatcatggaactactggtggctataatgatgacaccaatagacatc

SEQ ID NO: 253744 - DNA, 341 bp, Glycine max
gaacgagggagctcttcttctaccacacttcaattcaaaggcgatagtgatactggtaattaatgaaggagatgcaaacattgaacttgttggcctaaaagaacaacaacaggagcagcaacaggaagagcaacctttggaagtgcggaaatatagagccgaattgtctgaacaagatatatttgtaatcccagcaggttatccagttgtggtcaacgctacctcaaatctgaatttctttgctattggtattaatgccgagaacaaccagaggaacttcctcgcaggttcgcaagacaatgtgataagccagatacctagtcaagtgcaagagcttgcat

SEQ ID NO: 253745 - DNA, 187 bp, Glycine max
aaaaaaatttaaaaaaaaaaaaaaaaaaaaaaaaaaaagaaaaaaaaaaaaaaaaaaaaaaaaaaaaaaaaaaaaaaaaaaaaaaaaaaaaaaaaaaaacaaaaaaaaaaaaaaaaaagaagaaaaaaaaaaataaaggggtgcccacagattagatactaggccatccagaatttaaaacagatac

SEQ ID NO: 253746 - DNA, 360 bp, Glycine max
aaacagtttgctgtgaaatagactgaggaatggtgcccaaaagacgagaacctgaaataccaggattgagcccatatgcacacatattgtttatttcacagcaaactgtttggaatcaaatggcaacagtgagaacaccattgaattttgattctagcaagcagagtttttgtcaattttctattgaccttctcggtggaggaattttagtggacaaaactggagattggatcacacttatacaaaattctccaattagtaacttgttgagagttgctgcttggaagaaaggctgtttaatggttaagattgtgatgtctgggaatgcagcagtcaaaaggagtgattgggcctcattgg

SEQ ID NO: 253747 - DNA, 410 bp, Glycine max
caaaacaaattgtttacgttacaaatcgcataataaccgtcctaagtttattgagagaattttgcaagtgtgagaaacatggcatctcgtcaaaacaacaagcaagagcttgatgaaagagcaaggcaaggagagactgttgtcccgggtggaactggtggcaagagcctggaggctcagcaacaccttgctgaaggaaggagcaagggagggcaaacaaggaaggaacagctgggtacagaagggtaccaggaaatgggacgcaaaggagggttgagcactgtggacaaatcaggagaagaacgtgctcaagaagaaggcattggcatcgatgagtccaagttcaagactggtaataacaagaaccagaatcagaacgaagaccaggataagtgataatgtaacaccct

SEQ ID NO: 253748 - DNA, 416 bp, Glycine max
agaagaaatggcattgacgagaccatatgcaccatgagacttcgccacaacattggccagacttcatcacctgacatctacaaccctcaagccggtagcgtcacaaccgccaccagccttgacttcccagccctctcgtggctcagactcagtgctgagtttggatctctccgcaagaatgcaatgttcgtgccacactacaacctgaacgcgaacagcataatatacgcattgaatggacgggcattgatacaagtggtgaattgcaacggtgagagagtgtttgatggagagctgcaagagggacgggtgctgatcgtgccacaaaactttgtggtggctgcaagatcacagagtgacaacttcgagtatgtgtcattcaagaccaatgatacacccatgatcggcactcttgc

SEQ ID NO: 253749 - DNA, 546 bp, Glycine max
  unsure (1)..(546): unsure at all n locations
attaggnaattagggtagaggtctgttatgaatgggggggtattagtcagagctcacaagcttgcatgcctgcaggtcgactctagaggatcccctcggggaattccaattccacattttcaagaaataaggaggcaaaaatgttcatatatgaattggaattatttgttttcttattaggcctatcctgaagccaaaggaaatgagatcggaattcctcggggaattccaattccacattttcaagaaataaggaggcaaaaatgttcatatatgaattggaattatttgttttcttattaggcctatcctgaagccaaaggaaatgagatcggaattcctcggggaattccaattccacattttcaagaaataaggaggcaaaaatgttcatatatgaattggaattatttgttttcttattaggcctatcctgaagccaaaggaaatgagatcggaattcctcgggggtaccgagctcgaattccctatagtgagtcggattaaattcgtaatcatgtcataactggttcccgggtgaaaatt

SEQ ID NO: 253750 - DNA, 264 bp, Glycine max
taggaggcaaaaatgtggataggtgaattggaataatgtgatttcttattaggcctatcctgaatccaaaggaaatgagaacggaattcctcggggaattccaattccacatgttcaagaaataatgaggcaaaaatggtcatatatgaattggaagtagttgttttcttattaggcctatacaggagccaaaggaaattggatcggaattcctcggggaattccaatttcacattgtcaagaaataaggaggcaaaaatgttc

SEQ ID NO: 253751 - DNA, 402 bp, Glycine max
aaataattgatctttgaaaatgcagggaggaaagaaagctggagagtccatcaaggaaacagctgcaaacattggtgcttctgccaaggctggcatggagaaaaccaaggccactgtccaggagaaggcagaaagaatgacggcacgtgatccgatgcaaaaggagttggcaacccagaagaaagaggcaaagatgagccaggcagagctggacaagcaagcggcgcgtcagcataacacggcggcgaagcaggctgccacggcagggcacatgggacaacccatggggacccatcagacgtcagctatgcccggtcatggaaccggacagcccacgggccatgtcaccgaaggagtggtgggctcacaccctattggaaccaacagaggcccgggtgggac

SEQ ID NO: 253752 - DNA, 418 bp, Glycine max
tcggtgaattccaattctacattttcaagaaataaggaggcgaaaatgttcatatatgaattggaattatttgttttcttattaggcctatcctgaagccaaaggaaatgagatcggaattcctcggggaattccaattccacattttcaagaaataaggaggcaaaaatgttcatatatgaattggaattatttgtttttttattaggcctatccttaatctatttgtaaagtgttcggaattctttgttttattcttttttctactattgtttttattattttttgtttattttatttatttttttaatttattttatattattttttttatgttttttatttttttttatttttttttttaaatttttctttattttttatttttttttttatttttattttttattatttattt

SEQ ID NO: 253753 - DNA, 338 bp, Glycine max
gtgcggttttctttgttggtgttgctgggaactgttttcctggcatcagtttgtgtctcattaaaggtgagagaggatgagaataaccctttctacttgagaagctctaacagcttccaaactctctttgagaaccaaaacggtcgcattcgtctcctccagagattcaacaaacgctccccacaacttgagaaccttcgagactaccggattgtccagtttcagtcaaaacccaacacaatccttctcccccaccatgctgacgccgatttcctcctctttgtccttagcgggagagccatacttaccttggtgaacaacgacgacagagacttcta

SEQ ID NO: 253754 - DNA, 418 bp, Glycine max
atatcctagtacaccgtattaaagaatttaagatatactatgatgagagcgcggttcccattactgttgctgggagttgttttcctggcatcagtttctgtctcatttggcattgcgtattgggaaaagcagaaccccagtcacaacaagtgcctccgaagttgcaatagcgagaaagactcctacaggaaccaagcatgccacgctcgttgcaacctccttaaggtggaggaagaagaagaatgcgaagaaggtcaaattccacgaccacgaccacaacacccggagagggaacgtcagcaacacggtgagaaggaggaagacgaaggtgagcagccacgtccattcccattcccacgcccacgccaacctcatcaagaggaagagcacgagcagaaggaggaacacgaatggcatc

SEQ ID NO: 253755 - DNA, 416 bp, Glycine max
cttttctgccttagcagagaagttgcgttctgattatgactttggtcacactctgaatgccaaactccttccaagaggagagtcatcagtttctgggcccgtagttaggctgttcaagccattcgatgaactttttgttgacttccaggatttcaatgtggaagctctagagaagtttgttgaggaatctagtacccctgttgttactgtctttaacaatgaaccgagcaatcaccctttcgttgtcaaattcttcaacagtcccaacgcaaaggcaatgttgttcatcaacttcactgccgaaggtgctgaagctatcaaatcaaaataccgtgaagctgctgagcaatataaacaacagggtgtcagctttttggtgggagatgttgagtctagtcaaggtgctttccaggttt

SEQ ID NO: 253756 - DNA, 418 bp, Glycine max
ttcgtcgagaacactcttttaacttcaacacctttaattggctgaacgaaattcagccacagaatatcaaagggagcgaagatgagtcaggagcagccaaggcgcccccaaggccaagaccccatcaaatacggcgacgtttttgacgtctacggtgaccttgcacagatgcccattgcaccggaagatgctgccatgatgcaaagcgcggaagctcgagtactcggaaaaacccaacccggcggagcttcttccgtcatgcaatccgccgccacaaggaatgaacaggctggtcttgtcggtcaccaggacgtcaccgacatcaccggcgaccatggcgtcacagtcacagaaactacattccatggaagacgcataataaccgaggctgttggtggccaggtagtggaacagtatg

SEQ ID NO: 253757 - DNA, 416 bp, Glycine max
  unsure (1)..(416): unsure at all n locations
cgtgaaagatgatgcgagacaagaaacggggttgaggaaaatatctgcaccttgaagcttcacgagaacattgctcgcccttcacgcgctgacttctacaaccctaaagctggtcgcattagtaccctcaacagcctcaccctcccagccctccgccaattccaactcagtgcccaatatgttgtcctctacaagaatggaatttactctccacattggaatctgaatgcaaacagtgtgatctatgtgactcgaggacaaggaaaggttagagttgtgaactgccaagggaatgcagtgttcgacggtgagcttangaggggacaattgctggtggtaccacagaacttcgtggtggcggagcaagccggagaacaaggattcgaatacatagtattcaagacacaccacaacgc

SEQ ID NO: 253758 - DNA, 420 bp, Glycine max
ggagtcctcaaagatctatgcttacctcttcctctgcatgatctttctctcttccgccactcccattctcggttgtggctactgtggcaaaccccccaaaaagcacaagcctggtaaaacaccaaagacacccaaaacacccgttgttaagccaccagtcaccatccctcccattaatgttcctcccgttgttcttccaccaatagtgaagcccccaggtattctccctccaattccaattattaacccaccaaccacaccagggaagggagggaacactccatgcccaccaccaaagtctcctgcgcaggctacgtgccccattgacacgctcaaacttggtgcctgtgtggatcttcttggagggttggttcacattggtttgggtgaccctgttgcgaaccagtgctgccccgtgct

SEQ ID NO: 253759 - DNA, 376 bp, Glycine max
ttccttcacttgcagcactgttgcatcatcatcttcattgcaaaaccctaaacttcaccttcaaccatgaccacacaagtaccaccacacagtgtccaagtccacacaacaacacaccgctacgaagctggcgtcgtcccccccggagcccgtttcgaaccgccgcgttatgaagccggcgtcaaagcgccctccatttaccattccgagagaggtccaacgactttccaggtcctcgtcgtcctcgccggcctcccggtcggtggcatcctgctcctgctggcgggattgaccctggcaggaaccctcaccggactggcagttgccacgccggtcttcgtcctcttcagcccggtgctggttccagccacggtcg

SEQ ID NO: 253760 - DNA, 287 bp, Glycine max
ctgctgcactttggcttctgctgcgctttcaggtccagagggcagccgtagccatacgagtgccacatccacacactcaatgcactcgacccagatcaccgtatcgagtcagaaggagggctcatagatacatggaaccctaacagcaagccattccaatgtgccggggttgccctctgtcgctgagaccctcaacctgtacgaccttcggagaccttcctacgccaacagtgcccaggaaatctacatccaacaacgtgacggtatttttcgcatgatatacccgg

SEQ ID NO: 253761 - DNA, 378 bp, Glycine max
ctgcttttcagtggctgctgcttcgctttcagttccagagagcagcctcagcaaaacgagtgccagatccaaaaactcaatgccctcaaaccggataaccgtatagagtcagaaggagggctcattgagacatggaaccctaacaacaagccattccagtgtgccggtgttgccctctctcgctgcaccctcaaccgcaacgcccttcgtagaccttcctacaccaacggtccccaggaaatctacatccaacaaggtaagggtatttttggcatgatatacccgggttgtcctagcacatttgaagagcctcaacaacctcaacaaagaggacaaagcagcagaccacaagaccgtcaccagaagatctataacttc

SEQ ID NO: 253762 - DNA, 384 bp, Glycine max
cactaacaattccttcacttgcagcactgttgcatcatcatcttcattgcaaaaccctaaacttcaccttcaaccatgaccacacaagtaccaccacacagtgtccaagtccacacaacaacacaccgctacgaagctggcgtcgtcccccccggagcccgtttcgaaccgccgcgttatgaagccggcgtcaaagcgccctccatttaccattccgagagaggtccaacgacttcccaggtcctcgccgtcctcgccggcctcccggtcggtggcatcctgctcctcctggcgggattgaccctggcaggaaccctcaccggactggcagttgccacgccgctcttcgtcctcttcagcccggtgctggttccagccacggtc

SEQ ID NO: 253763 - DNA, 410 bp, Glycine max
ctttcgcaccttcgaaaatcaattttctgtcttctctgcgtcttcttcctctatcaatcgttttccatggctcgtaccaagcaaaccgctcgcaaatccaccggtggaaaggctcctaggaagcaactcgccaccaaggctgcaaggaaatctgcaccgacaaccggtggagtcaagaagcctcatcgctatcgccctggaactgttgctcttcgtgagatccgaaaataccaaaagagcacagagcttctgatccgcaagctccccttccagcgtcttgttcgtgaaattgcgcaagacttcaagaccgatttgaggttccagagtcacgctgttcttgcgcttcaagaagctgcggaagcttacttggtgggtttgtttgaggacaccaacttgtgtgcgattcacgc

SEQ ID NO: 253764 - DNA, 407 bp, Glycine max
atcttaaaccgtccaactcttagtaggcgattcatgcctgagaaaggttctgctgagtatgaggagctgaggaagaatccccagaaggcttacttgaagactattacaccaaagtttcagacccttattgacctttctgttatagaaatcttgtcaaggcatgcatctgatgaggtgtaccttggggagagggacaatccaaattggacatctgatacaagagcattagaggcttttaaaaggtttggaaataaactggcacaaattgagaataaactctcagagagaaacaacgatgagaaactgagaaaccgttgtggaccagttcaaatgccttatactctgcttttgccttctagtaaggaaggattaactttcagaggaattcccaacagtatctctatctg

SEQ ID NO: 253765 - DNA, 352 bp, Glycine max
cgaacatttttgctaatgccaaggctggcatggacaagaccaaggccactgtccaagagactgcagaacgagtgacagcgcgtgatccgttgcaaaaggagttggcaacccaaaagacagaggctaagatgaaccaggcggaactggacaagcaggcggctcgtcagtataacacggcggccatacagagcgagaccacggatgtgcacatgggacatgcccaccacaccaccggaaccgggactggaaccgtcacgtattgcaccatcggagaatatggtcagcgcatagtggccgatcagacgtcggcaatgcctggccatggaatcgagcagaccatgggccatgtcac

SEQ ID NO: 253766 - DNA, 364 bp, Glycine max
ctcgagccgctcgagcggctcgagcaagagttgaaggaaatggctgaagcacaactacgagaccagcatggcaaccctgtcccactcaccgatcaatacggtaatccggttatcttaactgacgagcgcggtaatcccgtccaactcactggtgtcgctaccaccgctaccggcacagcaggttctgggtttgggtcctatggtaccggtgcttacggtggtggtgcaagtgcaaccaccgttgcagatcttttggcaacccaaccaaggagtggcagggaggctagagagcttcgtcgttcctccagttcaagctctagctcgtctgaggatgatgggcaaggtgggaggaggaaaaaaggag

SEQ ID NO: 253767 - DNA, 394 bp, Glycine max
gaaggcgaatgaaacgaaggacaagacaatggagaaggctggagagtacacagattatgcttcgcagaaggcgaaagaagccaaggacaaaaaaaccggttccaaggtcggagagtacgcagattatggttctcagaaggcgaaagaaacaaaagatgcaacgaaggaaaaagctggagagtacacagattatgcttcgcagaaggcgaaggaaacgaaggacaagacaatggaaaaggctggagagtacactgattatgcttcgcagaaggcgaaggaaacgaaggacaagacaatggagaaggctggagagtacacagattatgcttcgcagaaggcgaaagaagccaaggacaagacaatggagaagggaggggaatataaagactatgct

SEQ ID NO: 253768 - DNA, 408 bp, Glycine max
gtgacgaattgcatcacacaggctggaattcatgcagctcttgccatggagacccctcagcagaccgacgatttctcatcgtacctgcactcgtatcaggtcgagtatatgtggttgatgtgaaaacaaatccaagggctccatctttgcacaaagttgtcgagcctgccgatatcatacagaagactggattagcttatccacacacatctcactgccttgcttctggtgatataatgatctcgtgtcttggagataaagatggaaatgctgcaggaaatggatttcttcttcttgattctgagtttaatgtgaaaggaaggtgggagaaaccgggtcacagcccactatttgggtatgacttttggtaccaaccacgtcacaataccatgattagcacatcatggg

SEQ ID NO: 253769 - DNA, 407 bp, Glycine max
gctgtagagtaaggctatggtgatttgaaagacaagccatggtggcctaagttgcagacacttgaagaccttgttgaagtttgcctcattatcatatggattgcttcagctctccatgcagccgttaattttggtcagtatccttatggaggtttgataatgaaccgcccaactgcttctagaaggttgcttcctgagaaaggcaccccagaatatgaagaaatgattaataaccatgaaaaggcttatttgagaacaattacatcaaagttgccgactctcattagcctttcagtgatagagatcttgtcgacacatgcttctgatgaggtctaccttggccagaaggacaacccacattggacctctgatcaaaagcattacaagcctttcaaaagtttggaaac

SEQ ID NO: 253770 - DNA, 199 bp, Glycine max
tagtaatttactttcaccacgcgaggggcagccacggggggccggggagacccctcagaggaccgtctaatagttacagcacatgaactcatatgaccataagggaccttgacctaaccaagaacaccacccagggccacgtgtttgcactgaagcaactatgctagcgagatcatacacaagactaccataacctcta

SEQ ID NO: 253771 - DNA, 322 bp, Glycine max
atcttaaattttccaactcttactaggcgattcatgcctgggaaaggttctgctgagtatgacgagctgatgaagaatccccagaaggcttacttgaacactattacgccaaagtttcatacccttattgacctttctgctatagaaatcttgtgaaggcatgcatctgatgaggggttcctcgaggagagggacaatccaaattgacatctggtccatgagcattaaaggcttataaaatgtttgggcataaactggctcaaattgagaataaactctcatagacaaacaacgattataaactgacaaaccgtgctggacc

SEQ ID NO: 253772 - DNA, 369 bp, Glycine max
caccattgaattttgattctagcaagcagagcttttgtcaattctctattgatcttcttggtggaggaattttagtggacaaaactggagattggatcacacttatacaaaattctccaattagtaacttgttgagagttgctgcttggaagaaaggctgtttaatggttaagattgtgatgtctgggaatgcagcagtcaaaaggagtgattgggcctcattggtacaagtgtttttaacaaacagcaacagtacagagcattttgatgcatgtaagtggaaaaaatcggaaccacattcctgggaattgatcttcccaatagaggtatgcggtcctaataatggttttgaaatgtggagttctgagt

SEQ ID NO: 253773 - DNA, 363 bp, Glycine max
tttcaattatcctcaatccctctagcaattggagcatttcttggtgctacagcccagagtgttcagccaatgatcattggtcgcttacttgctggtataggaattggtgttacatctgctatagtaccactatacatatctgagatttcaccaactgaaattcgtggtgcgctaggatctgttaatcaactttttatatgcattgggattcttctggcactggtggctgggctgcctctggcaggaaaccctatatggtggcggtcaatgtttggcattgcaatagttccatctgtgctgttagcactaggaatggcaatttctccagaaagtccacgctggcttgttcagcaaggcaaaatc

SEQ ID NO: 253774 - DNA, 382 bp, Glycine max
cacaaaatgtatcgcgttcttcaccgcgctttctgcaccggcaccgagcccgccaccaccgccaccgtcaccgtttccatcaagtccatttcggaggatctgtacaaggaagtgaagctaaagaatgtggtggagaagttcaagaaagcctcggacatcgaccgcttccgcaaaaaaaccggcatctacgaagacaccgtccgccgcctcgccggcgcccgacgcttccggtggatccgcgacatcctcgagcaccagaagcagtactccgacatctccaacgagggcttctccgcgcgcctcatctccctgtacggcaagtccggcatgaccaagcacgcgcgcaaggtgttcgacgaaatgccgcagcgaaactgcagcc

SEQ ID NO: 253775 - DNA, 374 bp, Glycine max
aagggtatcccctgggacaaacaagatcctggggaagaggctatcgaatcactctcagcagaactcaagctttatgggaagagaggagtctataaagataccaagttgcaggaacaaggtggaaagatatttgaaagagatgggatactatacaactgtgccttctctgtttgtgaccaagggcgaggactgaatgactactgtgtcatgcaactgattgttgtcccagagaatcgtttgcatctgtactttaagaaagggagagttggggatgatccaaatgcagaggagcgattagaagagtgggacaatgtagatgttgctctgaaagagtttgtgaggctctttgaagaaataacaggaaatgagtttga

SEQ ID NO: 253776 - DNA, 264 bp, Glycine max
aaaaaaaaattcaaaaaaaaaaaaaaaaaaaaaggggaacgggtaaaattaacatcaaagccaaaactaataaaaacagcatagaaactttaaagatccatattgaaccatagccctagccaagtttaccacaacagaaacaggtgtctacactgctccaactatggaagagtgagcatggacgagtctaccatagccaccaggaagacgcaaataggcattggatgatctagaataactcgaacgatatcagggacatgaatg

SEQ ID NO: 253777 - DNA, 410 bp, Glycine max
aacttattaacactttccttagttcaatatggggaagcccttcttcactctctctctttcttccctttgcttgctactcttgtcgagtgcatgctttgctattacctccagcaagttcaacgagtgccaactcaacaacctcaacgcgttggaacccgaccaccgcgttgagtccgaaggtggtcttattgaaacatggaactctcaacaccctgagctgcaatgcgccggtgtcactgtttccaaacgcaccctcaaccgcaacggcctccacttgccatcttactcaccttatccccaaatgatcattgtcgttcaagggaagggagcaattggatttgcatttccgggatgtcctgagacgtttgagaagccacaacagcaatcaagcagaagaggctcaaggtcgc

SEQ ID NO: 253778 - DNA, 377 bp, Glycine max
cgagaggaacaccaggtatgttgatgctgttcttaccattcccaaaggaacattgttccccatgtgtggtatgaatttggcattcgatcgtcagctgattggacctgcaatgtactttggactcatgggtgatggccaacctattggacgatacgatgatatgtgggctggatggtgtgttaaggttatatgtgaccatttgggcttgggagtgaagactggccttccatacatctggcacagcaaagcaagcaacccttttgtcaatctcaaaaaggagtacaagggcatcttctggcaagaagaaatcattccattcttccaaagtgccactctttcaaaagagtgcacgtctgtccaaaaatgttacattgaac

SEQ ID NO: 253779 - DNA, 433 bp, Glycine max
cttaaacactcatcagtcatcaccatggccaagctagttttttccctttgttttctgcttttcagtggctgctgcttcgctttcagttccagagagcagcctcagcaaaacgagtgccagatccaaaaactcaatgccctcaaaccggataaccgtatagagtcagaaggagggctcattgagacatggaaccctaacaacaagccattccagtgtgccggtgttgccctctctcgctgcaccctcaaccgcaacgcccttcgtagaccttcctacaccaacggtccccaggaaatctacatccaacaaggtaagggtatttttggcatgatatacccgggttgtcctagcacatttgaagagcctcaacaacctcaacaaagaggacaaagcagcagaccacaagaccgtcaccagaagatctataacttta

SEQ ID NO: 253780 - DNA, 517 bp, Glycine max
agttttagcaggttgtgtatgtaaaagacatattgcaaactcatagaagatctatgacgtcgcatgcacgcgtacgtaagctcggaattcggctcgaggcatctactattatacctacaatgattggccataccattgctatccacaacggaaaagagcatttacctatttatataacagatcgtatggtaggccataaattaggagaattttcacctactctaaatttccgaggacatgcgaaaaatgataatagatctcgtcgttaacgttaattttaacataaatttttaaatcgtaatttataactaaatattacaaaatggaattcttattaaaatgaaattcaaatcatttcttttataaaaaaaaaaaaaattctttaattaaatatttaatgaaattaaatatttaaattaataaaattagtcgtgttttattcgattttttgaattggtttttttttacaggagcttatgcgattgaccgaaaatttaatcaatggacttaaatgggt

SEQ ID NO: 253781 - DNA, 275 bp, Glycine max
aacttcactaatcttgaatgtgctttaaatctagctatgtactagatagtctcgttcaatgttagtgttcaaattgtggatgtgatttctaatattagtctactactctatatgtagaggcctttctttatgtggaataggtataacatgctgttatgcccgttttgtacttgaaaactatcttataatgaataagaatatgtgaattttgagtattaacaaactggtaaatcctactaataattaaattgcatctctatgttcataaacacgag

SEQ ID NO: 253782 - DNA, 415 bp, Glycine max
gttactttcatttgttgtgcaatcttacaagttccaaacttctctattttgttattatttgttctcacttctcacacatacagatttgagccttttatattatcatggcttctaaggtggtttcggttttggttatagcgatgatgttgtttgccatgaactgtaactgcactagtgttggccacatgccttcaaccaaagaggaaggtcacgattttcaggagtctaaagccaagaccacacaaactgcgaacaaggccatggaaactggtaaagagggacaagaagccgcagagtcatggacagaatgggctaaagagaaactcagtgaaggtcttggcttcaaacatgatcaggaatccaaagaatccaccactaacaaagtctctgattatgccactgacactgcacagaa

SEQ ID NO: 253783 - DNA, 439 bp, Glycine max
catccatgctttctgctcctttggattgtgaatctcattttgtgcaaaatgccaaccagcagcagcctaactctcagaatgtggtatctattgaagatgattctgcaaagacactctctgaggagcttgtggatattgaatctgagttgaagttctttcagatgccttatcttgaagggagctggggcgatacttcattggaatccttgctatctggtgacacaactcaggatggtggaaacctcatgaacctttggtgctttgatgacattccttccatggctggtggagttttctgaaccgctttttctttggtctccctgtgtgtaaataaagctacaagttgtttttctctgattttgatttttggtgcatttgttgatctcttgttggacacatccccccatgtgtctgaaaaaaaaaaagttattttcatttt

SEQ ID NO: 253784 - DNA, 380 bp, Glycine max
taaaattcttccaccaagttatgggtttccttgtgttgcttcttttctccctcttaggtctctcttctagttccagcatatcaactcatcgttccatattggaccttgacctaaccaagtttaccacacagaaacaggtgtcttcactgttccaactatggaagagtgagcatggacgtgtctaccataaccacgaagaagaggcacagagacttgagattttcaagaataacttgaactatatcagggacatgaatgcaaacagaaaatcaccccattctcatcgtttaggattgaacaagtttgctgacatcactcctcaagagttcagcaaaaagtacttgcaagctcccaaggatgtgtcgcaacaaatcaaaatg

SEQ ID NO: 253785 - DNA, 280 bp, Glycine max
cagcaaggatgttcccaaagccagaaaggaaagcaacaagaagaagaaaacgaaggaagcaacatattgagtggcttcgcccctgaattcttgaaagaagcgttcggcgtgaacatgcagatagtgagaaacctacaaggtgagaacgaagaggaggatagtggagccattgtgacagtgaaaggaggtctaagagtcacagcttcagccatgatgaagccacagcaagaagaagatgatgatgatgaggaagagcagtcacagctcgtggagacagaca

SEQ ID NO: 253786 - DNA, 542 bp, Glycine max
  unsure (1)..(542): unsure at all n locations
attatgttaagaggagtagaaggtgnatactgataagcaatattgtcactactcggagagactagcttgcatgcctgcaggtcgactctagaggatcccctcggggaattccaattccacattttcaagaaataaggaggcaaaaatgttcatatatgaattggaattatttgttttcttattaggcctatcctgaagccaaaggaaatgagatcggaattcctcggggaattccaattccacattttcaagaaataaggaggcaaaaatgttcatatatgaattggaattatttgttttcttattaggcctatcctgaagccaaaggaaatgagatcggaattcctcggggaattccaattccacattttcaagaaataaggaggcaaaaatgttcatatatgaattggaattatttgttttcttattaggcctatcctgaagccaaaggaaatgagatcggaattcctcgggggtaccgagctcgaattccctatagtgagtcgtattaaattcgtaatcatgtcataactggtttctgg

SEQ ID NO: 253787 - DNA, 409 bp, Glycine max
gaaaggggtggtggctgcttcgaaagcttaataatttgtttatttccagaacatcatagttttcgcagcagcaaactaacaaattactcatatcatataataagatggcccgttctctctcgcaagccaaacgtattggtgtccttgttgctcaatctatctccctaattcccgttcatcggcgaggttacgcagtggcatccgatgtatcggtaagagttggattgggtaatattgggcgaaggaatggaatcgtgggaggtgtagaagagaagcctgatacaagagatggttcaaaagcctactcaactgattgggccccagacccagtaacaggttactataggcccattaaccacacccctgaaattgacccggtggagcttcggcataggttgctccgatcacc

SEQ ID NO: 253788 - DNA, 344 bp, Glycine max
atgcatggttggcacgtactcatatatatgctaaagtaatttacacgctcaagctaaattatgtgaggagtgtattaaacgaaaaaaaaaaagacataaattagagacatcttcagcaaagtgttacggtctaccagaaaagaaattgactttgatttcaagtcttccagactaagaagatcttgagtctaaatacttctaagaggtatcacgttgttgttttattgatgtatcatgtagtttgtgttttctggcctgctgctttaattgattatcttatatcatggctgatgtggctggctgacgggaatattaggctactagatacatgcttaatggcagag

SEQ ID NO: 253789 - DNA, 330 bp, Glycine max
attcaaattttgctctatactacacagtacacacactagaagactaatggcttccatcctgcactactttttagccctctctctttcttgctcttttcttttcttcttatccgactcagtcacctctacaaaaccaataaaccttgttgttctacccgttcaaaatgatggttccacagggctccattgggccaacctccaaaaaagaacccctctaatgcaagtaccagtcctggtggacctcaatggaaatcacttgtgggttaactgtgagcagcagtactcatccaaaacgtaccaagcacccttctgccactccactcaatgctc

SEQ ID NO: 253790 - DNA, 418 bp, Glycine max
gggtgatccaatggcgacccttttccagggattgggagttgtgaacccatcattgtcttcttccaactccaacaacttcctgcttccttctcgaacatccctctctgagagaaaagatggcatatttgtagtcagatctgatgcaagggtaagcagcaaggttctgaaggccggagctcgcaagcatgaattgttggttactaatgcagtcgcaacaaaggaaggcagttctgcggcttctacatcaaaatctgggcatgaacttctcctttttgaggccctacgtgaaggtttggaagaagaaatggagagggatccttgtgtatgtgtcatgggcgaagatgtaggtcactatggacgatcctacaaggtgactaaaggccttgccacaaagtttggggaccttagagttttggac

SEQ ID NO: 253791 - DNA, 417 bp, Glycine max
  unsure (1)..(417): unsure at all n locations
caccacaccactctctctgctcttcttctacctttgaagggtttaaagtattaagatggcagagacattcctatttacctcagagtcagtgaacgagggacaccctgacaagctctgcgaccaaatctccgatgctgtcctcgacgcttgccttgaacaggacccagacagcaaggttgcctgcgaaacatgcaccaagaccaacttggtcatggtcttcggagagatcaccaccaaggccaacgttgactacgagaagatcgtgcgtgacacctgcaggaacatcggcttcgtctcaaacgatgtgggacttgatgctgacaactgcaaggtccttgtaaacattgagcagcagagccctgatattgcccagggtgtgcacggncaccttaccaaaagacccgaggaaatcggtgc

SEQ ID NO: 253792 - DNA, 414 bp, Glycine max
  unsure (1)..(414): unsure at all n locations
cacaaacacacactgaactaaaaaacatcaaaagagacatggctgagcaaaccttcatcatgatcaagcctgatggcgtccaaagaggccttattggcgagatcattagcagatttgagaagaaaggtttctacttgaaaggtttgaaacttgttactgtggaccgtccttttgctgagaagcactatgctgatttgtctgccaagcctttctttagtggtttggtggattacattatctctggccctgttgttgccatgatctgggagggcaagaatgttgttacaactggccgaaagattatcggagccacaaacccaacttaatctgaaccttgaacttatccgggtgactttgccattgacatttgaaaggaatgtatccatggaagtgatgcagtngaaagtgcttaca

SEQ ID NO: 253793 - DNA, 354 bp, Glycine max
caagtttcgtttccaggtttcggcgcaatcggctgctgcttcaaggaaggagagctcgctattctctatcaacaagtaaaatgtcacgtgaagagggtgtcattgcagatgatccagctgctgctgctgctgccatcccaggcgagccaatgtatatcatgactgccttacaacttgtgctcagaaaatctctggcttatggcggtttgacgcgtggccttcatgaaggtgcaaaagtgattgaaaagcatgctgcacaactctgtgttcttgcagaagactgtgaccagcctgactatgttaaactggttaaggccctttgtgcaaagcacaatgttagcctgctgacagttc

SEQ ID NO: 253794 - DNA, 409 bp, Glycine max
ccggcgagcatgcccatcagatgtattctgcattggcaagcgaagcaaggaagcgttgtgaacagccaagtcctgaatgagatctcgcagtgcgtcgaaagcctcaacggcgtcaaagaaggaagatgcaaagcctccctcactttctacagacccaatttacgagaccagtcggtgaccatcgatttcccgcgcgattttctggggatatcgatgctggagcagccgaacaaatactacttcatcattcgcggccagaagattgttctggaggccgattcttctatcttgcttatcatggagaaactccagtcctacaagtccaaagtcgcccttcatttcgagggagtgctgtataaattgggtgactttcagatgagagtcattaaagttgttcccagtcaagcag

SEQ ID NO: 253795 - DNA, 210 bp, Glycine max
  unsure (1)..(210): unsure at all n locations
cttgctctctctctctgtctctctgtctcctccatggccgtctgcttcagtcccaaacaccctgcttacgatgagatgatatacacagcaatcggagctctgaaggagagggatggttcgagcaagcgagccataggaaagtacatagaacaagtctacaaggaccttncacccactcaccctgctttggtgactcaccatctcaaccga

SEQ ID NO: 253796 - DNA, 411 bp, Glycine max
gttctttctctcgcaatcttcactacattcaccgagcatgtgcattcacattgaatatggctgagactacacaatctaatgctgagttgttggagtggcctaagaaagataagcgccgcttcctgcatgttgtgtatcgtgttggtgatcttgatcgcaccattaagttttatactgaatgttttgggatgaagcttttgaggaaaagagatattccagaggagaaatatgccaatgcttttcttggatttggccctgaacaatcccattttgttgtggaattaacatacaattatggggtgacctcatatgatattggaactggatttggacattttgctatcgcaactccagatgtttacaaattggttgaagacatccgggcttagggtggaaatgtcaccagggagc

SEQ ID NO: 253797 - DNA, 402 bp, Glycine max
gtgcggtgctcttcctgtttcttctctctatcctttcctggattggatggtgaaggattttaatattgcagaaggggaggaagatatcagtgcctatgctggctatattgggtctgcattcatgcttggtagatgtttgacatctatgttgtggggaatgatagctgatcgctatggtagaaaacctgttgtgattataagtgttatttctgttgtcattttcaacatactattcggccttagtacaagtttttggatggctgttattacaagactttttcttggatgttcaaatggtgtgatgggcacaatcaaggctttttcttctgaaatatttcgagaagaatatcaacctctgggactctcaaccgtctctgctgcttggggagtaggtttagcact

SEQ ID NO: 253798 - DNA, 421 bp, Glycine max
acttcccaccttatggaaaggattttcagggaggaaaccggacgggtcgattttgctatggaaaaatttcttatgacttaatagttgaacaattgcgtattaaggagtatttgcctgcatatttggatccgaatctcaaatctagtgatcttgttaccggcgtgtgatttgtctacggtgcttcaggatacgatcctttgacacccaaaataacgttagttctatcggtatctactcaactagacatgttcagggaatacataggaaagctgaaaggcattgttggagagagcagaacagactacatcctatccaatagtctttatcttgtggtggcaggtagtgacgacattgccaacacctatgatgttgctcacgccagagttttacggtatgacattacttgttacaccgaccttat

SEQ ID NO: 253799 - DNA, 405 bp, Glycine max
  unsure (1)..(405): unsure at all n locations
gcgagattgataacagctggagaagagacagagctgcttgttggtgttaaaaatgatggggattcaagcttgaatgttattgcgatcaaggctagtgttcaccttccttttgatcaccgtatgctggttcaaaatcttactgcacagggttttaacaatggttctgtaccagcctcagcacaagctactttcccatatttatttgcagtcagtaagttcttgcaggcaggaacttttgaccttgtgggcactattatatacgagatagatgaacatccatatcaaagcaccttttttaatggcactgttgaggttgttgaatctggtgcttntcttagcatggaatccgtttntcttgttactcttgnngttgcactccttgtcctnctggggctatggattcat

SEQ ID NO: 253800 - DNA, 330 bp, Glycine max
aaatgatcccaagtttgatcacattgacatcaatgagaagcaaaaggtcttaaatgaatgtgtggaagctgagaactggctcagggagaaaaaacagcatcaggactcgcttccaaaatatgccacccctgtacttttgtcagctgacgtaagaaagaaagctgaagctgtggacaggttttgtaagccaattatgacgaaaccaaagccactgccacccaagccagctacaccagaagcaccagcaaccccacctcctcaaggtggtgagcaacagcaacaaccaccttaagaaaatcctaatgccagtactaatgaaaatgctgggga

SEQ ID NO: 253801 - DNA, 397 bp, Glycine max
  unsure (1)..(397): unsure at all n locations
aattcttccaccaagttatgggtttccttgtgttgcttcgtttgtccctcttaggtctctcttctagttccagcatatcaactcatcgttccatattggaccttgacctaaccaagtttaccacacagaaacaggtgtcttcactgttccaactatggaagagtgagcatggacgtgtctaccataaccacgaagaagaggcaaagagacttgagattttcaagaataacttgaactatatcagggacatgaatgcaaacagaaaatcaccccattctcatcgtttaggattgaacaagtttgctgacatcactcctcaagagttcagcaaaaagtacttgcaagctcccaaggatgtgtcgcagcaaatcaaaatggccaacangaaaatgaagaa

SEQ ID NO: 253802 - DNA, 414 bp, Glycine max
  unsure (1)..(414): unsure at all n locations
ctgggggagaaattggccctctcaaatataaattcgctgagatcgtatgaagttgtcgatcaagtgaaggaagcgctcgagaaggactgccccggagtggtttcctgtgctgacatcataattatggcatctagagatgctgtctctctgacaggtggacctgagtgggaggtgaggttgggaagattggacagcttgagtgctaatcaagaagactcaaacaacatcatgccaagcccaagagccaacgcaagctctcttattgatctcttccagaaatataaccttactgtgaaagacctagtagcactctcaggatctcactctattggccaaggtcgttgnttctccgtcatgtttaggctatacaatcaatctggaactggaaggcctgaccctgccattgaccctagc

SEQ ID NO: 253803 - DNA, 128 bp, Glycine max
aaggaagcccctcctgaatatcagagctatcttgtccaagtgacgaaaataccaagctgcacaaaactgtaagacctggatcgttggtaagtggatcacgccaagagagcaatactgggcaccacgtg

SEQ ID NO: 253804 - DNA, 414 bp, Glycine max
ttcagaggcatgtttgacagccggatatttttggcgatggttttcgccaccgtggcatttcaagtggtgatagttgaattccttggaacgtttgccagcactgtgcctctaaactggcaattctggttactaagtgtggtaatcggagcagttagcatgcctatagctgctatcctcaagtgcatcccagttgaaagagatactagtaagcagcaccatgatggttatgaagcactgccatctggtcccgagctggcataaaatattataagaggcattaccctggttgctctgctgatttctcctactagtgtagtgtgcttttaatgctgtcattccttacggcattgcaaatttatgtaattttgtaaagacttgataccatacggaatttccaggcatgacaaaacatat

SEQ ID NO: 253805 - DNA, 363 bp, Glycine max
  unsure (1)..(363): unsure at all n locations
atcgacttcatcttcggcgacgcctncgcggtgttccagaactgcaccatggtggtaagaaagccactggagaaccagcagaacatcgtgacagcacaagggaggctcgacaagcaggagaacaccggcttcgtcctccagaaatgcgtgatcaaggccgacaccgacttggtacccctcaaagacacaatcaagaactacctcggaaggccgtggaaggagtattcaagaaccatcatcatggagactcagattgatgacctaattcaccctgatgggtttcttccttgggaagggaactttgccctaagcacactttactatggtgagtacaacaacaatggggctggttctagcaccact

SEQ ID NO: 253806 - DNA, 361 bp, Glycine max
ctcatcagtattgtgggcaatgcccatgtcgactctgagagatgcactaccactggtcacctgcttcacaagcttgaatgcatcgacaatcgtgtcattgaaaggtttgagaaggtagttgatgagatgaacaagaggtctctcaagtttgcctgcgtgctggactaacttagcgctgagcgtgaaagaggaattaccattgatattgctgtgtggaagatcgtaaccacaaagtcttaatgcacattcattgatgcgtctgtacatatggatttgattaataatatgattactgggacataccaatctgactgcgctgatcttatcattggttcgaccactagtcgttttgaagctggta

SEQ ID NO: 253807 - DNA, 416 bp, Glycine max
  unsure (1)..(416): unsure at all n locations
tcaaaattcttctccttttgtgcttccaactcttggcttggttatattattctctttcactttctgccaacccttggagtcaacatgactatcctcattgagcaatctgatcactttggggctgaagtagaggcaaagactgaaccaataaatgagagagaactggtgttggatggtggatttctgataacacagaccaactcatttgggcacatgtttagggcttataatgatgctgaaagtgagaggcatgaaggagtggagaacttctacagaaaaaatcacacttaccaatcaattgatttcgtgaagaaaatgagagaggagtacgcanaattgaacagggtagagatgagcatatgggaatgttgtgaactccttaatgaagtggtggatgagagtgaccctgacttgga

SEQ ID NO: 253808 - DNA, 409 bp, Glycine max
ctctggtttcgagggtgacaacatgattgagaggtccacggaccttgactggtacaagggaccaactctccttgaggctcttgaccaaatcaatgagcccaagaggccctcagacaagccactcaggcttccattgcaggatgtctacaaaattggtggtattggtaccgtgccagtgggacgtgttgagactggtgtcgtgaagcccggtatggtggtgacttttggtcccactgggctgacaactgaggttaagtctgttgagatgcaccatgaggctctcacagaggctcttccaggtgacaatgttggctttaatgtgaagaatgttgcagtcaaggatctcaagcgtggttttgatgcatccaactccaaggatgaccctgccaaggaagctgccaacttcaca

SEQ ID NO: 253809 - DNA, 242 bp, Glycine max
attttaaccctaggatcctttctcctctcatccacctggagcaaagaatgaaccgggcaatggaagaagataatgaggaagaagagttcaacaccgaaccggtatttgtactcatgatgagtgttaaaaataatactcaggtactgattaattgtcagaacaacaaaaagcttctgggtcgtgtaagggcttttgacaggaactgcaacatggttcttgaaaatgtcaaggagatatggact

SEQ ID NO: 253810 - DNA, 387 bp, Glycine max
ctcgagccgattcggctcgagcacaaacctagatttcatgcggaagaggaagatttctagtgacttcaacatgatgatggatcagaaaatctacacatgcgagcatccccaatgcccttacagcgaagttcgccttggtctccatgataggtctgctagggacaatcatcaattgaattgtgcatatagaaacagttctgcagattatggtggtggtcccaatttccatgctactgaggttaagccagtcatattcccccagtcctttgttcaacccaacactacagctcagtctgcaagtttggttgcaccttcatttgatctaactggtcttggagttcctgaggatggccagaaaatgattagtgaccttatgacaatctatga

SEQ ID NO: 253811 - DNA, 398 bp, Glycine max
tctcggtgaagctcaattccacattttcaagaaataaggatgcaaaaatgtgcatatatgaattggaattatgtgttttcttattaggcctatcctgaagccaaaggaaatgagatcggaattcctcggggaattccaattccacattttcaagaaataaggaggcaaaaatgttcatatatgaattggaattattcggtttcttattatgcctatcctgaagccaaaggaaatgagatcggaattcctcggggaattccaattccacattttcaagaaataaggaggcaaaaatgttcatatatgaattggaattatttgttttcttattaggcctatcctgaagccaaaggaaatgagatccgaattcctctgaggtaccgagctcgaattcccta

SEQ ID NO: 253812 - DNA, 410 bp, Glycine max
tttttcaagatattgagaaagatgaatttggcaaagttgcgagttttaagttgcataatcttgttcatgatcttgcacgatctgttacagaagatgtttgttgtgtcacagaaggcaatgatggatctacttggactgaaagaattcaccatctctcagatcataggctgaggcccgattcaatccagttgcatcaagtgaaatctttgaggacctatttattgccacatcagcgtggtggtgcactttctcctgatgtattgaaatgttattctttgcggatgcttcacttaggagaaatggaagaattgccatcttcaattggtgatttaaaacatctaaggtacttgaatctttctgggggcgagtttgaaactctttcagaatcattatgtaaattatggaatttg

SEQ ID NO: 253813 - DNA, 415 bp, Glycine max
cttgatacattcgttgctggatggggtgattaagcatctacctgatggagtaccagaaaaggaagaaatcaggagaatgagaacagtggcaaatactgtaggtgttgttaatgatcatgattcagtttgggtaagatcaattttggaggaggttggtggtgcaagtgatggatcatggggcttgttaccatacttatttgccacattcatgacatctaatatttggtccaccacagcatttaatgttgacacagagggttttagtaacaatatccattgcttggcaaggtgcatttctgcagtgattgccggaagtgagtttgttagattggaacgggaacatcagcatcgacagtctttaacaaatggacatgctagtgagggaatggatcccgaattatcaagtcatatgtca

SEQ ID NO: 253814 - DNA, 410 bp, Glycine max
  unsure (1)..(410): unsure at all n locations
ctgacccaaaatccgtcttctctttctttctactccgatgcctgcgttgcttttggtcttggtcgaattgcgaactcagcagcagaagaagttcctcaattgtttcacctcaaattcgattcgaactatgtaaacgccactgtcgcgtcgggtttgttgtctctgtttttgttgcggtgttactgttcctcggttcggatctccgaagcatgaatctcagcaacggaaagggatccatgtcaacccttactgcaagcgtggttatgaaatccggcgacgccgtctccgaccagtttccggcgggtctccgggttctcgtggtggacgatgatcccacgtgtctcatgattcttgagaagatgctccgcacgtgcctctacgaagttaccanatgtaatcgagcagaaact

SEQ ID NO: 253815 - DNA, 408 bp, Glycine max
ctgaagatgatccatccacttttttctctcttttcgggcggcgagctgctggttttcttttaccttgctatatcatggcttgggcaatcagtattttgcaacgccggcgacaaagacaagaagcggcagcactagcggcaacccaagttgcttttgttctacaaaccgggcagcgtaggggtctgcagtttgcaataggaccaggaccaccaacaatgaatacacaccaaccggaacaagtgtaatttttgtatgccaccagtgtatgtaacaaggcttgttggaatgccatgcatttttttactcatgatttttctgagctctaatttacatacatagcttgagagactttgagatggtacttaatattctagggtccttaaaccctcaaaaagaaccgctcatttt

SEQ ID NO: 253816 - DNA, 380 bp, Glycine max
cagaaacccaacttctgttcatatggaaaccagtgcggcgatggatgtcgaggaccaaccttcacccaactccaacaacgttaaacgcttcggccttaaaaactctatccaaaccaatttcggtgatgactatgttttccaaatcgtcccaaaggaagattggagtgcaatggcggtgtcactgtcaacgaacgcagtgaaactctattcacctgtggcgggtcagtattttggagagttcaagggtcactctgaaaccgtcaatcagatttcgttttcgggtccttcaaatccccatattttgtgttcgtgttcttctgatggcaccattagagcttgggacgctcggacatttcagcaggtttcttctatcaatgctg

SEQ ID NO: 253817 - DNA, 346 bp, Glycine max
  unsure (1)..(346): unsure at all n locations
ctcgagccgattcggctcgaggcttcacgtggaacatgggcaactgattgctggaatggaggaggcacacaaacatgtggaagaactagaatcaaaagccaagcaacttgaggaagaggtcgagaggcaaagaaccgtgatcttagaaggagcagaagagaaacgcgaggccataaggcagctatgtttctcactcgagcactatagagatggctataatatgcttcggcagcatgttatggggcacagacgagttccagctttggctgcctagttaataanatttgaaacgtgatcttgaatattggtttggtgctatcttcatttcagacttgggatggtttat

SEQ ID NO: 253818 - DNA, 420 bp, Glycine max
gaagaggagaaaaagactatggagggtttgaagaagagagagctggagctggacgaagcaggcaacggtgaattggcttccaaggaagagcttcgcttcctcattgaacctctcgctaaaccccagctcgtcgatcttcttgctaaactagggtcccaatatccttcaattgcagaagaaataaaaagtattgcaagtgcagatcctgcccatcgaaagctttttgttcgtggcttggcctggaataccacttcagaaacattgcgtgctgcatttcaagagcacggagaaattgaggaaggagctgtgatctttgataaagtgacaggaaaatcccgtggctatggatttataactttcaaaaatatggaatcaactcagcaagcattgagagcccctagcaagttaattgatgggaga

SEQ ID NO: 253819 - DNA, 420 bp, Glycine max
gaaaatctgaaatttcatttctctctgtataaatatcctgagtccttatcagcttcactatttcgattgaaatcgccgaagaaggtattgacgtcgatgatgaaaatgaaattggtgaaaacattactgcttctcctttgtgtgaaactcttctgttatgcagtgattggtgctcctcaaacttgtcctgctaacaatgaggataaatgcggcgattcagatgaatggaaaggggagtttttccctgacattcccaaaattaaatatgagggtccgtcaagtaagaatgtgctttcatttaaatggtataatgcagaggaggaaattcttgggaagaagatgaaggattggttaagaattagtgttgcattttggcatacattccgtggaacaggtgctgacccatttggtgcacctacc

SEQ ID NO: 253820 - DNA, 418 bp, Glycine max
tttcattctctatttccatttttcggccgtccagaagacgccagcataccactaaagggtccacaggacgaccttcagaacgtgcctcaacaggccgccgaccaaaaacctcagaaactcagcccagatttctacataaaaacttgccccaatgcccaaaaaatcgtggccgatgcacttgcagacatcgttaagaagaatcccggcgctctcggaaacctacttcgccttcaattccatgactgcttcgttaatggatgcgatgcatcgatcttgctagattactcgccaagcggtgacaccgtggagaaaagttcaatggtgaatggtctactcctgaaaggagctgatatgatcgatgacataaagttgaagctggaggagcagtgtcctcaaactgtgtcatgtgctgacacat

SEQ ID NO: 253821 - DNA, 417 bp, Glycine max
  unsure (1)..(417): unsure at all n locations
ctctgagtatcgtatcgttttattattatttctagggctgtcttatcagtatgtattcaaaaccctagctaggtttttggagctccctttctttctttccgatcccaccgtcaaacttgtcattctatatgctttgcagggtccattgaatatgtctccgtcgttggatcttcctcccaagggtggcttcagttttgatctatgccgaagaaacgcaatgcttcaaaacaagggcctcatagccccaacctttctcaaaactggcaccactattgtcggtttagttttccaggatggtgtcattcttggtgctgatactagggcaactgaacgacctatagtggctgataaaaactgtgagagaattcattatatggcacccaacatatattgctgtggagcangcacagctgctga

SEQ ID NO: 253822 - DNA, 371 bp, Glycine max
  unsure (1)..(371): unsure at all n locations
cacattcatactaaaaataaataaactaatatttgttacagacacatttcttttttagtatgagtagcttaacaaattttatctaatgcattcatactaaaataaaggattatatacgttaacaaataccaattgtcttagataaaattatagaactgtgacagctgtcttcttgctaacctaacatgtcatacccaaatatttataaggcttgaagggaaagtggctcttatcagtggtggtgctagcggtataggtgaggccactgcaagactcttctctaagcatggagcacacgttgtgatagctgatattcaagacgatttgngtctctctctttgcaaacacttggaatccgctttctatgtcca

SEQ ID NO: 253823 - DNA, 419 bp, Glycine max
aagcttgttcagtctttcttggaactttgttactctcacacatgtcgggctccgtgcctttggtttcaaccatttttgtcttgcttctgcttctggtggccactgagatgatggggccaacaatggtggcagaagcaagaacttgtgagtctcagagccaccgtttcaaggggccatgtttgagtgacaccaactgtggctctgtttgccgaaccgaacgtttcactggaggacactgccgtggcttccgtcgcagatgcttctgcaccaaacattgttaattttaaaaaattaattaagagtgctttgatagaagatgatagatctatcatctttctactcgtgttgttaattaaccactttgtgtttgagaataagggttacccattctactatgggtttctttggttgcctcttat

SEQ ID NO: 253824 - DNA, 390 bp, Glycine max
atttgtcgtgatgtccaccgtgcagagccagattggaaaagaatattgttaagatacttcaacccagtcggtgcacaccctagcggttgtattggggaggatccccgcggaattccaaacaatctcatgccatttgttcagcaagtagcagttggccgacggcctgcactgacagtttttggaaatgattataatacaactgatggcactggggtatgctctgactgacttaaacttatgcactgaaatttttccatgatgggcacattgctgcgttgcttaaactagatgatcctaatataggttgtgaggtttataacctgggaacaggaaagggaacatcagttttggagatggttcgagcttttgagatggcatctggaaagaaaa

SEQ ID NO: 253825 - DNA, 410 bp, Glycine max
ctgacccaaaatccgtcttctctttctttctactccgatgcctgcgttgcttttggtcttggtcgaattgcgaactcagcagcagaagaagttcctcaattgtttcacctcaaattcgattcgaactatgtaaacgccactgtcgcgtcgggtttgttgtctctgtttttgttgcggtgttactgttcctcggttcggatctccgaagcatgaatctcagcaacggaaagggatccatgtcaacccttactgcaagcgtggttatgaaatccggcgacgccgtctccgaccagtttccggcgggtctccgggttctcgtggtggacgatgatcccacgtgtctcatgattcttgagaagatgctccgcacgtgcctgtacgaagttaccaaatgtaatcgagcagaaact

SEQ ID NO: 253826 - DNA, 392 bp, Glycine max
aggcatcgttagcagttttgtagattcaacctcaagttggggagttacgttctaatatatttacacaagactgataagagaaaatgtctctgattccaagtttcttcggtggccgaaggagcagtgttttcgaccctttctccctcgatgtgtgggaccccttcaaggattttccatttcccagttctctttctgctgaaaattcagcgtttgtgagcacacgagtggattggaaggagacaccagaagcacacgtgttcaaggctgatattccagggctgaagaaggaggaagtgaagctggagattcaagatggcagagttcttcagataagcggagagaggaatgttgaaaaagaagacaagaatgatacgtggcatcgcgtggagcga

SEQ ID NO: 253827 - DNA, 524 bp, Glycine max
  unsure (1)..(524): unsure at all n locations
nggagaagtctctctgtcttacgtaaaagaaatgtatatgcattactctaagagacctgattaccatgcatgcacgcgtactttagcatgatactttgggtgaagcccaattgcacattgtcaagaaataaggaggcaaaggggtgcatatatgaatcggaattatttgctatcttattaggcctatcctgaagccaaaggaaatgagatcggaattcctcggggaattccaattccacattatcaagaaataaggaggcaaaaatgttcatatatgaattggaattatttgttctcttattaggcctatcctgaagccaaaggaaatgagatcggaattcctcggggaattccaattccacattttcaagaaataaggaggcaaaaatgttcatatatgaattggaattatttgcattcttattaggcctatcctgaagccaaaggatatgagatcggaattcctcgggggtaccgagctcgaattccctatagtgagtcgtattaaattcgtaatcatgtca

SEQ ID NO: 253828 - DNA, 390 bp, Glycine max
  unsure (1)..(390): unsure at all n locations
gaaaatttgaagagtttgtttattgtgaaaaaaagaaaagggcaggcagcaaagaaagccatagagacctttaaggaaaccgcagccaacattggcgcctctgccaagtctggcttggagaaaaccaaggccactatccaagagaagaatgagaagatgaatgcagaagatcaaactcaaatggatatggctaccaagaggaaagaagagaagatcaaccaggctgagatggagaagcagcaggcccgtaagtactacgccgctgcaaaacaatacgccatggctgagcacatggcaaagggcaaccacgacaccgncgggcctagaatcgagactgccacacacatcaccagtgggcccgggactgacaatgctatgtactctaacact

SEQ ID NO: 253829 - DNA, 232 bp, Glycine max
gtgagaaacatagaaaggaaataattgatctttgaaaatgcgaggaggaaagaaagctggagagtccatcaaggaaacagctgcaaacattggtgcttctgccaaggctggcatggagaaaaccaaggccactgtccaagagaaagcagaaagaatgacggcacgtgatccgatgcaaaaggagttggcaacccaaaagaaagaggcaaagatgaaccaagcagaacttgac

SEQ ID NO: 253830 - DNA, 423 bp, Glycine max
ctcccttttttcgtgcgcaaactgttcccgttggtctctgtccctctgcacttcacaatcctaccctctcactgtgctatctctcagcatcttcgcaatcacacccttcccagatggccttgcaaacagctactcctccaacaactcccagtgcccaagttgttggtaatgcatttgttgagcagtattaccatattcttcaccattcaccaggttcggtctatcggttttaccaagactctagtgtgataagccgtcctgattccagtggtgtgatgacatcagttacaaccatgaaaggcattaatgagaagattctttcactaaatttcaaggaatttaaagcagagataaagactgcagatgctcaaaaatcatacaaggaaggagtgactgtgttggtgactggatgcttgactggca

SEQ ID NO: 253831 - DNA, 384 bp, Glycine max
tctcaccattccctccaacctctccaagcccgccgccctgcgccgcaaactaagcccaaagctaaggtccgccgccacaaccaccatcgtctgcagcaccaccaacaacaacaacaacaacaacgtgtcctccgacctgaaggcgttctccgccgcgctggccctctcctccatcctcctctccgcccctctccccgccggcgccgacatctcggggctcaccccatgcaaggagtcgaagcagttcgcgaagcgtgagaagcagtcgataaagaagctggagtcgtcgctgaagctctacgaggcgggcagcgcccccgcactggccattaaggccagcgtggagaagacgaagaggaggttcgacaactacgcgaagcaagg

SEQ ID NO: 253832 - DNA, 408 bp, Glycine max
ggtctttcaagtatgcctgggtgcttgataagcttgagggtgagcgtgaaagaggaatcacaattgatattgccttgtggaagtttgaaaccaccaagtactattgcacagtcattgatgcccctggacacagggatttcatcaagaacatgatcactgggacatcccaagctgactgtgctgttcttatcattgattccactactggtggttatgaagctggaatttcaaaggatggacagactcgtgaacatgctctgctttcattcacccttggtgtgaaacagatgatttgttgctgtaacaagatggatgctactacaccaaagtacttcaaggccaggtatgatgaaattgtgaatgaagtttcttgctatttgaagaaagtaggatacaaccctgacaaga

SEQ ID NO: 253833 - DNA, 408 bp, Glycine max
gccttgtgccgtttgtgttgttttcgggacgaagaagaagatggtgtcaggttctggaatctgcgcaaagcgggtggtggtggacgcgcgccaccacatgctgggtcgtctagcctccatcgtggcgaaggagcttctgaacggccagaaagtggtggtcgttcgctgtgaagagatttgcatctcgggcggtctggtgaggcagaatatgaaatacttgaggttccttcgcaaacgcatgaacaccaaaccctcccatggccccatccacttccgtgccccctccaagatcttctggcgcaccgttcgtggaatgataccacacaagacaaagcgtgggggagctgctcttgctcgtttgaaggtttatgaaggaatccctactccatatgacaagaccaagagaat

SEQ ID NO: 253834 - DNA, 391 bp, Glycine max
ggttgaaccttccggtgtttcctatagatatttcggtgctgcaattgggaagggcaggcaggctgctaaaacagagattgaaaagttaaagcttgctgatatgacatgtcgacaaggggttattgaagtggctaaaattatatatggagttcatgatgaggcaaaggacaaagattttgagctagaaatgagctgggtgtgtgatgagtcaaaccgccaacatgagaaggtcccggatgagcttctagaagaagcaaaggcagctgccaaagcagctcttgaagaaatggatgcagattaatagactagaaatgtttatttcaaagttgcatttcataacttgtaattgagcatttggaacatctataggaaatacaaggcttcgatagtc

SEQ ID NO: 253835 - DNA, 395 bp, Glycine max
ataaagaaagatcatggcgatggcaaacttggctcgacggaagggttacgccgtcgttttgtcgtcgaggtcgtcgctttgtctgacaaggtggagggggttcgcgtccggatctgacgaaaacgacgtcgtggtcatcggcggcggtcccggcggctacgtggcggccattaaagcggcgcagctgggtctgaaaaccacttgcatcgaaaaacgtggcactctcggcggtacctgcctcaacgtcggatgcatcccttccaaggcacttttgcattcttgccacatgtatcatgaggctaaacatgcatttgccaaccatggggtcaagttctcatctgtcgaggttgatttgccagccatgatggcccaaaaagataaagcagtttctaatc

SEQ ID NO: 253836 - DNA, 77 bp, Glycine max
aaaaaaaaataaaaaaaaaaaaaaaaaaaaaaaaaaaaaggaataaaaaaaaaaaaaaaaaaaaaaaaaaaaaaaaa

SEQ ID NO: 253837 - DNA, 313 bp, Glycine max
cacaaactcagggtagggcagagagagagagagagagagagagagagagagagaatgggagggtgggctatcgcggtgcatggtggcgctggtgtcgaccctaatctcccactcgagcgccaagaagaagcgaaacaacttctcacgcgctgtctcaatcttggaatctctgctctaaattctaatcttcccgccatagatgtcgtcgaacttgtggtgagggaattggaaacggatccgctgttcaattcgggccgtggatctgccctgacagaaaaaggaacggtggagatggaggctagcatcatggatg

SEQ ID NO: 253838 - DNA, 383 bp, Glycine max
gcggacctcaacctttctctctccggtgatgccttcgacatcatagttaaaatcaaaaacgcattagaacttgcatgccctggtgttgtgtcgtgttccgacatcgtggcacaggccacaagagaccttgttaagatggtcggtggtcctttttaccccgtgaggctggggagaaaggatagcactgaatcagatgctgcgagagtgagtgcaagccttccaacaccaagcatgaccatggaccagatcattgagaagtttacctcaaagggtttcactgttaaaggagatggtggctttgactggggcacacaccattgggttcacacactgcaaggagttcatccacaggatctacaacttcagcaagacctctgatgctg

SEQ ID NO: 253839 - DNA, 424 bp, Glycine max
  unsure (1)..(424): unsure at all n locations
agtttgttgagatagctagaagcaataagatgaaaatgaaagtgcttgttttgtttgttgctacagttttggtagcatatgaatgccatggctcagactaccagaagttccctctccaaatgaaaactgggtttggtgggcaatacagcaatgaggtggcatgtgccagttggaggcttggcgtggaagcaaacaacgtagtcaagtggcaaactgttcctgcagcttgcggagagtacatagctgactacgttctaggagaccaatatagatcagattccaaaacagttaaccaacaagcttatttctatgctaaatccctcaaactcaccaacaaagatgtctntgtcttggacgttgacgacactactctctctaatctccagtattttgctaaccatggatttggtgtggaaccaccaca

SEQ ID NO: 253840 - DNA, 373 bp, Glycine max
caagaagaacatatatactgctagggagtatgttgtttatgtttatagtggctgttgctgtgctaatggcatcatcagggcaaagaaacagcactgccaaggaataattggacaacacacaagttgtttatagattgcctagtgcaaagggagaaaaattctcattgttcattggtgtgaataagagaagaagaaaaaatctattaagaaaagagtgcagaaaaagaaataaagcagggagcatagttgatatattcctaattgaaatgcttttatgttttttatttttctgtatatttggacttccaaaatgaaaaaattgtccgatattatatatatatatatatgatttatatataaaatctccaatgtt

SEQ ID NO: 253841 - DNA, 305 bp, Glycine max
aatatctacacaaaagtgttccacttgagtgaaaagtagtgtgttaagaactaaacaatttttcaatggcgtccaagaaacaagaggagcgagctgaggcagctgcgaaagttgctgccaaagaactcgaacaagtcaacagagaaagaagagaccgtgatttcggtgttgttgctgaacaacaacaacaacatcatcaggaagatcaacaaaaacgtggtgtaatcgggtccatgtttaaggcggtgcaagacacctacgagaacgccaaggaagctgtcgttggcaagaaagaagctactaat

SEQ ID NO: 253842 - DNA, 354 bp, Glycine max
ctcgagccgaaaaaaatgggttcttctctgtggacctgtctgattttgttatcacttgcttctgcttccttcgccgccaacccaagagcaccaattgatgtgccatttggcagaaactatgtgcctacctgggcctttgatcacatcaaatacctcaatggtggttctgagattcagcttcatcttgataaatacacaggtactggcttccaatcaaaagggtcctacttgtttggtcacttcagcatgtacataaaattggttgctggtgattcagctggcacagtcactgctttctatttatcatccacaaactcagaacatgatgaaatagactttgaattcttgggaaac

SEQ ID NO: 253843 - DNA, 371 bp, Glycine max
cggctcgagaccaacaccaaaccttaaaattattttgcccgtctgcttctctctctgtctttctcagaagacaactcaaaaaaaccatggacgtgggtcagatgcagagacagtggatcgactacaccaaatccctcttccttgagggcttcctggatggtcagtttctgcaacttcagcagcttcaagatgagaacaaccctgactttgtggtcgaagttgtctctctcttctttgaagattctgaaaggcttctcaaagatctcacctttgccctagatcagaatggtgttgacttcaaaaaagttgatgctcatgtgcaccagttaaagggtagcagttcaagcataggcgcgcaaagggtgaaaaat

SEQ ID NO: 253844 - DNA, 333 bp, Glycine max
ctcacctacaccctggacgagattgagggtcccttcgagggtacatccgatggaaccgtgaaattcgaggagaaagacggaattgactatgctgctgtcactgttcagcttcccgggggagagcgtgtgccattcctctttaccattaagcagttggtggcatctgggaaaccagacagcttcagtggggagttcctagtgccttcttaccgtggttcctctttcttggaccccaaaggaaggggtgcctcaactggttatgacaatgctgttgctttgcctgctggtggcagaggagatgaagaggaacttgctaaagaaaaccaccagagt

SEQ ID NO: 253845 - DNA, 365 bp, Glycine max
  unsure (1)..(365): unsure at all n locations
gacaaatggaaggttccgaagtgtgagacacagagtgttggcaaatgggttcaagtccaggctttcaatgatttactttggaggtccacctttgagtgagaaaatagcaccattatcctctctcatgaaaggaaaagaaagtctatataaagagtttacctggtttgagtacaaaaaatcaatctacggttcaagattatctaaaaatagacttgaacattttgaaagaattgcagcttcgtaatatatattctagagaattgtttgagacacttgtcaatacaaaatgggagattacaatatgtagtttgtatactataaatgctttntttttttttttttactttttaagttatttatcaatc

SEQ ID NO: 253846 - DNA, 336 bp, Glycine max
gtttgttggactgaacaagggtcacgtcgtcaccaagaaggaattgcccccacgcccctcagatcgtaaggggaaaacaagcaagagggtgcactttgtgaggaacctcataagagaggttgctggttttgcaccctatgaaaagcgtataactgagttgctgaaggttgggaaggataagagggcactgaaggttgcaaagagaaagcttggaacccacaaacgtgcaaagaagaagcgtgaggaaatgtccagtgttctcaggaagatgaaggctggtggtgctggagacaagaagaaataagtcttaattatttactcttttccagaatcact

SEQ ID NO: 253847 - DNA, 286 bp, Glycine max
  unsure (1)..(286): unsure at all n locations
aattgtttaaacctaattctcatttcttcatcggtcgatgcttctcctcctaaagatgcagatcttcgtgaaaactttgaccggtaagaccatcacccttgaggtggagtcctccgacaccatcgataacgtgaaagctaagattcaagacaaggaagggatcccacctgaccagcagagacttatctttgcgggtaaacagcttgaggatggtcgaacccttgccgactacaacatccaataggaatccactctccacctcgtgcttcgnctcaggggtggcatg

SEQ ID NO: 253848 - DNA, 404 bp, Glycine max
  unsure (1)..(404): unsure at all n locations
agcctcgccgactcggttgctatcagcgagtgagagtgagtgagtggttctcttgcagcaacaaggtttagtgacaccaaacagacgggaaatgggtcgtggggtcagtgctggtggtggacagagttccttggattatctctttggcagtggggtacctgccagcagtgcaaatggtgctcgcactcaaaatgcaagtgctccttcaccaccggttgataagcaaagtccagcaccagcaccagcaccagcacctgcacctgcagcagcagcagcaccagcacctgcaccagcaccagcaccagcaccagctgataagcaaattccagctggaattcctggaagtctcanaaacaattaccatcgcgctgatgggcaaaactgtggcaactttctcactgatc

SEQ ID NO: 253849 - DNA, 253 bp, Glycine max
ggacccatctacacgaccgctatcatacaagtagagtgaggcgacacacctagaggacaaagccaagtttacaccaaccacagtctacacgtacgggtcacctggaccacgatacaagtggcctactcctccacacaccatcctatatagtacccatcttcaccacccgcagtgtacaagtgcacatctcctactgctccctacaagcaccaatatccaccacctgcaccctacaagtaccaatatcctccac

SEQ ID NO: 253850 - DNA, 382 bp, Glycine max
gagagaatgatgattgagacggactcaccatactgtgaaggcaagaatactcatgctggaattggttttgttaaatctacatggccttctaagaagaaagagaagtatgatcaagagtgcattgttaaaggccgcaatgaaccttgtttagttaagcaagttcttgaagtggttgctggctgtaaaggcatcaacgatgtgagtaacctcagcagaacattgtaccataacacttgcaggatatttttccctcatgacttggattctgctgctgatgctcttctagctggcggtaattctacataaacatacttgctagtgacttggccttttctttgcttatattcggagctgttctgtagaccaaatcctcattttcttg

SEQ ID NO: 253851 - DNA, 398 bp, Glycine max
atcgcagccctgatagccgtcagcacaggtctatggtatacacatgaaattcacgccttcctccaaattcttaggcttttcaaatcacttccactcccttctcgcaccctctttctctccgaccccaaagttctcatcttccttttccgccaccatgtccactctttccactcagaacgacaccgtcacccacaaaacgcagcaacctttgcagattgcaaagcgcttagagaaatttcagacaacaatcttcactcaaatgagcttgcttgccatcaaacatggggccataaaccttggtcaaggctttcccaactttgatggtccagaatttgtaaaggaagcagcgattcaggcaatcagggatgggaaaaatcagtatgccccgggttatggag

SEQ ID NO: 253852 - DNA, 410 bp, Glycine max
gaagaatttggtcctgagtgggctatgcagcacatgaattcctcaggttttggagatgaacaacaacccacactatttgtatcggatgactattcttcgtgctatctctctgcttgctcctgtgatgggccctgaaatcacttgttcaaacttgttaccagttgttgttgctgcatcaaaagacagagtgcccaacataaagttcaatgtggcaaaggtattagagtccatcttccccatcgttgatcagtctgtggtggagaagactattcgtccatgtctggttgagctcagtgaggatcccgatgttgacgtgcgatttttctccaaccaagcactgcaggcaattgatcatgtcatgatgtctagctaggcagaaatggttccacacgcaattaattaggttgaag

SEQ ID NO: 253853 - DNA, 389 bp, Glycine max
gttgtgtttctgagtttcggaagcatggggagattctcgaggactcagttgagagagattgctattgggttggagaagagtgagcaaaggttcttgtgggtcgtgaggagcgagttcgaagagggtgactcgggggagccaccgagtttggacgagttgttgccagaagggtttttggagaggacaaaggaaaaggggttagtggtgagggactgggccccacaggcggcgatactgagtcatgactcggtgggtgggttcgtgactcactgcgggtggaactcggtgttggaggcggtgtgtgaaggtgtgccaatggtggcgtggcctctctacgcagagcagaagctgaataaggtgatctttgtggaaggaatgaaaagtggttt

SEQ ID NO: 253854 - DNA, 283 bp, Glycine max
ctctttcaaaagggagaagaaaaggaaaggaaacaaaacgcacatgattattatagcaatggcagaacaaaaccaaaaccagacaactgaaactggaaagcaccaagaggttggccacaagagccttctgcagagtgatgctctttaccagtatattctggagaccagtgtctacccaagagaacctgaatccatgaaagaactgagagaagttgacagcaaaacacccatggaacatcatgacaacctctgcaaacgaagggcaattcttgaacatgctcct

SEQ ID NO: 253855 - DNA, 293 bp, Glycine max
  unsure (1)..(293): unsure at all n locations
gaaaaaccctaagcaaagcaaagcggtaaggatggggaacacggagaagctgatgaaccagatcatggaattgaaattcacttcgaaatcgctgcagcgtcaatcgcgtaagtgcgagaaggaggagaaatcggagaagctgaaggtgaagaaggcgatcgagaaaggcaacatggacggcgctcgaatctacgcggagaacgcgatccgtaagcgcacggagcagatgaactaccttcgnctggcctcgcgccttgacgccgtggtcgcccgtctcgacacgcaagcgaaaa

SEQ ID NO: 253856 - DNA, 356 bp, Glycine max
gtcaaagacaatgtcagggatcattcacaagattgaggagacccttcatgtgggaggccacaagaaggaggaggagcacaagggtgagcagcaccatggtggagaatacaaaggggagcatcatggtgaacacagtactgaatacaaaggagagcatcatgttggtgagcacaagccggagcaccatggaggagaagagcacaaagaggggttcctagacaagatcaaggacaagatccacggcgaggagggtggcgccaccgccgagggcgagaagaagaagaagaagaaggagaagaagaagcatgaacatggccatgacagcagcaggcacagtgacagtgattagattatct

SEQ ID NO: 253857 - DNA, 240 bp, Glycine max
  unsure (1)..(240): unsure at all n locations
gttttcgttcaaggtgagaccttgttcccgggcatactctcatgattggactgagtgtccttttgttcatcccggagagaatgctcggaggagagaccccaggaagttccattacagctgtgtgccgtgccctgattntagaaaaggggcttgcaggcgtggagacatgtgtgaatatgctcatggggtgtttgagtgctggctgcacccggctcagtatcggacacgcctctgcaaaga

SEQ ID NO: 253858 - DNA, 356 bp, Glycine max
ctgggatatgttgctgcatccaaggacccggtgattggaggcagcttacttttaacatacacaactggctatgtttctcctttactcttggctgcttcttttgctggagcactacagagcttgctctcattccgcaagttctcggcatggatcaatcctataagcggagcaatgctgttaggtggtggtgtatatacgttcttagataggctgttcccagtcacaatggtgatgtagaaaatctcttggctcttaacatgctgtgatattttacattaacagttcaatgtatatatgtcatacaagtattcaattcaattggaatagaaatccaaatgagactattgcataccaca

SEQ ID NO: 253859 - DNA, 354 bp, Glycine max
gaagtagaggtcttaagagtttgagaactgagaagagatgggtggtgttgcatggacagaagaagaagatcacttgctcaagaaatgcatacaacaatatggagaaggaaagtggcatcgtgttcctttactggctggtttaaacaggtgccggaagagttgtaggctaagatggctgaactatctccgtcctaacatcaagagaggaaattttgcggaggaagaagtggaaatgataatcaaactccataaattactaggcaacagatggtcgttgattgcaggaaggctaccaggaaggactgccaatgatgtgaaaaactattggaactgtcatctgagcaaaaaacttaa

SEQ ID NO: 253860 - DNA, 369 bp, Glycine max
attaactaagcatatatagcgtgtaagacagtgagaaaaaaagtgttgtgtagagagaaatggctaggtggtgcatcttggtggttcttgcccttgtcgtggttgcaagtgccagaaacatgcccaatgacgcaggtttggaggaccagaagaacttcctcgggtatgggttctctggagttggcaacaatgggcttccctttggaggagtgggttctgggtttgatggtaatatgggtgggccttctgggctcggtggatttggaggattcggtgggcctagcgggctcggaggtcttggtaacggtgaagggcccaaccttcctctcccttgggagttgagaccacacaccttcgggtttcttattt

SEQ ID NO: 253861 - DNA, 359 bp, Glycine max
cacataagtgctgaaaagggtggagagtttttcatagacactgagaaacatatgcgaactgtagctactgcagcaagtccaatacctagtccacaaagtagtggagactttggtgcgctgagtccattggttggaggtttcgtcatgagttgtagagttcaaggtgaaaggaagcgaagtaaaccatcagtacaactggcaatgcgacacgtgacatgcgtggaggatgctgccatcttcatggcacttgcagcagctgttgacctcagtatcgtggcatgtaaacctttccggaggaaagtcaggagaggtttttggcattcgatgtgatcaacaaggcaaatgtatttataagcact

SEQ ID NO: 253862 - DNA, 336 bp, Glycine max
tgacaagaagtgccccttcactggcaatgtttccatccgtggccgtatcttggctggaacatgtcacagtgctaagatgaacaggactattattgttaggaggaattatctccattttatcaagaagtaccagaggtacgagaaaaggcactccaacattcctgctcatatatcacctgctttccgtgtgaaggaaggagatcacgttattattggtcaatgcaggccactttctaagactgtgaggttcaatgtgttgaaagtgatcccagctggatcttctagcggtgcaaagaaggcttttactggaatgtgagctttgatttccagttttta

SEQ ID NO: 253863 - DNA, 568 bp, Glycine max
  unsure (1)..(568): unsure at all n locations
gtatggggagtggtgatgagnnatntgnatgnatttgtgagggaggaggtggcttttagtttacggataagaaatgtgtatagccaacactctagaagagctatgacgtcgcatgcacgcgtacgtaagctcggaattcggctcgaggaacaacaaaaccagtccttaacgggatggtactgactttcatacaggtgctgcatggctgtcgtcagctcgtgtcgtgagatgtttggtcaagtcctataacgagcgaaaccctcgttttgtgttgctgagacatgcgcctaaggagaaagtctttgcaaccgaagtgagccgaggagccgagtgacgcgccagcgctactaattgagcgccagcacgtagctgtgctgtcagtaagaagggagccggcgcctttcgaattcgaagcactttctagtgtgcgctgttttttgattgcagctagcgagcaagaaaacggatgcgcgaacgcgggtttctttcgccttgcttgntgctttactaaatagaaagaaagggcttttctcgcttgtttaagtaaatccaatttttggccctatcc

SEQ ID NO: 253864 - DNA, 337 bp, Glycine max
gagacttgagattttcaagaataacttgaactatatcagggacatgaatgcaaacagaaaatcaccccattctcatcgtttaggattgaacaagtttgctgacatcactcctcaagagttcagcaaaaagtacttgcaagctcccaaggatgtgtcgcagcaaatcaaaatggccaacaagaaaatgaagaaggaacaatatttttgtgaccatccacctgcatcatgggattggaggaaaaaaggtgtcatcacccaagtaaagtaccaagggggctgtggaagcggttgggcgttttctgccacgggagccatagaagcagcacatgcaatagca

SEQ ID NO: 253865 - DNA, 417 bp, Glycine max
aatgggtgttgctttgactgtgtgctcaattcctggtcaagttgcatcagatcgtttggggccaggaaagatggaacttggtcttggaattcatggagaacctggggcagctgtggctgatattcagcccgtaaatgtggtggtttctcatgttctacagcaaatattgtccacggaaacaaactatgtaccgataactcgaggagaaagagtggtccttatggtcaatgggttatgtgccacttcttaccatggaactaatgattatagctggaaaaacagttccaaaattacagctagaacatggattggctgttgatagagtttatacagggtcatttatgacttctcttgatatggcaggtttctcaatttctattatgaaagctgatccaattattctttaacgattagatg

SEQ ID NO: 253866 - DNA, 405 bp, Glycine max
cagctgctttgtatgtgttgcggtgctcagcctcagcctcagcctcaggcagcaccgtttatgaggttcccattttggaattcagttcatccaaagaatccaacaagtgtagtaagggtgcaagcagaagcagcagatatgaatatgaattcaatcccacacgtgctgagtgttgctgggtctgattctgggggtggtgctggaatccaagctgatcttaagacttgtgcggctcgccgtgtctactgttccactgtcattactgctgttactgctcagaacactgctggggttcaaggactcaacattctacctgaggattttgtggcagaccagttgcactctgtgctctctgatatgcatggtcatgtcgtcaaaacaggcatgctggcctctcttaatata

SEQ ID NO: 253867 - DNA, 411 bp, Glycine max
caaatacaaacatggcaatgaagaagttcttgtgggttgttctgtccctttctttggtccttggagtggccaatagctttgattttcacgacaaggatttggagtccgaggaaagcctgtgggacttgtacgagagatggaggagtcaccacacggtttcgcgaagccttggtgacaagcacaagcggtttaacgtgttcaaagcgaatgtgatgcatgtccataacaccaacaaaatggataagccttacaagctgaaactaaacaagtttgctgacatgaccaaccatgaattcaggagtacctatgctggctcaaaggttaatcaccatagaatgttcagagacatgccacgtgggaacgggaccttcatgtatgagaaggttggtagtgttcctgcttcagtggatt

SEQ ID NO: 253868 - DNA, 339 bp, Glycine max
aagcaaaaagaaagaatcccaggcgaggagaaagatggaggggaaggagcaggatgtgtcgttgggagcgaacaagttccccgagagacagccgattgggacggcggcgcagagccaagacgacggcaaggactaccaggagccggcgccggcgccgctggttgacccgacggagtttacgtcatggtcgttttacagagcagggatagcagagtttgtggccacttttctgtttctctacatcaccgtcttaaccgttatgggagtcgccggggctaagtctaagtgtagtaccgttgggattcaaggaatcgcttgggccttcggtggcatgatctt

SEQ ID NO: 253869 - DNA, 300 bp, Glycine max
ctcttccttttctcttctctgtctaaggggtgccctgagatcacattgaacaatggtgaaggctgtggccgttcttggcagcagtgagggtgtcactggaactattcacttcgttcaggagggaagtggtccaaccaccgtaactggatctcttgctggtcttaagcctggtctccatggtttccatgtccatgccttgggggacactaccaatggttgcctctcaactggatcacatttcaatcctaataacaaggagcatggtgcccctgaggatgagaatcgtcatgctggtgatct

SEQ ID NO: 253870 - DNA, 317 bp, Glycine max
tcggggaattccaattccacattttcaagaaataaggaggcaaagatggtcatatatgaattggaattatttgttttcttattaggcctatcctgaagccaaaggaaatgagatcggaattcctcggggaattccaattccacattttcaagaaataaggaggcaaaaatgttcatatatgaattggaattatttggtttcttattaggcctatcctgaagccaaaggaaatgagatcggaattcctcggggaattccaattccacattttcaagaaataaggaggcaaaaatgttcatatatgaattggaaattat

SEQ ID NO: 253871 - DNA, 298 bp, Glycine max
cagctcctgattgcatgtgccaagcttagtagtgactagtagtagtatatacttaaattattattattgctcacggatgtagcctgtgtattttatagttcggtgtcttattatttaacattatatctagtgaaaataaaaaagctatttccactcctattcctaatggagtttgttatgttgttcttgataagagtgcttgagagttagttgtgtattgtgtgggagatgtatttatcagatgatggcattcttagcaggagccagccatattattaatttataattttataattca

SEQ ID NO: 253872 - DNA, 381 bp, Glycine max
  unsure (1)..(381): unsure at all n locations
ctcgagccgattcggctcgaggcttcacgtggaagatggacaactgattgctggaatggaggaggcacacaaacatgtggaagaactaaaatcaaaagccaagcaacttgaggaagaggtcgagaggcaaagaaccgtgatcttagaaggagcagaagagaaacgcgaggccataaggcagctatgtttctcactcgagcactatagagatggctataatatgcttcggcagcatgttatggggcacagacgagttccagttttggctgcctagttaataaatntgaaacgtgatcttgtatattgttttggtgctatcttcatttctgtcttgggatgttttatggttctagtgtatgagtcaaggtcatgtgtactact

SEQ ID NO: 253873 - DNA, 524 bp, Glycine max
  unsure (1)..(524): unsure at all n locations
nagtgaggaggggtgngtgatgaataagaggttattgtactactcggagagacatgcttgcatgcctgcacgtcgactctagaggatcctctcggggaattccaattccacattttcaagaaataaggaggcaaaaatgggcatatatgaattggaattatttgttttcttattaggcctatcctgaagccaaaggaaatgagatcggaattcctcggggaattccaattccacattttcaagaaataaggaggcaaaaatgttcatatatgaattggaattatttgttttcttattaggcctatcctgaagccaaaggaaatgagatcggaattcctcggggaattccaattccacattttcaagaaataacgaggcaaaaatgttcatatatgaattggaattatttgttatcttattacgcctatcctgaagccaaaggaaatgagatcggaattcctcgagggtaccgagctcgaattccctatagtgagtcgtattaaattcgtaatcatgtcatagct

SEQ ID NO: 253874 - DNA, 419 bp, Glycine max
  unsure (1)..(419): unsure at all n locations
agaaaaaatgggttcttcttcttctatgtggacggtgtgtgtgattttggcatcactggcctctgcagcactctgtgccaacccacgcaggccagtggatgtacaatttggccgaaactacgtgcccacatgggcctttgatcacatcaaatatttcaatggtggttctgacattcagcttcatcttgacaagtacactggtactggcttccagtccaaagggtcttacttgtttggtcacttcagcatgtacataaagatggttcctggagattctgctggcacagtcactgctttctatttatcttcccaaaacgcggagcatgatgagatagactntgagttcttggggaacagaacaggacaaccttacattctgcaaacaaatgtgttcaccggaggcaagggtgatagagagc

SEQ ID NO: 253875 - DNA, 523 bp, Glycine max
  unsure (1)..(523): unsure at all n locations
tggatattgtgaagtgtgtcntgttatgatgagtattgttatgctcggacagacaagcttgcatgcctgcaggtcgactctagaggatcccctcggggaattccaattccacattttcaagaaataaggaggcaaaaatgtgcatatatgaattggaattatttgttttcttattaggcctatcctgaagccaaaggaaatgagatcggaattcctcggggaattccaattccacattttcaagaaataaggaggcaaaaatgttcatatatgaattggaattatttgttttcttattaggcctatcctgaagccaaaggaaatgagatcggaattcctcggggaattccaattccacattttcaagaaataaggaggcaaaaatgttcatatatgaattggaattatttgttttcttattaggcctatcctgaaaccaaaggaaatgagatcggaattcctcgggggtaccgagctcgaattccctatagtgagtcgtattaaaatccgaatcatgtcatan

SEQ ID NO: 253876 - DNA, 379 bp, Glycine max
tcggggaattccaattccacattttcaagaaataaggaggcaaaaatgggcatatatgaattggaattatttgttttcttattaggcctatcctgaagccaaaggaaatgagatcggaattcctcggggaattccaattccacattttcaagaaataaggaggcaaaaatgttcatatatgaattggaattatttgttttcttattaggcctatcctgaagccaaaggaaatgagatcggaattcctcggggaattccaattccacattttcaagaaataaggaggcaaaaatgttcatatatgaattggaattatttggtttcttattaagcctatccctaaacccaaagaaattagaatcgaattcctcgggggtac

SEQ ID NO: 253877 - DNA, 331 bp, Glycine max
ctcgagccgattcggctcgagccatttggagaaatgaattgattcttgtaataatctgtgatctgatgagcagatagaaagagaagagaagttgatgtcaacagcagaagctcctcctccgttccaagaagcagcgcgatgcgttgtgtgcaattgcagtttcaacaccttcagaagaaggcatcactgtcgatcctgtgggagaacattgtgcaatgaacattcatcagatcaaatggctttaccacaatttggcatttactcaaatgtccgagtatgtgctgattgtttcaacaactcacggtctgggagggatgaaccacagacttct

SEQ ID NO: 253878 - DNA, 368 bp, Glycine max
gaagtagaggtcttaagagtttgagaactgagaagagatgggtggtgttgcatggacagaagaagaagatcacttgctcaagaaatgcatacaacaatatggagaaggaaagtggcatcgtgttcctttactggctggtttaaacaggtgccggaagagttgtaggctaagatggctgaactatctccgtcctaacatcaagagaggaaattttgcggaggaagaagtggaaatgataatcaaactccataaattactaggcaacagatggtcgttgattgcaagaaggctaccaagaaagactgccaatggttgtgaaaactattggaactggcatctgagcaaaaaactaaatgtaatagaagctg

SEQ ID NO: 253879 - DNA, 285 bp, Glycine max
gcaaaaagtacgttgctggaaatggattctacataattggggctcacacggatagtccttgtctcaaactcaagcctgtcaccaaggttgttaaggctgggattttggaagttggtgtccaaacctatggaggtggtctgtggcacacgtggtttgatcgagacttgactgtggcggggagggtcattgtgcgggaagagaatgctggttctgtttcgtactcacatcgccttgttagaattgaggaacctataatgcgaataccgactttggcaattcacttgg

SEQ ID NO: 253880 - DNA, 384 bp, Glycine max
gaatttcgctgttctgactatgcgggatacacatgccagaatagctccatgctcctatctagcctttcggtgtgcaaaaatgtgctgggaaatgatgtttctggacagcattgtgcacccagtgagcctagcatactacagcaactggaagaggttgttgtcatacccaactaccaccgactattccctggtggtgctagaaaattatttaatatatttggtagctcctactgtgatgagactgctaaacggcttgcctgctggatctcaatccagaagtgcgacaaggatggagacaacaggcttcgagtgtgccattctgcatgccagtcttataatctagcatgtggagctttacttgactgctctgatcagacgcttttc

SEQ ID NO: 253881 - DNA, 397 bp, Glycine max
  unsure (1)..(397): unsure at all n locations
aacacgcaaggtcagcagaaaccccgaattgataaggggaatcggaaagtactcgaggtcgcagatgtaccacaagaggggcatttgggctatcaaggccaaaaacggtggcgttttacctcgccacgaccccaaacccaaacctgaaactcccactgaaaaaccacccaaattttaccccgctgatgatgtcaagaaaccccttgtcaacaagcacaaacccaaaccagctaagctcagggctagcattacccccggaacagtgttgattcttcttgctggtagatttaagggaaagagggtagtgtttttgaagcagctaccttctgggttgctttttgtaacaggtcctttcaaggntaatggagttcctttgagacgtgtgaatcaggcctat

SEQ ID NO: 253882 - DNA, 339 bp, Glycine max
gggagcgtgagttcatgttctacagaaaccccagcgccgacatgctcctcaagcccgaagaactcaatctcgaactcatcagatctgcaaaagttttccattacggatcaatcagtttgatcgtggagccatgcagatcagcacacttgaaggcaatggaagtagccaaggaatctgggtgcttgctctcctatgaccccaaccttcgtctacctttgtggccttcggctgaggaagctcgtaagcaaatactgagcatttgggagaaagctgatttgatcaaggtcagtgatgcggaagctgagttcctcacaggaagtgacaagattgatgatgaat

SEQ ID NO: 253883 - DNA, 357 bp, Glycine max
  unsure (1)..(357): unsure at all n locations
tgtcttccgaagcaggaactaaatatggctgacttgttggaatggtcaaagcaagataagaaacgaatgcttcatgtcgtctaccgtgttggtgaccttgatcgcaccatcaaattttacacagaatgtttaggaatgaagcttttgaggcaaagagatatcccagaggagaaatatgctaatgcttttcttggatttggccctgaagaatcccattttgttgttgaattaacatataattatggggttacctcgtatgacattggcgatggctttggacattttgcaattgcaactcaagacatttataaattggttgagcacatcanggccaagggtggaaacatcacaagggaa

SEQ ID NO: 253884 - DNA, 388 bp, Glycine max
  unsure (1)..(388): unsure at all n locations
ggtaattatctcggctgtttctctcatcctggtggttggagtggccataggtgtggtggtggccgtcaacaagaagggcgaggatcccacacttcaatctcaacaaaaatcagtaggggttatctgccaaaacactgatgaccagaagctctgccacgaaaccctaagctccgtgaagggcatggacaccgctgatccaaaggcttacatcgccaaggcggtgaaagccaccatggacagcgtgaccagggccttcaacatgagtgataggctcagtaccgagtacggaggcaacgataacggaaccaagatggcccttgatgattgcaaggaccttttgcaatccgctatcgagagcctncaactcaacattgacatggttcacaac

SEQ ID NO: 253885 - DNA, 330 bp, Glycine max
caaggaactcaagaacggtcgcttggctatgttctccatgtttggtttctttgttcaggctattgtcactggcaagggccctattcagaacctttacgaccacgttgctgatcctgttgccaacaatgcttgggcttatgccactaactttgtccctggacaatgaggatgcctacatgcaatgcaatcttctgctcccttttgcagttcccttgtgtttaactccattttcactaatgtaactacacctgtgtagcagaaaaatctgtatgagaaccattatatttttatatattagaaatttgggtccccagaaaatatcaactctta

SEQ ID NO: 253886 - DNA, 390 bp, Glycine max
ctggccccaagcacgtcagccttactcccctgatacggttgattatatcaaatctctggatgccgagaaagacatagagcttctgaaatatttcgggtgggatgtcccggttgagtgtgcacgaacactccgaatctccacaatgttattgaagaaaggggttgagagaggtctcactccttatgacattggaagcattatgtgtagggaaaatttgaacaaagaatctgtcatcgaggagattatttgtgaagcccaagaatcattgctacctggcatggaggaatctgtgtttcttgaatctgtctcccagatcatggattcccgccttggatagctttcaaaatagactctctttgattcatagttatataataacaataatatata

SEQ ID NO: 253887 - DNA, 383 bp, Glycine max
cctctgtctcctcctcaatcttcattgtgctgggctttcccttggtgacaaaccaagactaacacacacagaacatagcttgtgttggtgaggtgagaagataaagaaagaatggcatttgcaggaacaacacagaagtgtatggcctgtgacaaaaccgtttatctggttgataagttgaccgcggataaccgaattttccacaaagcttgcttcagatgccatcactgcaaaggaaccctcaagctgagcaactacaactcttttgagggagttctttattgtaagccacactttgaccaactgttcaaaagaacagggagccttgacaaaagctttgaaggaacaccaaaaattgccaagccagagaaaaatttggaaga

SEQ ID NO: 253888 - DNA, 537 bp, Glycine max
  unsure (1)..(537): unsure at all n locations
gtagatgagtggtgagagtgacgtgnagttttattgtacaagaagcagtaccgtcactaccgggagagacaagcttgcatgcctgcaggtcgactctagaggatcccctcggggaattccaattccacattttcaagaaataaggaggcaaaagtggtcatatatgaattggaattatttgttttcttattaggcctatcctgaagccaaaggaaatgagatcggaattcctcggggaattccaattccacattttcaagaaataaggaggcaaaaatgttcatatatgaattggaattatttgttttcttattaggcctatcctgaagccaaaggaaatgagatcggaattcctcggggaattccaattccacattttcaagaaataacgaggcaaaaatgttcatatatgaattggaattatttgttatcttattaggcctatcctgaagccaaaggaaatgagatcggaattcctcgggggtaccgagctcgaattccctatagtgagtcgtattaaattccgaatcatgtcat

SEQ ID NO: 253889 - DNA, 379 bp, Glycine max
attgcaatcaaattagttcattctctttgcgcagttccctacctctcctttcaagatgcagatcttcgtcaagaccctcaccggaaagaccatcacccttgaggtggaaagctctgacaccatcgacaacgtcaaggccaagatccaggacaaggaaggaattcccccggatcagcaacgtctcatcttcgccggaaagcagctcgaggacggccgtaccctcgccgactacaacatccagaaggagtcaacccttcaccttgtccttcgtctccgtggtggcatgcagatcttcgtcaagactctcactggcaaaaccataaccctagaggtcgaaagctctgacaccattgacaacgtcaaggccaagatccaggac

SEQ ID NO: 253890 - DNA, 393 bp, Glycine max
aaacatctcaatgggttcttcttctattacaacatcgcccgcaaccatgaccatggctgcgatcgtgctcctgttcacggtctttgccgtttcctccgccctagacatgtcgataatctcgtacgacagcgcccacgcggacaaggccgccacgttgcgcaccgaggaggagctgatgtccatgtacgagcagtggctcgtgaagcacgggaaggtgtacaacgcgctcggcgagaaggagaagcgcttccagatcttcaaggacaacctgcgattcatcgacgaccacaactccgcggaggaccgaacctacaagctcggactgaaccgggtcgctgatctcaccaacgaggaatacagggcccagtacttggggaaccaagatcgatccca

SEQ ID NO: 253891 - DNA, 270 bp, Glycine max
ggctgttgttcaggtctttgagggtacatctgggattgacaataaatttacaactgtgcaatttaccggagaggtgttaaaaactccagtatcattggacatgcttggccgcatattcaatggttctggaaaaccaattgataatggtccacccatattacccgaggcttacttggacatatcaggaagttccatcaaccctagtgagagaacctatcctgaggagatgatacagacagggattatctaccattgatgtcatgaattcta

SEQ ID NO: 253892 - DNA, 299 bp, Glycine max
ggttcacaatcaatggccactcttacttcaacctagtttggatcaccaatgtggctggagctggtgatgtgaattcagtgtccattaaagggtccaaaactgggtggcagcccatgtcaagaaactgggggcaaaactggcagagcaactcatacctcaatggacaatccctctcttttcaagtcaccaccagtgatggcagaactgtgacaagcttcaatgtggcaccagccaattggcaatttggccagaccttccaaggaagccaattctagagacattattgcaatgagggatag

SEQ ID NO: 253893 - DNA, 392 bp, Glycine max
caaacttaattattaacacttccttagttcaatatggggaagcccttcactctctctctttcttccctttgcttgctactcttgtcgagtgcatgctttgctattagctccagcaagctcaacgagtgccaactcaacaacctcaacgcgttggaacccgaccaccgcgttgagtccgaaggtggtttgattcaaacatggaactctcaacaccctgagctgaaatgcgccggtgtcactgtttccaaactcaccctcaaccgcaatggcctccacttgccatcttactcaccttatccccggatgatcatcatcgcccaagggaaaggagcacttggagttgcaattccaggatgtcctgagacgtttgaggagccacaagaacaatcaaa

SEQ ID NO: 253894 - DNA, 368 bp, Glycine max
gttcttcatcatagtcttaaacattaaaccttagcaaaagtcaacaatgctagacatcaaaggctacctcgtactcttcttcctatggttcatatcaaccattctgatacgttccatcttcaagaaaccacagcgtctaagactcccaccgggtcctccaatttcaatacccttgctgggacacgcgccatatctccgttcactgctccaccaagcattgtacaagctatcactgcgctatggacccttgatccacgtcatgatcggttcgaagcacgtggtggtggcgtcgtcggcggagacggccaagcagatcctcaaaacctcggaggaggcattctgcaaccgtcccttaatgatagcgagcg

SEQ ID NO: 253895 - DNA, 377 bp, Glycine max
tgatggtgcaatcacaaaccaagaacttgttcaaagggcaagagagaagctgaagaactccggtttcactcaaaaaccgggactctattgcagtgatcatcatgttgatgctccttttgtgtgttgatctgttctcatctgatgcagagaaagagagaataatatgtgttgtttatagtctgcttgtgtattgctgtatagttggagactcaaaatgaagttaatgttttcatccagttatcatatgctgctctattatcaggaattatattccttcaacattttagcccttgttgtgtctttgctgctacatgaccattgggctgggagaccaaactatcagagcaggttccatgcacccaaccacagattttggc

SEQ ID NO: 253896 - DNA, 389 bp, Glycine max
attcatttacatcgtttcatcattttcataattgaatagtgtgcttaatatgatttgatgacctgaccattccgtctcttaaaattgtatgaatagtgattccttggctgcgattggaggcatggatcaaagactggtcatctgggatatacaacatttcttatctcgagccacctgtgaccatgagggtggagtgacatgtttgacatgggttggttcatcgtgtgtggctactggatgcgtggatggaattgtgagattatgggatattcggtctggtgaatgtgtagaaaaattcagggggcactcagatgcccttcaatctctttgtgagtctgctaatggggattatattgtcttgggcttcttggatcatacagcttggggtt

SEQ ID NO: 253897 - DNA, 424 bp, Glycine max
  unsure (1)..(424): unsure at all n locations
ggctaactgcaacaaattcagaggcctgaaacccagagagcacgctgcactcaaggactgcgccgaggaaatcagcgacagcgttgaccgcctcagccggtcgctgaaggagctcaagctatgtaaggttaagggtgaggacttcacgtggcacattagcaacgtggagacatgggtcagttctgctttgaccgatgagagcacttgcggcgatggattctccgggaaggcgctgaatgggaagatcaaggactctattagggctaggatgctcaatgttgctcaggttactagcaatgctctctcgcttattaaccactatgctgcacaacactagttgggaacaatgatcttggttgcttaatgctntacttttcttcttttatgtgctctatgtaattattatatatgtgagtctttatag

SEQ ID NO: 253898 - DNA, 337 bp, Glycine max
ggataatatccgtggaaatgctgtcgcatctggacctgttatgactgtccttatggagggtgtcatgaattcttcagaagtgagcgacgttgtgaatgcagcaacgtctcaatcacttgttggtcgcatgggagaagctaaacagatatcagcattagttgcttttctttgccttccggttgcatcatacatcactggacaagttatatgtgttgatgggggtctcacaacttaattagtattctgttaattactatcatttggctgctgaattaaattctaatgtatgcagttggtgtttcctgcaaccccattcatgctttgcatatcattgggc

SEQ ID NO: 253899 - DNA, 458 bp, Glycine max
cacacttacccccaactaacaataattccttcacttgcagaacttaggttctctgttgcatcatcatcatcttcattagtgttagccctaaacttcaccttcaaccatgaccacagtgccaccacacagtgtccaagtgcacacaacaacacaccgctacgaagccggcgtcgtcccgccggctcgttttgaggcgccgcgttacgaagccggcatcaaggcgccctcttccatttaccattccgagagaggtccgacgacctctcaggttctcgcagttgtcgccggccttccggtcggcggcatcctcctgctcctggcaggactgaccctggctggaactctcaccgggcttgtggtggcaacaccgctcttcatcatcttcagcccggtgctgattccggccacggtcgcaattggcctggccgtggccgggttcctgacgtcgggagtctttg

SEQ ID NO: 253900 - DNA, 452 bp, Glycine max
  unsure (1)..(452): unsure at all n locations
cccaactaaccaaaccagctatggcggcgatgcagaggccactcaggagaaccattgcaatcgccaagctacgcgcgtgcttttcctctctccgacccgccgccgccgccgacatcgtcgcgtctcctccgccgcagctcccgccgttcgatcaccagccgcacccttacaacggtcccttcgccgatgaagtcctcgccaagcgcaaaacgttcctcggtccttccgtcttccactactataagaaacctctgaatatcgtggaagggaagatgcaatatctgtatgatgatagtgggaggcgttaccttgatgcatttgcggngatagttactgtttcttgcggacattgccaccctgaaatcttgaatgccatcacggagcagagcaaacttctgcagcatgctacaaccatatatctacatcatacaataggtgattttgctgagtca

SEQ ID NO: 253901 - DNA, 298 bp, Glycine max
aacatattctcctctcattctcactcaaaacacaaaatcctaactaaggtgaaaatgaaggcatcacgcattgctttgttcactttggtggtgcttctttttgtggctgaagttcaagtgtcaaaggcagtgacctgcagcccagtgcagctgagtgcatgtgtgagtgcaataacctcttcaacccctccatcaaacctatgctgctccaagatcaaggaacagaaaccatgcctttgccaatatctcaggaaccccaatctaaaaaagtttgttgactttcctaatgcaaggaaag

SEQ ID NO: 253902 - DNA, 429 bp, Glycine max
cataaacccggcggtgacattcgggttgttcctaggacgcaaggtgtcgttgataagggcgttgttgtacatggtggcacagtgtgccggtgctatctgtggtactggattggccaaggggttccaaaaagcatactacaacaggtatggaggtggtgccaactctgttgctgatggctacaacaatggtactgctttgggtgctgagattattggtaccttcgttcttgtctacactgtcttctctgccactgaccctaagaggaacgctagggattcccatgttcctgtactggcgccacttcctattggatttgccgtgttcatggttcacttggctacaatcccaattactggtactggcattaacccagcaaggagtttcggagcagctgtaatttacaacgaagacaaaatctgagatgatca

SEQ ID NO: 253903 - DNA, 431 bp, Glycine max
  unsure (1)..(431): unsure at all n locations
ctagaagcaataagatgaaaatgaaagtgcttgttttgtttgttgctacagttttggtagcatatgaatgccatggctcagactaccagaagttccctctccaaatgaaaactgggtttggtgggcaatacagcaatgaggtggcatgtgccagttggaggcttggcgtggaagcaaacaacgtagtcaagtggcaaactgttcctgcagcttgcggagagtacatagctgactacgttctaggagaccaatatagatcagattccaaaacagttaaccaacaagcttatttctatgcttaatcccttaaactcaccaacanagatgtctttgtctttgacgttgacgacactactctctctaatctccagtattttgctaaccatggatttggtgtggaaccacacaatacgacggcgtttaagaactgg

SEQ ID NO: 253904 - DNA, 376 bp, Glycine max
cccgtgtggaggatcccaccattctcatgcttccacatccacacgggccgttcccaatcccttcgcactttcgccagaatccgggtcggacccaggtcgtgggctcctattcgggcatcggcagcgagctcggagagaggggagatagtattggagcagaagccgaagaaggatgacaagaagaagctgcagaagggaatcgcagagttttacgacgagtcttctggcttatgggagaacatttggggcgaccacatgcaccatggcttttatgactcggattccactgtttcgctttcggatcatcgtgctgctcagatccgaatgatccaagagtctcttcgctttgcctctgtttctgaggagcgtagtaaat

SEQ ID NO: 253905 - DNA, 348 bp, Glycine max
ctcttctgcggcgtagcaatgggacactccaacgtttggaattctgacccaaaaaactacggtcctggttctcgcacttgccgagtgtgtgggaatccacatggattgatcaggaagtatggccttatgtgctgcaggcagtgcttccgtagcaatgccaaggaaattggcttcatcaagtatcgctaaaagagctgttgtcacctacggaccaatattatgttctggcactaggatgttttgaagatgttatgtttgaagaaacttgagacttgtttttttcatctattttattatcagacataatgtgtggaacgaagaatacttttatataaattgttttgcact

SEQ ID NO: 253906 - DNA, 433 bp, Glycine max
  unsure (1)..(433): unsure at all n locations
ctcgagccgcaagaatattctagaggcctcatacgacaccaaattggaggagataaacaaggttctgtttggtagagaggaggggcagcaacaaggggaagagaggctgaagagagtgtgattgtggaaatctcanagaaacaaattcgggaactgagcaaacatgccaaatctagttcaaggaaaaccatttcttctgaagataaacctttcaacttgagaagccgcgaccccatctattccaacaagcttggcaagttgtttgagattaccccagagaaaaaccctcagcttcgggacttggatgtcttcctcagtgttgtggatatgaacgagggagctctttttctgccacacttcaattcaaaggccatagtggtactagtgattaatgaaggagaagcanacattgaacttgttggcattaaagaac

SEQ ID NO: 253907 - DNA, 392 bp, Glycine max
  unsure (1)..(392): unsure at all n locations
cgatcttttcctctgagaagacgtgtcggtagctgaagcattttataagcctncactttcctgaactagttntaacatacaatctttcaagtacacctncncagcttccatttaagaatggagatcactagaataggccaatggttaagtcttctgatatgtgtactactattactgcagacaaaagggttcctgggggatcacttttgttgaaaatgcagtggcaaaggggcttgttgtttggagggaatcctncagcttaccactttcacaagggatctggagcagggattaaacaactggatagntcacttttgagggaggaggatggtgcaacaacgttactacttgcctttcccgtaaggacactcgattaggttcatctaagaaaa

SEQ ID NO: 253908 - DNA, 419 bp, Glycine max
gttgtgtccctcttttaagctatttccttctcttaacacaattggttgtgccaattgccatagtcaccaaccaattaacaaaggtatatatatcatcatatcatcaccaaatgaaaaatattgggttgttttttcttgtggtggtggctacttttgtggtggcagccacagctggtagcttttaccaagactttgaaataacgtggggtggtgagcgtgccaaaatctatgagaatggaaaccttctcacactctcccttgacagagcctctggctctggctttcgttccaaaaaagagtacttgttcggaaaaattgacatgcagctcaagcttgtgcctggtaactctgctggaacagtaactgcctattatttatcttctctggggcctactcatgacgaaatagcctttgagttt

SEQ ID NO: 253909 - DNA, 255 bp, Glycine max
ggacaaagccccctttatgctttgtttgttatgtaaggaatgactagataaacttggaataaaacttcctctcttttcgtggcccataatttgctttctgcaaatctgggtcttcttcattccaaaaaaaaaaaaaaaaaaaaaaaaaaaaaaaaaaaaaaaaaaaaaaaaaaaaaaaaaaaaaaaaaaaaaaaaaaaaaaaaaaaaaaaaaaaaaaaaaaaaaaaaaaaaaaaaaaacaaaaaaactagaaaaa

SEQ ID NO: 253910 - DNA, 397 bp, Glycine max
  unsure (1)..(397): unsure at all n locations
gaccaacacttccattcttttttttttttttttttttccaacctaggggggccaaccaatccgcccttaatttgggaaggttcggccgggcaacctcttccttcttaaccggggcctccggccggcgcttttcttccaacgtgccgggaacccccgccggggttcccggcttcgcgaggcgtggaaaaaagtgggccccaacaatcgaaccggcgaaaacgccggttggcgtacatgaaagccctgaccacccacttcctcggctcttccttcncaagctcacagtcaacttcgtcttgccctactcttctcaattggccgcaaaagaggttgatatggtcattgtaccagcaacaactgggcagatgggtgttctcccaggacatgtagcaacaat

SEQ ID NO: 253911 - DNA, 466 bp, Glycine max
  unsure (1)..(466): unsure at all n locations
ttcagccgacaccaattcttcaatgcgcaccttaacggcttcaaggttaaggaaccgttcctttcggttccccgaaccaccaagctcaggaccgaaaactccaccgtcaaaattgagaattctgacggcgccaaagacgccggagccgtcggatctggcgccgncgncgncgcgggaccggtccccgggattgtggttaaggaggacccgactaagatttttactgataatttgcaaaccagtggggcttacactgccagggaggagagtctcaagaaagaggaggaagcaggaaagctcaaatttgtatgcctttcaaacgatggtgttgatgaacatatggtttggttgattggattgaagaatatatttgctaggcaacttcccaatatgcccaaggagtacattgtccgacttgttatggataggagccataagtctgtaatggttataaggcgcaatcacg

SEQ ID NO: 253912 - DNA, 422 bp, Glycine max
  unsure (1)..(422): unsure at all n locations
attgttggagagactactataagtggagatgcatcccgctagactggcctgttgctttgcttcttcaatggccacttacaatatatcatgctgctcgacttgttggaattacagccttgaatcctgaaatcagtgataagttgtacattcattaccttggacctgagaaagagttgctacaacttgctgtgtttggagaattactggcactcttccccggtgtacgaattcatatagaacttgttggacctgcaattcctcctcaaagggatggtgagatgattcacatttctaagtatccttgttgcaatgaagacgaatgtgaatgcaaaataggaagtaaaaatacattcttagaaacacaatctggtatcacttncactttgacattgcaactttggcaaggattctatcatgatcga

SEQ ID NO: 253913 - DNA, 393 bp, Glycine max
  unsure (1)..(393): unsure at all n locations
acaacatatagccaacgtaacagaacccgttaatttgtgtattgaattaaaaattgagaggaatcgtgggtatcgtataaaaacactaaaaaactttcaagatggaagttatcctatagatgccacatttatgcctgttcgaaatgtaaatcatagtattcattcttatgtgaatgggaatgaaaaacaagagatactctttctcgaaatatggacaaatggaagtttaactcctaaggaagcgctttatgaagcctcccggaatttgattgatttatttattccctttttacacgcagaagaagataactttaatttagaaaacaatcaacacaaagttactttgcccctttntacttttcatgatatattggctaaggaaaaactaaggaa

SEQ ID NO: 253914 - DNA, 450 bp, Glycine max
cccataaccaacaacatgggactaccgttggttatgctggtgacactggaaggcagcatgggaatacaggtggcctttactatggaaccgacaccgcggacacaggaaccggtcctagaagtggaaacaccggtggcaccggttatggaggcactggtggtactgattatggaacagctggtggcactggttatggaagtggaactggctatggaatcaacactgggggtgcgcacactgaagcagggtatgggaaggagcatcgtcagcatgagcaatctcatggtggtcagcacgagaagaaagggatactggacaagattaaggagaagcttcctggaggacacagtgacaagtagatgcatcgtgcatgcatgcatatagtatatatataataatggtgtctttgaataaatttgctgcatatgtacttggaggatatagcatatg

SEQ ID NO: 253915 - DNA, 425 bp, Glycine max
cagagtttgaactttgaacgttgaaggaacatagaggcagaggttggtcttctctcaccgtagaatcgaatcgagttcactttgatcgtgtgtgtctccgatcttcaaatccgcaacaaccatggtgaggggattgctcaacaagctcgtctctcgctccctctccgtcgccggaaaatggcagcacaaccaactccgccgcctcaacatccacgagtaccagggcgctgaattgatgagcaaacacggagttaatgttccgagaggcgtggctgtttcctctgttgaagaggtcagaaaggccatcaaggaccttttccctaatgaaaatgagttggtggttaagagtcaaattttagccggtggaagaggtttgggaactttcaaaagcggccttaagggaggagtgcacattgttaagactg

SEQ ID NO: 253916 - DNA, 304 bp, Glycine max
ggctcgagaaagaagcgatacatgcacctgacggaggagtggctgagagagaacccgaacatgtgcgagtacatggcgccatcgctggacgtgagacaagacgtagtggtgatggaggtgccgaagctgggaaaacaagccgcaacgaaagcgattaaggagtggggtcaaccaaagtcaaagatcacacaccttgtgttctgcaccacttcaggcgtggacatgcccggagcagattaccagctcacgaagcttctcggcctgaggccctccgtgaagcgcctcatgatgtatcagcagggct

SEQ ID NO: 253917 - DNA, 287 bp, Glycine max
aaatattttttagttttaactctacggtatagaagaaatagaaaaggatcatataaaagttttttaaatttaaaacggatcagtacacccggtctacgaatatattctaattatcaacgaatccctcgaattttagggggcatggggattgtaattctttcaacttctagaggtataatgacagatcgagaggctcgattagaaagaattggcggagaagttttatgttatatatggtaatctttctaacacccgaattatatgagaaacttcgatccatttttggt

SEQ ID NO: 253918 - DNA, 433 bp, Glycine max
  unsure (1)..(433): unsure at all n locations
ccggttgagcttttttaaaacctacccaccccaccaaattcaatttgccatggagaagtttggtggaaagggaaaacgttccggcggtgtgtaaggaagatgatcagatggatttgccttccggatttcgattccacccgacggatgaagagctcataagccattacctctacaagaaggtcattgacaccaagttctgcgccagggcaattggagaagtggacctcaacaagtccgagccttgggatttgccatggaaagccaaaatgggagaaaaagagtggtactttttctgtgtgagagacagaaaataccccactggcttgagaaccaacagggccacagaagctgggtactggaaagccacagggaaagacaaagagattttcagaggaaaatctttggttggaatgaagaaaactctggntttcta

SEQ ID NO: 253919 - DNA, 556 bp, Glycine max
ggagtacgtgtcgtctggtaacgggagaagagatgggaatactttcgacgagctatgacgtcgcatgcacgcctacctaaacttcgaaatccggttcagccccttatccaagggcttcctctctcctctctccataattaacttcgttcccccgcataaggaaggagggctctctctctgctttcacttctcagcgatccttcaaagcgcttccaaggagaataatccgttgtgctgtggcggcgcctcaccgccaaccttccaccactggatcagtgaggactgcaatgaccatgactgagaagatactggccagagcttctgagaaggtacagctgacccctggcgataatgtttgggtcaatgttgatattttgatgacacatgatgtgtgtggccctggttctattgggattttcaagagggagtttggtgacgatgccaaggtttgggaccgtgaaaagcttgtaataatacccgaccattatatattcacaagtgatgaacgtgccaatcgcaatgtagacatattaagagatttctgccatgagcagaa

SEQ ID NO: 253920 - DNA, 464 bp, Glycine max
  unsure (1)..(464): unsure at all n locations
gttgaggccagggtggttggaatggggcctaccatgggaaaacaggctgttaggagcattgtggcaggtggactagccagaaggtgcatggggcaggtgtctaatgccattggggtgcccaagcctttgtctgtctttgttgacacctatggcaccgggaagatccatgataaggagattctcaacattgtgaaggagaactttgatttcaggcccggtatgatctccatcaaccttgatctcaagaggggtgggaataacaggttcttgaagactgctgcatatggacactttggcagagaggaccctgactttacattggaagtgggtaaagcccctcaagtgggagaagggcctaagccattcatttcactgcaatgtgctgggagttttttagcgttgcccttataatgtctattatccataactttccacgtaccttgctctgngtttntctctcgtcg

SEQ ID NO: 253921 - DNA, 412 bp, Glycine max
cttcgtctcaaatctcttcgttccttcgattcgttccatttcttccgaaatggccaaagacccagttcgcgttctcgtcactggagctgcagggcaaattgggtatgctcttgtccctatgattgctaggggagtgatgttgggtcctgaccagcccgtgatcctccacatgcttgacattcctccggcagcagagtcattgaatggggttaaaatggaattggtggatgctgcattccctcttcttaaaggtgttgttgccacaactgatgtggttgaggcatgcactggggtcaatattgccgtgatggttggtggattcccaagaaaagaaggtatggagaggaaggatgtgatgactaagaacgtctccatttacaagtcccaggcttctgcccttgaaaagcatgct

SEQ ID NO: 253922 - DNA, 351 bp, Glycine max
ggagttccccttgcgattactttcagtgtcccttttgctctagcggcaatatactgcagcgcttcaggagcaggacaaggtttatctttgggagttctcaatcttgcaattgtggtaccacagatggtggtgtctgcattaagtggtccttgggattccttgtttggtggtggcaacttgccggctttcatggtgggtgctgcggcagccgcgttgagcgccataatggcgattgtcttgctgccaactccaaagccagctgatgaggccaaggcttcaagcatgatggcagggggctttcactagttaatggagttttgcatgtttcagttttgtcccctgctttaatag

SEQ ID NO: 253923 - DNA, 379 bp, Glycine max
tcataacacaaagcacaaagcaaagctcatccttgagttaaaaaatggcagcagcttcttccatggctctctcatccccatccttggctggcaaggccgtgaagctgggcccatcagccccagaagtgggaagggtgagcatgaggaagaccgtcaccaagcaggtctcctcaggaagcccatggtacggcccagaccgagtcaagtacttgggcccattctctggcgagcccccgtcctacctaaccggtgagttcccaggcgactacggctgggacactgctgggctttccgcagacccagaaaccttcgccaagaaccgtgaactcgaagtgatccactccaggtgggccatgctcggagccttgggctgcgtctt

SEQ ID NO: 253924 - DNA, 386 bp, Glycine max
  unsure (1)..(386): unsure at all n locations
agaaactggacaagacaggaaagaaaatgttgtgcagacatctgaaaatgcagctggaaccaagtctggcaagccaaaaataaaaggagtctcattaactgaattatttactccagagcaagtcagggaacatatcactggcctcaggcaatgggttggccagagcaagtcaaaagcagagaagaatcaagcaatggagcattcaatgagtgagaactcctgccaattgtgtgctgtagagaagcttacctttgaaccaccgnctatttattgcacaactttgtggggttcgcattaaaccgaaataatatgtattataccacggggcaccggtgacacaacgggcattatttttgtcttccatgctataatgatgctcgtacaga

SEQ ID NO: 253925 - DNA, 437 bp, Glycine max
cagctatgacgtccatgcacgcgtcctagcttgggattccggttcagggtggattcaggaccgatgcttttttcaaaactaatctttccgagggtatgctgttggtgatgttgctactttccctttgaaattatacggtgaattgagaagagttgaacatgttgatcattctcgcaaatcagctgaacaggctgtgaaggccataaaggcagctgaggaaggaagaacagttgaggagtatgattaccttccatacttctattcccgttcatttgatctgtcttggcaattctatggcgacaatgtcggcgacacagtactattcggagacaacaatcctgcgtcgtcaaagcctaagtttgggacatactggattaaagatgggaaagttgttggggtctttctggaaggtggaactcctgaagagaaccaggcta

SEQ ID NO: 253926 - DNA, 419 bp, Glycine max
  unsure (1)..(419): unsure at all n locations
agctatgacgtcgatgcaccgtactagctcgaatttcggtcgagttncacacatttttttctacaagaactcaaattacaaacgtatgtttcaactctttttgcaccaacttataaaatcctcatatctgttcccaaaagcttgttgtgagaatggacttcggtgaaaagagattcccaccttaaccaacaacaaacacagcctgggaaggagcatgctatgaatccagtaccccaattcactagccctgactacaagccttcaaataaacttcaaggaaagatagcattagtgactgggggtgactctgggattggacgagcggtgtgtaacttgtttgccttagaaggtgctaccgtgggcttcacatatgtgaaggggcatgaagacaaggacgcgaaggacacgttggaaatgat

SEQ ID NO: 253927 - DNA, 397 bp, Glycine max
  unsure (1)..(397): unsure at all n locations
cttcaagtgcttttaacggaatcgcttctcctccttccttcggtttcaggagccaacgagaacaagagcaaggttccagaagacaaatggtatttagcctacattgtgtattttaccctgngtctcggttaccttctcccatggaacgctttcatcaccgccgttgattacttctcctttctctaccctgacgccagcgttgaccgcatcttcgccgtggtttacatgatagtcgggctggtggggatcttccttataatcctctacagtcacaagtcttacgcctatgtgaagatcaacgttggattggccctattcgtcgtttcgcttctcgtcgttcccctccttgatgccttttacataaagggtccggtcgggttttatagcgggttctacg

SEQ ID NO: 253928 - DNA, 354 bp, Glycine max
  unsure (1)..(354): unsure at all n locations
tctttctgcaccatcgttctccatttttggctttacaaaaccactgtgtctgattaagggttctttaatatttccaatatttcttgtagtgaaaaagttgttagctaaaagaagaccaagtttttggtgttgtagaaggaagagaagaattaacatgaaaattcagtgtgacgtgtgtgagagagctccagcaacagtgatttgttgcgcggatgaggctgctttgtgtgccaaatgtgacgttgaagttcatgctgcaaacaagcttgcaagcaagcaccaaagacttcttcttcaatgtctatcaagcaagcttnccacatgtgacatttgccaagacaagccagcattcat

SEQ ID NO: 253929 - DNA, 405 bp, Glycine max
ggccgacgaagccaaagccaaaggcaacgcagccttctcctccggggactatcctgccgccatccaccacttctccgatgccatcgccctggctccctccaaccatgtcctctattccaaccgatccgccgcatacgcctccctcaaaaactacgcagatgcattagcggatgccaaaaagacagttgaactcaagcccgactggtccaagggttacagccgtctcggtgccgcgcatcttggcctttcccaatacgatgatgctattttggcttacaaaaggggtctcgaaatcgaccctcacaacgagccccttaagtctggtttggcagatgcgcagaaggccttggccgcggcctccaggcctcgcccctcggcctctaaccccttcggtgatgctttctc

SEQ ID NO: 253930 - DNA, 405 bp, Glycine max
gaaaaccaggttccccatctcacaaatcagtgtgatgggttttgtgtattgtgatttctgctccaacaacagcttttccagacacagctacttcttgccaggtgctgaggtcaaggtagattgcatgttcaaagcactttcagagaaaacctctgagcagatttcactttcagtgaacagaactaccaataagtatgggatgtacaagctggaaatcccttcagtggatggagtgaaatgtgcagaagattctgcagttgtgtcttcttgccaagcaagcttaataggtagttcatcctctgcttgcaatgttcctggctacaaaaccacttctaatgtgatagcaatcaaagcaagaagagccaatctctgcatatacagcttcaatgctttgactttcagacc

SEQ ID NO: 253931 - DNA, 432 bp, Glycine max
aaagaaagaaagaaagaaaaccctagcttaccttttcaactttcaagatgcaaatctttgttaagacactcactggtaagacaatcacccttgaggtggagagttcagataccatagataatgtaaagtccaagattcaagacaaggaagggatcccaccagaccagcaacgtctcatttttgctggcaagcagcttgaggatggacgtacacttgctgattacaacattcaaaaggagtccactctacacttggtgctccgtcttcgcgggtggaatgcaaatctttgttaagaccttgaccggaaagacaatcacccttgaggtcgagagctctgacaccattgacaatgttaaggctaagattcaggacaaagagggtatcccaccagaccaacaaaggcttatctttgcaggaaagcagctagaagat

SEQ ID NO: 253932 - DNA, 346 bp, Glycine max
cgctgctctttctaactttcctttcccgatctccggccataccccatgccgcacgcagattagggaatcgaacttgtgaatggaactgagttgattttctaagatggaaaaggaaaataaggtgaaggacactgcaagtgatgacggttattgttggtggtggttggttcaagaaaggaacaacagctgtattcatcactgttgggttgtttgcattgttggtccgtgtggctgtgtcactgcacccttactccggcgctggcaaccctccgaaatttggggactatgaggctcagagacattggatggagatcaccattaaccttccaattaaaggaatggtata

SEQ ID NO: 253933 - DNA, 452 bp, Glycine max
  unsure (1)..(452): unsure at all n locations
acaataccaggtgattntgtcattggtgttaaagttgacaaccataggcaatatgtgtgcatatgggctcaatcctggtatttcaggttctcgtcttttgggcaccattcctcagtccatttcacagcaaactgtttggaatcaaatggcaacagtgagaacaccattgaattttgattctagcaagcagagcttttgtcaattttctattgaccttctcggtggaggaattttagtggacaaaactggagattggatcacacttatacaaaattctccaattagtaacttgttgagagttgctgcttggaagaaaggctgtttaatggttaagattgtgatgtctgggaatgcagcagtcaaaaggagtgattgggcctcattggtacaagtgtttttaacaaacagcaacagtacagagcattttgatgcatgtaagtggacaaaatcgg

SEQ ID NO: 253934 - DNA, 452 bp, Glycine max
ttcaggtcctgaaggcatggttccagaaaatagtgaagttgctgaaactttgttaggtcaagttgacagggctgctgtattccacaatgcaagtacacggttttgtgatggagcacgctttgggcttggcgcaaaggttggaattagtacaagtcgaattcatgctcgaggtcctgtaggagttgagggttgttgacaaacagatggatattgagagggagtgggcatgtggttgatggagatcaagggatcaattacacttacaaagagttgccactaaaagcataactttgcatgcaacttagctcactttcaagctataacatgctcacctcaacaaagcagcatcacttttctggtctggtatgatatgcagaagttgctgagatgctggccatgtataatcgtaactatcacttgaccctttccagggcctttttcttacctggagc

SEQ ID NO: 253935 - DNA, 449 bp, Glycine max
ggcgtcaccctgaaaatgttgaacttgataaagttcaagtggttcgttactgtgctgctgggtctaagccttggaggttcactgggaaggaagagaacatggatagggaagatatcaagatgcttgtgaagaagtggtgggacatatatgaagatgagacactggactacaataacaactctgtcaacgtggaacgtttcacatcggcactattggatgctgggggctttcagtttgtgccagcaccttctgctgcctaatatgcttattatttacagctacaaattaatgttaattaacgacaaagtatatgtattggtatttgctttttttcgtttttgggtcttatatatgaaggaacaacgtctatggttttaatttggatgaccttcttgtatacaaagccacatgtgatctcatacagcttttgattattattaagaaattag

SEQ ID NO: 253936 - DNA, 415 bp, Glycine max
ggcatcttcttctggtagtttagacacctctgcaagtgcaaactcgcttcaccaacttcaccttctccacacaccctttcatgaccacttctttctctgaccttcttgcttctcccacagacaacaacaaaccaccacatggtggtggtggtggtttgtctgagagaactggctctggtgtccccaaattcaagtccacaccaccaccttctctgcctctctctccccctcccatttctccttcttcctacttttctattcctcctggattgagccctgctgagcttcttgactcacctgttctccttaactcttccaacattctgccatctccaacaactggagcatttgttgctcggagcttcaattggaagagcagttccggtgggaaccagcgaatcgtcaaagaagaaga

SEQ ID NO: 253937 - DNA, 412 bp, Glycine max
  unsure (1)..(412): unsure at all n locations
gccgagttccgccgccagttcctcggcctcaagccgctccgcttcccggcgcacgcccagaaggcgcccatcctccccaccaaggatctccccaaggatttcgattggcgagacaaaggagccgtcactaacgtcaaggaccaaggggcgtgtggttcgtgttggtctttcagtacgacgggagcgttggaaggagctcattatctggccactggtgagctcgtgagccttagcgagcaacagcttgtggattgcgatcacctgtgtgatccagaagaatatggaacgtgtgacttcaggctggaatggtgggttgatgaacaacgcatttgagtacatacttcagtctgggggagtacagaaagaaaaggactatccatacnaccggagagatggcaccttgcaatttgac

SEQ ID NO: 253938 - DNA, 435 bp, Glycine max
ccagaatgttagtgtctctgtgatggttgggaggaaggattcaaataaggttgctcgtgtaataaacaagtccatgtttgattacatcgatcgttcatcatatagagccttggcttttgattacctagacatatcccctggctacccatttttgtctggcatccgtgcatggatctctttgctattcatggaagatagaaatgaagatctcatggatgtatttgggatccaaatggatttctgtgatgtagcaaattctaaggaagaagtcttgtggctgttggacatgcttgactggaagtaaatgttcaagaaaagtgtggtgccccatcattacaacaaaaagtaattggacattgtgattttatgttaacttgtttgttgatacggggtgcattacaaagtttaccatattatcagcaccaataatttgcg

SEQ ID NO: 253939 - DNA, 400 bp, Glycine max
cttcttccttttcttcaccccgtacattcacaactctggccctcttcaaatctaagaccaaagccgctcctgctaagactaaggttacaaagccaaagcaaaaggttgaagatggtatctttggcacttctggaggatttggttttactaagcagaacgagctctttgtgggtcgtgttgctatgcttggttttgcagcatcactgttgggtgaaggaataactgggaaaggaattctagcacaattgaatctggaaactggaattcccctttatgaagcggagcctcttcttctgtttttcatcctcttcaccctgctaggagccattggaggtttacgtgaccgtggaaaatttgttgatgacgaacctactactgggagtgttattcctccaggcaa

SEQ ID NO: 253940 - DNA, 446 bp, Glycine max
ggaatccaatggctggggatgcctgtatgtcttcccataccatggctgatgatctccacatgaaactactgtaccttgagaacagagtggcatttgcaagacttttcttcccttcagaagccaaactagccatggacattgcccatgctgagacaccatctgagtttgctggtctttctgcgtcaaactcaaaaggttcaaatggaaacttaagggaggttgatctcaatgagactcctatagtgcaaaataaaagacttctttctagaatggaagcccttacgaaaacagtggatatggcgcggcgctacttcccacattgctcggaagtgctgcacaagttcatggaagatgacctgcctgactttgtttaccttgaaaagggtactcatgaagagcagagaatcaaaaggacgcgtttcatggagcttaaagatgacgtccac

SEQ ID NO: 253941 - DNA, 370 bp, Glycine max
  unsure (1)..(370): unsure at all n locations
ccgcttcaagggggtttaccagaccgtggactaatcacctatggcggaaaaccacgacatgaagaacccagccgtgaagcggattctccaggaggtcaaggagatgcaatcaaaccctttccgatgactacatgagncctnccttcttgagggaaaatatatttgaatggcaatttgcgatcagggggcctcgtgatactgaatttgaaggtggtatttatcacggacggattcagctgccttcagaatatcccttcaaacctccttcgtttatgttgctcacacctagtggccgttttgagacccaaaccaagatttgcttgagcatatcaaatcatcaccctgagcattggcaaccatcatggagcgt

SEQ ID NO: 253942 - DNA, 448 bp, Glycine max
tcggatataaacaataaaataaaataaaacagaagagaaggaaacagaagtaaaaaaaaaataaaatgggttacacaagatcttctcttctgtccgtggctcttgtcttggcattctgttcaagcattcagggtttggacatcaccaaattgttgggcgaatatcccgaatatgcacagttcaacaaatacctaactgaaaccaagctggcggaccaaatcaacagccgtaacgccgttacagtccttgcccttgacgacgccgcaatggcttccctctccggcaagtcgcaagacgccgttaaggccatccttagcacccatgtgctcgtcaacttctacgacgagaagaagctgatggaagccgaaggtagtcgcaccaaggtcgaaaccctattccaatcctccggtgtcgccaagcccaaccagggttacatctacgtggcgct

SEQ ID NO: 253943 - DNA, 547 bp, Glycine max
  unsure (1)..(547): unsure at all n locations
agggggagagaggccttcnnanttatagagatgcagagttttattgcactaactcgagagacaagcttgcatgcctgcaggtcgactctagaggatcccctcggggaattccaattccacattttcaagaaataaggaggcaaaaatgttcatatatgaattggaattatttgttttcttattaggcctatcctgaagccaaaggaaatgagatcggaattcctcggggaattccaattccacattttcaagaaataaggaggcaaaaatgttcatatatgaattggaattatttgttttcttattaggcctatcctgaagccaaaggaaatgagatcggaattcctcggggaattccaattccacattttcaagaaataaggaggcaaaaatgttcatatatgaattggaattatttgttttcttattaggcctatcctgaagccaaaggaaatgagatcggaattcctcgggggtaccgagctcgaattccctatagtgagtcgtattaaattcgtaatcatgtcatagctgtttcctgtgtgaa

SEQ ID NO: 253944 - DNA, 340 bp, Glycine max
ggctcgaggaagcagaagccatggaaaccaacacactcccaaaccagcagacaccaaaaaccaaaaggcaaatcttcatactctcaggtcaaagcaacatggccggtcgtggcggggttatcagggacgctaacaaccgtaagcggtgggacggcgtggttccgccggagagccgctccgatccatccatcctccgcctctccgccaccctccaatgggaacccgcgaacgagcccctccacgtcgacattgactccagaaaggcttgcggcgtgggccccggcatggtcttcgcgaacgcgctgctgcggcggcgcgtggtggtgggcgaactgggtct

SEQ ID NO: 253945 - DNA, 423 bp, Glycine max
  unsure (1)..(423): unsure at all n locations
gtgattgtggtgataatgtttgaaagattntgaatttggagagctggaagaagtattgcagtattatcctcaagggtaccatggagttgataaggaaggtaggccagtctacattgagagacttgggaaagcccatccaagccgcctaatgcacgccaccacaatagatcgatatttgaaataccacgtccaggagttcgagaggaccctgcaggagaaatttccagcatgctccatagcagcaaagagacggatttcttcaacaacaacaatatttggatgtacagggcttgggaatgaaaaatttctcacgtactgctgcaaatctcttgtctgctgtgacaaaaatagatagcagttactatcctgagacattacatcacatgtatgttgtcaatgctggttctggctttaagaagatgc

SEQ ID NO: 253946 - DNA, 440 bp, Glycine max
agaaagaaattaataaataatttctagagtccagaagtgaacaaccctgctccaccaccacgtaggctttacatgtcccaacaactctcaacatatgatgtattggcacaacatctctgcctttattatggtttatatttcagccacatatataagacccttacattactacatgcatacattttttattcttctacataaactataaccatatactatatcctccacatacatgacaagacactgtacgtacgtaagtacatatgcagcaaatttattcaaagacaacaatattatatatatgcatgcatgcatgatgcacgatgcatctacttgtcactgtgtcctccaggaagcttctccttaatcttgtccataatccctttcttctcgttctgatcaccatgagattggtcatgctgacgatgttccttcctata

SEQ ID NO: 253947 - DNA, 458 bp, Glycine max
ctccctctcgattttaacaaccaactgccaaataattaataatacagtaacgtaaataaaccgaactctggttaatcattgtgacacgttattttaatttttggtagaaagtaaacaacaaaaaattaaatttgattgttgcttattaaagagagggggagggagacaagatacaccaaagtcgtcgctcatggaagacttactcggccttttaaggattcacatcaagcgcggtgtcaacctcgccgttcgtgatgtcaatactagcgatccatacgtcgtcgttaagatgggcaagcagaagctgaagactcgtgtgattaaaaaggatgttaatcctgagtggaaggaagatcttacgctttctgttacagatccaattcatccatttatactgacagtgtatgactatgacactttcagcaaggatgacaaaatgggagatgcagaatgtgaca

SEQ ID NO: 253948 - DNA, 556 bp, Glycine max
  unsure (1)..(556): unsure at all n locations
gaggggaggtcttcncgttacgtacaagaatgttattgcactaactcgagagacatgcttgcatgcctgcaggtcgactctagaggatcccctcggggaattccaattccacattttcaagaaataaggaggcaaaaatgttcatatgtgaattggaattatttgttttcttattaggcctatcctgaagccaaaggaaatgagatcggaattcctcggggaattccaattccacattttcaagaaataaggaggcaaaaatgttcatatatgaattggaattatttgttttcttattaggcctatcctgaagccaaaggaaatgagatcggaattcctcggggaattccaattccacattttcaagaaataaggaggcaaaaatgttcatatatgaattggaattatttgttttcttattaggcctatcctgaagccaaaggaaatgagatcggaattcctcgngggtaccgagctcgaattccctatagtgagtcgtattaaattcgtaatcatgtcatagctgtttcctgtgtgaaattgttatccgctcaca

SEQ ID NO: 253949 - DNA, 306 bp, Glycine max
acacaccttgcaaaaaccgctattgttgattaatacctatattctccatatattgacactcattcaactatggaaaactcaacaatgggtagtaattgtcttaccacatgttgtacggggaatttcttcaagaaaaagaaatctctccccattgataccatattcaagcttcctgttcctgttgcaaattcttcttggcctcaaggtggtaattttgctagtggaataatcgatctgggtgggctacaagtgtctcaaatatcaacattcaacaaagtatggggcacctatggcggcggaccggac

SEQ ID NO: 253950 - DNA, 383 bp, Glycine max
gtttgttggactgaacaagggtcacgtcgtcaccaagaaggaattggccccacgcccctcagatcgtaaggggaaaacaagcaagagggtgcactttgtgaggaacctcataagagaggttgctggttttgcaccctatgaaaagcgtataactgagttgctgaaggttgggaaggataagagggcactgaaggttgcaaagagaaagcttggaacccacaaacgtgcaaagaagaagcgtgtggaaatgtccagtgttctcaggaagatgagggctggtggtgctgtgagacacgaagaaataagtcttatttatttactcttttccagattcactagatggacctgtgtattgatggacgagctttcatatttttgctttg

SEQ ID NO: 253951 - DNA, 315 bp, Glycine max
caacatacacaaagcaaagcatgggagtgactctggagtttatgacacagaatgacgttatgtgccagcaaatattgagaacatattcagtaagtatgctcgtacagtacctgaacagctcacacttggggagctctgggacttgacagagggaaaccgaaatgcttttgacatatttggctggcttgcagcaaaatttgaatggggggttctgtacattctggcaagggatgaggaaggtttcctgtctaaagaagctgttagaagatgctttgatgggagcttatttgaatactgtgcgttaatgcatactac

SEQ ID NO: 253952 - DNA, 386 bp, Glycine max
caatcacaattctctgtgaactttctagaatctcgttcttcctttgccttctccttcttcttcaaccctttttctttctctttctttcgcactttcattctctaaaaaaaatctaagtccctttggtcttcatcttctgttctgatccaggtatggcttctaaacgcatcttgaaggagctcaaggatttgcagaaggatcctcctacctcatgcagtgcaggccctgtggctgaggacatgtttcactggcaagccacaatcatgggacctgctgatagcccatatgcaagtggtgttttcctagtttcaattcattttcctcctgactatcccttcaagccacccaaagttgcttttcggacctaaggtgttcacccaaacatc

SEQ ID NO: 253953 - DNA, 451 bp, Glycine max
cgtgacttcatcgaagtcatcttcgagaaccctggcaaggtcattcagtcctacaaccttgacggctattctttcttcgctctcgcggttgagccagggaagtggaccccagagaagaggaagaactacaaccttcttgatgctataagcaggcacaccattcaagtgttccctaactcttgggcagcaatcatgttaacctttgacaacgctggaatgtggaacttgaggtcggagatggcagagaatcgttacctgggacaacagttgtacgtgagtgtcttgtctccaaacaggtctctaagggatgagtacaacctcccagagacccagcttctatgcggaattgtcaaggatatgcctaagccaccaccttactccagttaagaaagtttttctcttctgagatgtatatatatacaccaccagtaagggcggagctagaatttct

SEQ ID NO: 253954 - DNA, 376 bp, Glycine max
ctcttttgctgcatcagaggagttgtaaattaagagcatggctgcagaagctcttgtatcatcatcttctcttaccttctcagcggaggctgcaagacaaagtcttggaccaagatcactccaatctccatttggcttctccagaaaagcctcctttcttgttaaggcagctgctaccccccctgtcaagcaaggatcagacagacctttgtggtttgcatcaaagcaaagtctttcttacttggatggcagccttccgggtgactatggatttgaccctctgggactttcagaccctgaaggaacaggagggttcattgagccgaaatggctagcatatggtgagataatcaatgggtcgtatgcaatggtgggg

SEQ ID NO: 253955 - DNA, 554 bp, Glycine max
  unsure (1)..(554): unsure at all n locations
gagggagggtgtgtctgggatacgaaacagaatgtacactcgtcactaactcgagagacatgcttgcatgcctgcaggtcgactctagaggatcccctcggggaattccaattccacattttcaagaaataaggaggcaaaaatgtgcatatatgaattggaattatttgttttcttattaggcctatcctgaagccaaaggaaatgagatcggaattcctcgggggtaccgagctcgaattccctatagtgagtcgtattaaattcgtaatcatgtcatagctgtttcctgtgtgaaattgttatccgctcacaattccacacaacatacgagccggaagcataaagtgtaaagcctggggtgcctaatgagtgagctaactcacattaattgcgttgcgctcactgcccgctttccagtcgggaaacctgtcgtgccagctgcattaatgaatcggccaacgcgcggggagaggcggtttgcgtattgngcgctcttccgcttcctcgctcactgactcgctgcgcttcgtcgttcggctgcggcgagcggt

SEQ ID NO: 253956 - DNA, 391 bp, Glycine max
gccaatgctatacctgtattctcaggaataccaactgtggcctgtgctatgaatagttcttttagggggcgtgccagttctgatatttacaccatctgctctcaagactgtgaattatggaatcctgcttgcacaaaagcaatgactatgtcatttaatccaaacccgtgttctgatgcatggagtttggaatttctgaagcgtaccggatttcattgtgatatcatttgtgtcactggatggactgccaccccaatgcaggatgttcaggttaccattgattggtttatttcctttcaggaatgtgttcccaagaacctattgtgttttaaatccaccaaaatccttttgggtaaaaataggtggatggggaaactgactttcccccagg

SEQ ID NO: 253957 - DNA, 408 bp, Glycine max
gacacataaacccggcggtgacatttgggctggttttggcgaagaagttgtcgttgcccaaggcgattttctacatcgtgatgcaatgcttgggtgctatttgtggcgctggcgtggtgaagggtttcgaggggaaaacaaaatacggtgcgttgaatggtggtgccaactttgttgcccctggttacaccaagggtgatggtcttggtgctgagattgttggcactttcatccttgtttacaccgttttctccgccaccgatgccaaacgtagcgccagagactcccacgtccccattttggcacccttgccaattgggtccgctgggttcttggttcacttggcaaccatccccatcaccggaactggtatcaaccctgctcgtagtcttggtgctgctatcatct

SEQ ID NO: 253958 - DNA, 325 bp, Glycine max
tcgtaattggctacatagagttccagaggaatgcagagctcgacccagagaagaggttgtacccaggtggcagttacttcgacccattgggcctggcctcagacccagagaagaaagccaccctgatctggatcgaggtactcgtaattggctacatagagttccagaggaatgcagagctcgacccagagaagaggttgtacccaggtggcagttacttcgacccattgggcctggcctcagacccagagaagaaagccacccttcaattggcggagatcaagcacgcccgtcttgccatggtgggcttcttgggccttgcagt

SEQ ID NO: 253959 - DNA, 354 bp, Glycine max
aaaaaaaaaaaaaaaaaaaaaaaaaaaaaaaaaaaaaaaaaaaaaagagaaagggaaaaaaaaaaaaaaaaaaaaaaaaaaaaaaaaaaaaaaaaaaaaaaaaaaaaaaaaaaaaaaaaaaaaaaaaaaaaaaaaaaaaaaaaaaaaaaaaggggggccccccaattatgggccttgtaaccccggaaataaattcggacccggcccttgaggggtaccaattttccctaaaagggggccaattaaaaattggggaaaaaaagggcaaaaatttttccctgggaaaaattttattcccttaaaatttcccaaaaaaatacaacccgaaaccataaagttaaaacccggggggcc

SEQ ID NO: 253960 - DNA, 366 bp, Glycine max
aaaaaaaacaaaatttaaataaaaaaaaaataaaacacataaaaaaagtaaaggataaataggtaaataaaacaaaaacattaaaaataaaaaaaaacaaaataaaataaataaaaaaaatataatacaaatataaaaaaaaaacaaaaaataacccatcatataacatataatcaatataccaccaaaaaatcactaaccttaaaaaaaccactttacaaattttcttaaatatactccaatttaataactaacattacaaaaatctacactcaattcacaataaattaaaccccacaatactataaaaaaactattcatatcccaatcaaaaatatttaatcccctatcccttaaaaaacttac

SEQ ID NO: 253961 - DNA, 442 bp, Glycine max
gcacaaagcacgctcatcctagagttacaaaaatggcagcagcctcctccatggctctctcttccccatccttggctggcaaggccgtgaagctgggcccatcagcccgcgaagtcgggagggtcagcatgaggaagaccgtcaccaagcaggcctcctccggaagcccatggtacggcccagaccgcgtcaagtacttgggcccattctctggcgagcccccgtcctacctcactggcgagttcccaggtgactacggctgggacactgctgggctttcggccgacccagaaaccttcgccagaaaccgtgagcctcaagtgatccacttcaggtgggccatgctcggggccttggggctcgtcttccccgaacctgtgtcccgcaaccgggtcaagtttggagaagctgtgggttcaaggcccggtcccagatcttcagc

SEQ ID NO: 253962 - DNA, 437 bp, Glycine max
cgcacttctgctccgcaattatcatgggcaaggtcaagatcggaatcaacggatttggaagaattggccgtttggtagccagagtggctctgcagagagacgatgttgaactcgttgccgttaacgaccctttcatcaccaccgattacatgacatacatgtttaaatacgacagtgctcatggacactggaagcatcacgatgtcaccgtttaggacgagaagacccttctcttccgtgacaagccagtcactatttttggacacagaaaccctgaagagatcccattggggtcaactggagctgacatcattgttgagtccacccgagttttcaccgattaggacaaggccgtcgcacatttgtaggggggtgcaaaggaagttattatttctggccccagtaaggatgcccccatgtttgttggtgtgtcaacg

SEQ ID NO: 253963 - DNA, 445 bp, Glycine max
tggacgctgatgttatcaccattgagaactctcgctccgatgagaagctcctgtcagtcttccgtgaaggtgtgaagtatggtgctggaattggccctggtgtctatgacatccactccccaagaataccaccaactgaagaaatcgctgacagaatcaataagatgcttgcagtgctcgagaagaacatcttgtgggtcaaccctgactgtggtctcaagacccgcaagtacactgaagtgaagccagccctcacaaacatggttgccgcagcaaaactcatccgtaacgaacttgccaagtgaatggtataagaaagtagaatctacaagttccatggttcttcttttaatatacacccaaggaaaattttctataatggggtggttcaattacccggtgtggaatatttagatgtttagcatgctctgtgagcaattgattc

SEQ ID NO: 253964 - DNA, 446 bp, Glycine max
  unsure (1)..(446): unsure at all n locations
gtcatttaatccaaacccgtgttctgatgcatggagtttggaattgctgaagcgtaccggatttcattgtgatatcatttgtgtcactggatggactgccactccaatgcaggatgttcaggttacaattgattggtttatttcctctcaggaatgtgttcccaggacctattgtgttttaaatccacaaaatccttttgtgttaaataggtggatggggaaactgacttttccccagggcacttcccgaagtgttaaaagaatgcctctttctatagggggaggagctggtgcaaagaatgctattctcatgaatatgccaaatgctgttctttcaatgtggagatattttgttggagatctcgtctttgaagtttctaagatgacttctccctacattaaatgtacagtctctntcttcatagcatttggaaatttggctgatg

SEQ ID NO: 253965 - DNA, 445 bp, Glycine max
accctcctctttattttctttaacacctcctcctctttctgttctgagcaagtatggccgtggaattcatgatggggtacaggaacgacactttcgcggaggataatgcggttcgtgaagctgcgtcggggctagagagcgtcgagaaactcatcaagttgctgtcgcatactcaacaacaataccagacaacctcaaagtcttccatggaaaacatcgacaccgactacacagctgtcgctgacgtcgcggtttctaagttcaagaaggtcatttcgcttctgggccgcaccagaaccggtcacgcgcgttttagaagagcccctgtgcctgtgcctgtgcctgtggcttcacctccaccttcggaaccgagagtctaccgtgctacgccgctgcagcagatcccgccacccacccttcacactcactctgtcactgaccactc

SEQ ID NO: 253966 - DNA, 348 bp, Glycine max
  unsure (1)..(348): unsure at all n locations
ttcgggagaaaaagcaatccactcagagagctagaagaattcaacgatgcctcactatgatgataaatacggcaatacccgcctctatgtggggcacttatcttcgaggactcgttcccgggatctggagcgtgccttcagcagatatggaagagttcggggtgtggatatgaagaatgatttcgcctttgttgattttagtgatcctcgagatgctgatgatgcaagatataacttggatggtcgggatgttgaatgaagtcgtattattgtggaatttgcaaaaggggctcctcgtgggtcccgggaatattttgggggcaggtcctcctnctggctctggacgct

SEQ ID NO: 253967 - DNA, 355 bp, Glycine max
gaaagataaagcattccatagcctcccataaaaatgaagaatactatcttctctgctctctttctactttgtgccttcaccacctcatacctaccttcaaccaccgcggtggtcgataccgacggtgatattcttcagaatcctggcacatactttatcttgtccgtttttcgacccggcggcggagtagaattcgccgccactggaaacgaaacttgccctctcactgtcgtgcagactctcttcgggaggggctttccagcaatattatcgtcccggttacgaatccctttcatcggcgaaggacaactcttcagcatcctgttccgtattgtgccatggtgcgccaccactc

SEQ ID NO: 253968 - DNA, 375 bp, Glycine max
  unsure (1)..(375): unsure at all n locations
gggcatcctacaggaattggagtggaaaaatggcacaatataaaatgctttatcattaagagtttgaaccatcaaaacatccatttgtcaattgagaaaggaatttgggctactcaaatcatgaatgaaccgattctagaagaagcttttcataattcaggcagtgtaatccttatatttagtgtcaacatgagtggttccttccaagggtatgcacaaatgatgtcctccattggaagggggagagacaatgtttggagtgagggaactggntaaagtaatcctctggggncgagttttaaggtcaaaatggatgtgtttgaatgatttgcctttccacaagacactgcatctcaagaaatcgttgaatgacta

SEQ ID NO: 253969 - DNA, 413 bp, Glycine max
gcgatgggcaacactagcagctatgtttcaagcagcagcagcagcagcaaatggctgggcttcgtggcggccgtgtggattcaatgcatctccggcaacaactacactttctcaaactactccgacgccctcaaatccctcatgcaccttactcagctccaactcaacaacctcttcgtcgctaaagacgttggcaaagcctttgggcttctggcgggcctcgccttcgaccgcttccccacttgggctattctcctcattggctccgtcgaaggccttattggctaccgagcccaatggcctcgtggtagccagagaattcagcccctcccttactggcagcttggcgtgtttctctgcatgggaggcaacagcaccacttggatgaacacctgccgcttggtaacatgcat

SEQ ID NO: 253970 - DNA, 447 bp, Glycine max
gagaaacatggcttccttaagctccttagtgctgctccttgcaggggtaattctatcccctcaagttcttgcaaactatgagaatcccccagtgtacaagcctcccactgagaaaccaccagtttataagcccccagttgagaagcctcctgtttacaaacctccagttgaaaaccccccaatttataagcctccagtagagaagccaccagtgtacaagcccccagttgagaaacccccagtgtacaagcccccagttgaaaaaccaccagtgtacaagcccccagttgagaaaccaccagtgtacaagcccccagttgaaaaacccccagtttacaagcccccagttgaaaaacccccagtgtacaagcccccagttgaaaaaccaccagtgtacaagcccccagttgagaagcccccagtttacaagcccccagttgagaagcc

SEQ ID NO: 253971 - DNA, 426 bp, Glycine max
  unsure (1)..(426): unsure at all n locations
cttcaggcacatactcccgcaggttaaatggcgaggatcaaacctcaggctctgctacagcaaagcaaaaggaagaagggtccttctcggataagtgccgtgactgttatattttactttttgattcttgccttggttgggtttttcctgtttgcttcgtacagacattggtccagcagatcaagattacaatccgaagatcacttgtcagtctccgagggtgaaaatacttttgtggactccaagaaatctgagctgcctggatatgctgttttaaatacctctaaaggttctataataatagaactgtacaaggaaagtgctcctgaagttgttgatgaattcattgacttatgtcaaaaaggacacttcaaggggatgctntttcacaaagtaattaagcactatgtgattcaggcaggggat

SEQ ID NO: 253972 - DNA, 448 bp, Glycine max
gggtcatggggatttgaaggataagccatggtggcaaaagatgcaaactcgtgaagagttggttgaagcttccgctaccctcatatggattgcttcagctcttcatgctgctgttaactttggacagtatccatatggaggtttaatcctgaataggccaactattagcaggagattcatgcctgagaaagggtctcctgaatatgatgcgttagctaagaaccctgagaaggagtttttgaagactattactggcaagaaagagaccctcattgaccttacaattatagaaattttatcaaggcaccgcatctgatgagttctaccttgggcagagagaatgcggtgactactggacttctgatgccgggccattagaggccttttaaaggtttggaaagaatcttgaagagattgaaaagaagcttatagagaagaacaataatga

SEQ ID NO: 253973 - DNA, 361 bp, Glycine max
ctctagagtaatggcggaatcagctagaattttctaataatggccaaagacgttgagcaggttacagagcaaggtgaatactccgcgaaggattaccatgacccacctgcggcgccgttgatcgacccagatgagctcactaagtggtccttgtacagagccgccatagctgagttcatagcaacactccttttcctttacatcaccgtgttgaccattattggctacaagagacagagtgacaccaaaatccccggtaacaccgagtgcgacggcgttggcattatgggcatcgcttgggccttaggtggcatgatcttcatgcttgcttactgcaccggcggcatctctggtggacaca

SEQ ID NO: 253974 - DNA, 427 bp, Glycine max
  unsure (1)..(427): unsure at all n locations
ccaattcccactcaaccaccaaaccctattcagcatttcccccaaatcaccgtcacaccatgggctcctccgcgatggtgttggacccgaaaccctcatcggagcctccgccgttcctcccgtcgacgaaatcggactaccttcaaggcagcttcggcggcgacgccaccgcctccgacgaggacgacctctacagccgcctgaaatccctccagcgccagctggagttcatcgacatccaggaggagtacgtgaaggatgagcagaagaatctcaagcgccaagctgcttccgagcgcatgaggaggtgaaaccgnatacagtcgggtgccgctcgtcattggcccagttcatggagatggttgaccagaacaacggatcgtcggatccaccaccggatccaactactacgtcaggatcctcagta

SEQ ID NO: 253975 - DNA, 180 bp, Glycine max
  unsure (1)..(180): unsure at all n locations
ggagacaagaaaaatgagccatggtggcctaagatgcaaactcgtgaagagctagttgaagcttgcgctatcatcatatggactgcttcagcacttcatgcagctgttaattttggacagtatccctatggaggtttaatcttaaaccggccaactcttagtangcgattcatgcctgaa

SEQ ID NO: 253976 - DNA, 409 bp, Glycine max
ctttagcaaattccaattcccaattcccaattcgaaacccttattggtttcagagaaccaaattgagtgatcgtgatggcaccaaaggcagagaagaagccagcggagaagaagcccgcggaggagaagaagtcgacggtgggagacaaggctccggcggagaagaagccaaaggccggaaagaagcttccgaaagagggaggcgccggcggagaagggaagaagaagaagagaaacaagaagagcgtggagacatacaagatctacatcttcaaggttctgaagcaggtccaccctgacattggtatctcaagcaaggccatgggaatcatgaacagcttcatcaacgacatcttcgagaagctttgcccagaatcttctagacttggccgttacaacaggaagccca

SEQ ID NO: 253977 - DNA, 396 bp, Glycine max
gtttctttcttcttctacatccactgcacaattgccacatgaatcattaggtagggtttattctgcaagaaaagcaatgagtgcgtccaggttcatcaagtgtgtcactgtgggtgacggtgccgttggcaagacttgcatgctcatctcctacaccagcaacacttttcctacggactacgtgccaactgtctttgacaatttcagtgcaaatgtagttgtggatggaagcactgcgaatcttgggttgtgggatactgctggccaagaagattacaatagattaagacccttaagctatcgtggagcagatgtattcctgcttgctttctctctcataagcagggctagctatgaaaatgttgccaagaaatggattcctgagttgaggcatta

SEQ ID NO: 253978 - DNA, 443 bp, Glycine max
tttttattctacctaacaccacatggatacgttgccggaggattgtgtttccaaaattctgtcttacacatctccaccagacgcatgtagattctctatggtctcttcaaccctacgctcttccgctgactctgaccttctctggcgaactttctttccttctgattactctgacattgtctcaagggctctcaaccccctctcccttaattcctcttcttcatacaaacaccttttctatgctctttgtcatccactcctcctagatggaggcaacatgagcttcaaattagacaagtcttcgggtaagaaatcttatatcctatctgcaaggcagctttctataacgtggagcaatgaccctttgtattggagctggagaccagttcctgaatcaaggttcaaagaggtggccgagctgagaacggtgaactggttagaaa

SEQ ID NO: 253979 - DNA, 415 bp, Glycine max
ccctcttttaagctatttccttctcttaacacaattggttgtgccgattgccatagtcaccaaccaattaacaaaggtatatatatcatcatatcatcaccaaatgaaaaatattgggttgttttttcttgtggtggtggctacttttgtggtggcagccacagctggtagcttttaccaagactttgaaataacgtggggtggtgagcgtgccaaaatctatgagaatggaaaccttctcacactctcccttgacagagcctctggctctggctttcgttccaaaaaagagtacttgttcggaaaattgacatgcagctcaagcttgtgcctggtaactctgctggaacagtaactgcctattatttatcttctctggggcctactcatgacgaaatagactttgagtttttgg

SEQ ID NO: 253980 - DNA, 416 bp, Glycine max
  unsure (1)..(416): unsure at all n locations
ctaatatggcaattgaaaaccaagacaacactgtcagagaaatcaagccaaagaacaggagaatcatgggtgctggaggccctgatgatgacgacaataggtggccaccgtggttgaagccactgctgaaagagagcttctttgttcaatgcaagttgcatgctgactctcacaagagcgaatgcaacatgtattgcttggactgtatgaatggccctctctgctctctctgcctcgctcaccacaaggatcaccgtgcaatccagattaggaggtcctcataccatgatgtgatcagagtctctgagattcagaaggtgttggacatcactggtgtccaaacctacattatcaaccagcggcaggggtgtgtttttgaacgagaggcctcaaccaaggccagnaaaaggggtcac

SEQ ID NO: 253981 - DNA, 378 bp, Glycine max
atttgacaggttcatcatcataaccttcaatgaaaagaaatggctgaggcaagcattggcagcaaaagcagcagatggtctttacagggaatgacagctctcgtcaccggtggatccaaaggaatcggatatgctatcgtggaggagttggcacagcttggagccactgtgcacacttgcgctcggaacgaagctgaactcaatgaatccttaaatgaatggaacacaaaaggatacagagtaactggttccgtctgtgacgtggcgtctcgtgcagaaagacaagacctcatagctagagtctccaatgagtttaatggcaaactcaatatccttgtaaacaacgtgggaaccaacgtaccgaaacatacccctgat

SEQ ID NO: 253982 - DNA, 437 bp, Glycine max
gcaaccagacattcccaatacatggagagcaatggaggcactctatgactcagacaaggctagagccataggagtgagcaatttctcttcaaagaagcttcaagatttgttagatatagcaagagtggttcctgctgttaaccaagtggaattgcacccaggatggcagcagccaaagttgcgcgcattttgtgaatctaaagaaattcatctatctggatattctccactaggttcaccagcagctctcaaaagtgatattcttaagaatcctgttgtcacagagattgcagagagattggggaagacaccagcacaagttgcccttcgatggggcttgcaagcaagtcatagtgtgcttcctaagagcactaatgagtccagaatcaaggggaaattttgatatcttgactggtctattcctcaagatttgatga

SEQ ID NO: 253983 - DNA, 355 bp, Glycine max
agcattccatagcctcccataaaaatgaagaatactatcttctctggtctgtttctactttgtgccttcaccacctcatacctaccttcaaccaccgcggtggtcgataccgacggtgatattcttcagaatcctggcacatactttatcttgtccgtttttcgacccggcggcggagtagaattcgccgccactggaaacgaaacttgccctctcactgtcgtgcagactctcttcgggaggggctttccagcaatattatcgtcccggttacgaatccctttcatcggcgaaggacaactcttcagcatcctgttccgtattgtgccatggtgcgccaccactccttttaagt

SEQ ID NO: 253984 - DNA, 381 bp, Glycine max
  unsure (1)..(381): unsure at all n locations
gggatattttgcatacatggcaattgatagtctcccagggaatcaagtntgggaaaggatatcgcttctgatcatcccaccaagtcgacgctataagatattggaaggttatcatgcctcgtttgtggagtcagtaccattcaagaccatagctgtattcacaatattacagtttgtgtatttcctaatctgttttggagtgacatggatacctgtaggaggaatactttttccattaccatttttccttctcataactataagagagcatttgcttccaaagatattcaaacctaatcatcttcaagaactagatgcatctgggtacgaggaaattggtggtgctccacatattacacataatataccaccaagggaaaa

SEQ ID NO: 253985 - DNA, 425 bp, Glycine max
  unsure (1)..(425): unsure at all n locations
cacaactactacaagtacttccttacaatcaaaaccaacaacaactatggcgagttatcaaaagcactacgatgatcagggtcgcaaggttgacgagtatggcaacgttgagaagcaaaccgacgaatacggcaaccctgttcatgctgctagtgtcacctatgtagccaccagaactgctgctggtggttacagtgatgacattaataagcaacatgataccaccaatgcctacggcgtagacactggtagacagcattctagtggtggctacgatggtgacactaataaacatcatggaactactggtggctataatgatgacaccaatagacatcatggaactataccggnctatggatagacaccgataggcaacaacatgggactactggggctatgtcgtgacactgtaggcaacatgg

SEQ ID NO: 253986 - DNA, 359 bp, Glycine max
gggagtttccccctggcgatttccctttaagtgtccctttttgcttctagcatcaatatactgcagcgcttcaggagcaggacaaggtttatctttgggagttctcaatcttgcaattgtggtaccacagatggggtgtctgcattaagtggtccttgggattccttgtttggtggtggcaacttgccggctttcatggtgggtgctgcggcagccgcgttgagcgccataatggcgattgtcttgctgccaactccaaagccagctgatgaggccaaggcttcaagcatgatggcagggggctttcactagttaaatgggtttttgattgttcagttttgtccccctgctttaataga

SEQ ID NO: 253987 - DNA, 434 bp, Glycine max
cttggcatcttgtgttgtgtccctcttttaagctatttccttctcgtaacacaattggttgtgccaattgccatagtcaccaaccaattaacaaaggtatatatatcatcatatcatcaccaaatgaaaaatattgggttgttatttcttgtggtggtggctacttttgtggtggcagccacagctggtagcttttaccaagactttgaaataacgtggggtggtgagcgtgccaaaatctatgagaatggaaaccttctcacactctcccttgacagagcctctggctctggctttcgttccaaaaaagagtacttgttcggaaaaattgacatgcagctcaagcttgtgcctggtaactctgttgaaccagtaactgcctataattaatcttctttggggcctactcatgacgaattaaactttgagttttt

SEQ ID NO: 253988 - DNA, 449 bp, Glycine max
  unsure (1)..(449): unsure at all n locations
caactccactcttagctgccattggtttttcttcttccatttctcgtcctttctaagcttttttcgattacccatttggagattctgtcctaatggctcttgctccttccaaagtttcctccttttccgggttttctcccaaacccagtgttggggatgctctgaaaaacccaacttgctctgtttctctgagctttgcgaatgtgaaacttggaagcagaaacccttagggtttgtgcctcaactgtgcctctctcaggggtgattttcgaacccttcgaggaggttaagaagggtgaacttgctgttccaacggctccccaagtctcgcttgctcgtcagaactacgctgatgagtgtgaatctgccattaatgagcagataaatgtggaatacaatgcttcctatgcgtaccactccttggttgcatactntgacagggacaacgt

SEQ ID NO: 253989 - DNA, 535 bp, Glycine max
  unsure (1)..(535): unsure at all n locations
ngggggagcggcgtcnngttatgggacgagatgtattgctcgagacacatgcttgcatgcctgcaggtcgactctagaggatcccctcggggaattccaattccacattttcaagaaataaggaggcaaaaatgttcatatgtgaattggaattatttgttttcttattaggcctatcctgaagccaaaggaaatgagatcggaattcctcggggaattccaattccacattttcaagaaataaggaggcaaaaatgttcatatatgaattggaattatttgttttcttattaggcctatcctgaagccaaaggaaatgagatcggaattcctcggggaattccaattccacattttcaagaaataaggaggcaaaaatgttcatatatgaattggaattatttgttttcttattaggcctatcctgaagccaaaggaaatgagatcggaattcctcgggggtaccgagctcgaattccctatagtgagtcgtattaaattcgtaataatgtcattactgtttcctgtgtgaaat

SEQ ID NO: 253990 - DNA, 433 bp, Glycine max
ctcgagccgatacggctcgagaaacacacatgctcaaccatggcagcaccaggttcagagacaaagtcaccatcatcctcgaacacgcagcttacgctgaaaccaatcccaggcagctacggaatgccgttttttggagcaataagcgacagacacaactacttctaccaccaaggacgcgacaagttcttcgcgacgaggattgaaaaacacaactccaccgtgatccgaaccaacatgcctccggggcccttcatctcctcggaccctcgtgtcgtcgcgttgttggacggtgcctccttcccgatcctcttcgacaacgacaaggtcgagaagcttcacgttctcgacggcaccttcatgccttccaccaagttcaaccggcgggtttcgcgtctgcgcctacctcgacaccaccgaacccaaccacgca

SEQ ID NO: 253991 - DNA, 392 bp, Glycine max
gctaaatccaccttttcaaagaagaaagcaagggggtttgatgaagaacggactttaactactcacaggcaaattgatgagaaagaggaagctccagatgaagatgatggtgatgataacgtgcaatggctgacagatacatcacttgatgctgctcgtcaacgtatccaagaacagttaagtgctgtgacagctgatatggttatgctttctacagatgaaccagagaagaagaaaaaagcagcaagtaacggaaaatggggttctcagaatggtaactcaatgcactatgggaccctggttgtgggagtgaaagctaatttgaaggaaggtattggagcgaatgaattgctgcccatctttcagcacatcctgcacctgctcaagaaaag

SEQ ID NO: 253992 - DNA, 384 bp, Glycine max
  unsure (1)..(384): unsure at all n locations
gttgaatcatgcaagcgtttacgcatcatgaaaggaaaggaggccattggtcgtggtcttgcaccaagagccatggcaaaatccaagaacaggagctagactagtcgcacaattcatgacctgccccatcctttgtaattgcggtgcccagttggcttagttactaaagtaaggataattaagctgcagcagacacggatggacattgctaagtggttgaattatagttaattngtgtcattatggtttgttataatatttcatcaaacaaaacaatgagatgcatgtctaattaagtactaatcatgaacaggaacataatgactctcaatcatgttgttagacttggctttcttatatatcgatctttgcttggtctgtgtg

SEQ ID NO: 253993 - DNA, 384 bp, Glycine max
atgaacttgatcggttcatttacttcatgttacttgactagtggagcattttccaagaccgcagtgaattacaatgcagggtgtaagactgctatggcaaacgtggtacaggcaatagtaatggcactcacactacaatttttggcgccactatttggcttcacccctcttgttgctctctcagctattattatttctgccatgcttgggctcattcattacgaagaagtcatccatctctacaaagttgacaagtttgactttgttatttgcatggctgacttccttggagtcatctttataagcatggacgttggtctcatgctgtctgttggtctcggcgttcttagagcactttcatatgtggctagacctgcgccatgc

SEQ ID NO: 253994 - DNA, 335 bp, Glycine max
gttgaaaacacataagaaaaaaaatgggttcttctctgtggacctgtctgattttgttatcacttgcttctgcttccttcgccgccaacccaagagcaccaattgatgtgccatttggcagaaactatgtgcctacctgggcctttgatcacatcaaatacctcaatggtggttctgagattcagcttcatcttgataaatacacaggtactggcttccaatcaaaagggtcctacttgtttggtcacttcagcatgtacataaaattggttgctggtgattcagctggcacagtcactgctttctatttatcatccacaaactcagaacatgat

SEQ ID NO: 253995 - DNA, 416 bp, Glycine max
  unsure (1)..(416): unsure at all n locations
gaactttgctgatatagaaaagcagattaatgcttttgcaaagaaggcaaatgatggaactttatcaattgatgagatggctggaggcactcttacaatatcaaatggtggtgtttatggaagccttttgagtacccctattatcaaccctcctcagtctgcaatcttgggtatgcattccatagtgagccgtccaacggttgttggaggaaatattgtcccaagaccattgatgtacgtggctctaacatatgaccacagaattattgatggaagagaggctgtgttctttctgcgacgcatcaaagatattgtggaggatcctcgtangcttctgctcgacatatgaagtgaacctctaatttaaaatggagtaaattaaacctcaaaattcaaatcccttaaggggacccctt

SEQ ID NO: 253996 - DNA, 400 bp, Glycine max
ctcgagccgctcgagccgcaagtacttccttacaatcaaaaccaacgacaactatggcaagttatcaaaagcactacgatgatcagggtcgcaaggttgacgagtatggcaacgttgagaagcaaaccgacgaatacggcaaccctgttcatgctgctagtgtcacctatgtagccaccagaactgctgctggtggttacagtgatgacattaataagcaacatgataccaccaatgcctacggcgtagacactggtagacagcattctagtggtggctacgatggtgacactaataaacatcatggaactactggtggctataatgatgacaccaatagacatcatggaacctacggtgtctatggtatagacaccgataggcaacaacatgggactac

SEQ ID NO: 253997 - DNA, 352 bp, Glycine max
ctcaaaacggtccatgtcctataaatgtacttcgattgggtgtgtgtgccagtgtgttgaacctggtcaatgttacactaggatcaccaccaaccctcccctgttgcaccctcattcagggtttggctgatgttgatgttggtgtttgcctttgcactgtcctcagagctaaccttcttggcatcaacttaaacttgccaatttccttgacattgcttctcaatacctgcagagggaacatccctaatatccagtgttcttaaatttatcttctctagtggaatatacatgtggtctatgaaaaaataaactcatcgcctccatccacaattccacatgttgtctctctcat

SEQ ID NO: 253998 - DNA, 440 bp, Glycine max
gttatcaagaggttcctcatgaagggcccatgtgcgatctgttgtggtctgagccagatgataggtgtggctggggaatttctcctcgtggtgctggatatacatttggccaggatatatccgaacaatttaatcacacaaacaagcttaagttaattgctagagctcatcagctggttatggatggatttaactgggctcatgaacaaaaggtggttaccatttttagtgcacctaactactgttatcgatgtgggaacatggcctccattttagaggttgatgattccatgggccacacatttatccagtttgatcctgctcccaggagaggagaacctgatgtcacccgtagaacgcctgattacttcttatgatgttgctgctgctgcatatcatacttggggtcgagttacatctcattctgcacaaatttcaag

SEQ ID NO: 253999 - DNA, 429 bp, Glycine max
tatcacttgagggcagatatacatcgacaggcagctgtggaataggcagatatacccaccaatcaacgtcctcccatcactatctcggttgatgaagagtgctattggtgagggaatgactagaagggatcattctgatgtgtccaaccagctctatgcaaattatgctattggaaaggatgtccaggcaatgaaagcagtggttggagaagaagcactttcatctgaggacctgctgtatctggaatttttggagaagtttggagaggaagtttgttgcccagggagcctatgacacccgcaatatattccagtcacttgatcttgcatggactttactccggattttccctcgtgaacttcttcatcgtataccagccaagactctggaccagttttacagcagagatgctggtaattgatgattaa

SEQ ID NO: 254000 - DNA, 307 bp, Glycine max
aaagggcttgggagtgaagttcccctttgaccaacccatgaaggtgtacaacagcttgtggaatgctgatgactgggccacaaggggtggtttggagaaaacagattggtccaaagcacccttcatagcagaatacaaagggttccacgttgatgggtgtgaagcttcagtgaatgcaaagttctgtgctacacaaggcaagaggtggtgggatcaagcacagtatcatgatcttgatgcttctcaatggagatggctcacgtgggtgcgcaggaaatacaccatctacaactactgcactgacaga

SEQ ID NO: 254001 - DNA, 370 bp, Glycine max
gtttcttgcagcttcacactgtgccactgctccgttttagggttgcaatggcgctgttcctcctctacgagtcggcgtcgggttacgcgctcttggaggcgcacggcctcgacgaaatcgggcacactacggaggccgttcggaactccgtttccgacctcaacaggttcggcaaggtcgtcaagcttcgctccttcaaccccttcaccttcgccctcgacgctctcaaacagtgcaacgccgtttccgaagggctgttgactgatgagctgagaacggttttggagactaacttacctaaagttaaggaaggtaagaagtccaagttcagtttaggtgtatcggatccaaagattggttcccagatatc

SEQ ID NO: 254002 - DNA, 396 bp, Glycine max
atattctctcactctcttactctttcactctacttctctctcctattgcggctagggtttaggtttttctttcaccgtctccgttccttcaatcttcttattctctttcatctctgatggagacgttgcgggtttagttctaaggggtggttctggccttgggtttttggaacgtacggtgtcgttttggggttgggaaaacaaattctgagagatggcaaccacgaacccttttgatttgttgggtgacgacgctgaggacccttctcagctcatcgccgccgagcaactcaaggcggcggctgcggcctcggcggccaccgcggctcccaagaaggcgccggctcagcagaacaagccgggttcagttccttaccaagccgcttcttccggtta

SEQ ID NO: 254003 - DNA, 406 bp, Glycine max
atgaacttgttcggttcatttacttcatgttacttgactagtggaccattttccaagaccgcagtgaattacaatgcagggtgtaagactgctatggcaaacgtggtacaggcaatagtaatggcactcacactacaatttttggcgccactatttggcttcacccctcttgttgctctctcagctattattatttctgccatgcttgggctcattcattacgaagaagtcatccatctctacaaagttgacaagtttgactttgttatttgcatggctgccttccttggagtcatctttataagcatggacgttggtctcatgctgtctgttggtctcggcgttcttagagcacttttatatgtggctagacctgcgccatgcaagcttggaaagttacctgaaa

SEQ ID NO: 254004 - DNA, 364 bp, Glycine max
aatttctggccctatagtggtggcaggagtgttatgtttcatagctggttcaatatctagtgctggtggaattggtggtggtggacttttcataccaatattaaccattgtggctagcctagacctcaaaacagcttcaagtttgtcagctttcatggtcacaggagggtcaattgcaaatgtcatgtgcaaccttcgtgccacaaatcctaaacttggtggcaagtcattgattgactatgacatagcacttttatcagaaccttgtatgctgctaggagtgagtgttggagtcatatgcaaccttgtgttcccagaatggttgattaccatgctatttggtgggtttctaaactgggctacc

SEQ ID NO: 254005 - DNA, 427 bp, Glycine max
  unsure (1)..(427): unsure at all n locations
aagagctatgacgtcgctgcccgctggattcggtcggatatcgatgggtctccttctttagcgctttagctcgtaccgcgacatggaaggtatcgaggaattagatgtcggaatcggagcgnntcgtcgagaaattatattgcatcaaatatcgatacctctgagattgtcgccatcaagatggaaagcaagaagaccaagcatccgcagctattgtatgaagcaaagttatatagtattcttcaaggagaaagtggtgttccaagtatgaagtggtgtggcacagatggagacaataatgttctagttattgatcttttggggcggagtcttgaggactcttttgtctattgcgggaaaaagttttcattaaaaacggtttttatgttggccgatcagatgctgacaagaatagagtacatgcatt

SEQ ID NO: 254006 - DNA, 202 bp, Glycine max
tcggactctctcggcaaattccaattacacatatctaacaaataaggagccacaaatgttcatatatgaattgcaattattcgtcttcttattagaccctatcctgaagccaaaggaaatgacatcggaattcctcggggaattccaatttcacattttcaagacataaggaggcacaaatgttcatatatgaattgaaata

SEQ ID NO: 254007 - DNA, 309 bp, Glycine max
aattattttattttattggcgaatgttggtggttggttgggatgggattccaacccataacctatgtgcttccctttttccttcttttctttctttacaatttagaccaaccttgtatctctatcattctgaattattaacgttgtcgtgttttgtgttttgtgttgtgcaggggacaattatctgaagccgtatgtaatttcggaaccggaggtaacggtaactgagcgtagtgaggaggatgagtgtttgatatttaggagtgatgggctatgggacacagtgcaaaacgacatcgcatgcaaagtg

SEQ ID NO: 254008 - DNA, 307 bp, Glycine max
gcgagacaaaggagccgtcactaacgtcaaggaccaaggggcgtgtggttcgtgttggtctttcagtacgacgggagcgttggaaggagctcattatctggccactggtgagctcgtgagccttagcgagcaacagcttgtggattgcgatcacgtgtgtgatccagaagaatatggagcgtgtgactcaggctgtaatggtgggttgatgaacaacgcatttgagtacatacttcagtctgggggagtacagaaagaaaaggactatccatacaccgggagagatggcacctgcaaatttgacaaa

SEQ ID NO: 254009 - DNA, 409 bp, Glycine max
atcatatcattcgagctctgaatgcttctctctccataataacaaaaccaacaccctctttctctttctctcttcttcatttccaatgctgcagcaatctgcaagcttcataggcactacgacagacccaattgaattcccgagaaagaattgaagagaaaaaaccgtaaagttaggatcttttgtgtgatttcgatgggtgcgtacagagcggacgatgattacgactacttgttcaaggtggtgttgatcggagactcaggcgttgggaaatcgaacctcttgtctcgtttcacgaagaacgaattcagcttggaatccaaatccaccattggcgtcgaattcgccacccgcagcatccacgtcgatgacaagatcgtcaaggctcaaatttggaacacggaaggcc

SEQ ID NO: 254010 - DNA, 409 bp, Glycine max
caacatacacaaagcaaagcatgggagtgactctggagtttatgacacagaaggacgttatgtgccagcaaatattgagaacatattcagtaagtatgctcgtacagtacctgacaagctcacacttggggagctctgggacttgacagagggaaaccgaaatgcttttgacatatttggctggcttgcagcaaaatttgaatggggggttctgtacattctggcaagggatgaggaaggtttcctgtcttaaagaagctgttagaagatgctttgatgggagcttatttgaatactgtgctaaaatgcatactactagtgatgccaagatgagttgaaattggattatgcagtgtgcataggtacgtgtgatgtgtcgttctgttagacatgttagtggtgtaatgtg

SEQ ID NO: 254011 - DNA, 416 bp, Glycine max
tagattgctcttttctccttcgctcttccctttcccattccgattcctattcctcctttccctctcctctccgctcctccaattccccccaaactttctccctccgccgcttcgccgccgcctctctcgcttgccctccaccgccgccgccgcccctcgacgccatggcccagaaaatcggaaagtccacgcgccgccccggtgcctcctccaaggcccgcgtctatgccgatgtcaacgtcgttcgccccaaggaatattgggactacgagtccctcaacgtccagtggggggagcaagatgattatgaggtggtgagaaaggtgggtagggggaaatacagtgaggtgttcgaaggtgttcactgcaccgacggtgagaaatgtgtcattaagatcctgaaacccgtgaagaag

SEQ ID NO: 254012 - DNA, 381 bp, Glycine max
gaaccaagaaaccaagcaaatcattgttctctctgtcctgtgttttgtgatttcccccttcaagccaccaccaatggccaacaacgagatgcaagttgagaggggtttggacttggaaaggtacatggggcgttggtatgagatagcctctttcccttcaaggaaccagcccaaggatggcgtgaacaccagagccacatacactcttaggaatgatggcactgtgcaagtgctcaacgagacttggagtaatggcaagagagggcacatagagggaactgcttttaagtctaaccgcacaagtgatgaagccaagttcaaggtcaagttttatgtccctccctttttgcctatcattcctgtaacaggggactactgggt

SEQ ID NO: 254013 - DNA, 405 bp, Glycine max
ggagcccaagtttttgaagaacggtgatgctggttttgttaagatgattccaaccaaacccatggttgttgaaactttctccgagtatcctccacttggtaggtttgctgttagggacatgcgtcaaactgttgctgtgggagtcatcaagaacgttgagaagaaggatcctaccggagccaaggtcaccaaggctgcccagaagaagaagtgaatcgtgcgggctggttcatcaggggatgttggttacaataaatgttggtttcttttctgtactcttgtgtcttcttttctaggtagcttgtttttcggacaaagtttgaagtctccaccatcatctcgcaactgttgttcccagaactgggttcttgatcgacggtggcaaaattgctcttatttatctgt

SEQ ID NO: 254014 - DNA, 411 bp, Glycine max
cacagttagtacaaaaaagggttacttcagcttccacatatcttgaagaattgatcaatgggcaagtctgtagttgagaagctactttggatggcaattgtgtgcttggtgctgggtgtaatttccattactcccaaggcccaagcagcagtgacatgcaaccaggtggtgagcaacctcaccccatgcatttcttatgtgctcaatggtggcaaaaccgtgcctggcccttgctgcaatgggatcaagaccctctttaacctcgctcactccacaccagaccgccaaaccgtttgcaagtgcataaagaacgctgttagtgcgttccattatggcaagtccaatgtggaccgtgctgctgctcttcctaagcagtgtggggttaacatttcttaccagatcagccctttc

SEQ ID NO: 254015 - DNA, 341 bp, Glycine max
atatcttcttatagcttcatcccaaaaagctcttttcgttctaaatttgattccttagttcagcattctattattatatatggcttcttcaccttcctcagaaaacaaaaacctagagggagtagctggtggtgccggagagaaacccattccacttggtgagaacgttctgcagaagcatgctgcattctttgacttgaataaagatggggtcatctacccatgggagacttttaaagggttgcgtgaaatcgggactggggttctgctgtccgttggaggtgctattctcatcaatgtgcttctcagtcagagtactcgtcccggaaagtttccatcta

SEQ ID NO: 254016 - DNA, 338 bp, Glycine max
ctcctcctacttagagccattagatcgaattcgatgcatttcggatttgatctgatggttttggacttctaattagtctaagatggacaaggttacgaggttggcaacagaaaagggtgcggtggactttaccgcgagctcttggtgcctgagctatgcactcaacattctgatgcaagatcttggagcgatccctgtggttcatgaattcgtctgagaccctgtgggcaatgaaatagaggtagctataacggggtttgtgtggcctactactgttactgctgtgttcatcggaaggaatctggagttggacacctatgatggcatgatcctacgac

SEQ ID NO: 254017 - DNA, 359 bp, Glycine max
agattctgtaactaatgatgggaaagaggtcatcaaaggcaacatcttgagtcaagtcaccaatgcttcacaaatgataaagctggaaaaggatccacatgctgcatttgcattaattattgatgggaaaactctaacatatgctttaaaagatgatgtcaagcaccaatttttgggattggctgttggttgtgcatctgttatttgctgtcgtgtgtctccaaagcaaaaagcattggtaacaaggttagtgaaagaaggaactgggaaaaccactttagccataggtgatggtgcaaatgatgttggcatgattcaagaagctgacattggtgttggaatcagtggggttgaaagta

SEQ ID NO: 254018 - DNA, 405 bp, Glycine max
gaaaaaatgggttcttcttcttctatgtggacggtgtgtgtgattttggcatcactggcctctgcagcactctgtgccaacccacgcaggccagtggatgtacaatttggccgaaactacgtgcccacatgggcctttgatcacatcaaatatttcaatggtggttctgacattcagcttcatcttgacaagtacactggtactggcttccagtccaaagggtcttacttgtttggtcacttcagcatgtacataaagatggttcctggagattctgctggcacagtcactgctttctatttatcttcccaaaacgcggagcatgatgagatagactttgagttcttggggaacagaacaggacaaccttacattctgcaaaccaaagtgttcaccggaggcaag

SEQ ID NO: 254019 - DNA, 416 bp, Glycine max
gttttctggcacacaagaaaagtgtgccacatgtggcaaaactgcttatccattagagaaggtaacagtggaagggcaggcctatcacaaatcatgtttcaagtgttcacatggtggatgtcccataacgccatcgaattatgcagcccttgagggcattttgtattgcaagcaccacttctcccagctttttaaggagaaagggagctataatcatcttactaagtctgcatcagtcaaacgggcagccgcagccacagcagcagcaacaacagctgcctctgttccagaatcttgaatgttggttccttcaattgccttttctttttcaaatacattttggtttgtgaagcacgtgtttgtatgtgtggcctttttggttattgattgttctctcgtgactttgatcatttctg

SEQ ID NO: 254020 - DNA, 419 bp, Glycine max
agaaatttaagtgaggagctagagaatgatgatgaagtctgctatgtgtgcagtggtggttgtagcacttcttcttctggcggaagaggggcccatggctgatgctgtgacatgcaccccaacagagttgagtccgtgtcttccagcaatcacttccggtgctaaaccttgcaatgcttggtgcacgaagctgaggcagcaaaaaccatgcttatgtggctacctcaaaaacgctagcttgaagcagtatgtgaactctcctaatgcccgacaaaccgttgcttcttgtgggattccctttccaacttgttaattaattaagccttcttataattaaagtgtgggatatatatatatatatagataaacagtttaatttatacacactttgatcctacaaagcatcttgacacaagcat

SEQ ID NO: 254021 - DNA, 324 bp, Glycine max
cttcactttaaagttacatagttattcattggtttacttaatgtacaatggctgcttcaacaatgactgtctcttcatcatcattggctggccaagctatcaagcttgccccctccacccctgagcttggtgctggaagggttagcatgaggaaaacagcctccaagactgttttcctaagaagcccatggtacggaccagaccgtgtcaagtacttgggcccattctctggtgagcccccatactatcttactggtgaattcccaggtgactatggttgggacactgctgggctttctgctgacccacagacttttgccaaaa

SEQ ID NO: 254022 - DNA, 400 bp, Glycine max
gttttcgttcaaggtgagaccttgttcccgggcatactctcatgattggactgagtgtccttttgttcatcccggagagaatgctcggaggagagaccccaggaagttccattacagctgtgtgccgtgccctgattttagaaaaggggcttgcaggcgtggagacatgtgtgaatatgctcatggggtgtttgagtgctggctgcacccggctcagtatcggacacgcctctgcaaagatggcaccagttgcaatcgaagggtgtgtttttttgctcacactgcagaggagcttcgtccgctgtatgtgtccactggatctgctgccccttcgccccgttcatctgcttcaggtcctaatgtcatggacatggctgctgccatgagcctttttccagga

SEQ ID NO: 254023 - DNA, 420 bp, Glycine max
agtggagcttgtggcagcccggaaagtgccattgaccaaatcatcagaacagttaccaacaaagtctacaacattacattttcagttggagatgcccaaaatgggtgtcatggatcaatgatggctgaacatttgcgataaagatccttcaaagtttcctataaatctgaaaggaacggaacatccgagactgtaagctttaagttcaaagcaattgcaccaagaaccagactcactttctacaggtccttctaccataccacaattgatgactatggctgtatatgtggccctgacattgatcaagttatagtgttccctgtggcctaaatattagagttccattccatctgtaccagtataatatgtagtaattgagatttttgcaaatcacttgagcttttcttttctataattaca

SEQ ID NO: 254024 - DNA, 528 bp, Glycine max
  unsure (1)..(528): unsure at all n locations
naggggnaggagaggcntnnncttatgtaaccggangattaatgtcaatactcgagagacatgctagcatgcctgcacgtctactctagaggatcccctcggtgaattccaattccacattttcaagaaataacgaggcaaaaatgttgatatatgaattggaattatttgatctcttattaggcctatcctgaagccaaaggaaatgagatcggaattcctcggggaattccaattccacattttcaagaaataaggaggcaaaaatgttcatatatgaattggaattatttgtttacttattaggcctatcctgaagccaaaggaaatgagatcggaattcctcggggaattccaattccacattttcaagaaataaggaggcaaaaatgttcatatatgaattggaattatttgttatcttattaggcctatcctgaagccaaaggaaatgagatcggaattcctcgggggtaccgagctcgaattccctatagtgagtcgtattaaattcgtaatcatgtcatt

SEQ ID NO: 254025 - DNA, 329 bp, Glycine max
ctcgagccgttgcatttcgttactttcatttgttgtgcaatcgtacaagttccaaacttctctattttggtattatttgttctcacttctcacacatacagatttgagccttttatattatcatggcttctaaggtggtttcggatttggttatagcgatgatgttgtttggcatgaactgtaactgcactagtgttggccacatgccttcaaccaaagaggaaggtcacgattttcaggagtctaaagccaagaccacacaaactgcgaacaaggccatggaaactggtaaagagggacaagaagccgcagagtcatggacagaatgg

SEQ ID NO: 254026 - DNA, 317 bp, Glycine max
gattaacatccataatcttaagtcagcatattgttcttctttgcctcgcaactgtgtgaaatggaataatgatgtgtatgttttttctaggtatctttacttctttgagaagggaaacctacaagtcaccgttgctgctatccagggcttaattgagttaattatgaatgagatgcagagtgataccacaactcaagatccagctgctaatgctttcttagccagtaccatgcgctatatagagttccagaaacaaaaagggggtgcggtaagcgagaagtatgaagccatcaaggtttcacatgctggatgaccga

SEQ ID NO: 254027 - DNA, 385 bp, Glycine max
ctcgcacttctagttttggtgttctgagttcgagcgaggaaggtctatgacctgagaaagtcttgctgctgtggtaactgaaggtgcggaagctcctgcaagtgcggcaacggctactgaggctgcaagatgtacctaaacttgaactacactgagtcaaccactaacgagaccttgttcatgggaatggcacctgttaaggctcaattggagagtgctaagaagggtgagaccattgagaacgacggctgcaaatgtggaccatactgctgctgaacgtctgcacttgcaatggaggtgttgggagagcaagcttcaagcagagagttcccttaattacgataatgatgaactattaatgagtaactaagaacttatgtactat

SEQ ID NO: 254028 - DNA, 419 bp, Glycine max
tggaaaagctctggtgcagatatgtgttataatcaataacatcggtgtgctgattgtttacatgattataattggtgatgtgctctctggaacatcttcaagtggagatcatcactatggtatccttgaaggatggtttggtgtgcactggtggacggggcgaacatttgttgtcctttttacaacacttgccatatttgcaccccttgcaagctttaagcgaattgattcattgagattcacatcagccctttcagtcgcacttgcagttgtttttctagtcattgccgtgggaattgcagttgtcaagatattcagtggaggcattgcgatgcccagactcttccctgtcactactgatgtggcatcattctttagactattcactgtagttcctgtgtttgtgactgcatatatct

SEQ ID NO: 254029 - DNA, 395 bp, Glycine max
tggcaagcaaagcgggggtgaacaaaaacaatggcgacatcgctatgggttttgacatctgtttatttcaacaatgtgtgttttggcaaagcgcttcctctatctcggcccttccttgtatgtctcgctctccgcaaatcccttctatctctgtgcacgcgccgacgaaccttcgccgtccgcgccgaatcccaaaacggggccgatgccgtccccgcacactacgacttcgacctcttgaccatcggcgccggcagctgcggcgtccgagccgctcgcttcgatgtcaactacggcgcttccgtcggcatgtgcgagcttcctttgtccactatctcctgcgaaaccaccggaggcgtcggcggaacctgtgtaatacgaggatgtgtgccaaa

SEQ ID NO: 254030 - DNA, 325 bp, Glycine max
gaacaaaagagaagtaatggagagtgaacttatgctgcataggatgcggatgaagtacaagcatgaaaccgcactcttggaagacaacataggactctctggatttactcccttcacttccaagtttgtctccagtgaagaggaatatctcgattcacatgatgtcatgataaaccggcttgcgcggacacggtctactgcagtacagcatttgccttataatgaaaccaacgtttccatagcatctgccgctagtacaaagcaagagttcacgatgagatatgtgccacatgcatggcctcataaactgtatgcactcgagcca

SEQ ID NO: 254031 - DNA, 417 bp, Glycine max
cttgaacccttcaggccgttttgtcattggtggccctcatggcgatgctggtctcaccggccgcaagatcattatcgatacttatggaggatggggtgctcatggtggtggtgctttctccgggaaggaccctaccaaggttgataggagtggtgcttacattgtgagacaggctgctaagagcattgtggcaagtggacttgccagaaggtgcattgtgcaagtgtcttatgccattggtgtgcctgagcctttgtctgtgtctgttgacacctatggcactgggaagatccatgataaggagattctcaacattgtgaaggaaaactttgatttcaggcctggtatgatctccatcaaccttgatctcaagaggggtggaaataacagtttttgaagactgctgcctatggacac

SEQ ID NO: 254032 - DNA, 407 bp, Glycine max
accaagacgaggatgccatttcgctgtcacctgacatgagcgctggtacagaggaagatagcagaagccagggatctccacgtagagtttactcaatggcccttcacttgcgatcaattgcttcaatcttggaaagcaacctcgaggagaagtccaagttatacaaagaagtctccttgcagcacttgttcttaatgaacaacctgcattatatggctgaaaaggttaaggggtctgaactcaggctcatacatggagatgaatggattcgaaagtgcaattggaagtttcagcagcatgcaatgaaatatgagagagctagttggagtcccattctcaacttgcttaaggatgacggaattcatgttccgggtacaaattcggtctcaaaaagtcttcttaaagag

SEQ ID NO: 254033 - DNA, 420 bp, Glycine max
ttccaatatattccattctctctgtgtatttccctacctctggcttcacgatgcagatcttcgtcaagaccctcaccggcaagaccatcacccttgaggtggaaagctctgacaccatcgacaacgtcaaggccaagatccaggacaaggaaggaatccccccggaccagcaacgtctcattttcgccggaaagcagcttgaggacggtcgtacccttgctgactacaacattcagaaggagagtactcttcacctcgtactccgtctccgtggtggcatgcagatcttcgataagacactcaccggcaagaccataaccctagaggttgaaagctccgacaccatcgatgacgtcaaggccaagatccaggacaacgaaggtattctcccggaccagcaacgtctcatctttgccggaa

SEQ ID NO: 254034 - DNA, 407 bp, Glycine max
ctccaatatattccattctctctgtgtatttccctacctctggcttcacgatgcagatcttcgtcaagaccctcaccggcaagaccatcacccttgaggtggaaagctctgacaccatcgacaacgtcaaggccaagatccaggacaaggaaggaatccccccggaccagcaacgtctcattttcgccggatagcaacttgaggacggccgtacccttgctgactacaacattcagaaagagagtactcttcacctcgtactccgtctccgtggtggcatgcagatcttcgttaagacactcaccggcaagaccataaccctacaggttgaaagctccgacaccatcgataacgtcaaggccaagatccaggacaaggaaggtattcccccggaccagcaacgtctc

SEQ ID NO: 254035 - DNA, 284 bp, Glycine max
tcgctccagatatagaaaagctcggggtttttttaaaataataatgggggccgtgaggaaacttttttgggaaggcaaggtgtgtaaaaaactggtttaaggaagaagctactgaaacctgtattatgaggttcaaaagctttggctatgccaggaaaatttggaatattacaatatgggtagcaacaggactattgtttggtttagaagggaccttagaattgaggacaatcctgcattagctgctgctgcaaaggaggggtctgtactccctgtgtatatat

SEQ ID NO: 254036 - DNA, 419 bp, Glycine max
gaaaaggaacaccttgaaaactgcatttatgttcccaggcattctttttgctgtcttctttgtgctgaatgctttaatctggggggagcagtcctccggggcagtcccttttggaacaatgtttgctctagtctgcttatggtttggtatatcagtacccttggtctttgttggcagttacttgggttttaaaaagccagcaattgaagacccagtgaagactaataaaattcctaggcaggtacctgagcaggcgtggtatatgaaacctgtcttctcaattcttattggaggcattcttccatttggggcagtgttcatcgagctcttctttatcctgacatcaatatggctgaaccagttctattacatctttggcttccttttcatagtgtttgtgatcctattaatcacctgtg

SEQ ID NO: 254037 - DNA, 368 bp, Glycine max
gaaaccagcaatcggcgattaggagtgagagagatatggagggaattgaaggaaatagcagcagatacagtctgaaaccctcgcgaatttgcaacgaagatgttctgatctgcgtcgacgtcgatcctcagtgcctcgtcgaaatgaaaggtgccaccggtcccaatggcagacccctcacccgtttggactccatcaaacaagccatcgttctcttcgtcaatgccaaactcaccatcaaccccgaacaccgttttgccttcgccactctctccaacaccctcgtctcttgggtcaggaaagagtttagcagtgaaattgagtcaacacttgcagcaatgcgtgttctttcagcttcttcttcttct

SEQ ID NO: 254038 - DNA, 401 bp, Glycine max
cattctctctgtgtatttccctacctctcccttcaagatgcagatcttcgtcaagaccctcaccggcaagaccatcacccttgaggtggaaagctctgacaccatcgacaacgtcaaggccaagatccaggacaaggaaggaatccccccggaccagcaacgtctcattttcgccggaaagcaacttgaggacggccgtacccttgctgactacaacattcagaaggagagtactcttcacctcgtcctccgtctccgtggtggcatgcagatcttcgttaagacactcaccggcaagaccataaccctagaggttgaaagctccgacaccatcgataacgtcaaggccaagatccaggacaaggagggtatccccccggaccagcaacgtctcatcttcg

SEQ ID NO: 254039 - DNA, 418 bp, Glycine max
  unsure (1)..(418): unsure at all n locations
ctcataacacaaagcacaaagcaaagctcatccttgagttaaaaaatggcagcagcttcttccatggctctctcatccccatccttggctggcaaggccgtgaagctgggcccatcagccccagaagtgggaagggtgagcatgaggaagaccgtcaccaagcaggtctcctcaggaagcccatggtacggcccagaccgagtcaagtacttgggcccattctctggcgagcccccgtcctacctaaccggtgagttcccaggcgactacggctgggacactgctgggctttccgcagacccagaaaccttcgccaagaaccgtgaactcgaagtgatccactccaggtgggccatgctcggagccttgggctgcgtcttcccggagttgctgtcccgcaacggngtgaagttcggag

SEQ ID NO: 254040 - DNA, 378 bp, Glycine max
tcggggaattccaattccacattttcaagaaataaggaggcaaaaatgttcatatatgaattggaattatttgttttcttattaggcctatcctgaagccaaaggaaatgagatcggaattcctcggggaattccaattccacattttcaagaaataaggaggcaaaaatgttcatatatgaattggaattatttgttttcttattaagcctatcctgaagccaaaggaaatgagatcggaattcctcggggaattccaattccacattttcaagaaataaggaggcaaaaatgttcatatatgaattggaattatttggtttcttattaagcctatcctgaagccaaaggaaatgagatcggaattcctcgggggta

SEQ ID NO: 254041 - DNA, 372 bp, Glycine max
ggcaacctcatatttgtcttcaattttcattggaacaacagcgattcagattacagagttggctgttcaacccctgggaaatataagattgtcttggattcagatgatgccttgttcggtggcttcaatcggctcaatcacactgctgagtacttcacctgagaaggatggtatgatgaccgacctcgatcctttcttatctatgcaccttctagaacagcagtggtttatgcccttgcagatgatgctgaacctaccctagcagatgaagctgaacctgccctagcagatgaagctgaaccagatccagttgatccttgatgacaatcttctgggatgctgaaatgttacaagtgcacaacggcatggatg

SEQ ID NO: 254042 - DNA, 376 bp, Glycine max
gtgggaatgcctaatgctggtaaaagcactttactcggggctatatcaaaggctaaacctgctggtggtgactatgccttcactactattaggccaaatttggggaatctaaactatgatgatctctcaataactgtggctgatattcctggacttataaaaggcgcacaccaaaatcgtggactcggacatgcgtttatgcgccacatagaacgcacaaaggttcttgcttatgtggtagacttggctgctgctttaaatggaagaaaaggaattccaccatgggaacagctgagagacttaattctagagctagagtaccatcaagatggtttatacaaacgaccattcttgatagctgcaaattagactgatg

SEQ ID NO: 254043 - DNA, 362 bp, Glycine max
caaattccattttccaattcaaaaccctaactccgttcgaagcaccaaatcgtgatggcaccaaaggcagagaagaagccagcagagaagaagcctgtggaggagaagaaatcgacggtgggagacaaggctccggcggagaagaagccaaaggccggaaagaagcttccgaaggagggaggcgccggcggagaaggtaagaagaagaagagaaacaagaagagcgtggagacatacaagatctacatcttcaaggttctgaagcaggttcaccctgacattggtatctcaagcaaggccatgggaatcatgaacagcttcatcaacgacatcttcgagaagcttgcccaggaatcttctag

SEQ ID NO: 254044 - DNA, 424 bp, Glycine max
  unsure (1)..(424): unsure at all n locations
tccaacggtgcatcttgatttccgtggaacagtattgaacgtgaagccttcaccagtagtggcagcttttagttccagagggcccaatatggttaccagacagattctgaaaccggacgttattgggcctggggttaacatcttggccgggtggtccgaagcaattgggccatcagggttatccgatgacactcggaaaactcagttcaacatcatgtcaggtacatctatgtcttgtccacacataagtggattggctgccttgttgaaagctgcacatccgcaatggagttctagtgcgataaaatcagccctaatgacaacggcagatgtacacgacaacaccaagtcccaactccgggatgcggcaggnggtgcattttccaacccatgggctcatggtgcgggccacgtgaacccacac

SEQ ID NO: 254045 - DNA, 411 bp, Glycine max
tgctagtgttaggtgaattccctcgcttcacatgcatgatcgcaccttcaactctcttcttcttcttcttctccatggctttttttcaaggttttggcgccgtggagttcgttttgtagcatcaccgtatcatcagcttcagcttgctttcaccaaaacggctttactatttggtgtgttccatgtcacaaaaaacgaaaggagatattccttttacccactcctcgtcagggaagatctgaagcagcgctagcagcacacgtcctctaatggacgccgactcctctggagaagaagtggttattaaaacaagaaaaccatatactatcacaaagcaaagagaacgatggacagaggaggaacataacagatttctagaagccttgaagctatacgggcgagcatggcagc

SEQ ID NO: 254046 - DNA, 395 bp, Glycine max
gcaggacctaaaccagcagtttatctagaaactgctaaggatttggctgaccgtctgctatctgcttttacggccagtccaactgctattccgtttagtgatgctattctgcatgaaaagtcagcccatccagctcccggaggactgagtagcacatcggaagtttccactttacagcttgagtttaattatctcagtcagatatctgttgatcagaaatatagtttggaagcaatgaaagtcatggagcacatgaagactcttccaaagattgaaggactagttcctatctacattagccctcattctggtgagtttagtggagaaaatattagactgggatctcgtggggacagttactatgagtacttaatcaaagtatggcttcagagtgg

SEQ ID NO: 254047 - DNA, 414 bp, Glycine max
gaaaagatgatgatgtttgaagatatggggttttgtggcgatgtggatatgttatgtgtttctcttggagagggggatattgctgtgagacaaactgaaccggatcctgtagttgaggatgactacagtgatgaagaaattgatgtggatgaacttgagaagaggatgtggagggacaaaatgcgtcacacgcgattgaaagaacaaaccaagtccaaggaagggactgatgcaacaaagcaaaggcaatcccaagagcaggcaaggaggaaaaagatgtcaagagctcaagatggaatactgaagtacatgctgaaaatgatggaagtttgcaaggcacaagggtttgtttatgggataattcctgagaaggggaagccagtgactggagcatcagacaatcttcgtgaatgg

SEQ ID NO: 254048 - DNA, 409 bp, Glycine max
cttcacaattagaaaaaaaaaaaaaccaaaaatgggcgtttctcgttctcaaaagcctcatgttgtttgtgtgccattcccagcacaaggccacgtgaacccttttatgcaactaagcaaactccttctttgcaccggtttccacataacctttgtgaacaccgagttcaaccacaagcgtttggtgaagtctcttggacaagaatttgtcaagggacaacctcattttcgatttgagaccataccagatgggttgcctccatctgacaaagatgcaacacaaagcattgcagcattgtgtgatgcaactagaaaacatttgtatgagccactcaaagagcttgggaagaaactcaatgcttcacatgaagtgcccttggttacctctatcatctatgatgggctaatg

SEQ ID NO: 254049 - DNA, 433 bp, Glycine max
tgctagcatgcctgcacgtctactctagatgatcctctcggtgaattccaattccacattttcaagaaataacgaggcaaaaatgttcatatatgaattggaattatttggtttcttattaagcctatcctgaagccaaatgaaatgagatcggaattcctcggggaattccaattccacattttcaagaaataaggaagcctaaatgttcatatatgaattgcaattatttgctttcttattaagcctatcctgaagccaaaggaaatgagatcggaattcctcggggaattccaattccacattttcaagaaataaggacgcataaatgttcatatatgaattggaattatttggtttcttattaggcctatcctgaaaccaaaggaaatgagatcggaattccttcggggtaccgagctcgaattcccta

SEQ ID NO: 254050 - DNA, 412 bp, Glycine max
gtcatttgcaagggatgttttcgcggacaatcagacttctagaagctgggataaaacctgtatatgtttttgatgggaagccacctgatttgaagaaacaagagcttgccaaacgttactccaagagagctgaggctactgaagatttgtcagaagccttagagaccgccaataaggaagacattgaaaaattcagtaaacggacagtgaaggttacaaagcagcataatgacgactgcaaaagacttttaaggctcatgggagtgcccgttgttgaggcaccctcagaagcagaggctcagtgtgctgctctttgtaaagctggaaaggtttatggtgtggcttctgaagacatggattccttaacatttggagctcctaaatttcttcgccacctaatggatccaagctc

SEQ ID NO: 254051 - DNA, 419 bp, Glycine max
ggagaagggtgagtggaagatctctaaaggctcagagagaagatagcattagaagaacagtatatgtttctgagattgatcagcattcttttttcctggtgtaggttactgaggagcggcttgctgccttattcagcagctgtggacaagtaattgattgccgaatttgtggtgatccacattcagttctccgttttgcttttgttgagtttgcagatgagtatggtgcaaggactgctctaaatcttgggggtaccgtgcttggatactatccggtcagggttcttccttcaaaaactgccattcttccggtgaatcctacattcctgcctaggtcggatgatgagcgtgaaatgtgtgcccggactatctattgtacaaatattgataaaaaggtttctcaagctgaagtgaagaat

SEQ ID NO: 254052 - DNA, 396 bp, Glycine max
atcgtgagagggacggtagcagagattccgtgagttgcaaagatgaggacaattctttctgcagagaccatgaacatcccggacggcgtgagcgtcaaggttaatgccaaggtcatcgaagttgagggcccccgcggaaaattggtgcgagacttcaagcacttgaatctcgattttcagctcatcactgacgaaaacggtaaaaggaagctgaaggtggaggcctggttcggttctcggaaaacatccgccgccattcgcaccgccctgagccacgtggagaatctgatcaccggcgtcaccaagggctaccgctacaaaatgaggttcgtttatgcccattttcccatcaacgcaagcatcggcaacgacaacaagtctattgagatcagaaat

SEQ ID NO: 254053 - DNA, 419 bp, Glycine max
caagattgtttttgatgataagcttgtgttggctaacacacgggaattctttgatggaaattttccagtggattcttggttaccaatttttgtgaattgtctttatcctgtaagtcaattaccttcagaagctgtcgttgtaaatgtcacatgtggtagtggacgtgtggtttacccaccactgcttggattagttctgcagttaacaatcgctcctcagatatcaacaaaaggattcgcacagcacttgggaaaggtaagaaaattgtttttcttactagagttgatccttttgcagtagctttactggctgatctttttggtgttaagaatgaaattctgagttctaacgccactaatcctatgctgacgcgacttcttgaaaactgtaagagtctcaaatatctggttgatgagtg

SEQ ID NO: 254054 - DNA, 525 bp, Glycine max
  unsure (1)..(525): unsure at all n locations
gggggtagaggctgnngtaaagatctcggggagttaatggtaacactctagaagagctatgacgtcgcatgcacgccgtacgtaagctcggaattcggcttgagcaagattccggccgccgaatggcttctattactgatgccaatgggcaatcccttgggcttgaatctgaatctgctggtttggctgaattctgggcgccatggtgttgttcctgccgaatgattcaccctataatagatgaactgtcaaagcaatatgctgggaagctcaagtgttacaaactcaacacggatgagagcccttcaaccgctactcggtatggaattcgaagcatccctactgttatgatcttcaagaatggtgagaagaaagatacagttattggtgctgtgcccaagtcaacattgactgcgagcatagaaaaattcgtatgaagtggtaagtaaagaaggcctttgctggaagtaaagctgttttttccccattagcctcttttcttctaagccccatgtctcaagtttc

SEQ ID NO: 254055 - DNA, 343 bp, Glycine max
gctgaatgcttcatattatctaaaaacagggggtcattttggtatttcaatcaaggctaactgcatagactccacagtccctgctgaagcagtgtttgaaagcgaagtgaacaagttaaaggctgatcaattcaaaccattcgagcaagtcacccttgaaccatttgagagggaccatgcctgtgtggttggtggatacagaatgcccaagaagaaaaaagatgctgctgagtagattgctttccagtagccagtaggcgtgtaccaatgttatttcatgagattcgtgttaattttgattcgaaaccttggttataaaacagttctggtttgaatttaaaaa

SEQ ID NO: 254056 - DNA, 324 bp, Glycine max
caagttattatcaaataattaattaaattccctcgggaatcttgttggagccatgtttacagctggtcaggtcatcaagtgcagagctgcggtggcatgggaagcaaggaagccactatcgatagaaaccatagaagtggcaccaccccagaaaggtgaagtgcgtttgaagatcctcttcaactccctttgccgtacagatgtttactggtgggatgctaagggccagactccgctgtttcctcgtatcttatgccacgaagcttcggggattgtggaaagcgtgggccagggtgtgacacatctgaaaccaggtgaccatgc

SEQ ID NO: 254057 - DNA, 407 bp, Glycine max
ttgcactacatcaaagcacattgttcatatgtgtatgagtgcaattctggtcaacattgaaatgggtcaatttactcatgttacaagctatgttagcaaggcagaacagtcaccagatgcccttgaagcagtaacagttgcaaagctacgatgtgctgcaagattggctaatctagaagccaaaaagtacaagcttgctgcccgaaagtttctagaaacaggacctgaactgggaagtcactataatgacgtaattgcacctcaagatgttgcaacatatggaggactttgtgcacttgcaacatttgatcgggcagagttaaagagtaaagttatagacaattccaacttccgcaatttcttagagttagtaccctgaagtaaggaactgataaatgatttttact

SEQ ID NO: 254058 - DNA, 420 bp, Glycine max
acaaggcttacctagctcgtccatggaagaattactctaggagcatggtcatggacacatacattgatgatttgattgacgctgatgggtatttgccatggcaaggaccagagggtccttctggtatggatacttgcttctatgccgagtaccacaacattggccccggttcagacaaatccaagcgtgtgaaatgggctgggatttggaacctcaattcaaaagctgcacgttggttctcaccatctaagttttttcatggaactgattggattgaagttactggaattccttgctttcctggcgtgcccaaacaccatatgcacaaaaagacaatacttaattggcaataaaagtaatgagttgcaaaatcaagcaatataaattaattaaaaagtaatgattgtgcttctttattct

SEQ ID NO: 254059 - DNA, 399 bp, Glycine max
  unsure (1)..(399): unsure at all n locations
aagattgcttacttgggaaggccgtggagggtttacgctaaggttgtgatcatggactcgcagatcgatgacatctttgtccctgaagggtacatgccgtggatgggaagtgctttcaaggacacaagcacctactacgagttcaacaacaggggttttggtgctaacactcaaggtagaatcacgtggcctggttttaaggttatcactcccattgaagctactgattactacccagganaattctttgagatcgctaattcgactgagcgtgattcttggatcgttgggtctggggtgccctactcccttggcccaattattgcgctgcctttgccaacagcttaattcatggtcttttttaatgactctaatagaatatacatggtactacatatc

SEQ ID NO: 254060 - DNA, 339 bp, Glycine max
aaacaggccttcttcggcgaaacacaagctgagggtggttttgatccaaatgcagtggccacggctaacatcttagagactgcaacacctgtgattgacgggaagccatactattttttgtctgtgttgacaagaactgctgatggagatgaaggtggcaagcaccacataattagagcaactgtaaaagatggaaaactgttcatttgcaaggctcaagctggagacaagaggtggtttaagggagcaagaagatttgtggagagcgcagcaagttctttcagtgttgcttaaaaaacttcaacagcgggttatatatatatatgctatgtgtaaatc

SEQ ID NO: 254061 - DNA, 390 bp, Glycine max
gcaccacgtatccctgagaaaagagaggaaccacactctctaagccaaagcaaaagcagcagcagcagcaatggttaaagacacaaagcctttagcctatgctgccaataatggataccaacaaaagggttcttcttttgattttgatcctagcgctccttcaccgtttaagattgcagaaatcagagcttcaataccaaaacattgctgggtcaagaatccatggagatccctcagttatgttctcagggatgtgcttgtaattgctgcattggtggctgcagcaattcacttcgacaactggcttctctggctaatctattgccccattcaaggcacaatgttctgggctctctttggtcttggacatgattgtggccatggaagctt

SEQ ID NO: 254062 - DNA, 395 bp, Glycine max
  unsure (1)..(395): unsure at all n locations
cctctttcttcctcttcctcagtagtgcgattttcgattctgttctctgcaactatgcctaaccctaaggtcttcttcgacatgaccatcggcggtcaacctgccggccgcatcgtgatggagctctacgccgacgtgactccgagcaccgtcgagaacttccgcgcgctctgcaccggcgagaagggcgccgggcggagcggcaagccccttcactacaaaggctcgtccttccaccgcgtgatcccgaacttcatgtgccatggcggcgacttcaccgtcggaaacggcaccggatgcgagtcgatctacggcgccaagttcgccgacgagaacttcgtgaagaagcacacttgtcccggcatactctncatggcgaacgccggtcccggaac

SEQ ID NO: 254063 - DNA, 378 bp, Glycine max
tggaaaaagcttctggtgcagatatgtgttataatcaataacatcggtgtgctgattgtttacatgattataattggtgatgtgctctctggaacatcttcaagtggagatcatcactatggtatccttgaaggatggtttggtgtgcactggtggacggggcgaacatttgttgtcctttttacaacacttgccatatttgcaccccttgcaagctttaagcgaattgattcattgagattcacatcagccctttcagtcgcacttgcagttgtttttctagtcattgccgtgggaattgcagttgtcaagatattcaatggaagcattgcgatgcccagactcttacctgtcactactgatggggcatcattcttt

SEQ ID NO: 254064 - DNA, 402 bp, Glycine max
  unsure (1)..(402): unsure at all n locations
cttcctcagtagtgtcatttacgcttctcttctctgcagcggctatgcctaaccctaaggtcttcttcgacatgaccatcggcggtcaatctgctggccgcatcgtgatggagctctacgccgacgtcactccccgcaccgccgagaacttccgcgcgctttgcaccggcgagaagggcgtacggcggagcggcaagcccctccactacaagggctcgtccttccaccgcgtgatcccgagtttcatgtgtcagggtggcgacttcaccgncggaaacggaaccggcggcgagtcgatttatggcgccaagttcgccgacgagaacttcgtgaagaagcacaccggtcccggcatcctctccatggcgaacgccggtcccggaaccaacggatcttagttct

SEQ ID NO: 254065 - DNA, 408 bp, Glycine max
  unsure (1)..(408): unsure at all n locations
cttgacaaggatattaattcattctccatgagagtcagagagtggtattcttggcattttcctgagctggtgaaaattgtaaatgataattatctgtatgccaaagttgcaaaatttattgaggataaggcaaagttggctgaagacacgattccaggcttaactgacatagttggagatgaagataaagcaaaggagattgtggaagctgccaaagcctccatgggacaggatttgtccccagtggacttaatcaatgtccatcnaattgcacagatggtaatggacctatctgagtacagaaagaacttatatgattacctgtttgctaaaatgaatgatattgcaccaaatttggccacttaaatgggtgaagttgttgttgctcgtttgatttcccatgctgga

SEQ ID NO: 254066 - DNA, 379 bp, Glycine max
gaatgggtatacagtgatgggaaatcaacaacatgtgttgcctttattctttcaatgtataaagcggctggaatattcggccctatttctagctccattcaagtaactgaattcacaattcgtgatgcatacatgcttaggatttttgaggataaccaaacacgtctaccaagatggtgcaacaatgagaacgatcggcatccattctgccagattcttggtgaatataggatggaattgcctggctataacaccttggatccttatgccaatatgaacgagcactgtccttcccttccttccacttatgacaggcccttgaaatgttagtctcttctccggcatttccattttctgatttgcctgtaatccatgatct

SEQ ID NO: 254067 - DNA, 371 bp, Glycine max
tttctctctcactccaaacctgcgattctcacccctgcccaatggcttcgcaggagaatggtcgtccattacctaaattcggtgagtgggatgtgaacaatcctgcctcagctgacggttttactgtcatactcaacaaggctagagatgagaagaagactaacacggcaaccccacgtagatctgatcctgtgttcaagaatgagaattataacactcctcaatattctggaaagagaaagtggttttgctgcggctgaatctagaagagggcatgatggatcatgaccctatttgctgtggaccatgatcccgctaatcaagtggagcaaggaatggcttatgatcctatttgctgactgtcacttctt

SEQ ID NO: 254068 - DNA, 408 bp, Glycine max
aagagattcaagaccggcatggctaatgaagaggaacagaagaaccacctcttcggcatcaaagatctcggtcacaagactcttcttcagagtgatgcactctatcagtatatacttgaaaccagtgtctatccaagagagcacgagtgcttgaaagagatacgcaagatgactgcaaaacacccactgaacatcatggcaacaccagcagacgaaggacaacttctgagcatgcttgttaagctcacgaattcaaagaacgccttggaaattggtgtattcactggttactctctgctctccactgccctggctcttccccctgatggaaagatcttggctttggatgtgaatcgcgaatactatgagttaggattgccaataattcaaaaagctggagtggctcac

SEQ ID NO: 254069 - DNA, 374 bp, Glycine max
tggatgtgaaaaacagtggcaggggaattccattcatgaccttttatctctttcttcttctcctttctgccatctctgttttgtcccatgcttcctctattgcttttcagattaaaggaaatgtgtatccacttgggtattacacggtgaacctcgccattggcaatccccctaaggcttatgaacttgacattgacacaggtagtgatctcacttgggttcagtgtgatgcgccatgcaaaggttgcaccctacctcgcgatcgacaatataaaccacatggcaaccttgtgaaatgtgtggatcccttgtgtgctgcaatccaatcagcaccaaacccctccctgtgttaacccaaatgagcaatgtgacta

SEQ ID NO: 254070 - DNA, 365 bp, Glycine max
attttatccaattgaaattttaaaaatgactgggataaacttaagaattcaattattgaaattgaataagtaaacaatttaattggattggtcgaatggtatcaaaaaaatggagtactaactcccatttcttatttattattgaattaaccgatcaacttgctttgttatcgaacatttctttttgatttcaaaaattttccggaaaaaatttgaatctatttttatatgcgaatcaatcctactacttctggtcctgaggtttctgcgcttgaaaaaaaaaatctgggacgtatcgcccaaataattggtccggtactagatgtagcttttcccccaggtaagatgcctaatatttacaacgc

SEQ ID NO: 254071 - DNA, 401 bp, Glycine max
  unsure (1)..(401): unsure at all n locations
agaaatttaagtgaggagctagagaatgatgatgaagtctgctatgtgtgcagtggtggttgtagcacttcttcttctggcggaggtggggcccatggctgaggctgtgacatgcaccccaacagagttgagtccgtgtcttccagcaatcacttccggtgctaaaccttccaatgcttgttgcacgaagctgaagcagcaaaaaccatgcttatgtggctacctcataaacgctagcttgaagcagtatgttaactctgctaatgcccgaataaccgttgcttcttgtgggattccctttccaacttgttaattaattaagccttcttataattaacgtgtgggatatatatatatatatagattaacagtntaattatacacactttgatcctacaaag

SEQ ID NO: 254072 - DNA, 348 bp, Glycine max
ggctaattcctacttatccttgcttgtcttgatccttgtagctctgctcctcacccctcaagggcttgctgatgaatctgattcttactataagccaccagtttacaagaaaccaccagtgtacaagcccaagcccaagccacccattcacaagcccaagccacccgtttacaagcccaagccacccgtttacaagaaacccccttatggtaagtacccaccagttcaagacaacgatcacttctaaaccatgcaacaaggcatgttaatgttaactatctactaaaataaagaggttcagttaacctactacgtacgttgctccttttaattcctaaatcgtaattt

SEQ ID NO: 254073 - DNA, 392 bp, Glycine max
aagaggtccaagtcaaatcaatacccaagcacctccctaaggcagattgagaatgtaaactctaaggaagaagttgcgtggtactgtgggaagcgcatggcttacatctacaaagcgaaggtaaagaagaacggaagccactatcgctgcatttggggtaaggtcaccaggcctcatggtaacagtggtatagttcgagctaagttcaagtccaatctgccacctaggtcaatgggtgcaagggttagagtattcatgtatccaagcaatatatgagttatgatggggctgtggtagaaagtgatgaataatgcaggtacttctgatgacatgtctagcgctgttctcttggtgcagccgaaatggctgtgccgagcatctgcactgtgtct

SEQ ID NO: 254074 - DNA, 343 bp, Glycine max
aatatatcaaagcaagaaaaaatggggtccgcataatttgctgggatattaacaattgtcattatctcaatgtgtagcatttccttggcacaaaattcgcccaaagatttccttgacgcgcacaatgcagctcgtgcagaggatggtgtcgagccactcgcatggacacgacaccgatcgcagcctacgctcagcaatatgctgactcaaggatcatacagtcgcctagacagcactctcaagggccttatgatgagaacctgcaggccatatacgacgaatgatggggctgtgatacaaagtgatggttaatgcaggtgcttgcgatgacatgcctaacgct

SEQ ID NO: 254075 - DNA, 515 bp, Glycine max
  unsure (1)..(515): unsure at all n locations
nagtnntgatgggcgtgnaggtacgtataggagacttaatgtcataaccggagagacatgctagcatgcctgcacgtctactctagatgatcctctcggtgaattccaattccacattttcaagaaataaggatgctaaaatgttcgtatatgaataggaattatctgtattattattaggcctatcctgtagccataggaaatgagatcggaattcctaggggaattccaattccacattttcaagaaataaggaggctgaaatgttcatatatgaattggaattatatgttttattattaggcctatcctgaagccaaaggaaatgagatcggaattccttggggaattccaattccacattttcaagaaataacgatgcaaaaatgttcatatatgaattggaattatttgttttcttattacgcctatcctgaagccaaaggaaatgagatcggaattccttgatggtacctagctcgaattccctatactgagtcgtattgaattcgcan

SEQ ID NO: 254076 - DNA, 385 bp, Glycine max
gcagtgatgtgtcataggctaaatttcagaactgcagtattttactgccatgaagtccgtgaaacaacagctttcatggttccattggtggctggtgatggaaccaaaactcaggcacttgctatttgccactcaaatacttctggaatgaatcatcaaatgcttcatcaacttatgggagttgatcctggaactaaccctgtttgccatttccttggaagcaaggccattttatgggtacccaatttatctgtggacactgcctatcagaccaacattgttgcttaattagtccatgcatcttgagcaccatgagaatgagaatgtgtataaaataaattatcatgtgctgtgtgttgtgcaagtactaccttctctagctaga

SEQ ID NO: 254077 - DNA, 324 bp, Glycine max
gccatgtatgttgcaattcaagctgtcttgtctctgtatgcgagtggacgtactacaggtattgcgcttgattctggtgatggtgtgagccacacggtgcccatatatgaagggtatgctcttactcatgcaattcttcggttggaccttgctggccgtgatttaacagagtacttggtgaaaatccttaccgagagaggatactgcttcagcacctctgccgaaaaggaaattgtccgtgatgtgaaggagaaattggcatacgtggcccttgatttcgaacaagatatggagactactaagagtagttctgcagtgggaaag

SEQ ID NO: 254078 - DNA, 323 bp, Glycine max
gtgttcaatcttcaaagacttgaattcttcttacttaggttctgaatggctggaatttgctgtggtgttgtcggagaaggtgacactccggctccactcgagccaactactcgcccctccaggcgccggagtttggacatcttacccttaaaatacatcgctgacatggcggtgccgccgtcggatggttcacggaaacgtcccaagctggatctcagggaccgcgataacgtagttcaaaattgcgacgaatccactggacacaaggtggtgaaaaaagaagccaaagtggaaatccacgacaatatttccgaaacgaaaaa

SEQ ID NO: 254079 - DNA, 379 bp, Glycine max
aaaaatattattaagatgatcaacattattggagcacttgtgctactctttgcattcctctttctcaggtgtgtgtatgcacacgacacaacaacccttgtgcctgcaatcataactttaggtgattctgctgtggatgtagggaacaatgactatcttcccacccttttcaaggctgattaccctgcttatgggagggactctgttaaccaccaacctactgggaggttctgcaatggcaaattagctactgatatcactgctgacacattgagtttcaagacctatgctccagcttatattagcccacatgcttctgggaaaaacctcctaatggaaccaaacttggctgcagtggcttcaggttttgatgaaaatg

SEQ ID NO: 254080 - DNA, 328 bp, Glycine max
atctatatctaccatggagcagaatataacccttctgtctggttagtgaatatgagaatggcttcagatcggaaacttgacactttcgaggaggtggcaaagcacgaccagaccaaggattgctggctcatcatttctggcatggtgtatgatgtcacccctatgatggaggatcatcccggaggtgatgaagtagtggcatctgctacaggtaaagatgcatccgatgatgatgaagatgttgtacacagtgaatctgctagagatatgatggaaaagtactacattggcgagattgatcattaacctgaaccactaaaacgtacct

SEQ ID NO: 254081 - DNA, 408 bp, Glycine max
ctcagaccaaatgggctcttgttgttctatgtagacggtgtgtgtgactgtggcatcactggcctctgcagcactctgagccaacccacgcaggccagtggatgtacaatgtggccgaaactacatgcccacatgggcctttgatcacatcaaatatttcaatggcggctctgacattcagcttcatcttgacaagtacactgctactggcttacaatccaaagggtcttacttgtttggtcacttcagcatgtacataaagatggttcctggagattctgctggcacagtcactgctgtctatgtatcttcccaaaacgcggagcatgatgagatagactttgagttcttggggaacagaacaggacaaccttacattctgcaaacaaatgtgttcaccggaggcaa

SEQ ID NO: 254082 - DNA, 406 bp, Glycine max
caagattagagtaaagaaaaaatgtttgcagggaaaggggctgtttgattctccagagcggtggcattggcagcaatcgcggtggtagcttgcgttgggcttacacaggcccaacccgaggccaggttcaagtgcaacagcgcgaacatccccacgtgtcgcgcgctcataagctactctcacccgaacaccaccaccctcggcgacatccaaaagctcttcaacgtgaaacacatcctcgacatcgtgggagcgaacaacctcccaagcaacgccacaaaaacatacgcggtgggccccaacgaggttgtgaaggtccctttcccgtgcaggtgcagcaacaacacgggactctcggaccgtgttccgctgtacaggatcaagaaaggggacacgctgtactaca

SEQ ID NO: 254083 - DNA, 313 bp, Glycine max
  unsure (1)..(313): unsure at all n locations
gtgagtgatcggcgttcactagatccttcataagccgtcatgatcatcatcatcatcaccgttgattgaagaagattccgatcagaaacatcgtcatcggaaggcctgaaaaggctactcaccccgacacgttgaacgcgtggttggctgagttcatgtgcaccttgatcttagtgttctgcggttcaaggtccggcatcgnctacgacatgctcaccgtcaacggtgccgncactgccgccggcctgatgtacgatttcattgtccatgctttcgccctgttcgtcgccgtcttcgtcggggccaacatctt

SEQ ID NO: 254084 - DNA, 297 bp, Glycine max
atccattgcacctttctcttcctccgatggctaatctctcactcttgttcttcggtctcctcctattctccgctgccgtagccaccgtcgaacgaatcgacgatgaagacaaccttctgatccgtcaagtggtgccggacgcggaggaccaccacctgctcaacgcggagcaccacttctccgccttcaagacaaagttcgccaagacctacgccacgcaggaggagcacgaccaccgcttccgtatcttcaagaacaacttgctccgcgccaagtcgcaccagaaattggacccct

SEQ ID NO: 254085 - DNA, 405 bp, Glycine max
caaggatttgaccaagaaactgctgcagttgtaatggctagatttgcttctctgaaaatggagagtgaggaaacatttgatgctacacggtggttggatcggtttctcattcgcctctgttctaaatttggtgactaccgcaaggatgatccatcgtcttttacattaaacccatcattttcacttttccctcagtttatgttcaatctgcgacgctcacagtttgtacaggtttttaacaacagtccagacgagactgcatatttccgcatgttgttagacagggaaaatattagtaatgctgccgttatgaatcaacccgtaattgatatcgtattcatttaatgcactgcctgcaccagcattgttagatgtggcttccattgctgcagacaagattttgtt

SEQ ID NO: 254086 - DNA, 393 bp, Glycine max
cgtttgatcgctaacggaaccgaagccgaagccggtttgattcccgtttttccctctctcactttccccaaccactactccatcgccactggcctctaccctgcttaccacggcatcattaataaccacttcaccgatccactctctggggaacccttttacatgggtaacagccatgaccccaagtggtggctcggggaacccttgtgggaaactgtggtaaaaaacggcttaaaggctgcaacttatttctggcctggttctgaggtaaataaaggtccttggtcttgtcccttcaaatattggcagcactattaatccttcggttgcgtttgaggatagggttgatgcggttttggggtactttgatttgcctagtgatcagattcctga

SEQ ID NO: 254087 - DNA, 399 bp, Glycine max
  unsure (1)..(399): unsure at all n locations
atcacatactatcaacactataaacattgattctggctctttgctgcagcgagaccaatatgtctttcactgcaaccaagttttcaccttgtcctctacctctcacttccaccacccccagatccaatgacaagcctctctctttctgcttcgatcactccaaacccaacccttcttgctccttacttggatccactcgcaagcttcttcgcttcaatgctctcgctacgcctcatgctcaccctcgtgcttctgcttcccctgctgctgctgttcttctcgaacgaacctncaatctgcttgtcacaaaagatgaaaggttggaactctatgaagacatgatattagggaggttttttgaggacaagtgcgctgagatgtattataggggcaaaatgt

SEQ ID NO: 254088 - DNA, 405 bp, Glycine max
gagaagagagatggatccagacgcgttggcaaaggcattcgtggagcactactacagcaccttcgacaccaacaggaacggcttagcgaatctctaccaggagggttccatgctcactttcgaagggcagaagatccaaggcgcttccaacatcgttgccaagctcacctccctcccttttcagcagtgccaccactcaatctccaccgtcgactgccagccctccggcgtcaacgccggcatgctcgtcttcgtcagcggaaaccttcagctcgccggcgaacagcacactctcaagttcagccagatgttccatttgataccaacacctcagggaagctattatgtgttgaatgacatattccgtttaaactatgcatgaagatgtcatatgacccggaaggc

SEQ ID NO: 254089 - DNA, 176 bp, Glycine max
tatactgaatgttttgggatgaagcttttgaggaaaagagatattccagaggagaaatatgccaatgcttttcttggatttggccctgaacaatcccattttgttgtggaattaacatacaattatggggtgacctcatatgatattggaactggatttggacattttgctatcgc

SEQ ID NO: 254090 - DNA, 356 bp, Glycine max
gggaagagtcagtatgtcaaatgggcatggcaagaacgtgtagggttaaattcgttcaacgattctctattctttgatccatctatccgtacttatttcacgaattacatcaagactgtcttgaccatgaaaaatactatcaccggaatcgaatatagaaatgaccccagcattcttggttgggaattgattaatgagcctcgatgcatgtctgatccttcaagtgacactctacaaggatggatagacgaaatgtcaacttttgtcaaaatgattgacaagaaccatctgttgactgtgggtctcgaaggtttttatggtccaaacgatccacaatgtgcaactgtcaaccctga

SEQ ID NO: 254091 - DNA, 365 bp, Glycine max
tcttaacttaacttctggttcccaactttttttttcaaaggccacccagccttttttttaccggtcatgggccaaggcaaaaaccggatcaacggatttggaaagaattggccgtttggttgccagagtcgctctgcaaagagacgatgtggagctcgttgccgttaacgaccctttcattaccaccgattacatgacatacatgtttaaatacgacagtgttcacggacactggaagcatcacgatgtcaccgttaaggacgagaagacccttctcttcggtgacaagccagtcactgtttttggacacaggaaccctgaagagatcccatgggggtcaactggagctgatatcattggtgagt

SEQ ID NO: 254092 - DNA, 396 bp, Glycine max
acgacgcacgcagcagcatcagcttctactcgtgtaatctctgcgtgggctacaatggattccggtgtccaaggttgcatcttagccactttaattctccacgacgaggaaatcccagtcaccgctgagaagatcaacgctctgttgaaggcttctaatgtctccgccgagtcttactggcccagcctcttcgccaagctcgcccagaataagaacatcgaagacctcattttgaacgccggcggtggtggggccgccgttgcagttgccgctcccgtcggcgatggtggtggtgccgctgctgcagccgcacccgtcgccgaggaaaggaaggaagaagtgaaggaagaaagtgacgatgacatgggtttcggcttgttcgattagatcttttat

SEQ ID NO: 254093 - DNA, 400 bp, Glycine max
  unsure (1)..(400): unsure at all n locations
cccaaccatgctgacgctgattacctcatcgttatccttaacgggactgccattctttccttggtgaacaacgacgacagagactcctacagacttcaatctggtgatgccctgagagtcccctcaggaaccacatactatgtggtcaaccctgacaacaacgaaaatctcagattaataacactcgccatacccgttaacaagcctggtagatttgagagtttcttcctatctagcactgaagctcaacaatcctacttgcaaggattcagcaggaacattntagaggcctnctacgataccaaattcgaggagataaacaaggttctgtttagtagagaggaagggcagcagcaaggggagcagaggctgcaagagagcgtgattgtggaaatctcga

SEQ ID NO: 254094 - DNA, 119 bp, Glycine max
catcctcctcgttggcctgctcgcctcttggaccttcctctacctcttccgtccctcggatcaacctctcgtcattctcggccgaacattctctgacttcgaaaccctagccctcctct

SEQ ID NO: 254095 - DNA, 382 bp, Glycine max
agtgagtaggctgccttttctctcttctttctctgttgcgttttgtgaaatctaattcgacatggcgtcacgggacaacaagaaggcgtccagcagccgagccggccgaattcgcaccctctccgatctgaaccgtccctccgccgattccgacagcgactccgatggccctcaggagtattacaccggcggcgaaaagagtggaatgcttgtccaggatccttcaaagggaaatgatgtggatgaaattttcaatcaagctaggcaacttggggctggtgaaaggcctcttgatcagcttcaagagcctccaaggtcaactagctttactggaactggcaggttactctcaggggaaactacacgatctactaataatcag

SEQ ID NO: 254096 - DNA, 404 bp, Glycine max
tcaagatcggctttgctattcctcctggtttgagccctgctgagcttcttgactcgccggttctccttaattcttccaacattctgccatctccaacaactggagcatttgttgctcagagcttcaattggaagagcagttcaggggggaatcagcaaattgtcaaggaagaagacaaaagcttctcaaatttctctttccaaacccgatcaggacctcctgcttcatccacagcaacataccagtcttcaaatgtcacagttcaaacacaacagccatggagttttcaagaggccacgaaacaggataatttttcctcaggaaagggtatgatgaaaactgaaaactcttcttccatgcagagtttttcccctgagattgctagtgtccaaactaaccatagc

SEQ ID NO: 254097 - DNA, 394 bp, Glycine max
ggccgtcggaaagaacaagcgcatctccaaagggaaaaagggtggcaagaagaaggcagctgatccctttgccaagaaggattggtatgacattaaggccccttctctttttcaagtgaaaaatgttggcaaaaccctcgtctctcgtacgcagggtaccaagattgcttctgaaggacttaaacatagagtgtttgaggtctccttggctgatcttcaaggggatgaggatcatgcattcaagaagattaggttgagagctgaagatgtgcaagggaagaatgtcctgacaaatttctggggaatggatttcacaactgacaagctgaggtcattggtgcgaaaatggcaaactctaattgaagcccatgtggatgtgaagacaactgataac

SEQ ID NO: 254098 - DNA, 412 bp, Glycine max
gtatagccctacctttccgttcaagatgcacatcttcgtcaagacgctcaccgtcaagaccattacccttgaggtggaaagctctgacaccatagacaacgtcatggcctagatccatgactaggaacgaatacctccggaccatcaacgattcattttgaccgtatagcatctagatgacgggcgtacctttgctgactactacattcagaaggagagctctcttgaccttgtgctgcgtctgctcggaggcatgcataccttcggtaagacactcaccggcaagaccataaccctagaggctgaaagctacgacaccatcgatgacgtgaaggccatgatccaggacaagggaggtatccccccggaccagcaacgtctcatcttcgccggaaagcagctcgaggacggc

SEQ ID NO: 254099 - DNA, 364 bp, Glycine max
tcggggaattccaattccacattttcaagaaataaggaggcaaaaatgttgatatatgaattggaattatttgttttcttattaggcctatcctgaagccaaaggaaatgagatcggaattcctcggggaattccaattccacattttcaagaaataaggaggcaaaaatgttcatatatgaattggaattatttgttttcttattaggcctatcctgaagccaaaggaaatgagatcggaattcctcggggaattccaattccacattttcaagaaataaggaggcaaaaatgttcatatatgaattggaattatttgttttcttattaagcctatcctgaagccaaaagaaatgagatcgga

SEQ ID NO: 254100 - DNA, 411 bp, Glycine max
  unsure (1)..(411): unsure at all n locations
gccgatttccttgagaatgacattcgtgtgaagccagatcttgatgcacttggctctcttggcgatgaagggtggtattgtcttagagcaatactctgggctgccaactatgaactccctaaaactgtaatagcctcacgcaatcctgagcttaataaagctggggtgatattgtcttgtggggcttctttacactgggaagatgggaaagtagcaaccttccactgctccttcttgaccaacttgacaatggatataactgctgttgggacaaaaggaacactacatgttcatgacttcattatcccttatgaagagaaggaagcatcgttntatgcagctacagaaacaggctttgatgaccttgtgtcaaagtggatcccacagccaagcaagcatataataaaaact

SEQ ID NO: 254101 - DNA, 408 bp, Glycine max
gcagaaggaggagaagcagaaagaggagacgaagcaatggcgccgaagaagccccgaaccacgtcgaggaaccctgatttggtcaggggaattggcaaatattcgaggtcgcagatgtaccacaagaggggcatctgggccatcaaggccaaaaacggcggtgttttgcccctccacgatcccaagcccaaacccgaggccccggcccagaagccgcccaagttctacccggccgatgacgtgaagaagcccctcgtcaacaagcacaagcccaagcccgcgaaactcagggctagcattactccagggactgttctgatcctgcttgctgggaggttcaagggaaagagggttgttttcttgaagcagcttccatctggattgcttcttgtaacaggtccctttaag

SEQ ID NO: 254102 - DNA, 368 bp, Glycine max
gtggtttcagtgagtgatcggagttcacttgatccttcataaggcgtcatcatcatcatcatcatcaccgctgattgaagaagatgccgatcagaaacatcgccatcggaaggcctgaagaggctactcaccccgacacgttgaaggcggggttggctgagttcatctgcaccttgatcttcgagttcgccggttcaggttccggcatcgcctacaacaagctcaccgacaacggcgccggcactcccgccggcctcatctgcgcttccatcgaccatgctttcgacctcttcgtcgccgtctccgtcggcgccaacatcttcggcggccacgtcaaccccggcgtcaacttcggcgccttcgtgggc

SEQ ID NO: 254103 - DNA, 383 bp, Glycine max
cgaaggacaatgagtgttcggtccaaaaactggaactgtgtattctatgcagattggtaccatcccattcaagctggcagcatcgacggcaccgatgttgctcctcacgataacgccgtttatcgcgctcaactctgttcctacatcggcctctatgacccatttggtgatcccaaggccactggagacccttattgcactctctttgtcgctcgtctatgtcgcctcaccaccgaagatgatctccgcaaggtcatgactaagtatggtcgagtgaagaacttacgcttggatagggacattgtgacgggagcttctcgcggtcatgcttttgttgaatacgagactgaaagggagatgcgacgagcatatatggatgctca

SEQ ID NO: 254104 - DNA, 324 bp, Glycine max
atcgtgagatgtacggtagcagacattccgctagttgccaggatgagaacacttgtttctgcagagaccatgaacatccccgacggcgtgagcgtcaaggttaatgccaaggtcatcgaaattgaggaccctcgaggaaaattggtgcgagacttgaagcacttgaatctcgatattcagctcatcactgacgaaaacggttaacggaagctgaaggtggaggcctggctcggttctgggaaaacattcgccggcattcgcaccgcactgtaccacgtggagaatctgatcaccggcgttaccaatggctaccgctacaaaatg

SEQ ID NO: 254105 - DNA, 410 bp, Glycine max
cacataagtgctgaaaagggtggagagtttttcatagacactgagaaacatatgcgaactgtagctactgcagcaagtccaatacctagtccacaaagtagtggagactttggtgcgctgagtccattggttggaggtttcgtcatgagttgtagagttcaaggtgaagggaagcgaagtaaaccatcagtacaactggcaatgcgacacgtgacatgcgtggaggatgctgccatcttcatggcacttgcagcagctgttgacctcagtatcgtggcatgtaaacctttccggaggaaggtcaggagaggtttttggcattcgatgtgatcaacaaggcaaatgtatttataagcactgtcggaactgtcaatgctctgcctttgcttttcattgctgcaatgcttaaa

SEQ ID NO: 254106 - DNA, 286 bp, Glycine max
aaacaaacaaaacaatggcgttcgcttctttcctcggcagagtcctcttcgcttctgtcttcatactctctgcttaccaacaatttaatgaatatggagttgatgggggacctgctacaaaagcactcagacctaagtttgatgcctttacacatcgggtgcattctcaagtgggctttcaaattccagagattaatctgaaatttttaattgctggggctattgctctgaagggtcttggaggggttcttttcatatttggcagctcttttggagctttgcttct

SEQ ID NO: 254107 - DNA, 390 bp, Glycine max
gctagaagcaataagatgaaaatgaaagtgcttgatttgtttgctgctacagttgtggcagcatatgaatgccatggctcagactaccagaagttccctctccaaatgaaaactgggtttggtgggcaatacagcaatgaggtggcatgtgccagttggaggcttggcgtggaagcaaacaacgtagtcaagtggcaaactgttcctgcagcttgcggagagtacatagctgactacgttctaggagaccaatatagatcagatttcaaaacagttaaccaacaagcttatttctatgctaaatccctcaaactcaccaacaaagatgtctttgtcttggacgttgacgacactactctgtctaatcttcagtattttgctaaccatgga

SEQ ID NO: 254108 - DNA, 387 bp, Glycine max
cccaattcctaattgtttaaacctaattctcatttcttgatcggtcgattcttctcctcctaaagatgcagatcttcgtgaaaactttgaccggtaagaccatcacccttgacggggagtcctccgacaccatcgatgacgtgaaagctaagattcaagacgaggaacggatcccacctgaccagcagagacttatctttgggggttaacagcttggggatggtcgaacccttgtcgactacaacataccaaaggaatccactcttcaactcgtgcttcgactcaggggtggcatgcatatctttgtcaagactttgactggcaagaccatcaccctcgaagtcgaatcctcggacaccattgataatgtcaaggccaagatccagg

SEQ ID NO: 254109 - DNA, 350 bp, Glycine max
aagatgagaaaaagcaaccacttgatcggtctcttaaacttgctaacattcctgctgtcgattccgatcctaggaggcgggatatggctgagcagcagggcgaacaacaccgactgcctcaagttcctgcagtggccgctcatcatcatcggcgtcagcatcatggtcgtgtccctggcggggttcgccggcgcgtgttaccgcaacaccttcctcatgcggctctacctcgtcgtcatgttcctggtcattgccgttctgatcgggttcatcatattcgcctacgttgtcaccgacaaggggtccggtcggagggtgatgaaccgcgcttacttggagtattatcttga

SEQ ID NO: 254110 - DNA, 256 bp, Glycine max
gttcttgtgattcatggaacggctgacgatgtagtggattgctcccatggtaagcaactttgggaaaattgtaaacaaaagtacgagcccttatggattaaaggcggaaatcactgtgatttggagctttaccctcaatttataaagcacctcatgaaattcatgacggtcattgtgaagtcaccacatcaaaaaactggatctgaccgtttccctgatcaacttgacaaacctaggaacagcatagattttggag

SEQ ID NO: 254111 - DNA, 396 bp, Glycine max
aaacttacaaaacaatggcgttcgcttgtttcctcggcagaggcctcttcgctgctgtcttcatactctctgcttaccaacaatttaatgaatatggagttgatgggggacctgctacaaaagcactcagacctaagtttgatgcctttacacatcaggtgcattctcaagtgggctatcaaattacagagattaatctgaaatgatcaattgctggggctattgctctgaacggtcttgaaggggttcttttcatatatggcagctctcatggagctttgcttctgctactgcaccagctgattgctactccaatgcattatgattgctacaatcatgatagtgaggacagagaatttactcaactgttcatcaaatttacacagaatatggctc

SEQ ID NO: 254112 - DNA, 394 bp, Glycine max
cgtccatcatttttctacaacgacagaacaaggaaaagccgtgcctttaccaatgccttctcgtttttgtgttagtctttaactcatctgtcatgtcaattccattgtttttgaaaccttttcctcccccaccttgaaacaaagtatattttgtctcatgtagttttaagacaacttgattaggctgagtctgttgcgaaaattttccttgtatgatgacgatgatgtttaccatctcttccgcgtggtcaattttctaaatatattcctttccggatggttcaactttcttaatatttctttaccattttgtttttattggattgtctggttttaaaaatgtttgcaattggactaattcaattataactaaaaattaataattcaaggaatt

SEQ ID NO: 254113 - DNA, 407 bp, Glycine max
  unsure (1)..(407): unsure at all n locations
ctatactctatttttcgcgtcacataaccaaaaaaaataaactgggggagaaacatgttgtntgatgttggggactatgcttnctattgntctctgcatttccacttgcgttctctgagagatgccacccacaagacaagaaagcgttgctccaactccagaaggacctcggcaacccttatcacatcatatcctggaacgcanaggaggattgctgcgagtggttctgctgcgttaagtgtgacgagaaaacaaaccgcgtcattagcgttgccttatcatccccttttccagacaccaatctctcggcccaaatacctncctctgtgggtgacctnccttacctcgagtccctcgtcttccacaaattccccaaactcgtgggcccaatccagcccgcaatcgcc

SEQ ID NO: 254114 - DNA, 392 bp, Glycine max
tgcagcacatcctgtacctgctcaagaaaagatgagtgctctggttgaagctttgttcgagggaactgagaaaggttttgctaaagaagctgataaaaagaagaactacttttctgttgctgttgcggatgagggatcccagccgttgttgcttcatgctattgaagagttttcttgcaagtctacttcaaatgctttgaaggaggttgccctggttctaaaggcactctacgatgctgatgtgttagaggaagaacacatagtgcagtggtatcaaaagggactgaagggtgataacaagaactctaggatttggaagaatgctcaacctttcattgattggcttcagaatgcagaatcagataccgaggaagaataaattgcctacattc

SEQ ID NO: 254115 - DNA, 406 bp, Glycine max
gaagccattgctagggtacggaatgagaaagctcggagatacttgtgttgcatgcgtaagaagaagccagttcctttctcccaaaagtttcctaatgtagacccccttgctcttcgtgtgttagaaagaatgctggcatttgaacctaaggatcgacctactgctgaagaggctctagcatatccatattttaaaggcttggccaaggttgagagagaaccttctgctcagccagttaccaagatggaatttgaattcgagagacgtaggataacaaaggaagatgtgcgagagcttatataccgagagattctggagtaccatccaaagatgttaaaagaacatctagagggagaagagccaacaggattcatgtatccaagtgctgtggaccacttcaagaaac

SEQ ID NO: 254116 - DNA, 411 bp, Glycine max
gttttgaacctgaattgcctgcaaggaaattggaagcaattgagaggatggggtttgggctgctgaacaaggttgctatggtttttcctcatgtgttttggggggaagatcgagacacatttggatgtctcaatgaacatagtcatcaacgtggggaatttttcctattttactgttaccatacagtttctggaggtccagcacttattgcgctggtggctggtgaagctgcacaagcctttgaatccacagatgcttccattttgctgcatcgggttttgaccgtgttaaaaggaatatttcatcccaaaggcatcattgtgcctgatccaatacagtcaatttgtacaagatggggcagtgatcccctttcttatggttcctactctcatgttagcgttaattcatctg

SEQ ID NO: 254117 - DNA, 417 bp, Glycine max
  unsure (1)..(417): unsure at all n locations
aaacaactgtctaataatgcttatgaagcttccaaaagaaaagggagtgggaggaccaagatttgttcaatccaaacgccattacacagttcacggctgcaacgaatgaagatatatctctctcttctcacctctaattgaccttcaactaccaaaagttcaaaaccttgctagtcatatattgctaagattaaaactaaaaaatattaaacggcttggttgcgcggaactgagatatcaataacaaaaggccttcataaaagtctatttttcatgaacaagagggcaatactcagggtaccacatattgcctcggacatactccacggtttcttcttttgacatgtttgctagctctntgaaccctacatcaccatgtccttcagcctgcttttctgcaaccgctgcatgtacaac

SEQ ID NO: 254118 - DNA, 351 bp, Glycine max
  unsure (1)..(351): unsure at all n locations
ggccgacttcggccgcctcgagatcgagctggccgaggttgagatgccnggcctcatggcctgccggaccgagttcggcccatctcagcccttcaagggggcccgcatcaccggcttcccttcacatgaccatccagaccgctgtcctcatcgagaccctcaccgctctcggcgccgaggttcgctggtgctcctgcaacatcttctccactcaggaccacgccgncgccgccatcgcccgtgacagcgccgccgtcttcgcctggaagggtgagaccctccaggagtactggtggtgcaccgagcgcgccctcgactggggccccggcggcggccccgacctcatcgtcg

SEQ ID NO: 254119 - DNA, 329 bp, Glycine max
ggccgacttcgtccgactcgagatcgaactggccgacgttgagatggcgatcctcatggcgtgccggaccgagttcggcccatctcagcccttcgaagggggcccagcatcaccggctcccttcacatgaccatgcagaccgctgtcctcatcgagaccctcaccgctctcggcgccgaggttcgctggtgctcctgcaacatcttctccactcaggaccacgccgccgccgccatcgcccgtgacagcgccgccgtcttcgcctggaagggtgagaccctccaggagtactggtggtgcaccgagcgcgccctcgactggggcccccg

SEQ ID NO: 254120 - DNA, 436 bp, Glycine max
aaaatgacggaactttaaggccacttgccatagagttgagtttgccacatcctcagggagatcaatctggtgcttttagtcaagtttttctgcctgcagatgaaggtgttgaaagttctatttggctgctagcaaaggcttatgtagttgtgaatgactcgtgctatcatcaacttgtcagccattggttaaacactcatgcagttgttgagccattcatcatagcaacaaacaggcatctcagtgttgttcaccctatttataaactccttcaccctcactatcgtgacaccatgaacataaatggccttgctcggttatcactggtcaacgacggtggcgttatagaacaaacatttttgtggggaaggtattctgtggaaatgtctgctgtagtttacaaggattgggtttttacagatcaagcattgcctgc

SEQ ID NO: 254121 - DNA, 405 bp, Glycine max
ggcaaatggattaagcaataaaatagtagccattaattttatgaaatatgcaaaaagatgttagttttgcaggtttgttgcctttgaaatgttaattaaatacactgagaagtttaatttcagaatatataaatagttttccaaaaaaaaaaaaaaaaaaaaaaaaaaaaaaaaaaaaaaaaaaaaaaaaaaaaaaaaaaaaaaaaaaaaaaaaaaaaaaaaaaaaaaaaaaaaaaaaaaaaaaaaaaaaaaaggggcggcccccaattagggactttgtaaacccggaattaaattcggaaccggtccttgaagggttacaatttttccttatagggagtcgttttaaactttggcgaaataatggcaatagctgttccctggggaaaattgttttccgttcaa

SEQ ID NO: 254122 - DNA, 398 bp, Glycine max
  unsure (1)..(398): unsure at all n locations
gagaaaagttagggttcacaacttttccttttccttttgcttgcgaatctgaatcaaataatcaatcatccattcattattcatcatgtcgtcggcgaagaaaatcacgctgaagagttcggacggcgaggctttcgaggtggaggaggcggtggcgctggagtcgcagacgataaagcacatgatcgaggacgactgcgccgacagcggcatccctctgccgaacgtgacgagcaagatcctggcgaaggttatcgagtactgcaagaagcacgtcgaggccgcgaatcccgaagacaaaccctncgaggacgatctcaaggcctgggacgctgaattcgtcaaggtcgaccatgccacgctcttcgatctcatcctggctgctaactacttgaaca

SEQ ID NO: 254123 - DNA, 393 bp, Glycine max
cgggtattgcttatcatatgaacaaggaaactagtgctcatgcacccagtaccatgatgattaaggtggtcgctcctcctgagagaaagcacagtctctctattggtggttatatcttggaatcacttatcaccttccaacagatgttgatctacacgggtgaatatgatgaatatgtgccacatatccgttatcacaagtgcttctaaagttgcataaacgtcgagctggatggtgaacaagctcttaatgcacccaatcctagaccatattatactctagtacgtctgacttatttactgtttgaacattcaccatcctaatatatctatctagctgacactatgataccataccgcgaatagtttataaccattctacggtagtgaacct

SEQ ID NO: 254124 - DNA, 349 bp, Glycine max
aacaaccaaagcaagcgccatttacggctgttcatgaacgcgggcgccggcggaggaacacggtggagatccgttccgtttactcatccggcgacgtttgaaacgatggcgatggagaaggatctcaagaacaagatcaaatcatatctcgaatcgtttctcaaggcgaagcagtattaccggaaactcggccgcgcgtggaagaggagctatctcttgtatggtgcctcctgcaccggaaaatcgagcttcgtcgcctcgatggcgaacttcctctgctacgacgtgtacgacgtggatctttgcaagattcgcggcgttacggatctgtagtttctgatgactgaaa

SEQ ID NO: 254125 - DNA, 308 bp, Glycine max
  unsure (1)..(308): unsure at all n locations
attctcttcacttttaagttaaatagtttttcattgtttcatggaatctacaatggctgcttcaacaatggctctctcttcatcatcattggctggccaagctatcaagcttgccccctccacccctcagcttggtgttggaagggttagcatgaagaaaacagcctccaagactggttcttctggaagcccatggtacggcccagaccgtgtcaagtacttgggcccattctctggtgagcccncatcctacctcactggtgaattcccaggtgactatggttgngacactgctgggctttctgctg

SEQ ID NO: 254126 - DNA, 393 bp, Glycine max
  unsure (1)..(393): unsure at all n locations
gtgagttaaaagaaccgataatagttgttccttcactctncgctcgctctgccactgagccaagaagatggcctcacaggtttgcaaatctgcttccagagccgcgaggtcccttctatcctctcggtttcactctcaaggacgtgcgcttggggctgctgcggctgtttcattgagcagcaaagtgcctctttttttacggaaagaacggttcttgaaatggatccgcttcttcatcatcatcatcatcatggatttcaggagctcttgctcttcctgccgcagcttacatgttccaagatcaggaggtgcatgcagctgagcttgagcgcactttcattgccattaagcctgatggagtgcagagaggcctgatttctgagattatatctc

SEQ ID NO: 254127 - DNA, 394 bp, Glycine max
  unsure (1)..(394): unsure at all n locations
gaagaggagaaaaagactatggagggtttgaagaagagaaagctggagctggacgaagcaggcaacggtgaattggcttccaaggaagagcttcgcttcctcattgaacctctcgctaaaccccagctcgtcgatcttcttgctaaactagggtcccaatatccttcaattgcagaagaaataaaaagtattgcaagtgcagatcctgcccatcgaaagctttttgttcgtggcttggcctggaataccacttcagaaacattgcgtgctgcatttcaagagcacggagaaattgaggaaggagctgtgatctttgataaagtgacaggaaaatcccgtggctatggatttataactttcanaaatatggaatcaactcagcaagcattgagag

SEQ ID NO: 254128 - DNA, 326 bp, Glycine max
gcccggtgcacatagaattgccttatacaatcaagaatacactgacactaaccagtctaggaatgcagttaagtgaccgatgtcggacatgtacgactatgagaacgatatatggctctgaaactcatttccacggtcaatgctagaacttcactgcattatgaccgtctattaatactttgaaagaagtgcatgcgttcttgactgataatccaactgacattgagaccatcataactgaagactatgcgcacactcactaggagttgactaatgtgttcacatgtgcatatactggatcagtattagttccctgtgaccaagac

SEQ ID NO: 254129 - DNA, 439 bp, Glycine max
cttcacttgttgctcgtcttagtttctgtgttgtgtcagttgtattgctatatcctaattaaacttcaccctcaaaatgagtgatcccacactagcacaaccacacctagtcgaagtccacacaacactcgaaaccgttgttaccacacacaaccataaccatagaccctcaataaatgcctcaggtgaaaagaagaaaattgtgggggtgttctacaaagggaatgagtatgctaaattgaaccccaatttcgtggggtgtgttgaaggagcattgggtatacgtgagtggctggaatcacagggtcatcagtacattgtcactgatgacaaagaaggaccagattctgaacttgagaaacacattccagatgcccatgtcatcatatctactccatttcaccccgcctatgtcaccgcggaaagaataaagaaagcg

SEQ ID NO: 254130 - DNA, 430 bp, Glycine max
gagacatgctagcatgcctgcacgtctactctagagtgatcccctcggtgaattccaattccacattttcaagaaataaggaggcaaaaatgttggtatatgaattggaattatttgttttcttattaggcctatcctgaagccaaaggaaatgagatcggaattcctcggggaattccaattccacattttcaagaaataaggaggcaaaaatgttcatatatgaattggaattatttgttttcttattaggcctatcctgaagccaaaggaaatgagatcggaattcctcggggaattccaattccacattttcaagaaataacgaggcaaaaatgttcatatatgaattggaattatttgatttcttattaggcctatcctgaagccaaaggaaatgagatcggaattcctcggaggtaccgagctc

SEQ ID NO: 254131 - DNA, 350 bp, Glycine max
caaaacaccaccaccaccacctcgctctcttcttccctgcttgacaatttttattttaatgatactattttgttattgttaagacggcatcatcagggaaatggatcgggtgaagggtccatggagcccagaagaggacgaggctttgcggaggctggttcaagcccacgggcctcgaaactggtcggtgataagcaagtccgttccgggacgatccgggaaatcgtgccgcttacggtggtgcaaccagctctcgccgcatgtggcccatcgtcccttctcgccggacgaggacgaagccatcgtcagggctcacgccaggttcggcaacaagtgggccaccatagctc

SEQ ID NO: 254132 - DNA, 408 bp, Glycine max
  unsure (1)..(408): unsure at all n locations
cttcttctncaccatctcttcgcccataacctaattagtgctcaagcacaaaacatcaatttctctatgatcatgatgatgatgatgggttcaaacacaaaaccccttgtgcacctttctcttctaattttggttctcttttcttcttcaaccgaatccctcagattcgaactccaatctgggcacaccaaatgcatctccgaggacatcaagagcaattccatgaccgtgggcaagtaccaaattgttaactccaacgagggtcagcctcttcccgattcccacagagtcaccgtcagggtgacttcgtcttatgggaacaactatcactacggggatcgcgttcagacggggcattttgcgtttgcggcagtggaggctggagattacatgacttgcttttgggct

SEQ ID NO: 254133 - DNA, 405 bp, Glycine max
  unsure (1)..(405): unsure at all n locations
ggctcgaggaagcagaagccatggaaaccaacacactcccaaaccagcagacaccaaaaaccaaaaggcaaatcttcatactctcaggtcaaagcaacatggcccgtcgtggcggggttatcagggacgctaacaaccgtaagcggtgggacggcgtggtttcgccggagagccgctccgatccattcatccttcgccttccgncacccttcaatgggaacccgggaacgagccccttcacgtcgacattgactccagaaaggcttgcggcgtgggccccggcatggtcttcgcgaacgcgctgctgcggcggagcgtggtggtgggcgagctgggtctggtccnctgcgccgtgagcggcaccgncatgaangagtgggcgcgtgtggaggaactgtacgagaa

SEQ ID NO: 254134 - DNA, 535 bp, Glycine max
ggaggtataagcatctgttataggagggagggataagtgtatgagtagacaagcttgcatgcctgcaggtcgactctagaggatcccctcggggaattccaattccacattttcaagaaataaggaggcaaaaatgttcatatatgaattggaattatttgttttcttattaggcctatcctgaagccaaaggaaatgagatcggaattcctcgggggtaccgagctcgaattccctatagtgagtcgtattaaattcgtaatcatgtcatagctgtttcctgtgtgaaattgttatccgctcacaattccacacaacatacgagccggaagcataaagtgtaaagcctggggtgcctaatgagtgagctaactcacattaattgcgttgcgctcactgcccgctttccagtcgggaaacctgtcgtgccagctgcattaatgaaatcgccaacgccccggggaagagccggtttgcgtattgggcgcttcttcgctttcctcgctcattgactcgcttcggctcggtcgttcgg

SEQ ID NO: 254135 - DNA, 426 bp, Glycine max
gttggaaagagccatttaattacttttttcagtactgagtggacattggcaccaaacaagcatggatacaatcaagtccttcaagggctacggcaaaatagacgagttggagcaacaagcctatcagaagaagacacgtaagcgcctgataatcatcgcagtctcttccatcgttctatttgcggtgatcatcgccgcggtcgcaagggttgtgatacacaagcgcaacacctcatcatcgccctcctctgactcgcccccgcaaactgagttaaccccggccgcgtcactcaaagcggtttgccacgtgactcagtaccctaacctcgtgcttctccgcaatctactcgttaccggaatccaacaccactgattccgagctcctcttcaagctctctctccgcgtcgccattgacgagctctcga

SEQ ID NO: 254136 - DNA, 430 bp, Glycine max
agcaaattcactgaaataatttcaccaatcaaagctgtggcactctctagggagagggacaaagatgctgccaacatcaagaagttgcttgaggaaggggatttggtgatttgccctgaaggcaccacttgtagagagcaattcctcttgaggttcagtgccctctttgctgagctaaccgatagaattgtcccggtcgccatcaacaccaagcaaagcgtgttctacgggacatccgttcgcggccacaagctgttggatccttattttgtattcatgaatcccatgccaacttatgagatcactttcttgaaccagttgcctgcagaactcacctgcaagggagggaaatctgcgatcgaggtcgcaaattatattcagagggttcttgcagggactctcgggtttgagtgcaccaatttgactagga

SEQ ID NO: 254137 - DNA, 422 bp, Glycine max
  unsure (1)..(422): unsure at all n locations
tagagatcttaaaactagtaatattttactggatgcaaattgggatcccaaaatatcagactttgggttggcgcgatcatttttgggagatcaagttgaggcaaacacaaatagggtggctggaacatatggttacatgcctcctgagtatgctgcacgggggcatttctcagttaaatcggatgtctttagttacggcgtgatagtactagagattgtaagtgggaagaaaaacagggatttttcggacccagaacactacaataatctacttggacatgcgtggaggttatggactgaaaaaaaggccttgggaactattgaataaactgtcaggagaatgctcgccctctgaagtcgtacgatgcatacaagtaggcctattatgtgtgcaacaaagaccacangataggccacacatg

SEQ ID NO: 254138 - DNA, 363 bp, Glycine max
aattgtttaaacctaattctcatttcttcatcgttcgattctgctcctcctaaagatgcagatcttcgtgaaaactttgaccggtaagaccatcacccttgaggtggagtcctccgacaccatcgataacgtgaaagctaagattcaagacaaggaagggatcccacctgaccagcagagacttatctttgcgggtaaacagcttgaggatggtcgaacccttgccgactacaacatccaaaaggaatccactctccacctcgtgcttcgcctcaggggtggcatgcaaatctttgtcaagactttgactggcaagaccatcaccctcgaggtcgaatcctcggacaccattgataatgtcaa

SEQ ID NO: 254139 - DNA, 356 bp, Glycine max
gagaatggcaactatgactggtgtgagcctttcatgccccagggtggtcttcaacgcatgagcctcaccgcataacgcgcatgctgtaaagttctcacttccacccagccaagcagtgcgaccgggtagtatcaagttgggtcgcgtgatgaggatccgacccgttcgcgctgcgcctgagcgcatatcggagaaggtggaggagagcataaagaacgcgcaggaggcgtgcgccgacgatccgacgagcggcgagtgcgtgacggcgtgggacgaggtggaggagctgagcgcggcggctagccacgccagggacacgcaaatggtaatggacttcgacccgctcgagaattact

SEQ ID NO: 254140 - DNA, 337 bp, Glycine max
attgcaacatagttggtgcaatgcttttggttgatacttatgataccaatcctgaaaatgcagttcgtagtatttttgttgcgcctttcagaggcggaaggcccattcgggtggttacatttccgaataccattgtgcagattgaaccagacatgaattcaaggtttcagcttttgagtaccactaccaatggtgattttgttcaagggaaagatctcgcaatggttaaagttaatgtagcatgtgctgctgttggcttgacatcaagttacactccaactccattggtggaatctggtttgcaaaaagacagagggttaattgtggagtattttgg

SEQ ID NO: 254141 - DNA, 406 bp, Glycine max
ggggttggcagtctgcctgttgcacaactactctgtcaatggatacacttcctgcagtggccaacaagagacatgctcgggtaggcggccgaaacatgagtgggagtgctttcaacaagctgcttaatccacttgcagcagaaagtcatgatctgtcaaaccctgttgacctcaaggaccattgggcaaaacatggaacgaaccgatgcatcacaataaagtagagggcgagacattgtttctggggcagcattacacgaatagaaactgcttttagtgatcaattatggattctcaagtcgaatgagaaaaataatgttaagtgtaaaggccatccgggagagctaatgatttagagtatgcccttgcttatatctaggatgcataagcctggtggaggctggct

SEQ ID NO: 254142 - DNA, 369 bp, Glycine max
  unsure (1)..(369): unsure at all n locations
gagagagcaactgcacgcactgtaactcctaacttcccagatcggcttcttcctcttttctcttcggtgattgttggaactcagagagcttctttgatggaacagttccagaaggttgagaagataggccaatggacctaccgcgtcctttaccagggtcgcgaccgggttaccaacaagaccattccgtttaagaagattccccttgaaccagaaggataagggggtcccaagaacggccattcgcaagattcctctctggaaggaattgcaccacaggaacattgttaggttgcaggatgtantgcacgatgagaagagtttgtatctggtttttgagtaccttgacttagatctaaagaagcacat

SEQ ID NO: 254143 - DNA, 529 bp, Glycine max
  unsure (1)..(529): unsure at all n locations
ggaggggagagtatcttaatggagggaggtgagaagctttacaagagctatgacgtcgcatgcacgcgtacgtaagctcggaattcggctcgaggcccagtgctctgaatgtcaaagtgaagaaattcaaccaagcgcgggtaaacggcgggagtaactatgactctcttaaggtagccaaatgcctcgtcatctaattagtgacgcgcatgaatggattaacgagattcccactgtccctgtctactatccagcgaaaccacagccaagggaacgggcttggcggaatcagcggggaaagaagaccctgttgagcttgactctagtccgactttgtgaaatgacttgagaggtgtaggataagtgggagctggaaacagcgaaagtgaaataccactacttttaacgttattttacttattccgtgaatcggaagcggggcactgcccctctttttggacccaaggtcggcttcggccggtcgatccgggcggaagacattgtcangtggggaagttggctgggcggc

SEQ ID NO: 254144 - DNA, 430 bp, Glycine max
attaactaagcatatatagcgtgtaagacagtgagaaaaaaagtgttgtgtagagagaaatggctaggtggtgcatcttggtggttcttgcccttgtcgtggttgcaagtgccagaaacatgcccaatgacgcaggtttggaggaccagaagaacttcctcgggtatgggttctctggagttggcaacaatgggcttccctttggaggagtgggttctgggtttgatggtaatatgggtgggccttctgggctcggtggatttggaggattcggtgggcctagcgggctcggaggtcttggtaacggtgaagggcccaaccttcctctcccttgagagttgagaccacacaccttcgtgtttcttattttcggtcgctattatcatagcctatatagtgtttcttttagtgtttagttcaagaaaataat

SEQ ID NO: 254145 - DNA, 435 bp, Glycine max
  unsure (1)..(435): unsure at all n locations
ctctctttctctctctagaattctcagatttgcggggcgagatgatgcagcagccaggacccggcatggcacctcccaccatgggccagcagccgccgcaacagtaccagcagcctccgccgcagcagcagcaaccctacgtcatgatgccgccgcaggcccaggccccgcaggccatgtgggccccctccgcccagcctccgcctcagcagcagcccgccagcgccgacgaggtccgaaccctctggatcggggatctgcagtactggatggacgagaactatctctatacctgctttgctcacaccggcgaggttacatcggttaaagtaattcgaaacaagcaaactagtcaatctgaaggttatgggtttattgagtttaatagtcgtgctggagctgagagaattcttcanacatataatggggcaataa

SEQ ID NO: 254146 - DNA, 420 bp, Glycine max
gtctcaacttctgctcttccaactcctacaacgcttggctgtgcactcatgggcaaggtcaagatcggaatcaacggatttggaagaattggccgtttggttgccagagtcgctctgcaaagagacgatgttgaactcgttgccgttaacgaccctttcattaccaccgattacatgacatacatgtttaaatacgacagtgttcacggacactggaagcatcacgatgtcaccgttaaggacgagaagacccttctcttcggtgacaaggcagtcactgtttttggacacagaaaccctgaagagatcccatgggggtcaactggagctgacatcattgttgagtccaccggagttttcaccgataaggacaaggctgccgcacattcgaagggtggtgccaagaaggttattatttct

SEQ ID NO: 254147 - DNA, 413 bp, Glycine max
tgccatttcaatccccagtttcttcttcaacgtcctcttacgagcagatcccaattctgcttcccagtttcaaaccctaattccctcattcccatggcctcagaagagcccactgtcgcggtggaacccgctcccgaacctgccaccgccgagcctcccccggaggagaaggaggagcccaaacctgaagccaaggctaagaaaaccaaggaacccaaacctaaaaaggtttccagaccacgcaaccctgccactcatccttcctacgaggagatgattaaagacgcaattacctcgctgaaggagaaaaccggttcgagccaacacgcgattgcgaagttcatcgaggagaagcacaagcagcttccaccgaacttcatgaagcttcttctctaccatttgaagaaacttgt

SEQ ID NO: 254148 - DNA, 387 bp, Glycine max
  unsure (1)..(387): unsure at all n locations
ctcgagccgaatcggctcgagccatggtacggcccagaccgcgtcaagtacttgggcccattctctggcgagcccccgtcctacctcactggcgagttcccaggtgactacggctgggacactgctgggctttcggccgacccagaaaccttcgccagaaaccgtgagctcgaagtgatccactccaggtgggccatgctcggggccttgggctgcgtcttccccgaactgttgtcccgcaacggggtcaagtttggagaagctgtgtggttcaaggccgggtcccagatcttcagcgagggtgggctggactacttgggcaacccaagccttgtccacgcccagagcatnctcgccatctgggccacccaagttatcctaatgggt

SEQ ID NO: 254149 - DNA, 409 bp, Glycine max
  unsure (1)..(409): unsure at all n locations
tgaatttgtgaaagagaccaaagatagaggcatgttggcaagttggtgtccccaagaggaggttttggctcacccagcggttgggggattcttgacacattgtggttggaattcaacgttggagagtgtgtgtgaaggggttccaatgttgtgttggcctttctttgcggagcaacaaaccaattgtcgattttgttgcaaggagtgggggattgggttggagatagaggatgttaagagggagaaagttgaagcacttgtgagggagttgatggatggggaaaagggtaaggagatgaacgcatgagctttggagtggaagaaattggcacacgaggctgcttcgagtccacatgggtnctccgttgtgaacatggacaacgtggttcgtcaagttcttaataacaaa

SEQ ID NO: 254150 - DNA, 394 bp, Glycine max
gaagaagtcagtaaccatcgtcgtgagcgaagatccataatgatgcagttaccaattgcaataacacactcattgtggttatcgaaatttgatcgcagcgtcgagaagaatgggaagtttgggagcgattctgaaacattcagatgacttttaccctctgctgaagctgaaaatggcggcgaagaacgccgagaagcagaacccggcggagccggacttggcggtctgctacacaatgctccacagggtttctcgaagtttcgccctcgtcattcagcaactcggcaccgagcttcgcaacgccgtttgcataatttatttggttctgcgagctctcgacaccgttgaggatgatactagcatagaaacagatgtcaaggtgccaatactgata

SEQ ID NO: 254151 - DNA, 434 bp, Glycine max
cttttccttcactttcccgagaaaaaaaaaacactctttcactttcttgactacggtctcacttcgacatggctcgtactaagcaaactgctcgcaagtccaccggcggcaaggcgccacgtaagcagttggcgaccaaggccgcccggaagtccgctcccgcgaccggaggagtgaagaagccccaccgcttcaggccgggaaccgtggcgctgagggaaatcagaaagtatcagaagagcaccgagcttctcatcaggaagcttccgtttcagagactcgtgagggaaatcgcgcaggacttcaagaccgatttgcgttttcagagtaacgccgtttctgcgcttcaagaagctgctgaggcctacctcgttgggttgttcgaggacactaaaccttgcgcgattcatgcatagagggttaccattatgcct

SEQ ID NO: 254152 - DNA, 437 bp, Glycine max
  unsure (1)..(437): unsure at all n locations
gggaaaccaactaaggaataccctttcaaaatggcttgttctgtgtcatccatggtttctaccaccctcctcctaattaccatctgcacactgtcctcacttctgtcagttgcatctgcagcaacagaggagggacgaacaaggccattcaaaagggtctatgcctttggagactctttcacagacactggcaacacccaaaatgcagaaggtccaagtggctttggccatgtttcaaactctccctatggaaccactttctttaaccactccaccaataggtactcagatggtaggcttgtgattgattttgtggctgaagcactttcactgccttacttgcccccctaccgtcatagcaaaggcaatgacacttttggtgttaactttgctgttgctggttccacagccataaaccatttgntctttgtcaagca

SEQ ID NO: 254153 - DNA, 431 bp, Glycine max
tctagagagagaaactcgcagtcgcagacatgtcttggttcgatgccttcgccgacgacttgaacgtcaactcttcttgcactcaccaccacgacgaagacgaggacaacttctccggttacggcggctactcctccttcaccggaggattctacgccgacggcgatgtcgccgtcgaccactccggcgacgcgtcgccggagatctacggcttcactgatccgaatcccggttactctcagtctcccttcgaatcggccaccgtcgagaacggtaacgaaaacggcaacggctatggccaaggcgacggcgacggcgacggcgtttttatctacgatggtccggtgcttccgcctcctacggaaatggagcccgaggaaggttacgctcttcgcgagtggcgccgtccgaatgccattcagctagaggag

SEQ ID NO: 254154 - DNA, 429 bp, Glycine max
  unsure (1)..(429): unsure at all n locations
catcactacacgagcaagacgctgtgtatatacgttctgttcattcattcagaagcagcgtgggtgtgtgttttgcttcagagaatctttctcctaatggaacagctgaagccaagcgctcctaactcatcccctctcactccactcgccttcttggacagagcagccaccgtctacgcccacgtcccttccctagtctacaaccacaccaccttcacctggtccctcacgcgccgccgatgcctacagctcgcctactccctctcctccctcggcatccgccgcggcagcgtcgtctacgtcctcgccccgaacgtacccgccatgtacgagctccacttcgccgtccctttcggcggcgcaattctcaacaacatcaacacccggctcgacgcccgcaccgtctgcgtcatccttcgncacgcgaac

SEQ ID NO: 254155 - DNA, 398 bp, Glycine max
ctcctacaatttcctaaaatggccactctttcctcctacgacgacttcatcttcactgccttagctttcttcatatctggcctaattatattgctcaaacagaaatccaaatccaaaaagttcaacctccctgcaggaccccccgggtggcctattgttgggaacctcttacaagttgctcgttctgggaaacctttctttgagtatgtgaacgatgtgagactcaaatatggctcaatcttcaccctcaagatgggaacaaggaccatgatcatcctcaccgacgcaaaactggtccacgaggccatgatccaaaatggtgcaacctacgccaccaggccccccgagaaccccatcagaaccatcttcagcgaaaacaagttcaccgtgaatgcagc

SEQ ID NO: 254156 - DNA, 388 bp, Glycine max
  unsure (1)..(388): unsure at all n locations
gaagaagccaaaaagaacttcgccggagctctaacggcgaggcccaactccgatgagccgaaaccggcaccggtgccagctgttcccccgaagaaggtcatcatcaagagcgctgatatgatccccgacatgcagaaggaggccgttgatatcgccgtcgccgcgtttgagaagtacaatgtggagaaagacgttgcggagcagataaagaaggagttcgataagaggcatggccccacgtggcattgtatcgttggacgtaattttggctcatatgtgactcatgaaacaaaccactttggttatttctacttggatcagaaagcggttntactctntaaatctggctagccttattgtggtagcaaagaagttgagatctatggga

SEQ ID NO: 254157 - DNA, 427 bp, Glycine max
gagagagagagagagaaagagagagagagagaggttaggctatggctgatgagagcgtcgttgagtccccagtgaagaggcagagagatgatgatgaagaaaatgaggtctctgtttccatggatgtggagggtggcaaagaccctcttagtaacggtttatcatctgtgattcctgggtggttctctgaaattagttcaatgtggcctggagaggctcactccttgaaggtggaaaagattttgtttcaaggaaagtctgaataccagaatgtcatggtcttccagtcatcaacatatggcaaggttcttgttttagatggagtaattcagctaacagaaagggatgaatgtgcctaccaagaaatgatcactcatcttcctctttgctctattccaaaccccaaaaaggttttggttatcggtgg

SEQ ID NO: 254158 - DNA, 252 bp, Glycine max
gtgaaatttctgtctaatgatgaacttgcttatgcatgaacggataatacactgggattatgggatgtgaaggaaaacttgtcagttcgtactttcaaaggccatgcaaatgacaataactttgttgtccttacagttatcactgaatacattacgtgtgtcacttgaaactaatgaagtatacgtgttctacaaagtaataatgcgacctatgactcgcctctaactcctctcctcttcatatgaatgacc

SEQ ID NO: 254159 - DNA, 420 bp, Glycine max
caccaatgttgccgtaaacatgttgttcacttttgctattgctcaagttttcctagccatgctttgccacttgaagtttggccttttcttcttctttgctgcatttgtgctcatcatgaccctcttcattgccctgttgttgcctgagacaaagaacatccccattgaagaaatgcatttagtgtggaggtcacattggttttggtcaaagattgttccacaggttgataatgatcgcaagccaactactgctcagagttgaatcaaggatgcccattatactgtatgtatatgtgtatgtatatgtgtatgtatatatgtatatgtatatatatatatattgtatatatatgtgtgtatatatatatatataaggactgaaaatgaaaagaaaaaatagagcttgagtccctatgtatc

SEQ ID NO: 254160 - DNA, 441 bp, Glycine max
gtgaaagtgagaaaaaataaaaatcaaagagcataatgtcagggatcattcacaagattggggagacccttcatgtgggagggcacaagaaggaggaggagcataagggtgagcaccatgctggagaatacaaaggggagcaccatggtgaacacagtagtgagtacaaaggagagcatcatggtgaacacaaagctggagagtaccatggtgagcacaagccagagcacaaagaggggttcctagacaaagtcaaggacaagatccatggtgagggcggcgccgccgagggcgagaagaagaagaaggagaagaagaagaaggagcatggccatgagcatggccatgacagcagcagcagcagtgacagtgattaaactgctgcatcacctatatatttaaaaggtttatgggaccatagtagcgagggctgtgccttaa

SEQ ID NO: 254161 - DNA, 415 bp, Glycine max
gtctcttctctctcagaaaccctaatggcagagcgcggaggtggcgaacgtggcggcgaccgtggcggtttcggacgcggcttcggcgggcgagggcgcggaggcgacaggggccgcggccggcgtagaggtccccgccgcgaggaggaggagaagtgggtcccggtgactaagctgggacgcctggtgaaggaaggaagaatccgaagcctggagcagatctacctccactcgctgcccatcaaagagcaccagatcatcgacacgctggtgggccccaccctgaaggacgaggtgatgaagatcacgccggttcagaagcagacccgggccgggcagagaacccgtttcaaggccttcgtggtcgtcggcgacaacaacggccacgtgggtctaggcgtgaagtgcagcaagg

SEQ ID NO: 254162 - DNA, 433 bp, Glycine max
ccacatgcaagatggatcggaacgtgtgggtgagggacactgggagggcccggaagacttggcctacgacgctgcggcacgtgtcgtttataccgggtgtgaggatgggtggatcaagcgagtcacggtgaatgactcggtggttgactcggcggttgaagattgggtcaacacaggaggaaggccacttggactagttttgaagccgaatggagaactcatagttgctgatgcggaaaagggactgctgagagtgtcaagtgagaaggagattgagttgctggtagatgagtttgaggggttaaaattcaaactcacagatggtgttgatatagcagatgatggtacaatttatttcacagatgcatcacacaaataccccgtgaaggatgctgtgtttgacgtcttagaagggaagccaaatggaagattc

SEQ ID NO: 254163 - DNA, 445 bp, Glycine max
ctctgctcgtgcctctagggttatcatatctccatttccatggcctggctctcagtttccaagaatcttaagctatgggaaagtctgacccaaccgggagcgctgcataccggagagcaccatgctggacaatacaaaggggagcaccatggtgaacacagtagtgagtacaaaggagagcatcatggtgaacacaaagctggagagtaccatggtgagcacaagccagagcacaaagaggggttcctagacaaagtcaaggacaagatccatggtgagggcggcgccgccgagggcgagaagaagaagaaggagaagaagaagaaggagcatggccatgagcatggccatgacagcagcagcagcagtgacagtgattaaactgctgcatcacctatatatttaaaaggtttatgggaccatagtagcgagggctgtgccttaa

SEQ ID NO: 254164 - DNA, 404 bp, Glycine max
cagcaataaaagacattataccactgatggagaaaaccactgcattgagagctccttagcttatcattgccgaggatgtcactggtgaggctttggccacccttgtcgtgaataagctgcgtggtatccttaacgttgctgccattaaagctcctggctttggtgagcggcgaaaggccctgcttcaagacatcgctatattgactggtgctgagttccaagctagcgatctgggtctgcttgatgaaaacacctcagtggagcagcttggcttggctaggaaaattaccatctgcaaggattctaccactgtcattgctgatgctgcgacacaggatgagttgcaagccatggttgctcatgtaaaagaggagctgtctcagacagactcagtatatgatact

SEQ ID NO: 254165 - DNA, 378 bp, Glycine max
ctctgctcgtgcctctagggttatcatatctccatttccatttcctctctctcagtttccaagaatcttaagctatgggaaagtcttacccaaccgtgagcgctgattaccagaaggccgttgagaaggcgaagaagaagctcagaggcttcatcgctgagaagagatgcgctcctctaatgctccgtttggcatggcactctgctggaacttacgacgtgagctcgaagaccggtggtcccttcggaaccataaagcacccctccgaactcgctcacggcgctaacaacggtcttgacatcgctgttaggcttttggagccactcaaagcggagtttcctattttgagctacgccgatttctaccagttggctggcg

SEQ ID NO: 254166 - DNA, 416 bp, Glycine max
gctgcaaataacaagatcttcatgatgaacctttctgctccctttatatgtgagttctttaagggtgcactggacaaagttctgccatatatggattatgtttttggaaatgaaactgaagcaagaacattttctaaagctcaaggctgggagactgataatgttgaagaaatagctttaaagatttctcaattgccaaatgcatcagaaaaacatacaaggattactgttatcacccaaggtgcagatcctgtttgtgtcgctgaggatggaaaagtaaaattgtatcctgtgatactattacctatagagaaattaattgatacaaatggagcatgagatgcttttgcgggaagatttctttcgcaattggttaagcagaagcccattgaagaatgtgtgagagctgggtgtta

SEQ ID NO: 254167 - DNA, 356 bp, Glycine max
gagaagaaaagcataacaagcagagcacattgtttagtgctagcattgccaggtcaaggccatatcaatcccatgcttcaattctccaagctattggagcgtcaaggggtgagaataacacttgttactactcgtttctattccaagaatttgcacaacgtgccttcttccattgctcttgaaaccatttctgatgggtttgatgaagttgggccccaagaggctgggagccccaagcctatatagatcgcttgtgccaagttgatcaagaaacctttcatgagcttcttgagaaacttggcaaatcaggaaaccatgttgattgagttatttatgattcattcttcccttgggca

SEQ ID NO: 254168 - DNA, 147 bp, Glycine max
ggaatttgtgttttcttttgcttgttcgtttgtttaattcagtaaaggaaattaggcatgaccctcttgttgagtatgctctgcctatttgaaaatttccacacctcttttaattatcgtaatgatgtgtgaagtgtgtgttatttt

SEQ ID NO: 254169 - DNA, 408 bp, Glycine max
gtgttccatcattttgaaagaagcaaatttcgctgcggttaggattactattgggggtgggtattcaatgtggaatatactgaccccacctctggtcatacacacgttgcatccgctgagactgccaatgagaccctcacacgctatatcactcctaagagatgcgctcctctgatgacacattatacatgcaactctaatgagacttacgacgtgagctacacgaccggcggtcccttcgtaaccatacagcacaatatgctactcgatcactggtctaactactgtcttgacttaactgttatgctatcacagtcactcacatcatactatcctattttgtgctacgccaattccttccagcctaatggcattgctaccttacatttcatgtgttgaccttaattt

SEQ ID NO: 254170 - DNA, 422 bp, Glycine max
aaagaaggtgagaagaagatcaaggagcagtttcataccgagaccttggacaatgttcagaaactcactggcatcacccttgacattgtgagtggtttgtccaacatcctcgagaagttcgggttgaagtttaatcttaaacccgcgtctcgccgtcttctcggcaaggatgggttgcccacttggttctctgctgctgatcgtaagcttttgggtcgtggatggagatcacgtgtcaagcccaatgttgtggttgcccaggatggcactggtcagttcaaaaccgttgccgatgctattgcttcctacccaaaggataacaaaagtagatacattatctacgttaaggctggtgtctatgacgagtacatcaccgttcccaagagttcaaagaacattctcatgtacggtgatggccctgc

SEQ ID NO: 254171 - DNA, 377 bp, Glycine max
  unsure (1)..(377): unsure at all n locations
aaccactactactcactcactgcagatctcaattgcatcgctgtccatggctaccatcgttagcatcaaggcccgccagatcttcgacagtcgtggcaatccaactgtcgaggtggatttgacttgctccgatggtacttttgccagagctgctgttccaagtggtgcatctactgggatttatgaggcccttgaattgagagatggaggatctgactaccttggaaagggtgtatcaaaggctgttgacaatgtgaacaccgtcattggccctgctntgattggcaaggacccaactgagcagactgctattgacaacttaatggttcaacagcttgatggaactgttaacgaatggngttggtgcaagcaaaagc

SEQ ID NO: 254172 - DNA, 411 bp, Glycine max
  unsure (1)..(411): unsure at all n locations
ggaagagcaacctttggaagtgcggaaatatagagccgaattgtctgaacaagatatatttgtaatcccagcaggttatccagttgtggtcaacgctacctcaaatctgaatttctttgctattggtattaatgccgagaacaaccagaggaacttcctcgcaggttcgcaagacaatgtgataagccagatacctagtcaagtgcaagagcttgcattccctgggtctgcacaagctgttgagaagctattaaagaaccaaagagaatcctactttgtggatgctcagcctaagaagaaagaggacgggaataagggaagaaagggtcctttgtcttcaattntgagggctntntactgaataagtatgtactaaaatgtatgctgtaatagctcatagtgagcgaggaa

SEQ ID NO: 254173 - DNA, 371 bp, Glycine max
  unsure (1)..(371): unsure at all n locations
cgcacctgctgctaatcgctgtttgtctgttcacctcttcgtccgcttccaagatcggagaaaatggggggtaaaccaccaattccaagcttgacttaactggccaacatgttctgccaatggaaatacccgaccaagatgttcgcggacacaacctttgagccccaccttcaaggtgaaaggcttagcgtttaaccggtattcatggctgacgactcataactcttatgctctggcgggggcgagatcggccaccgggtctgtcattgaggcccctatgaaccaagaagacaaagttgatgaacaactcanaaacggagttagaggatgtatgttggatatgtatgattgtcaaaacgacatctggttgt

SEQ ID NO: 254174 - DNA, 186 bp, Glycine max
  unsure (1)..(186): unsure at all n locations
ggatgaaaaggggttcttctttggggactttgtgtctaaatgtggcttgactagcctcttctgcattctgtgcctttccacggaggccaatngatgttccattcggcagaaactacgttcccacttgggcttttgatcacatcaaatacttcaatggaggttctgagattcaacttcatcttgaca

SEQ ID NO: 254175 - DNA, 358 bp, Glycine max
  unsure (1)..(358): unsure at all n locations
attaaggatttccttctcactgccagaaggaaggatgcgaggtcagtgaagatcaagaggagcagagatgtggttaagttcaaggtcagatgctccaagtacctctacacactttgtgtgtttgacccagagaaagctgataaattgaagcaatctcttcctccaggtttgagtgttcaagacctgtaaaggtactgggcgagagatcaagaagaagcaattcattgattcttctgaagtttgattctctgtagttgaagcttgagatttttgtcagttggtcttttattatagattattgctaagacatggttgattntatctgttttggaaaatgaaacttgaatttatgtctaaa

SEQ ID NO: 254176 - DNA, 402 bp, Glycine max
agaaaatgaaagtccttgttttctttgttgctataggtctagcagcatggcattgccatggctcagaccatgaccatgaccatggccacacctaccaaattttccctctgagaatgaaaactggccatggtggccactacattccggaggtatcatgccaaagttggaggcttggtgtggaagcacacaacgtcattgactggaaaaccgttcctcaagattgcgagggatatattgggaactacatgcttggcgaacaatatagatcagactccaaaatagttaaccaacaagctttctatgctaaaaccctcaatatcactgccaaaaccgcatgggtgttcgacatagatgagactacactctctaatcttccttactatgctgaccatggatttgggg

SEQ ID NO: 254177 - DNA, 344 bp, Glycine max
  unsure (1)..(344): unsure at all n locations
caaccctctttttctcttaatttctcatcatatcatatctatgtaatcttacacatatattaagacatagatataatttttttcgttttatttttccttgcatgggctgttaagataagatgtctcgcacgtgctcacagtgcggcaacaacggccacaactcgcggacatgcaccgacggtggcgccgccgcttcctgcggcgggtctcccagggagaacggcatcatgctgttcggcgtaagagttatgaccgaagctaactcctccttccggaagagcgccagcatgaacaacctctcacagtacgacgcggaatccaacgccgncgacgccggctacgcc

SEQ ID NO: 254178 - DNA, 310 bp, Glycine max
gccaatggtatcttgaatgtctctgccgaggacaagaccacaaggcatgaagaacaaagatcaccatcaccaacgacaagggtagactatcgaaggatgagattgagaagatggtccaagaggcggagaagtacaaggccgaagatgacgagcacaagaagaaggtcgacgcaaagaatgctttggagaactatgcctacaacatgaggaacaccattaaggatgagaagattgcatcaaagctttctgatgacgacaagaagaaaatcgaagatgccatcgagagtgctattcagtggttggatggaaa

SEQ ID NO: 254179 - DNA, 516 bp, Glycine max
  unsure (1)..(516): unsure at all n locations
tggtnnnnnggggaggagtgcttttgtttatgaaaggggaggagtatgtgtattactcggagagacatgcttgcatgcctgcacgtcgactctagaggatcctctcggggaattccaattccacattttcaagaaataaggaggcaaaaatgtgcatatatgaattggaattatttgttttcttattaggcctatcctgaagccaaaggaaatgagatcggaattcctcggggaattccaattccacattttcaagaaataaggaggcaaaaatgttcatatatgaattggaattatttgttttcttattaggcctatcctgaagccaaaggaaatgagatcggaattcctcggggaattccaattccacattttcaagaaataaggaggcaaaaatgttcatatatgaattggaattatttgttttcttattaggcctatcctgaagccaaaggaaatgagatcggaattcctcggtggtaccgagctcgaattccctatagtgagtcgtattaa

SEQ ID NO: 254180 - DNA, 380 bp, Glycine max
ggattccacctcttcccgtccttcgagacggttgttgtgctgcttgctcttcaggttgacctgggattgaatctaaagaatcttgatttacattttgagatatggagggagtttgtttctggacaaattgctaccagtatcggttttttgcattccaagaagtgcttgattggcgagttttcatccttggagattttcttcgggtttcctttgttaattgcacttagggttctgctccgctttaatgatcagcacagggtacgtgatgctacattcttctgatacaggtgctgcatcttaagtgcacttgtacaatgcattgctgacccaacattcagttaaaacttttggaagtgctgctttgtgttccacgggaacaa

SEQ ID NO: 254181 - DNA, 411 bp, Glycine max
ctttgagttcttgggaaacagaaccgggcaaccttatattgtgcaaacaaatgtgttcaccggtggcaagggtgacagagaacaaagaatctacctctggtttgaccctacaagagaatatcacagatactcagtgctatggaacatgtaccagattgttttctatgtggatgactacccaataagggtgttcaagaacagcaatgacttgggagtgaagttcccatttaaccaaccaatgaagatatacaacagtttgtggaatgctgatgactgggccacaaggggtggtttggagaaaacagattggtccaaagcccccttcatagcctcctacaagggcttccacattgatggttgtgaggcctcagtgaatgccaagttctgtgacacacaaggcaagaagtggtg

SEQ ID NO: 254182 - DNA, 404 bp, Glycine max
gttagtacaaaaaagggttacttcagcttccacatatcttgaagaattgatcaatgggcaagtctgtagttgagaagctactttggatggcaattgtgtgcttggtgctgggtgtaatttccattactcccaaggcccaagcagcagtgacatgcaaccaggtggtgagcaacctcaccccatgcatttcttatgtgctcaatggtggcaaaaccgtgcctggcccttgctgcaatgggatcaagaccctctttaacctcgctcactccacaccagaccgtcaaaccgtttgcaagtgcataaagaacgctgttagtgcgttccattatggcaagtccaatgtggaccgtgctgctgctcttcctaagcagtgtggggttaacattccttaccagatcagccct

SEQ ID NO: 254183 - DNA, 387 bp, Glycine max
ctctcaaacacacaagccaaacccaaacacaacaacacaaagaaaaaaagagcacaaacagaccaattccaacggttgaattttttggctgaagacaccccaccgacgttagtcaaataaaacatgtcttgctccgtcgcggtttccaattcgccggtgttctctccttcttcttccctcttctgctcgaagccctccatcatctcttcttcgccggaatccctctcgctctctctctcgcatctcaaaccttccaactcttctacgacgtcgtcttgttcttcaccctctgctgctgcttcttcatcttcttctccttcttctccgtttcggcttcgccttcccaagccttccaccgtgttctctgcttcttcttctgcttcgtct

SEQ ID NO: 254184 - DNA, 395 bp, Glycine max
gtgattgtctttgtatcacgaaaactatacgattcgattcgttggtttcaatggacaccttcttcaattctcaatcttcttcttcttcgagaagccgctggagttacgatactctcaagaatttccgtgagatctctccgctggttcagaatcacatcaaacgggtttattttacgttatgttgcgctgtggtggctgcttgctgtggagcttttcttcatgttctgtggaacattgggggttttctcaccacgttggcttccattggaagcatgggttggttgctatctacaccccctggtgaagagcaaaagaggttgtctctggtgatggcttcggccttgtttcaaggcgcttccattggacctctgattgatttggctattgccattgat

SEQ ID NO: 254185 - DNA, 404 bp, Glycine max
tcataacacaaagcacaaagcaaagctcatccttgagttaaaaaatggcagcagcttcttccatggctctctcatccccatccttggctggcaaggccgtgaagctgggcccatcagccccagaagtgggaagggtgagcatgaggaagaccgtcaccaagcaggtctcctcaggaagcccatggtacggcccagaccgagtcaagtacttgggcccattctctggcgagcccccgtcctacctaaccggtgagttcccaggcgactacggctgggacactgctgggctttccgcagacccagaaaccttcgccaagaaccgtgaactcgaagtgatccactccaggtgggccatgctcggagccttgggctgcgtcttcccggagttgctgtcccgcaacggg

SEQ ID NO: 254186 - DNA, 401 bp, Glycine max
ccataacacatagcacaaagcaaagctcatccttgagttagaaaatggcagcaggttcgtacatggctctctcatccacatccttggctggcaaggccgagaagctgctcccatcagccccagaagtaggaagggtcagcatgaggaagaccgtcaccaagcatgtctcctcaggaagcccatggtacagcccagaccgagtcaagtacttgggcccattctctggcgagcccccgtcctacctaaccggtgagttcccaggcgactacggctgggacactgctgggctttccgcagacccagaaaccttcaccaagaaccgggaactcgaagtgatccactccaagtgggccatgctcggagccttgggctgcgtcatcccggaattgctggcccgcaac

SEQ ID NO: 254187 - DNA, 344 bp, Glycine max
aaaaaaaaaaaaaaaaaaaaaaaaaaaaaaaaaaaaaaaaagaaaaaaaaaaaaaaaaaaaaaaaaaaaaaaaaaaaaaaaaaaaaaaaaaaaaaaaaaaaaaaaaaaaaaaaaaaaaaaaaaaaaaaaaaaaaaaaaaataaaaaaaaaaataaaaaataatgggtcagccttgatatgaaaacctactaccctgtaaaaaaacaaacaacagttccagggtgttgaacatgattgaatataggggagatctctaaagattgtgaagaaaacagcgatagcatttttacaggtgaaaaagatgctcccgaaaaatttaaccaagattagttacctggaagatt

SEQ ID NO: 254188 - DNA, 227 bp, Glycine max
cctctctctgtctccgcctttcgcattgcaagcgctctctgtctttgcttttccttccccctttcagtttcttcaacgctgcaactatccatggcaaaccgctggctcagacccgaggtgtatccactgttcgctgcggttggtgccgctgttgggatctgtggattccaattggttcgtaatatctgcatcaaccctgaagtcagggtgaacaaagaaggaagaaa

SEQ ID NO: 254189 - DNA, 370 bp, Glycine max
  unsure (1)..(370): unsure at all n locations
atttatcgtccattctctctcactccataattgcttcttgctttggtcgatccattcggtgatcactgatcagtggtttggtgttgttgatagagaaaatgcattccagccctttgcttcttgaggaacccattaggatggcatccatccttgagccatccaagcctactttttttccggctatgacgaaaattgttggcacacttggtccaaagtcacgatcagttgatataatttcccattgccttgatgcaggaatgtctgtggcaaggtttgacttttcatggggtgatccagaataccatcaagagacattggnaaatttgagagttgctatcaaaagtaccaagaaactctgtgcggttatgct

SEQ ID NO: 254190 - DNA, 337 bp, Glycine max
gaacgctgcttcacgtcttagggtcatcagtgcccgttcgtgcagcatcagcaggatacctgccaatgccagatttgcaagttccgttgccacacaacaatcctcttctggtttgggtggattatttggatggctcactggagaccgatccagttctttaccatctctggatttaccgcttacgggcgttacacttaccgcttcattgcctgattttgctgcgcccggaaaaactattattactacacttccaaatggactcaaagtggcctctgaaacatcaccgactgccactgcgtctgttggcttatatgtagattgaggttcaatatacgag

SEQ ID NO: 254191 - DNA, 208 bp, Glycine max
  unsure (1)..(208): unsure at all n locations
gagttctacttctccctatgcattgnttgagttcttcatcggcttgctacaagtccaggcgattctggaccctgccgatttcctcgctctgcaaaacattcgtaaggctctggaagacatgccaggttccgatttcttttccacttgggatttcaccgcagacccatgcaacttcgccggcgtttactgcgactccgaccagatcatt

SEQ ID NO: 254192 - DNA, 277 bp, Glycine max
tgggacttcaggagagaaggggaagtttgggctgaccaccggtcagattcttagggttgcgaagaacctggacctcgcgggcatgctggattgcctgcaactgctggattttcatattgggtctcagattccctcaacagcgatgcttgctgatggtgtgggagaagctgcgcagatctactgcgagttggatcggctcggggcgaacatgcgagtcatcgatattggaggtggactgggcatagattacgacggttccaaatcgtgtgactctgat

SEQ ID NO: 254193 - DNA, 270 bp, Glycine max
ctacgacgtggcgtccaaactaagccacacggctaataaagacggccggcacactttcactgcatcaagaaaggaagaaacataccgaatgagagcatcaaactcttcttcttcgatttccattgcgaagcgttactttttcttcttctttctcttcattgtcttcgctcttcgatcttcgtccggggactgctccgaataccaccaccaccactcgccgatggccacgatcggaggcttacacgactcccaaggctctcaaaacagcgt

SEQ ID NO: 254194 - DNA, 278 bp, Glycine max
ctcttctctctcagaaaccctaatggcagagcgcggaggtggcgaacgtggcggcgaccgtggcggtttcggacgcggcttcggcgggcgagggcgcggaggcgacaggggccgcggccggcgtagaggtccccgccgcgaggaggaggagaagtgggtcccggtgactaagctgggacgcctggtgaaggaaggaagaatccgaagcctggagcagatctacctacactcgctgcccatcaaagagcaccagatcatcgacatgctggtgggcccca

SEQ ID NO: 254195 - DNA, 401 bp, Glycine max
cacaaacaaagaagagagcaaaatgaagagtgcgatttgtgggagaatcctctctcccaaccacgtcttcaaaccaggggacacacattcaatttgtaaaggaccatactccaatctttgtgtacccatggttgtattggcaacagggcctggtataggaggtggggtgctggaaaagccagttattgaaaaagtcacccctggccgtgagtctgaatttgatttaaagaaatcacggaaatcggcaccgccctatcgtgtaatattgcacaacgacaactttaataaacgggaatacgtggtccaagtgctgatgaaggtcatccctggaatgacccttgataatgcagttaatatcatgcaagaagcacactacaatggattgtcagtggtgatcatct

SEQ ID NO: 254196 - DNA, 406 bp, Glycine max
  unsure (1)..(406): unsure at all n locations
cgccaccgtcgagtacgagaccgagaaccgccactacgccgacgtggactgccccggccacgccgactacgtcaagaacatgatcaccggcgccgcccagatggacggcgccatccttgtcgtctccggcgccgacggccccatgccccaaaccaaagaacacatcctcttagccaagcaagtcggtgtccccaacatggtcgtcttcctcaacaagcaagaccaagtcgacgacgaagagcttctccaactagtcgaactcgaagttcgcgaccttcttacctnctacgaattccccggtgacgatacccccatcgtctccggctccgcactcttagccctagaagcccttatggcgaaccctgccatcaaacgcggcgacaacgagtgggtcgacaaaatctac

SEQ ID NO: 254197 - DNA, 402 bp, Glycine max
  unsure (1)..(402): unsure at all n locations
gttcttgcaggttctctgcttggcttcttagggcaaatggggtcccttgctagagcaagccactttcaggaaccgtcaacgtctctaactttccgaacagactgatggcagtggtcccaatactctttgtaaacccaaggttgctgcaaagttaatggagaagctcgctcttcctttttcaaaaggtcaaactgtatacattctgcnaggtgaatagaatcagggagtttcagcaaaacagtaagatagtagctactcacacggattgtcctgaagtacttatatgggatgttgaaactcaacctaatcgtcatgctgttctgggggctaccacttctcgtccagacttggtattaactggtcataaggataatgctgaatttgctctggctatgtgcccaa

SEQ ID NO: 254198 - DNA, 250 bp, Glycine max
ggtggattcaacttcgatgcgaaattgcggagagagagcacagatgttgaagacttgttcatagcccacattgttggaatggataccctggcccgtggcctgaggaatgctgccaagttgattgaggatggttctcttgctgagcttgttcgtaagcgttatcagagttttgacactgaaattggggctcaaatagaggctggtaaggctgactttgaactgcttgagaagaaggtcaaggaatggggag

SEQ ID NO: 254199 - DNA, 315 bp, Glycine max
  unsure (1)..(315): unsure at all n locations
gtcattgcctttaccatctcagtctcaactctctccaacaaccacaatggctctcttgggcgccgnctnctnctncgctcgcatcattccctccgtctcactctcttcctcttctcgctccttcttctcactctcatcctcttcttccaaactccaatgcttgcgctcctctcctcgtatttcgcacctctttctcaatcagcgaagagcggaggttcgcgtttcgagtggaagatacggaactgtgtcggcaccgaagtcagttgcgtctgatcctgatcagttgaagagcgccagagaagatatcaaggagct

SEQ ID NO: 254200 - DNA, 258 bp, Glycine max
gaaccattctgcgtagtgatctattggcaaattttttgacagaaggcaattttagagcaagtgttgatttgcagcgcactcattgtattaaaggaatgattaaaatggcggccacagttggtattcctgagaatacaggtatcgcattggcctgtgctatgaatagttcttttagggggcgtgccagttctgatatttacaccatctgctctcaagactgtgaaatatgggaatcctgctgcacaaatgcaatgacta

SEQ ID NO: 254201 - DNA, 298 bp, Glycine max
  unsure (1)..(298): unsure at all n locations
caaccaaccctttcccaaaaccactgacccacgcgtccaaattgccggtaacttcgcccccgttccggaacaccccgtcgaacattctctccccgttattggcacaatccccgacgccattaacggcgtctacctccgtaacggcgccaacccattgttcaagccaaaagcgggccaccacctcttcgacggcgacggaatggtccacgccgttaaattcaatgacggcaccgncagctacgcgtgccgcttcaccgaaacgcagcgtctcatgcaagagcgcaaattgggaaaacct

SEQ ID NO: 254202 - DNA, 381 bp, Glycine max
  unsure (1)..(381): unsure at all n locations
ctccattgtctttgaacactcatcaccatggccaagcttgggctttccctttgtttccttcttttcagtggctgcttcgctctgagagagcaggcacagcaaaatgagtgccagatccaaaagctgaatgccctcaaaccggataaccgtatagagtcggaaggtgggttcattgagacctggaaccctaacaacaagccattccagtgtgccggtgttgccctctctcgctgcacccttaaccgcaatgcccttcgtagaccttcctacaccaacggtccccaggaaatctacatacaacaaggtaatggtatttttggcatgatattcccgggttgtcctagcacttatcaagagccgcangaatctcagcaacgagga

SEQ ID NO: 254203 - DNA, 376 bp, Glycine max
accatggccaagcttgctctttccctttggttccttctttggagtggctgcttcgctctgagagagcaggcacagcaaaatgagtgccagatccaaaagctgaatgccctcaaaccggataaccgtatagagtcggaaggtgggttcattgagacctggaaccctaacaacaagccattccagtgtgccggtgttgccctctctcgctgcacccttaaccgcaatgcccttcgtagaccttcctacaccaacggtccccaggaaatctacatacaacaaggtaatggtatttttggcatgatattcccgggttgtcctagcacttatcaagagccgcaagaatctcagcaacgaggacgaagccagaggccccaag

SEQ ID NO: 254204 - DNA, 403 bp, Glycine max
gaaatttaagtgaggagctagagaatgatgatgaagtctgctatgtgtgcagtggtggttgtagcacttcttcttctggcggaggtggggcccatggctgaggctgtgacatgcaccccaacagagttgagtccgtgtcttccagcaatcacttccggtgctaaaccttccaatgcttgttgcacgaagctgaagcagcaaaaaccatgcttatgtggctacctcaaaaacgctagcttgaagcagtatgttaactctcctaatgcccgaaaaaccgttgcttcttgtgggattccctttccaacttgttaattaattaagccttcttataattaaagtgtgggatatatatatatatatagataaacagtttaatttatacacactttgatcctacaaagca

SEQ ID NO: 254205 - DNA, 362 bp, Glycine max
atggatcagaaagtcgatttcagtgctccgcattccatgggaaccactatcatcggcgttacttacaacggcggtgtcgatctcggagccgactctcgaaccagcactggagtgtatgttgccaaccgagcatcggacaaaatcacacagctcactgataatgtttacgtgtgtcgctctggatcggctgctgattctcagattgtctctgactatgtgcgctacttacttcaccaacacacgatacaacttggacaacctgcgacagtttaaggtgctgcaaaccttgtccggcttttcgcattttaccatgagaatttcgtaccgaccgggttaattggtggtggttgggataaatatga

SEQ ID NO: 254206 - DNA, 222 bp, Glycine max
agaaagtcttccatagccccccaaaaatgaagagcaccatggtctgtgctctctttctcttttgtgccttcaccacctcatacctaccttcagccatcgctgatttcgtgctcgataatgaaggtaaccctcttgaaaatggtggcacatattatatcttgtcagacataacagcatttggtggaataagagcaagcccaacgggaaatgaaagatgccctc

SEQ ID NO: 254207 - DNA, 399 bp, Glycine max
attgaattttgattctagcaagcagagcttttgtcaatttgctattgaccttctcggtggaggaattttagtggacaaaactggagattggatcacacttatacaaaattctccaattagtaacttgttgagagttgctgcttggaagaaaggctgtttaatggttaagattgtgatgtctgggaatgcagcagtcaaaaggagtgattgggcctgattggtacaagtgtttctaacaaacagcaacagtacagagcattttgatgcatgtaagtggacaaaatctgaaccacattccttggaattgatccttccaattgaagtattgggtcctaaatatgggtttgaaatggtgaagtcttaattggccaaataaacctcattgcctttggattttcc

SEQ ID NO: 254208 - DNA, 66 bp, Glycine max
aaaaaaaaaaaaaaaaaaaaaacaaaaaaaaaaaaagaaaaggaaaaaaaaaaaaaaaaaaaaaaa

SEQ ID NO: 254209 - DNA, 401 bp, Glycine max
ctcgagccgaatcggctcgagcacctttctcctaaaacatgtccagtgggttcttcttcttctattacaacaacgtcgtccaagaccatgaccatggccatggccacgatcctgctcctgttcacggtcttcgcggtttcatcggccctagacatgtcgataatctcgtacgacaacgcccacgccgccacgtcgcgcagcgacgaggagctgatgtccatgtacgagcagtggctagtaaagcacggcaaggtgtacaacgcgctcggagagaaggagaagaggttccagatcttcaaggacaacctgcgattcatcgacgaccacaactcccaagaggaccgaacctacaagctcggactgaaccggttcgcggatctcaccaacgaggagtacagggc

SEQ ID NO: 254210 - DNA, 303 bp, Glycine max
atagctagaagcaataagatgaaaatgaaagtgcttgttttgtttgttgctacagttttggtagcatatgaatgccatggctcagactaccagaagttccctctccaaatgaaaactgggtttggtgggcaatacagcaatgaggtggcatgtgccagttggaggcttggcgtggaagcaaacaacgtagtcaagtggcaaactgttcctgcagcttgcggagagtacatagctgactacgttctaggagaccaatatagatcagattccaaaacagttaaccaacaagcttatttctatgct

SEQ ID NO: 254211 - DNA, 338 bp, Glycine max
  unsure (1)..(338): unsure at all n locations
aaaagaaagctcagatattataatcctagacgataactttggatcagtggtaaaggttgtccgatggggccgctctgtatatgcaaatattcagaaatttatccagtttcagctcacggttaatgttgctgctcttgtaataaatgttgtggcagcaataacttctggtgatgttcctttaaatgcagtgcagcttttgtgggtcaaccttatcatggatacacttggggcgcttgcactggctactgaaccgncaacagaccgactaatgcacagatcaccagttggccgaagagaatctcttataacaaatatcatgtggagaaacttgatcgtac

SEQ ID NO: 254212 - DNA, 407 bp, Glycine max
agctgttcgagaaaagccgcgtccgaccaaaggacgtgggcgtcctagtagtgaactgcagcatcttcaacccgacaccatcactctcagcgatgatcataaaccactacaagatgagagggaacattctgagctacaacctcggcggaatggggtgcagcgcggggatcattggtgtggacttggccaaggatattctccaggcgaaccctaataactacgcggtggtggtgagcacggagatggtggggtacaactggtaccaggggaaggacaggtctatgcttatcccgaatagcttcttccgcatggggtgttctgctgttctgctttccaaccgtcgaagggactatagccgcgcaaagtaccgtcttgaacacattgttcgcacgcataacggtgccgat

SEQ ID NO: 254213 - DNA, 395 bp, Glycine max
  unsure (1)..(395): unsure at all n locations
gtcaaagacaatgtcagggatcattcacaagattgaggagacccttcatgtgggaggccacaagaaggaggaggagcacaagggtgagcagcaccatggtggagaatacaaaggggagcatcatggtgaacacagtactgaatacaaaggagagcatcatgttggtgagcacaagccggagcaccatggaggagaagagcacaaagaggggttcctagacaagatcaaggacaagatccacggcgaggaaggtggcgccaccgncgagggcgagaagaagaagaagaagaaggagaagaagaagcatgaacatggccatgacagcagcagcagcagtgacagtgattagattatctcccactgctgcatcacctatatatcttataaggtgtatg

SEQ ID NO: 254214 - DNA, 403 bp, Glycine max
gttcagcagagttttggaggctatcaaggctaatttcaatgacaaatatgacgagtacagaaagaaatggggtggtggaatcatgggatccaaatctcaagcgaaaaccagagcaaaggagaagcttcttgccaaggaagctgctcagaggatgaattaggaggagtttcttatatcttgttgctttgcgaatgctattaagtttgttttttaatgtactcttttaattattgtcttcataaaaacatttgttattcacatgagctagagtatttcgctaaaatctcctgccgactgttccaattcctgaacccttggattactttaattttggtagtggacttttttcgggtactttatgaaggaactgcattaggatgcagttgcatccaattttttaaaa

SEQ ID NO: 254215 - DNA, 334 bp, Glycine max
cacatcttaaccttgttcttaccagatggctgcctcagttgaactcttatttttgtcctttctctcgttgttcatctctttctccatagctcaaacctctttcagaccaaaggcacttgttcttcctgtaaccaaagatgtttctgcctcagttcctcagtatgtcacacaaatcaaacaaagaaccccacttgtggcagtgaaactaactgttgatcttggtggtggctacttgtgggtgaattgtgaaaagggctatgtctcatccacctctagaccagcccgttgtggctctgctcagagctcgcttttcgggttatatggttgcagtact

SEQ ID NO: 254216 - DNA, 355 bp, Glycine max
caccacctctcttttcatcatcgcttcaattaacacttcctttcgttgttttcctctgatttttttggtggttgatggcgtgggcgaataagcgaggtgactcaaaaaatgcagggtttatgagaacgttggtggtggtgttgttggtgttgctatcggggttttggtgtgtttccggtgtgaaagaaggaaaaagaaatgcttacgcgacgatgatgtacgtaggtacgccgagggactacgaattctacatagccatacgcgtgcttcttatatcgctggctacgctcgacgctcaaaccgatcttgttgtcattgctatccttgatgttcctcctccatggattcgagctct

SEQ ID NO: 254217 - DNA, 339 bp, Glycine max
gaattgttatgggatctcttggtatcaggggtacgacctgatgatgtatgctcacaggttggtttatgtttcaaaagggctaaatcagagagcaatggaattgagatggtgaccgaaaagggacaaagagagttatcagctaaagatactgctttgtgcacttcctgtcagatgcttgtggtttggattcagaatcaactaaaacaaaagaagaccaaggagatagtattcaactatgtaaatcagctgtgcgagagcttgccaagtccaaatggagagtcagtagtagactgtaatagcatttatggattgccaaacatcacgtttactggtggagac

SEQ ID NO: 254218 - DNA, 342 bp, Glycine max
cttccaataatcaccctggagaagattgaagacagtgttgagttcataagctcgaggcctaaagctttagctatttatgccttcacgaaaaaccaaactctgcagagaagaatggtatctgaaacatcatcaggaagtcttgtattcaacgatgcaattctacaatacgtagcggataccctaccatttggaggagttggtgaatgtgggtttgcatcaaggatcttagattctactgctattactattactttatactgaacataccacaatgaagtgtcattaatagactgtaattacggagatggattttgtggaatcgcatatactactagattcaga

SEQ ID NO: 254219 - DNA, 402 bp, Glycine max
aaaaaaaagcctcgtctctcgtgccgattctgcaggacaattgcgttcacccaacctaattgcaattagtgtataagatgagtacgttggatgcaacaagggctgaacttggtcttcttgttttatatttgggcaaggctgaagcaagggacaaaatatgcagggcaatacaatatggttccaaacttttgagtaacggggaacctggtactgctcagaatgtcgacaaaacaaccagcttggcacgaaaagtcttgcgtctttttaaagattgtcaatgacctacatgctttgataagtccaacaccacagggcacttgcctaccgctaattctgttgggaaagttcaagaatgcactactctgcactttcttggttcttgatcaatttgagtggcttggc

SEQ ID NO: 254220 - DNA, 379 bp, Glycine max
  unsure (1)..(379): unsure at all n locations
atttatcgtccattctctctcactccataattgcttcttgctttggtcgatccattcggtgatcactgatcagtggtttggtgttgttgatagagaaaatgcattccagccctttgcttcttgaggaacccattaagatggcatccatccttgagccatccaagcctactttttttccggctatgacgaaaattgttggcacacttggtccaaagtcacgatcagttgatataatttcccattgccttgatgcatgaatgtctgtggcaaggtttgacttttcatggcgtgatccagattaccatcaagagacattggaaaattgagagttgctatcaaaagtaccaagaaactctgtgcggntatgctagaatactgg

SEQ ID NO: 254221 - DNA, 326 bp, Glycine max
gggcatccagagaagacagggaaagtcataatcgtggatcacgtgcttcgacccgaaggcaacgaactcttcacagacgttggcatcgcattcgacatgatgcttctcgctcacaacgccggtggcaaagagaggaccgaagagaactggaagtggctgttcaaggaaaccggtttcgcgcgttacaacatcatcaagatcaacgctctcccttccatcattgaggcgtttccaatctgaagaagatgccactaccacaactgcatgtggtttttatgttgcatgtgttggtggtattattaacagctatatgatcttcgttttaa

SEQ ID NO: 254222 - DNA, 391 bp, Glycine max
tttcactccaaaccttccttccttccttgtttgctccaaagaatgggagataacaatgtcaacctcccacccgggtttcgcttctaccccacagatgaagagcttgttgttcatttccttcaaagaaaggcaaatcttcttccttgccatccagatgtcatccctgatcttgaactctacccttatgatccttgggaacttcatggtagagctttggcagagggaaagcaatggtactactacagcagaaggacacaaaatagggtcactagcaatggctattggatgccaatgggaatggaagagccagtgatttcaaactctagcaacaagagagttggcatgaagaaatattatgtgttccatttgggagaagcccctgatgcaacac

SEQ ID NO: 254223 - DNA, 340 bp, Glycine max
  unsure (1)..(340): unsure at all n locations
caagaatcttcctatttacatcactgaaaatggcatggctgaatcaaggaatgactcaataccagtcaatgaagcccgcaaggatagtataaggattagataccatgatggccatcttaaattccttcttcaagcgatcaaggaaggtgttaatttgaagggctattatgcatggtcattttcggacagttttgaatgggatgctggttacacagttcgattcgggctcatatatgtggattacaagaacaacttgaaaagataccccaagttctctgctttttggttgcaaaagttccttctcaagtgatctgaatntagtgttcctttgacatgtcta

SEQ ID NO: 254224 - DNA, 369 bp, Glycine max
aacatattctcctctcattctcactcaaaacacaaaatccgaactaaggtgaaaatgaaggcatcacgcattgctttgttcactttggtggtgcttctttttgtggctgaagttcaagtgtcaaaggcagtgacctgcagcccagtgcagctgagtgcatgtgtgagtgcaataacctcttcaaccccttcatcaaacctatgctgctccaagatcaaggaacagaaaccatgcctttgccaatatcttaagaaccccaatctcaagaagtttggtgactcttctaatgcaaagggaagtgctaacacttgtggaacttcctttccaaagtgctaaagggttactaaatttgaagtgggtttaaattct

SEQ ID NO: 254225 - DNA, 302 bp, Glycine max
ctttctctctcatgttgtagtatctcactagtgtttttcagtcgtttctgaaccacacaaacatcaccaccgaacaatgccgacggggttaccggcggcgaattccttagtggcgccggacgaagaggggtgggtgtgggggcagatcaaggcggaggcgcgccgcgacgccgagtcggagcctgctttggcgagctacctctactcgacgatcctctcgcactcgtcgctcgagcgttctctgtcttttcacctcggaaataagctctgttcctccacgcttctctcgacgctcctttacg

SEQ ID NO: 254226 - DNA, 372 bp, Glycine max
ctttgcttcattttatttatagagacactctaatagatgatgaagagctctttatgtcacgttcatcattcttgccttcggtttctgaatcatttgcagcaaagttgttagctgctgcagaaaagtatggtttgccaagacttaagctgatgtgtgagtctgtactttgcaaagacatctctatagattctgttgcctatattctggctcttgctgatcgttatcgtgcaacagaattgaagtctgtctgtctacaattttctgctgaaaaccttgtcgctgtgatgcaatctgatggttttgagtatcttaaggaaaattgtcccttgctgcaatcagaactgctaaagacctgtgctggatgccaggagg

SEQ ID NO: 254227 - DNA, 393 bp, Glycine max
gagatttataagcatcctaaagaagaaagaatagcccgaacttggggaaccactggccctggcctaccctatgttgaacaaactataaccaatgctggaaattggttgattgggggtgacctagaggtcattgaaccaatccagtacaatgatggacttgatcattttcggctgtcttcagcagaactccgtgcagagttcacaaggcgcaatgcagatgctgtgtttgccttccagctccggaatcctgttcacaatggccacgctttgctaatgactgacacccgtaggcggcttcttgagatgggttataagaatcctgtcctcttgcttcatccactgcgaggctacaccaaagctgatgatgttccacttgattggcgaatgaaacaa

SEQ ID NO: 254228 - DNA, 375 bp, Glycine max
gttgcctcaaactcaaaggatgaccctgcaaaagaagctctggaccttaaaaggccaggtaataatcatgaaccaccctggtcagattggaaatggctatgcccctgtcctcgactgccacacttatcacattgctgccaagtttgctgaactcatgaccaagattgacaggcgatccggcaaagagcttgagaaggagcccaagtttttgaagaactgtgatgctggctttgataagatgattccaaccaaacccatggtttgtgaaactctgtccgagtatcctacacttggtaggttcgctgttagggacatgcgtcaaactgttgctgtgggagtcatcaagaacgttgagaagaacgatcctaccggagc

SEQ ID NO: 254229 - DNA, 185 bp, Glycine max
  unsure (1)..(185): unsure at all n locations
tcggngaattccaattccacattttcaagaaataaggaggcaaaaatgttgatatatgaattggaattatttgttttcttattaggcctatcctgaagccaaaggaaatgagatcggaattcctcggggaattccaatttcacattttcaagaaattaggggggcaaaatggtccttttttgaat

SEQ ID NO: 254230 - DNA, 390 bp, Glycine max
ggcgagtgagtctcaacactgcctatgtcatggacactgctgagacccgaaccaacattgccgttatcaagtattgctgtaaaagagacgaaaccttgatcttaccggttaacgatagtatcagtctcactctcgatccctcccacctgtgcaccaccaccactgttgccgtcagttccgctttccaccaagatcgcatgtggctcaatgccaagtgtaggagatttctctttctgggggcaggttccagagctgtttaagggagatccgtgctcgtgcttgtgatgttgaggatgaaaataagggtataaagatcacaaaggaggattgggccaaattgcacctacacattgcttcgtacaacaacttccctactgcagcaggactggc

SEQ ID NO: 254231 - DNA, 416 bp, Glycine max
caccatttccctctcgattgtgagacttgttgttgttaactgaacttttctgagcaagaatgtctgggcgtggaaagggaggcaagggtttgggaaagggaggagcgaaacgacaccgtaaggtgctgcgcgataacattcagggaatcaccaagcccgcgattcggcgtttggctcgtaggggtggcgtgaagcgtatcagtggtctcatctacgaagagacacgtggcgtgctcaagatctttttggagaacgtgattcgtgacgccgttacctacactgagcatgctaggagaaagaccgttacggcaatggacgtggtttatgctctcaagagacagggaaagaccctctacggatttgggggctagggttttttaatttaatgggtaggttctttggttttggaggctaat

SEQ ID NO: 254232 - DNA, 349 bp, Glycine max
ggcgagtgagtcgcaaaactgggtattcatggtgactgcagagacctcaaccaacattgccgttatcaagtattggggtaaaagagacgaaaccttgatcttaccggttaacgatagtatcagtctcactctcgatccctcccacctctgcaccaccaccactgttgccgtcagttccgctttccaccaagatcgcatgtggctcaatgccaagtgtaggagatttctctttctgggggcaggttccagagctgtttaagggagatccgtgctcgtgcttgtgatgttgaggatgaaaataagggtataaagatcacaaaggaggattgggccaaattgcacctacaca

SEQ ID NO: 254233 - DNA, 296 bp, Glycine max
gcaagtttcgtcacgccggaacgatgaccggcggcggatccacggggaggttgccgacgtggaaggagagagagaacaacaagaggagagagagaagacgaagagcgattgcagctaagatctacactggccttcgagcccaggggaactacaagcttccaaagcactgcgacaacaacgaggtcctgaaagctctctgcgccgaagctggctggatcgtggaagaagatggcacaacttatcgaaagggatgtaagagacccacgagtgagattggaggaacagcattgaactta

SEQ ID NO: 254234 - DNA, 423 bp, Glycine max
  unsure (1)..(423): unsure at all n locations
tcgagcttcaaaccctctctctcttttttctctttctctctttgaagctctgtgagaaaccttaactgtgtaattgcaatggctgatgcttctgtggcaccaccaccttcactgaaagatgagcttgacattgtgatccccaccataaggaaccttgactttcttgagatgtggaggccattctttcagccttaccatttgatcattgttcaagatggtgaccccaccaaaaccatcaaggttcctcctggctttgactatgagctctacaaccgcaatgacatcaacaagcttttgggtccaagggcctcttgcatctccttcaaggactccgcgtgtcgctgcttcggctacatggtgtccaagaagaagtacatcttcaccattgatgatgactgctntgttgccaatgatccatctgga

SEQ ID NO: 254235 - DNA, 313 bp, Glycine max
cacacaacaaacatatctcttcctcttctgtccctcaatggaaggatcaggatccggtgtggttacagtctacggcaacggcgccatcaccgagaccaagaagtcccccttctccgtcaaagtcggcctagcccagatgctccgcggcggcgtcatcatggacgtcgtcgacgccgagcaggcccgcatcgcggaggaggccggtgcctgcgcggtgatggccctggagcgtgtccccgccgacatccgggcccagggcggcgtggcccgcatgagcgatccgcagctcatcaaggatatcaagccggccgtc

SEQ ID NO: 254236 - DNA, 166 bp, Glycine max
attccattctctctgtgtatttccctacctctcccttcaggatgcatatcttcgtcaagaccctcaccggcaagaccatcacccttgaggtggaaagctctgacaccatcgacaacgtcaaggccaagatccaggacagggaaggaatccccccgcaccagaaacg

SEQ ID NO: 254237 - DNA, 390 bp, Glycine max
tctcggtgaattccaattccacattttcaagaaataaggaggcaaaaatgtgcatatatgaattggaattatttgttttcttattaggcctatcctgaagccaaaggaaatgagatcggaattcctcggggaattccaattccacattttcaagaaataaggaggcaaaaatgttcatatatgaattggaattatttgttttcttattaggcctatcctgaagccaaaggaaatgagatcggaattcctcggggaattccaattccacattttcaagaaataaggaggcaaaaatgttcatatatgaattggaatcatttgttttcttattaggcctatcctgaagccaaaggaaatgagatcggaattcctcgggggtaccgagctcga

SEQ ID NO: 254238 - DNA, 457 bp, Glycine max
  unsure (1)..(457): unsure at all n locations
tccccccttccttagcccggaattccgcttcaagttaaaaaagttccttgccattggttgaaggaagaaggaatgggtttggcagtccgaaccttccggttttcaacttccccaaacaccttcccttcaaaacttcctggcttcgagaaattggccagagtacggtgcacgcccctgcttgatcaatgcccncacgggagacgtctacagctacgaggaggtggaaagcaccgccagaaaggtggcgcggnggctgaagaaagagggcgtggaacagggccaggtcatcatgatcctnctncccaattgccccgaattcgtcttctcgtttcttggcgcatcccaccgcggtgccatggccactgctgccaaccctntcttcacccccgccgagattgcaaagcaagcccatgcctccaatgccaagctcctcatcacccaggcctcttactacgac

SEQ ID NO: 254239 - DNA, 228 bp, Glycine max
cctggttacaccaagggtgatggtcttggtgctgagattgtgggcactcacatcctagcaaacactgcgttgatctctaccgatgccaaacgtagcgtcagagactccgatgttcacattgcttcacccttcacaattggaatcgctgatctcttggaaaagtcggtaaccatgcttgattgtcaaaaccggcatcgatgctgcccgcaaatacagcgcgattaagcc

SEQ ID NO: 254240 - DNA, 237 bp, Glycine max
  unsure (1)..(237): unsure at all n locations
gcggtgtactgaaggaatgtcttctgcagcgttacttcagcagagaacttaagtgcagtgttcagggagcagaatcagatttaatactaacttgccgaaagcttttggatgaaaggcaaggtttgaatgtcatccgatttcttcaagcaattaatgcacggcacgacctcactganggtctgaaggacttgcaatgtaaaacacttatatttgcaggtgagagtagtccattccatg

SEQ ID NO: 254241 - DNA, 411 bp, Glycine max
attgttaaaagtttctttatttcaagtgaagttagttagttgtatttatatacacaatcatgtcaatgagatcaattggtacaagccttagccttatggtatggcttgtaattgcaacatcagcattagcaaaatctgataaccccccagtcctagacacacaaggcaaccctcttgagcctggcaaagattactacatcaaacctgccataaccgacgttggaggccgcgtcactttgttaagcagaaacaatccatgccctctatatgtaggtcaagagaattctgatgcagcagagggcttaccccttttcttcaccccttttgcagaagaagatgatgttgtgaaggtgaagggacttcaaggtgacattctcagctgcctcaatatgtgtgcagggcacaaattgg

SEQ ID NO: 254242 - DNA, 300 bp, Glycine max
  unsure (1)..(300): unsure at all n locations
caaactcccaaagtggcgaagcaagacaagaagaaaaagcgacgcggacgcgctcacaagagaatgcaatacaaccgccgattcgtcaccgccgtggtgggattcggaaagaagcgtggaccaaactcctcggagaagtgagggaggcgtgttgaagatcatggtttttcttagtttgtgaaatgtatcacttgttttgatttgattgatgaactcaaacttttatgatagttcttattatggttcaatgaaggagttttttgctaaaaaaaaaaannnnnnnnnnnnnnnnnnnnnnnn

SEQ ID NO: 254243 - DNA, 349 bp, Glycine max
  unsure (1)..(349): unsure at all n locations
cacaactacaagaaagaacttccttataaccaaaaccaacgacaactatggcaagttatcagaagcactacgatgatcagggtcgcaaggtcgacgagtatggcaatgttgagaggcaaactgacgaatatggcaacccggttcatgccactagtgtcacttatgtagccaccaaaagtgttggtggctacaatgatgacgctaataagcaacatgatattactggtgtctatcccgagaaagacaccggtagacatcattttggtcgtggttacgacggtgacactaacaagcaacatgatgctactggtgtntatccccgaatagacattggtagagatcatgggac

SEQ ID NO: 254244 - DNA, 357 bp, Glycine max
  unsure (1)..(357): unsure at all n locations
cccaaattcattttaatcctaattctgcacttcttgatcattcgatttttctcctcaagatgcagatattcgtaaaaactttgaccggcaagaccatcacccttgaggtggaatcctncgacaccattgacaacgtaaaagctaagattcaagacaaggaaaggatcccaccttgaccagcagaaaattaattttggcgggtaaacaacttgaggatggtcgcacccttgccgattacaacatccaaaaggaatcaaccctccatctcgtgcttcgcctcaggggtggcatgcaaatctttgtcaagactttgaccgggaagaaccataacccttgaggtggaatccttggacacca

SEQ ID NO: 254245 - DNA, 336 bp, Glycine max
gccctctatgtatgattatcaccgcagcattgggttcccttgtcttagccgaacaagttcatctaggaagtatatttggggccattctcattgtgtgcggactttacactgtggtgtggggcaaaagcaaagaccgtaagagcacaacagaaatagagaaaggcgaaagccaagaattgccaataaagaacggtacaaaatcagcgtcagacatatttgatggcattgaaatcaatgttccttctgaggtgttgaagaaaggaggaaggaaaaatgtcccaccagcaacaacaacaactacaacatcatgaaggtgcttttataggactagcacta

SEQ ID NO: 254246 - DNA, 334 bp, Glycine max
  unsure (1)..(334): unsure at all n locations
gtgcaatcctatttcagcttgttacaggaagaacgcctttcgctggaaacaatcaaatacagttactacaaaatattatgaaatcaacagaattgcagtttccgtctgatagccaaagtctgagttttgaatgcaaagatttgtgtcagaaattgctacgtcggaatccagtggaacgtctaacttttgaagaattctttaaccatccattcctttctcagaagcaaacagaacaggatgagccattgagggatcgaagttctccaaggctggttggtgggttttggtctacagggtctgaccctttgagaagaactgangaaaattatcaaga

SEQ ID NO: 254247 - DNA, 324 bp, Glycine max
  unsure (1)..(324): unsure at all n locations
tgtangtgtgtgtgttggtgcacactctacacacttacacggatagaaaagagagagacagaaaaggatcaaatagttaaaacctttggttctttccctccatagttgcatttttccattcaacaacacaacacctcagacagacatcatggaggcaggttacaatcctcgtaccgtcgaagaggtctgtagggatntcaagggtcgcagagctgctttgattaaagccctcaccaccgatgctgaagaggtctaccagcagtgcgatcccgagaaggaaaatctttgcctctatggatttccaagtgagcaggtgcgaagtca

SEQ ID NO: 254248 - DNA, 402 bp, Glycine max
aaaaaaaaaaaaaaaaaaaaaaaaaaaaaaaaaaaagaaaagaaaaaaaaaaaaaagaaaaaaaaaaaaaaaaaaaaaaaaaaaaaaaaaaaaaacccaaaaaaaaaaaaaaaaaaaaaaaaaaaaaaaaaaaaaaaaaaaaaaaaagggggccccccaatataggaccttttccccccggaataaaatccggacccgtcccctgaggggtcccaattttcccataagggagggcctttaaaaccttgggaaaaaaagggaaaaaccttttcccggggaaaaattttttccccttcaaattcccccaaaaaatacaacccggaacctaaaaggtaaaacccggggggcccaaaaggggggcccacccccaaataatggggtggccccaattgccccttttcc

SEQ ID NO: 254249 - DNA, 298 bp, Glycine max
caaaacactcataacacaaagcacaaagcaaagctcatccttgagttaaaaaatggcagcagcttcttccatggctctctcatccccatccttggctggcaaggccgtgaagctgggcccatcagccccagaagtgggaagggtgagcatgaggaagaccgtcaccaagcaagtctcctcaggaagcccatggtacggcccagaccgagtcaagtacttgggcccattctctggcgagcccccgtcctacctaaccggtgagttcccaggcgactacggctgggacactgctgggctt

SEQ ID NO: 254250 - DNA, 422 bp, Glycine max
cgaaaaccctaaattgaattcgaatacacaacatgcagcaggggggaggatctgagacggaagtaacatgggaagaccagcagaacatcaacaaattcggaaggttgaataatcgctttcacgagcttgaggatgagatcaaaatcgcaaaggaaacaaatgataatttggaggatgcaagcaacgagttgattctcacagatgaagaggtcattcggtttcaaataggagaggtttttgctcatgtgccataggatgaagttgagaacaggatagaacagataaaagaggtgacaagccagaaattagcaaaacttgaagaggagaaagaatctattcttgctcagatggctgaactcaagaaaattttgtatgcgaagttcaatgactcgatcaatcttgaggaggattagtaactttct

SEQ ID NO: 254251 - DNA, 401 bp, Glycine max
ccaaaaacttaaatggaagagagatccacagcatgcagcagggcagaggatctgatgacagaagtaacatgatgaagaccagcgaaacatcaacaaattcggaaggttgaataatcgctttcacgagcttgaggatgagatcaaaatcgcaaaggaaacaaatgataatttggaggatgcaagcaacgagttgattctcacagatgaagaggtcattcggtttcaaataggagaggtttttgctcatgtgccaaaggatgaagttgagaacaggatagaacagataaaagaggtgacaagccagaaattagcaaaacttgaagaggagaaagaatctattcttgctcagatggctgaactcaagaaaattttgtatgcgaagttcaatgactcgatcaatc

SEQ ID NO: 254252 - DNA, 393 bp, Glycine max
gtataggcgtgccaaggtcttgttaattttgagcgttaagtgctgcagctaatcagatcccaagaccttggcctaccttgccatacagaaaaaaaaaaagcaaaaaaaaagccaaggtttggagccaacaaaaataaacacaaagcacaagtcatggaaagaataatggttggaagtgcaacaaaggttgctttcaccctcttggccactttcgccattgtcattccatgccttgaggctggcattgctgagtttgacgattttctcaaagcccaagctgatgaagcccataaaattgctcttgattcctatgtcccagagccccacgatgtctcccatgaactcaatttccatgttcatatggcactggaaaactccacatggagggaacta

SEQ ID NO: 254253 - DNA, 422 bp, Glycine max
  unsure (1)..(422): unsure at all n locations
ttcaaatccaaatggccctttacattacactaataattggggtcctagtaaacaccctagtactctataaatagcatttgcatgcaccttaatcttcaccaaaatactcctcttggcatcttgtgttgtgtccctcttttaagctatttccttctcttaacacaattggttgtgccaattgccatagtcaccaaccaattaacaaaggtatatatatcatcatatcatcaccaaatgaaaaatattgggttgttttttcttgtggtggtggctactnttgtggtggcagccacagctggtagcttttaccaagactttgaaataacgtgnggtggtgagcgtgccaaaatctatgagaatggaaaccttctcacactctcccttgacagagcctctggctctggctttcgttccaaaaaaga

SEQ ID NO: 254254 - DNA, 417 bp, Glycine max
attaattacttgtgagtgtttccaaaacacatagagcatatggtaagatccggggactaccgcacccacgtttcaaaagttgagagggagtctagtaccgttgaataccctaatgctcacgtttccctcaacaagaaggttgtttacgaggaaagtgagatagagggttcccaccaccaccaccaccacctcttccataggcaccaccacccagagactcgtgagagtgttaaggtggtagagtatgagcaagttcctgagaggcgcgtcgctgaagttgtctacgaagagaacaggacagtgtggccttgaatggcttactagctagggttgaacttcttatggtgtttggctactttgctaagcaggccacctagtatatcaaaattaatcaccagtgtgcttatattaaataaa

SEQ ID NO: 254255 - DNA, 469 bp, Glycine max
ctatgacgtcgaatgcacccttccttaacctcggaattggcttcagccaaaattaaaattcattcaagttaatcccttcatgaaggttggctaagggaatgttggcttaagccctttcgtttgcccttcttttaactgcattaaaaaccaaaaaggctaaatcatggcgtaatggtcccggttggcttggaagcctaatagctgactatggggtgcctcttatggcccaagttggaacaggtgtatcctacataccagctggaagtgttccacatggtatttcaaggcgtctgtttagcccaaatccatggtcaccgggtgcatatgagaattggactgttattaaggatatggttcatgttcctgttgtgtacataatcggagcatttatcccagcaaccatgattgcagtactttattactttgaccatagtgtggcttcccagcttgcccagcagaaagagttcaa

SEQ ID NO: 254256 - DNA, 390 bp, Glycine max
caatcggccagcaccaacagcatcggcggcgacagtcactgtccgacaacaacacttccgcggcgaaaaatgtctctggtggcgaacgaggatttccagcacattctgcgtgtgctgaacaccaacgtggatgggaagcagaagataatgttcgctatgacctccatcaagggtattggaaggagattcgccaacatcgcttgcaagaaggccgatgttgacatgaacaaaagggctggtgagttgagtgctgcagagttggatagtgtgatgactgtggtggcgaaccctaggcaattcaagatcccggattggtttttgaacaggaagaaggattacaaggatggaaagtactctcaggttgtgtctaatgctcttgatatgaagctc

SEQ ID NO: 254257 - DNA, 166 bp, Glycine max
aagcaggattagttgacaccagtgtaacatagaaggaaaaacatagttacagttggagtgattagatccagattcccaataacgacacaaccaatgcataagaaagcaagtaaaaagggagcaacatgggggtcaatggcatcttcaactttaaaggagttcaaaa

SEQ ID NO: 254258 - DNA, 420 bp, Glycine max
ctttgcgatggccatttgtttagggtgaatttgtttaaactaagtaactttaaaataagtgttttttatataagcgcttttttatgaagtagataggatttacttcttaaaataagcagaaatagtttagacaaaacacactaaaaaatcaaaaaaacttcttattattaaaacaagcgcttatttcaacaaataagtttaaacaaattggcccttaatcttaaaagaaaaaggggttataggatatagcttgtttttaagacccttaattctcagaagtttttttccatataaattgctgagaaaaactctgaaacactttttatttttgagtgtttttttcttctgaaaacttaataattataaattttattaaacatatattttgattaaaaagcatttttttcataaagacaacac

SEQ ID NO: 254259 - DNA, 418 bp, Glycine max
tagctgacaagtctgttgtttaaagtgcatccggctaaactggaaagtttcaggtgttgcattctatataaccccttttatatgaagtagataggatttacttcttaaaataagcagaaatagtttagacaaaacacactaaaaaatcaaaaaaacttcttattattaaaacaagcgcttatttcaacaaataagtttaaacaaattggcccttaatcttaaaagaaaaaggggttataggatatagcttgtttttaagacccttaattctcagaagtttttttccatataaattgctgagaaaaactctgaaacactttttatttttgagtgtttttttcttctgaaaacttaataattataaattttattaaacatatattttgattaaaaagcatttttttcataaagacaacac

SEQ ID NO: 254260 - DNA, 408 bp, Glycine max
tccttccggcctaaggatgatcgtttaatgggcaagacactgcgaagatctgaagtcaaggtccttctaagaatgcttccagactatcatcatcatgtgaagtcatatgaaaatacacttatcacaaaattttttggtctgcacaggattaaaccttcaagtggtcaaaagtttcgctttgttgtaatgggaaatatgttctgcacagacttaaggatccatcggaggtttgatttaaaaggttcttcccttggaagatcatcagacaagatagaaattgatgagagtactacgctcaaagatttggatctgaactacagcttctacctggaaccatcttggcgagagtctttactaaagcagattgaaatagacagcaaatttttggaagcacagcacattatggat

SEQ ID NO: 254261 - DNA, 347 bp, Glycine max
  unsure (1)..(347): unsure at all n locations
cccaattcttcccccttcacccacccaacatatctgtctagtgccaattaataagccccccttcacattaaccctggggtcacccaactactntgaactccttaccataccattacaataattatcaaacctaaccagtaaaaatggtgaccgtggaggaaatccgcaacgctcagcgttcccatggacccgncaccatcttggccttcggcaccgncacgccgtccaactgcgtctcccaagccgattaccctgactactacttccgcattaccaacagcgaacacatgactgatctcaaagaaaagttcaagcgcatgtgtgaaaagtccatgataaagaagcga

SEQ ID NO: 254262 - DNA, 129 bp, Glycine max
gaaaaccctacctaaccgtttcaagatgcaaatcttcgttaagaccctaactggtaagaccatcactctcgaagtcgagagttcagataccatagacaatgtaaaggccaaaattcaagacaaggaagg

SEQ ID NO: 254263 - DNA, 333 bp, Glycine max
actcggaattcaactcgagagtatttattctttggttcaacaatttcagattgtgtctatggtaaaatgtacatatacataacaatcccagattattaactacaccaccttataatatcaccaaatactcaatataaccaccaactacatcctcacaccttctcgtattatctacaacaatattcacatcctcaaaaaacagttgcagaaaaccaatttcaatttccaatcctacaaagacaaaatcaatgataatcattataatattaacttcaataagcatataccctaccttattataaacatcacttacatatttcaaatgaacccata

SEQ ID NO: 254264 - DNA, 416 bp, Glycine max
  unsure (1)..(416): unsure at all n locations
gttccaaaatgtgtccaaggagggtttgaaacttgggaaagattcaaaagacaaggaactgaaggaatcttttaaggatcttaccaagtggtggaaaactgctctttccaaagacaatgttgatgatgtgaagatttccaaccgattagataacactccttgtgtagtggtgacatcaaaatttggttggagtgctaacatggagagaatcatgcagtctcaaactttgtcagatgctagcaagcaagcatacatgcgcggcaagagggttcttgagatcaatcctaggcaccctattatcaaggagctccgagagagagtagtaaagaaccctgaggattgaggtgtgaagcatacagcacagctgatgtaccagactgcactctntgaaagcggcttcctgcttgatgatccca

SEQ ID NO: 254265 - DNA, 366 bp, Glycine max
  unsure (1)..(366): unsure at all n locations
cactctataagagctatgacgcacgctgacctaagcccgggattcgggttcgggatgggccccaacgagccttctgagctgtctatccatgagaacgcctatggcttggctagatacgctgtcatatgccatgagaatggcctggttcccattgttgagcctgagatccttgttgatggacctcatgacattcacaagtgtgccgncgtcaccgagcgtgtccttgcagcatgctacaaggctttgaatgatcaccatgtccttcttgagggtaccctattgaagccaaacatggtcacccctggatcccaatctgctaaggttttccctcatgtggttgccgagcacactgtcagagcccttcag

SEQ ID NO: 254266 - DNA, 260 bp, Glycine max
agaaaacaaagcatatgtggtctgaaatgctcaaatggacggaggaattcggagctgacacgatcacggaggacttcgaattcaaagaacttgatgaagtcttgcactattatcctcaaggccatgatggactggaccaagatggaagacctgtgtacatagagagattatgccaattcgatgccacgaatatgatgcatgtcacatccatggatcgctacgtcacataccacgcaaaggagcttgagaggacatttgat

SEQ ID NO: 254267 - DNA, 386 bp, Glycine max
caaattcaggtaatgctattctggcattagcatcaaatgccattcacctgctctggaaatggcagcgaaatgagcgtaactcatctggcaaggccactgctaccttgcaacctcagttgtggcaaccatcgagtggcatcctgatgacaaatgacattgctgatagcaatcctgaggatgctgtaccctgctttgcgttgtccaaaaatgactcgtatgtaatgtctgcatcacgagggaagatatctctgttcaatatgatgacttttaagactatgacaactttcatgcctccgacacctgcggcaacctttctagctttccatcctcaggattacaatattatcgctataggcatggatgattcctctattcaaatatataat

SEQ ID NO: 254268 - DNA, 415 bp, Glycine max
agcagaatgaattgagtgacacaaagcacactgaagggggatacaacaacatggaaaatcagaacaacaacaacaacaactacttctacaacagcaaggatgctttcggtaagcaaaatgaattgagtgacacaaagtacactgaaggaggatacaactccatggagaatcagaacaacaacaaatattactacaacaacgacaatgctgccaatgggaagtacttctacaacaacaatgatgctgccaacaacaggtactacaaaaccaaagctgtcaacaacaattacaatgatgagaggcagggtttgagtgacacgaggtttatggagggtggaaaatacttctatgacgttaactctgagaagtacaaccatccaacacaatatggaggctcaaccagaggaatgaactc

SEQ ID NO: 254269 - DNA, 415 bp, Glycine max
gtttgattgtcctagctttgagcaacatcatgaagatctccattctctttatcacaatcttttcttgtggttttcttggaaatgttgtttcaaatgctagtcctcttccatatgaagctatttttaactttggtgactctataagtgatactggaaatgctgctcataaccacccacctatgcctggcaatagtccttatggttcaacatactttaaacatccttctggacgtatgtcaaatggacgactaatcatagattttatagccgaggcatatgggatgccaatgttgccagcctatttgaatctcaccaaaggacaagacattaagaaaggagtgaattttgcatacgctggttcaactgcacttgataaggattttttagtacaaaaaagaatcaatatagaggaagc

SEQ ID NO: 254270 - DNA, 259 bp, Glycine max
gaaggcgtcttcataaacgcctttcttctccgtttgcgttgcctcgttcgaattcgctgtttgatctgcgaaaatgagagagcgcatctcgatccacattggtcacgctggtatccaggtcggaaatgctcgctgtgagctctactgcctcgagcacggcatccgtcccgatgggcaaatgcctagtgacaagactgttcgcagccttgatgatgccgacatgacttccgacagcctgactgaatccggattgcacgtt

SEQ ID NO: 254271 - DNA, 215 bp, Glycine max
tgcaaagcacaatgcaaagctcatccttgagttaaaaaacggcgacaggttcttccatggctctctcatccccatccttggctggcaaggccgtgaagctgggcccttcagccccagaagtgggaagggtgagcatgaggaagaccggcaccaagcaggtctcctcaagaagcccttggttcgggccataccgagtcaagtgcttgggcccattc

SEQ ID NO: 254272 - DNA, 419 bp, Glycine max
ctctcactcacaaacacacactgaactaaaaaacatcaaaagagacatggctgagcaaaccttcatcatgatcaagcctgatggcgtccaaagaggccttattggcgagatcattagcagatttgagaagaaaggtttctacttgaaaggtttgaaacttgttactgtggaccgtccttttgctgagaagcactatgctgatttgtctgccaagcctttctttagtggtttggtggattacattatctctggccctgttgttgccatgatctgggagggcaagaatgttgttacaactggccgaaagattatcggagccacaaacccagctcaatctgagcctggaactatccgtggtgactttgccattgacattggaaggaatgttatccattggaagtgatgcagttgaaagtgct

SEQ ID NO: 254273 - DNA, 405 bp, Glycine max
ctctcactcacatacacacactgaactaaaaaacaggaaaagagacatggctgagcaaaccttcatcatgatcaagcctgatggcgtccaaagaggccttattggcgagatcattaacagatttgacaagaaaggtttctacttgaaaggtttgaaacttgttactgtggaccgtccttttgctgagaagcactatgctgatttgtctgccaagcctttctttagtggtttggtggattacattatctctggccctgttgttgccatgatctgggagggcaagaatgttgttacaactggccgaaagattatcggagccacaaacccagctcaatctgagcctggaactatccgtggtgactgtgccattgacattggaaggaatgttatccatggaagcgatgc

SEQ ID NO: 254274 - DNA, 418 bp, Glycine max
ctctaagccactaaccctcgctggtctgaaaggcagtaaaagagacactgctgagcaagccttcatcatgatcaagcctgatggcgtccaaagaggccttattggcgagatcattagcagatttgacaagaaaggtttctacttgaaaggtttgaaacttgttactgtggaccgtccttttgctgagaagcactatgctgatttgtctgccaagcctttctttactggtttggtggattacattatctctggccctgttgttgccatgatctggcagggcaagaatgttgttacaactggcctaaagattatcggagccacaaacccagctcaatctgagcctggaactatccgtggtgactttgccattgacattggaaggaatgttatccatggaagtgatgcaattgaaagtgct

SEQ ID NO: 254275 - DNA, 413 bp, Glycine max
catggcttcctcgtgtgcttcctctgccattgcaggtgttggcatctccacaccaagttcccagaagaatggatcactcttgggaagcacaaaagcttcttttcttagtgggaggaaactgaaggtgaacaactttacagcaccagttggagcacgatccagcactacagtttgcgcagttgctgagcctgataggcctctgtggttcccaggcagcacccctcctccatggctagatggcagtttgccaggagattttggctttgatcctctaggtcttgcatctgatcctgagagcctgagatggaatgtccaagcagagcttgtgcactgcagatgggccatgttgggagctgctggcattttcatcccagaattcctcacaaagattggtatcctgaacaccccttcat

SEQ ID NO: 254276 - DNA, 259 bp, Glycine max
caaagggactcgttgttcttctcccaggttattcagaaaagcagagtggtgaagatttgctgcattggtgctggatatgtggggagtcctactatggcagtcattgcacttaagtgcccatccatcgaagacgcatgtggtgatatctataaatcccagattgcaaactggaacagtgaccagatttgtatctatgaacctggccttgaaggtgttgtgaaggaatgccaagtcaagaacctctttttcatcactgatg

SEQ ID NO: 254277 - DNA, 308 bp, Glycine max
ggattccaattccacattttcaagaaataaggaggcataaatgttgatatatgaattggaattatttgttttctcattaggcctatcctgaagccaaaggaaatgagatcggaattcctcggggaattccaattccacattttcaagaaataaggaggcacaaatgttcatatatgaattggaattatttgttgtcttattatgcctatcctgaagccaaaagacatgatatcggaattactcggcgaattccaattccacattttcaagagataaggaggcaaaaatggccatatttgaataggaat

SEQ ID NO: 254278 - DNA, 308 bp, Glycine max
cagaaatagatagagaacttcaagtgaggctgagggtgacaggtatctagagagagcactagtactctaaaagtctattatattcttcaaaatatgaccatgcatcgcgagtcttgggcttttgtcttcggcgttatgggcaacatcatctcctttggagtgttccttgctccattgccaaccttttaccaaatctacaagaagaaatccactgaaggtttccagtcacttccttatgttgttgcactgttcagtgcaatgctttggatttactatgctttcgtgaaaaggtaaactgccctccttct

SEQ ID NO: 254279 - DNA, 406 bp, Glycine max
ctcgagccgtgctgccaaagtgacaggcatgcttcttgagagggaccagactgaagttctgcatttgcttgagtcgccagaagccctgaaagcaaaggtggctgaggcaatggacgtcctaaggaatgttgctcagcagcaggctggcggtactgctgatcagctggcttccttatctcttaatgacaaccttgcttcttaaggtttatatcttggagtttactgaccgatgatgaattgttacactgtgcactggcttggatacagattacatgtcgagcgtgaaaagggaaacttgaatgcttctcattaccattaacacatttggaattgttgtggagtcaattgacctctctatctctctaattcatgccccatggaagccaacgcttacaaccatgaagct

SEQ ID NO: 254280 - DNA, 414 bp, Glycine max
aaaatgagaaggatcaagatacctgtaccaccagctgatgaaagaaaaaaggtaattgaagatgttgacaaagatcggagatatgccattgatgcagcaattgtgcgcattatgaagagtaggaaaattttgggtcatcaacaactagttttggagtgtgttgagcagttgggccgcatgttcaagcctgatatcaaagcaatcaagaagaggatcgaagatctcatcactcgggactacctggaaagggacaaagataacccaaacaccttcaggtatctggcataaatggaagttactaatgtatagagtggccagtgttatggcctgcaaaaagcactggggtttgcctgaatttaatttctagggaagtacagttgaaaatgcttaaagttacacaattctgtaaatgat

SEQ ID NO: 254281 - DNA, 317 bp, Glycine max
gctaatctcatgaaattgctcctaccaagactaggattagcgccataccttcctccagttgaggagggtgcatattctgcgtcgaagagagcatttgaggccttgaacactcatcttgcctccaatacttaccttgttggccattctgttacccttgctgacatcatatcaacatgctacttgtatttaggattcatccatctcttagttaagagcttcacctctgagttccctcacgttgtacgatacttttggaccttggtcaaccagccttacttcagaaagattctaggccatggtaagctatctgaggctgt

SEQ ID NO: 254282 - DNA, 414 bp, Glycine max
aggagcacatgattatgcttgtctgattgtgaaaggtcctagctaccagttttcacaagctttaacagaaccaaaggtggcttgattcaattaaaccatggtaggcctcagcctctccaatatgtggtcaatgcggcctttttggctgccctatatagtgattatcttgatgctgctgatacacctggatggtattgtggacctaatttcttttcaaccgacgtgctccgtagctttgccaagtcccagattgattacatccttggaaataacccaaggaaaatgagttatgtcgtaggttttggtaatcattacccaaaacacgtccaccatagaggagcatctgtaccgaagaacaagatcaagtatagctgtaaaggtggatggaaatggaaggacacttctaagccaaac

SEQ ID NO: 254283 - DNA, 311 bp, Glycine max
tggttatctagctccagagtatatgcaaagtggcagagcaactgagaagtctgatgtgtatagctttggtgtgttgacactcgaagtgctgagtggaaagcgaccaacagacgcagcattcattgaaaagggcctcaatattgttggttggttgaattttctaattacagaaaataggccgagggaaattgtcgaccctctatgtgaaggggtgcaaatggagagccttgatgccttgctctctgtggctattcagagtgtatcctcaagtccagatgatcgacccactatgcaccgagtggtgcaattgc

SEQ ID NO: 254284 - DNA, 341 bp, Glycine max
tccctcgttgaaatgaaaatgggttcttctttgtggactttgtgtctaattttggcttcactagcctcttctgcattctgtgcctttccacggatgccagtggatgttccattcggcagaaactacgttcccacttgggcttttgatcacatcaaatacttcaatggaggttctgagattcaacttcatcttgacaagtacactggtactggcttccagtccaaagggtcatacttgtttggtcacttcagcatgaacataaagatggttcctggcgattcagctggcacagtcactgctttttatttatcttctcaaaatgcggatcacgatgagataga

SEQ ID NO: 254285 - DNA, 256 bp, Glycine max
  unsure (1)..(256): unsure at all n locations
ggatgtcagactagaaatggggttagaggaaaatatttgcacgctggaggctcacgagatcattgctcgcccttcacgtgctgacttctacaacccaaaagctggtcgcattagcaccctcaacagtctcacccttccagcccttcgncaattcggactcagtgcccaatatgttgtcctctacaggaatggaatttactctccacattggaacttgaacgcgaacagtgtgatctatgtgactcgagggaaagga

SEQ ID NO: 254286 - DNA, 166 bp, Glycine max
ggcggtggtcatccatttagggccaatgctctggcttaccttgccaggttttgcagaaacctgaaagtcctaaatctttggggatgtgttaaagctgcttccgatactgctttacaggcttttggacaatactgcattcagctacaatctttgaaccttggatggt

SEQ ID NO: 254287 - DNA, 282 bp, Glycine max
gacatttcagtgatagagatatagtcaaggcatgcgtttgatgaggtctaccttggccaaatggataatccaaattggactacagattcaaaggcattggaagctttcaaaaagtttggaaacaaactggcagatattgagggaaaaatcacacataggatcaatgatccaagtctgataagccgacatgggccagttcagcttccatactcattgctccatcgttcaagtgaggaagggatgtggttcaaagggattcccaacagtatcttcatctaaaat

SEQ ID NO: 254288 - DNA, 544 bp, Glycine max
ggtaggggtgggtgagaggggaggaacgtgggtctgtaattgtggggagggtgggagatgagtatactcggagagacttgcttgcatgcctgcacgtcgactctagaggatcccctcggggaattccaattccacattttcaagaaataaggaggcaaagatgttgatatatgaattggaattatttgttttcttattaggcctatcctgaagccaaaggaaatgagatcggaattcctcggggaattccaattccacattttcaagaaataaggaggcaaaaatgttcatatatgaattggaattatttgttttcttattaggcctatcctgaagccaaaggaaatgagatcggaattcctcggggaattccaattccacattttcaagaaataaggaggcaaaaatgttcatatatgaattggaattatttgttttcttattaggcctatcctgaagccaaaggaaatgagatcggaattcctcggaggtaccgagctcgaattccctatagtgagtcgtattaaattcgtaatcatgtcat

SEQ ID NO: 254289 - DNA, 97 bp, Glycine max
ggtataaattgtgggaactggggagggtttatgttctatgttgttttgtactccaatcttttatgaatgtactggggaaacttgttttgtttgatta

SEQ ID NO: 254290 - DNA, 332 bp, Glycine max
gggaagggaactttgccctaagcacactttactatggtgagtacaacaacaatggggctggttctagcaccactgctagggttaattggcctggccgcaaagtcatcaatagggatgaggctaccaggtacacggttgatgctttcttgcaagggacatggatcaatggcacaggtgtaccagctcaactaggcctgtacagttaaaaggctctaattaacatcatcatgtttaataaatatgtataccagttgagttgaatgctccatctaatttaatgtattctaatgttatttatttgaaagggattaataatactattatttatgatt

SEQ ID NO: 254291 - DNA, 311 bp, Glycine max
agctgctgttcctgcgcgtgaacaagcctcatgttagccatagccatggttaagcataacaatgttatccccaacggacacttccgtaagcactggcagatctatgtgaagacctggttcaatcagccagcacggaagacaagaatacggttgtctcgtcagaagaaagctgtgaagatcttccccaaacctacatctggacctattagacccattgtacatggtcaaactttgaaatacaacatgaaagtgagagctggaaggggattttcccttgaagaactcaaggcagctgggattcccaaaaagct

SEQ ID NO: 254292 - DNA, 342 bp, Glycine max
ggcaacctcatctttgtcttcaattttcattggaacatcagctattcagattacagagttggctgttcaacccctgggaaatataagattgtcttggattcagatgatgccttgttcggtggcttcagtcggctcaatcacactgctgagtacttcacctcagaaggatggtatgatgaccgacctcgatcctttcttatctatgcaccttctagaacagcagtggtttatgcccttgcagatgatgttgaacctaccctagcagatgaagctgaacctgccctaacagatgaagctgaaccagatccagttgatccttgatgacaattttctgggatgctg

SEQ ID NO: 254293 - DNA, 413 bp, Glycine max
agagttggttctttctttccccaatttgtgagtgttactattgaatcgattggattgacatggcgagcgcgatggttgaggacgccaacttcgaagatgaccagctcgccaatatgaccaccgacgacgtcgtcagagcttctcgtcttctcgacaacgagattcgcatcctcaaagaagagttgcagaggaccaatttggagttggaatcgtacaaggacaagatcaaggagaatcaggagaagattaagctcaataagcagttgccctacctcgttgggaacatcgttgagatattggaaatgaacccagaagacgaagctgaagaagatggtgccaatattgatcttgactcacaaaggaagggaaagtgtgttgtgctaaagacttctactcgacagacaatctttcta

SEQ ID NO: 254294 - DNA, 368 bp, Glycine max
tgatgaggaggattcctttgaggaagtttctttgagtgcagcggtcagtggtgttgagggtttggactatatggaaagaattcctcttgccacatctgagggttttccccatgtgctttcacgcaaaaatggtgaaaaaggcaaaaggagatttgtttctggggatggtgaagagatgacattgattccgggaaccagtgttgaagaggcttacaataagctaatagttgaacttgagaaaagtgttcctacattggttggcattgaatgtcccaaggatgagaaacttcctcgtcgcaaaatttttgacaaacctaagacgcgctgcttcactattctccctattgagtttaatcttgtggttcgtc

SEQ ID NO: 254295 - DNA, 305 bp, Glycine max
gtataccttaataaataatttaagatactatgatgagagcgcggttcccattactgttgctgggacttgttttcctggcttcagtttctgtctcatttggcattgcttactgggaaaaagagaaccccaaacacaacaagtgtctccagagttgcaatagcgagagagactcgtacaggaaccaagcatgccacgctcgttgcaacctccttaaggtggagaaagaagaatgtgaagaaggtgaaattccacgaccacgaccacgaccacaacacccggagagggaacctcaacaacccggtgag

SEQ ID NO: 254296 - DNA, 353 bp, Glycine max
  unsure (1)..(353): unsure at all n locations
ggctcgaggacgtttggtattgcttcatggagcctgccatgnnggttggttttagtacaaggtggctgctttnttgaaatccaatggacaccaagtcacatctctagacatggctgcatcaggcatccatccaaagcaggtacacgacctcaattcaatttcagaatattttgagccattaatgtactttctagggtctttgccaacagaggagcgtgtaatccttgtgggtcacagctttggtggggcatgcatatctgtagctatcgaaatgctccctaccaagattgctgctgcggtatttgttgccgcttggatgccttctcctgacctaagcttttccactctccttc

SEQ ID NO: 254297 - DNA, 388 bp, Glycine max
ctccaactccattgttggaatctggtttgcaaaaagacggagggttaattgtggaatattttggaaggatgtcttacgttgctcataacgttaatcagccccaagagaaagatttgttggagggaaatttttcctttgatattaaatctcgctctagattggaaaaagtttcctctacaaaagcacaatttgttagtggaaaaaccttcaaatatgatataattggtgctggttcacattcttcagatgattttcctgaaaaggaagatcaagaaaaacccaaaaagattgatgccagattgagacaaagaatagatcctcaatacaatgaggttcaggctcaaatggaaaccaaattgtttaaattgtctcttgatgatgttgaaac

SEQ ID NO: 254298 - DNA, 331 bp, Glycine max
accactactactcactcactgcagatctcaattgcatcggggtgcatggctaccatcgttagcatcaaggcccgccagatcttcgacagtcgtggcaatccaactgtcgaggtggatatgacttgctactatggtacttttaccagatctgctgttccaagtggtgcatccactgggatttatgaggcccttgaattgagagatggaggatctgactaccttggaaaggctgtatcaaacgctcgtgacaatgtgaacaccgacattggccctgctttgattggcaaggacccaactgagcagactgctattgacaacttaatggatcaac

SEQ ID NO: 254299 - DNA, 386 bp, Glycine max
cgaaaaagatttcttgttcttattagaagatcgtgattggatgccggtatgtttggtaaaaagaaagaaaaatattcttctttgagaataataaaaaaggaaagtgttcaattggaacatgaaaacgtgacagaattggtcctagttactcttcggaacggaatagaagaaggggagagattctcgaaccgaactaggaaacggatccaatgacttcaaaagaattgaacgaggagccatatgaagtgaaaatctcatgtacggttctgtagagtggcagtaagggtgacttatctgtcaacttttccactattacacccaaaaaaccaaactctgctttacgtaaagttgccagagtacgcttaacctctggatttgaaattact

SEQ ID NO: 254300 - DNA, 498 bp, Glycine max
  unsure (1)..(498): unsure at all n locations
agcggttttnaaactgnngagnntctnaaaanntnaanccgcggggacgtagaagaaccctcngaaatccaatcccattttaaaaataaggaggcaaaaagttcatgtntaattgaattattgtttcttattaggcctatcctgaagccaaaggaatgagatcggaattcctcgtgaatccaattccacatttaagaaataggaggcaaaaatgttcatatatgaattgaattatttgttttcttattaggcctatcctgaagccaaaggaaatgagatcggaattcctcggggaattccaattccacattttcaagaaataaggaggcaaaaatgttcatatatgaattggaattatttgttttcttattaggcctatcctgaagccaaaggaaatgagatcggaattcctcggnggtaccgagctcgaattccctataatgagtcgtattaaattcgtaatcatgtcatagcttgttcctgtgtgaaattggtaac

SEQ ID NO: 254301 - DNA, 348 bp, Glycine max
gtgagaaacaaagaaaggaaataattgatctttgaaaatgcggggaggaaagaaagctggagagtccatcaaggaaacagctgcaaacattggtgcttctgccaaggctggcatggagaaaaccaaggccactgtccaggacaaggcagaaagaatgacggcacgtgatccgatgcaaaaggagttggcaacccagaagaaagaggcaaagatgagccaagcagagctggacaagcaagcggcgcgtcaacataacacggcagcgaatcaggctgccactgcagggcacatgggacaacccatggggacccatcagacgtcagctatgcccggtcatggaacccgaca

SEQ ID NO: 254302 - DNA, 321 bp, Glycine max
ggagtttccaaggctagtaagggtgagagctcaggcttcgggggataacaaagacaactctgtggaagtacaacatgttaacaagggtgaccatggaaccgcggttgagaagaagccacgcagaacttccatggacatttcaccatttggtctcttggacccgtggtcacccatgaggagcatgcgccagattttggacacgatggaccgaattttcgaagataccatgacattcccaggaagaaacgtgggaacaggggagatccttgccccttgggacatcaaagatgaagaacatgaaatcagaatgaggtttgacat

SEQ ID NO: 254303 - DNA, 387 bp, Glycine max
  unsure (1)..(387): unsure at all n locations
caacaatgaagacactcctgttgttgccgtttctattatggacaccaacagcttggagaaccagctcgaccagatgcctaggagattctatcttgctgggaaccaagagcaagagtttctaaaatatcagcaagagcaaggaggtcatcaaagccagaaaggaaagcatcagcaagaagaagaaaacgaaggaggcagcatattgagtggcttcaccctggaattcttggaacatgcattcagcgtggacaagcagatagcgaanaacctacaatgagagaacgaaagggaagacaagggagccattgtgacagtgaaaggaggtctgagcgtgataaaaccacccacggacgagcagcaacaaagacctcaggaagaggaagaaga

SEQ ID NO: 254304 - DNA, 377 bp, Glycine max
gctgaactcatgaccaagattgacaggcgatccggcaaatgtcgtgataaggagcccaagtttttgaagaacggtgatgctggttttgttaagatgattccaaccaaacccatggttgttgaaactttctccgagtatcctccacttggtaggtttgctgttagggacatgcgtcaaactgttgctgtgggagtcatcaagaacgttgagaagaaggatcctaccggagccaaggtcaccaaggctgcccagaagaagaagtgaatcgtgcgggctggttcatcaggggatgttggttacaataaatgttggtttcttttctgtactcttgtgtcttcttttctagggagcttgtttttccgacaaaagttgaagtc

SEQ ID NO: 254305 - DNA, 372 bp, Glycine max
  unsure (1)..(372): unsure at all n locations
tcggggaattccaattccacattttcaagaaataaggaggcaaaaatgttcggtgtgaattggaattatttgttttcttattaggcctatcctgaagccaaaggaaatgagatcggaattcctcggggaattccaattccacattttcaagaaataaggaggcaaaaatgttcatatatgaattggaattatttgttttcttattaggcctatcctgaagccaaaggaaatgagatcggaattcctcggngaattccaattccacattttcaagaaataaggaggcaaaaatgttcatatatgaatnggaaattattgttttcttattangcctatcctgaagccaaaggaaatgagatcggaattcctcgg

SEQ ID NO: 254306 - DNA, 370 bp, Glycine max
cacaaaaggatattgatgtcagcccaatctctcgccgtttaggtgtaactgtgctcattggtgctgctgctgttggctccaaagtccaacctgctgatgcagcctatggtgaagctgccaatgtgtttggaaagccaaagacagacacagatttcctgccatacaatggagatggattcaaactatctattccctcaaagtggaacccaagcaaagaagttgagtacacgggtcaggttgttagatatgaagataactttgactcaaccaccaacgtggttgtcaccatcactccaactgataagaagtccatcactgactatggttcacccgaagagttcctctctaaggtggattatttactaggaaa

SEQ ID NO: 254307 - DNA, 322 bp, Glycine max
tttgagtatgtgtcattcaagaccaatgatagaccctcgatgggagaccttgcaggggcaaactcattgttgaacgcattgccagaggaagtgattcagcacacttttaacctaaagagccagcaggccaggcaggtgaagaacaacaaccctttcagcttcctggttccacctcaggagtctcagaggagagctgtggcttagagagccctttttgcatgtgctaccacacttttgtccttttgggctctagctagtgctggtagcagtaaataagaatgaataaaagaaacaaaagcttagatgccctttgttaagtgta

SEQ ID NO: 254308 - DNA, 306 bp, Glycine max
gagtttctgatgatgaattcaataactataagcttgtgttcgctccacagcaagctgaggatgacaaatgtggggatattgggattagtattgatcatgatgatggaaccaggcgtttggtggtgtctaagaacaaaccgttagtggttcagtttcaaaaacttgataaagaatcactggccaagaaaaatcatggcctttctcgcagtgagtgagacacatgtgtgagagtactaaataaatgctttggttgcacgaaatcattacactaaataaaataatcaaagcttatatatggccttccgc

SEQ ID NO: 254309 - DNA, 396 bp, Glycine max
  unsure (1)..(396): unsure at all n locations
cggggctacccgctgagtttaagcatatcaataagcggaggagaagaaactaacaaggattcccttagtaacggcgagcgaaccgggaaaagcccaccatgaaaatcggtcgccctcggcgtccgaattgtagtctggagaagcgtcctcagtggcggaccgggcccaagtcccctggaagggggcgccagagagggtgagagccccgtcgtgcccggaccctgtcgcaccacgaggcgctgtcggcgagtcgggttgtttgggaatgcagccccaatcgggcggtaaattccgtccaaagctaaatactggcgagagaccgatagcgaacaagtaccgcgagggaaagatgaaaaagactttgaaaagagagtcaaagagnagaaaaatggaaaa

SEQ ID NO: 254310 - DNA, 331 bp, Glycine max
cggtactgccttttttacctagttaaacaacgccgaccgagccgcttacaaccttcaatctggcgatgccttaagagtccctgcaggaaccacatactatgtgcttaaccctgacaactactagaatctcataatgatcacactcgtcatacccgttaacaaacccggttgatttgagagtttcttcctatctagcactcaagctcaacagtcctacttgcaagggttcagcaagaatattctagaggcctcatacgacaccaaattccaggagataaacaaggttctgtttggtaaataggaagggcagcaacaatgggaggagaggctt

SEQ ID NO: 254311 - DNA, 377 bp, Glycine max
  unsure (1)..(377): unsure at all n locations
gttatgggtttccttgtgttgcttcttttctccctcttaggtgtncgcttctagttccagcatatcaactcatcgttccatattggaccttgacctaaccaagtttaccacacagaaacaggtgtcttcactgttccaactatggaagagtgagcatggacgtgtctaccataaccacgaagaagaggcaaagagacttgagattttcaagaataacttgaactatatcagggacatgaatgcaaacagaaaatcaccccattctcatcgtttaggattgaacaagtttgctgacatcactcctcaagagttcagcaaaaagtacttgcaagctcccaaggatgtgtcgcaacaaatcaaaatggccaacaagaaaa

SEQ ID NO: 254312 - DNA, 377 bp, Glycine max
cctgagatttattcaagtttcttgtttaggtgcatctcgtgtgtctccatctaggatgctcagaactaaatcagctgctgaggaaatgattttaagggaactacctgaggccacaatcttgaaacctgctgtaatgattggtacagaggatcggattttgaatccatgggctcattttgctaaaaagtatggctttcttccgttgtttggagatgggagcacaaagatccaacctgtttatgttattgatgttgctgctgcactcacttcactcttgaaggatgatggcactagcatgggaaaaatttatgaactgggtggtccagagatctttactgtgcatgaattggcagacgttatgtttgatacaattcgag

SEQ ID NO: 254313 - DNA, 343 bp, Glycine max
  unsure (1)..(343): unsure at all n locations
ctcagggatagcgaaaattcatgggagaagatgggagaagagggggatttggatccaaagaaacacgggtaatttattaggagtgtacagaatcagagacagagcaagcgttcttaagcgccatccttgagcaaccaattagtgtctccattgatgcaaaagattttcatttatacaccgggggaatttatgatggagaaaactgtacaagtccgtatgggattaatcactttgttttacttgtgggttatggttcagcggatggtgtagattactggatagcgaanaattcatggggagaagattggggagaagatggttacattttggatccaaagaaaca

SEQ ID NO: 254314 - DNA, 336 bp, Glycine max
taaaattcttccaccaagttatgggtttccttgggttgcttcgttgctccctcttaggtctctcttctagttccagcatatcaactcatcgttccatattggaccttgacctaaccaagtttaccacacagaaacaggtgtcttcactgttccaactatggaagagtgagcatggacgtgtctaccataaccacgaagaagaggcaaagagacttgagattttcaagaataacttgaactatatcagggacatgaatgcaaacagaaaatcaccccattctcatcgtttaggattgaacaagtttgctgacatcactcctcaagagttcagcaaaa

SEQ ID NO: 254315 - DNA, 372 bp, Glycine max
caaaacagtaaagctaacttcaacacctttaattttctggaaggaattcagcggctgaataccaagcggagaagatgagtcaggagcagccacggcgtcccaaaggccaaaaccccatcaaatacggcgacgtttttgtcgtctccggcgaccttgcacagaagcccgtcgcaccggaagatgctgccatgatgcaaagcgcggaaactcgagtgctcggacaaacccaacccggcggagcagcttccgtcatgcaatctgccgccaccaggaatgaacaggctggccttgtcggtcaccgggacgtcaccgacgttaccggcgaccgtggcgtcacagtcacagaaactaaagtccctggaagacgcatta

SEQ ID NO: 254316 - DNA, 365 bp, Glycine max
taaaattcttccaccaagttatgggtttccttgtgttgcttctgttgtccctcttaggtctctcttctagttccagcatatcaactcatcgttccatattggaccttgacctaaccaagtttaccacacagaaacaggtgtcttcactgttccaactatggaagagtgagcatggacgtgtctaccataaccacgaagaagaggcaaagagacttgagattttcaagaataacttgaactatatcagggacatgaatgcaaacagaaaatcaccccattctcatcgtttaggattgaacaagtttgctgacatcactcctcaagagttcagcaaaaagtacttgcaagctcccaaagatgtgtcg

SEQ ID NO: 254317 - DNA, 311 bp, Glycine max
gttcaatatcctagtacaccgtattaaagaatttaagatgtacgtatgatgagagcgcggttcccattactgttgctgggagttgttttcctggcatcagtttctgtctcatttggcattgcgtattgggaaaagcagaaccccagtcacaacaagtgcctccgaagttgcaatagcgagaaagactcctacaggaaccaagcatgccacgctcgttgcaacctccttaaggtggaggaagaagaagaatgcgaagaaggtcaaattccacgaccacgaccacaacacccggagagggaacgtcagcaaca

SEQ ID NO: 254318 - DNA, 349 bp, Glycine max
ctcaccgattgctagaatggaatttcgatgctcagtcaggtcgtttaccattctcttctctcttgctcttgcaggagagagccatgtccatgcatcgctacctgaggaagattattgggaagctgtttggccaaacactcccattcccactgcactgcgagagcttctaaagcctctccctgcaggtgttgaaatcgatgaactccctaagcaaattgatgatacacagtacccaaaaacattcttctataaagaagaccttcatccaggcaaaacaatgaaagtacaattcaccaagcgtccctatgcacaaccttatggtgtatatacatggttaacggatattaaa

SEQ ID NO: 254319 - DNA, 260 bp, Glycine max
  unsure (1)..(260): unsure at all n locations
caaaacagtaaagctaacttcaacacctttaattttctagaaggaattcagcggctgaataccaagcggagaagatgagtcaggagcagccacggcgtcccaaaggccaaaaccccatcaaatacggcgacgtttttgtcgtctccggcgaccttgcacagaagcccgtcgcaccggaagatgctgccatgatgcaaagcgcggaaactcgagtgctcggacaaacccaacccggcggagcagcttncgtcatgcaatct

SEQ ID NO: 254320 - DNA, 366 bp, Glycine max
ccacaccctataaataaacactctttgtgtgtctgcattttgagtgattccctgattcttcatccatagacatggccaccgtcacttctgcagccgttgctattccctcattcactggcctcaaggcaagcgcaggcaaagtgagtgccgcagttaaagtctcagctccccaagccacaaggttgggcatcaaggcttcgctgaaagacgttggagtcgctgttgtggccactgccgcgagtgcagtgctggctagcaacgccatggccattgaagtgttgctgggtggtgatgacgggtctctggctttcgttcccaacaatttctccgtggcctctggggagaagatcgtgttcaagaacaacg

SEQ ID NO: 254321 - DNA, 347 bp, Glycine max
aggaaataattgatctttgaaaatgcagggaggaaagaaagctggagagtccatcaaggaaacagctgcaaacattggtgcttctgccaaggctggcatggagaaaaccaaggccactgtccaggagaaggcagaaagaatgacggcacgtgatccgatgcaaaaggagttggcaacccagaagaaagaggcaaagatgagccaggcagagctggacaagcaggcggcgcgtcagcataacacggcggcgaagcaggctgccacggcagggcacatgggacaacccatggggacccatcagacgtcagctatgcccggtcatggaacccgacagcccacgggccatg

SEQ ID NO: 254322 - DNA, 314 bp, Glycine max
tgatgacttgggctgtgaagttagcagcctcctgtgcagggtcagtcatcatgaaccaccctggtcagattggaaatggctatgcccctgtcctcgactgccacacttctcacattgctgtcaagtttgctgaactcatgaccaagattgacaggcgatccggcaaagagcttgagaaggagcccaagtttttgaagaacggtgatgctggttttgttaagatgattccaaccaaacccatggttggtgaaactttctccgagtatccttcacttggtaggtttgctggtagggacatgcgtcaaactgttgct

SEQ ID NO: 254323 - DNA, 333 bp, Glycine max
ctcgagccgaatcggctcgaggattgggagagttggaagactcggctcctttcagcttgcccttcatgtttgctttcctatcacttcaatcagcactccactagtccttcaccgtctccgatttacctgttgaaggcttggcgtgttgatcaaaaaggattgctacatgatattaatgaaatcctgtgcaaccttgaacttattattcagagagtcaaagcgatgccaaccccatatggaagggtgttagacatgttctttatcactgatgggatggaattgcttcacaccaaacagaggccagattatcgttgtgaatatctgattgatgct

SEQ ID NO: 254324 - DNA, 396 bp, Glycine max
accttacgcattccatttctctctattcgctctctttcaatcacaacaacatggccgaacgtggaggcggagaccgtgccggtttcggtcgcggctttggcggtcgtggacgcggcggcgacaggggacgagggcggcgcagggcaggagggcgccgcgacgaggaggagaagtgggtcccagtgacgaagctggggcgcctggtgaaggaggggaaaattcggagcctggagcagatctacctacactcgctcccaatcaaggagcaccaaatcattgacaccctcgtggggcccaccctgaaggacgaggtgatgaagatcatgcccgtccagaagcagacccgcgccggtcagcgaacccgcttcaagggcttcgtggtggtcggcgacaaca

SEQ ID NO: 254325 - DNA, 350 bp, Glycine max
  unsure (1)..(350): unsure at all n locations
tcggtgaattccaattccacattttcaagagatatggaggcanaaatgttcaggtatgaatcggaatctattgtcctcttattatgcctatcctgaagccaaaggaaatgagatcggtacttctcggagaattccaattccacattctcaagatataaggaggcatacatgttcatatatgaatgggaattacttgtatcattattaagcctatcctgaagccaaatgaaatgagatcggaattcctcggagaattccaattccacattctcaagaaataacgaggcagatatgttcatatatgaattggaattattagttaacttattaagcctatcctggaacccaaa

SEQ ID NO: 254326 - DNA, 261 bp, Glycine max
tccattgaacatggcaagtttagaggaaaagggaatccactttgattcccagatcatgatgtgctcttcaaatttttggaaaccttctactgaagcccaaattagagatgacatggcttttaaaaaatagaagacatgttttagataacagttgaacctaaaacctggagtggaatatgatgagagcgattttaaccaaataaaaataaaaaaaaggccggcgccgaattagtgagctcgtcaacccggaaattaattccg

SEQ ID NO: 254327 - DNA, 130 bp, Glycine max
caataattccttcacttgcagaacttagctctctgggtccatgagaataacttgattagtgttagccctaaaatttacctttaaaccttaccacagtgccaccacacattgtacaaatgcacacacacaa

SEQ ID NO: 254328 - DNA, 414 bp, Glycine max
ctccccgcccaaaccctaactacctaccctattcggctttctcgcatccatcatgaaaggaggaaagttcaagaccgaatctaagagagcccatgccaaacttgctgtgaataagaagggcgccgtcaccaagactaggaaaccccccggaaaggggaaggcatcgaaagatcctaacaagccaaagaggcctccaagtgctttcttcgttttcatggaggaattcaggaaggtgttcaacacggaacattcctacaacaaagcagcgtctgctgtgggcaaagctgctggagcataatggaagacgatgtctgatgctgaaaaagcaccttatgtggcaaagtctgagaaaaggaaagtggagtacgagaagaacatgatagcttataacacgaaacatgcggaaggtcctac

SEQ ID NO: 254329 - DNA, 238 bp, Glycine max
accaagttaatgttgcaatcgcattataataaccggccaaaggtgattgatagaaatttgcaagtttgaaaagaaacattgcatctcatccaccaaacaaggccgagcctgattaaaaggcaaggccaggagaaactggtgatccgggtgggacttgtggcgagaaccttgaaggttaacaacattttggtgaaagaaagaaccagggaaggaaaaccagggaagaaccaattgggac

SEQ ID NO: 254330 - DNA, 296 bp, Glycine max
cctcgtgacacttcttacctccctcttctgattatcttctacttacatcatctgcactcatctctccctatcggaccctgacctaaccaactttaccacacaacaacaatcgtattcactactccaaccatagcacagtcatcatctacatgtctaccattaccacaaagaagaggcttcgacacttgcaaatttcacgcataacttgaactatcttatgtacaagaactcatactgaaaatcaccccattcatcatcgttactatctaacaatatcactgacatgactcctcaac

SEQ ID NO: 254331 - DNA, 406 bp, Glycine max
  unsure (1)..(406): unsure at all n locations
caattttggttaagagtcttgaaaaagcaagagaaaaaaaaatggcaaccatggcaaccatttctgatcaacctagagggtcctactcctatggaacctcatatggagcaccctatggaaccacgtatgagaccaacaccagcattaacaacccaccttcacgccaaacagtgaagttcataactgctgccactattggcatcacacttttgctcctgtctgggttgaccctcacaggcactgtcataggtttgatcattgcaaccnctcttcttggtatcttcagccccatccttgtccctgctgcgtttgtgctggtcctagttgcttctggctttttgttctctgggggctgtggtgtggctgccattgctgctttgncttggattacaactatgggtctggg

SEQ ID NO: 254332 - DNA, 250 bp, Glycine max
  unsure (1)..(250): unsure at all n locations
tgagagtgcggnttcctttgntggtgttgctgcgaaactgtttggctgcatgagtttgtgtctcattaaaggtgagagacgatgagtataaccatttctacttgagaagctctaacagcttccaaactctctttgagaaaccaaacggtcgcattcgactcctgcagagattcaacaaacgcttcccacaacttgagaaccttcgagactaccggattgttcagantcagtcaaaacccaacacaatcct

SEQ ID NO: 254333 - DNA, 432 bp, Glycine max
ctcgaacccgtccaaccgcttcagccccccacttccaaaaagaagcttcctgggacccaaacccaccaccacttttgccaggttttcaaaacccttccattattcaggtcccaaaggccaccaagattgccatttttaaaagccaacctgccaattttgcaaccccggtcaatccacttatggtaactatttaaccaacaaaagtggttgttgcttccatgattacccttattaaccaccatgatataactggtgccaatccagagaaaagacaccggtagacatcattttggtcgtggttacgacggtgacactaacaagcaacatgatgctactggtgtttatcccggaatagacattggtagagatcatgggactacccgtggttatggcctatacaccgacagacatcatggaactttctgggtgaat

SEQ ID NO: 254334 - DNA, 225 bp, Glycine max
gtttagcctttctatcacctgaaaatgtcttgctgcagtggtagactgcgttgccgaagcgcctgcacgtgctgtaacagctgcagaagctgctagatgtatccagacttgagcgacaccgagtctagcaccaccgagaccttgatcatcggagtggcaccagctaatgctgaatttgagagtgctgatataggcgttcccgctgagaacgattgctgcaaatgc

SEQ ID NO: 254335 - DNA, 366 bp, Glycine max
gtgaacaagtcctcaagtttccaccacctcatgtcattcaagtgagtaagtgtgcatggatgaccgatgaagaatttgcaagagagatggttgcgggtgtaaatccatgcgtaattcgtggtcttcaagagtttcctccaaaaagcaatctggatcctacaatctatggtgagcaaaccagtaagataacagcagatgcccttgatctagatggatacacagtggacgaggcactagcaagtcggaggttatttatgttagattaccatgatgtattcatgccatatataaggcggataaatcagacatatgccaaggcttatgcgacaaggactatcctttttctgagagaaaatggaaccttaa

SEQ ID NO: 254336 - DNA, 569 bp, Glycine max
  unsure (1)..(569): unsure at all n locations
ngatgtatattattgtgatgaatttttgtgtttttatctatgagaaggaaagataaaactatctaacatgtatgacaggtcgatcgtatagaggatcccctcggggaattccaattccacattttcaagaaataaggaggcaaaaatgttcatatatgaatgtggaattatttgttttcttattaggcctatcctgaagccaaaggaaatgagatcggaattcctcggggaattccaattccacattttcaagaaataaggaggcaaaaatgttcatatatgaattggaattatttgntttcttattaggcctatcctgaagccaaaggaaatgagatcggaattcctcggggaattccaattccacattttcaagaaataaggaggcaaaaatgttcatatatgaattggaattatttgttttcttattaggcctatcctgaagccaaaggaaatgagatcggaattcctcggnggtaccgagctcgaattccctatagtgagtcgtattaaattcgtaatcatgtcataactgatttctgtgtgaaattgttatccgctcacaattc

SEQ ID NO: 254337 - DNA, 308 bp, Glycine max
gcagaccgagctagctagctagcacgcaagcacagacatggaggcaaagcgaggccatgccctcatgtgcttggcacgtgtttcactcttcctgtgcgctctaaccctatccgctgctcacggaagcaccacggttcaagacatcgcgagaaagttgaaactcggggacaacgagcttctgcgcacggagaagaagttcaaggttttcatggagaattacgggaggagctactccacagaagatgagtatttgcgcctgttggggattttcgcccagaacatggtcaaagcggcagagcatcaggcgc

SEQ ID NO: 254338 - DNA, 299 bp, Glycine max
gcagaccgagctagctagctagcaagcaagcacagagatggagggaaagcgaggccatgccctcatgtgcttggcacgtgtttcactcttcctctgcgctctaaccctatccgctgctcacggaagcaccacggttcaagacatcgcgagaaagttgaaactcggggacaacgagcttctgcgcacggagaagaagttcaaggttttcatggagaattacgggaggagctactccacagaggaggagtatttgcgccgtttggggattttcgcccagaacatggtcagagcggcggagc

SEQ ID NO: 254339 - DNA, 343 bp, Glycine max
  unsure (1)..(343): unsure at all n locations
ccaaaacagtaaagctaacttcaacacctttaattttctaaaagtgattcagcggctgaataccaagcggagaagatgagtcaggagcagccacggcgtcccaaaggccaaaaccccatcaaatacggcgacgtttttgtcgtctccggcgaccttgcacagaagcccgtcgcaccggaagatgctgccatgatgcaaagcgcggaaactcgagtgctcggacaaacccaacccggcggagcagcttccgtcatgcaatctgccgncaccaggaatgaacaggctggccttgtcggtcacccggacgtcaccgacgttaccggcgaccgtggcgtcacagtca

SEQ ID NO: 254340 - DNA, 370 bp, Glycine max
atttggaaatttggctgatgacaccatcaattttgaggctttggcccacaagctggtgcagtttggagagattcaggtaaaagttgtattgaaattttcacaagacgaatttcttacagcttggtcaactcacgtgcgtcctgctacaactctgttggctgatgggtgtccatatgtgtatgctatggtgcatgatagttcagtgtctacaataccaggtgattttgtcattggtgttaagttgacaaccatgaacaatatgtgtgcatatgggctcaatcccgggaagtcacgttcctggctttgggcaccattcctaagtctatttcacagcatactgtttggaatcaaatggcaacagtgagaacac

SEQ ID NO: 254341 - DNA, 193 bp, Glycine max
cttctaaatggtttggtgaaaattagaaaaatggtcccgcctggttcacactttgaagccaagggttcccaactattatattccgggattaaggttattggcttgcttggccaacggaccaaatttggggaccttgaacccttgaggaaattaaggaaggaattattgacccattgggatggacttttgacaa

SEQ ID NO: 254342 - DNA, 571 bp, Glycine max
  unsure (1)..(571): unsure at all n locations
gggtggtgttagattttttgagccgatttttgtgtatgaaatctttagagaatctatgagagacacagcttgcatgcctgcaggtcgactctagaggatcccctcggggaattccaattccacattttcaagaaataaggaggcaaaaatgttcaggtatgaattggaattatttgttttcttattaggcctatcctgaagccaaaggaaatgagatcggaattcctcggggaattccaattccacattttcaagaaataaggaggcaaaaatgttcatatatgaattggaattatttgttttcttattaggcctatcctgaagccaaaggaaatgagatcggaattcctcggggaattccaattccacattttcaagaaataaggaggcaaaaatgttcatatatgaattggaattatttgttttcttattaggcctatcctgaagccaaaggaaatgagatcggaattcctcggnggtaccgagctcgaattccctatagtgagtcgtattaattcgtaatcatgtcaataacttgttcctgtgtaaaattgtatccgctcacaattcc

SEQ ID NO: 254343 - DNA, 296 bp, Glycine max
  unsure (1)..(296): unsure at all n locations
ttcaggtactgcgtttcggaagcagacacagatggctcgtacgaagcaaagcgctcgtaagtccacaggaggaaaggctcctaggaagcagcttgcaaccaaggctgcacgtaagtctgcaccaactactggtggtgtgaagaagccccaccgttatcgtcctggtaccgttgctcttcgtgagattaggaaataccagaagagtaccgagcttttgatccggaagctcccctttcagaagctggttcgtgaaattgctcangacttcaagactgatctgcgtttccagagccacg

SEQ ID NO: 254344 - DNA, 284 bp, Glycine max
ttcatgtactgcgtttcggaatcagacacagatttatcgtactgagcaaagcgctcataagttcacaggatgaaaggctcctacgaagcatcttgcaaccaaggctgcacgtaagtctgcaccaactactggtgttgtgaataagccccatcgtattcgtcctggtaccgttgctcttcgtgagattaggaaataccataagagtaccgagcttttgatccgtaagctccccttccacaggctgattcgtgaaattgctcatgacttcaagactgatctgcatt

SEQ ID NO: 254345 - DNA, 340 bp, Glycine max
gtccttaaacactcatcagtcatcaccatggccaagctagtttgttccctttgttttctgcttttcagtggctgctgcttcgctttcagttccagagagcagcctcagcaaaacgagtgccagatccaaaaactcaatgccctcaaaccggataaccgtatagagtcagaaggagggctcattgagacatggaaccctaacaacaagccattccagtgtgccggtgttgccctctctcgctgcaccctcaaccgcaacgcccttcgtagaccttcctacaccaacggtccccaggaaatctacatccaacaaggtaaggggatttttggcatgatatacc

SEQ ID NO: 254346 - DNA, 320 bp, Glycine max
cgctgctgccgaaacccttccggaaccctaaggtaagtgagtgatcagtggttgagaatggtggagaaggcgaagggtagaaaggaggaggtggttacacgtgagtacaccattaacctgcacaagcgcctccatggctgcacatttaagaagaaagctcctaaagctattaaggagataaggaaatttgcccaaaaagccatggggaccaatgatgtgagggtggatgtcaagttgaacaagtttgactggagccagggaatcaggagtgttccaaggaggattagagtaagaattgctcgcaagagaaatgatgatga

SEQ ID NO: 254347 - DNA, 350 bp, Glycine max
ggtgatgctgctcagaaaaccaaagactatgccagtgacactgcacagacatcaaaggactatgctggtgatgctgctcagaaatcaaagggctatgttggtgatgctgcacaaaagaccaaagaatatgttggtgatgcagcacagaagacaaaggattatgccactgacgcagcacagaagaccaaagattatgctactcagaagaccaaggactatgcaagtgatgcaactgatgctgcaaagaagactaaagattatgctgctcagaagactaaggactatgcaagtgaagctagtgatgttgcacagaacacataagattatgctgctcagaagaccaaggacta

SEQ ID NO: 254348 - DNA, 277 bp, Glycine max
gctaatgctgatcatataaccttagactatgatattatacatctggcacacggcattaatctatgctcatgatgctgatcagaaatcaaattgcttatcttgagatgctttacagattaccatactatatgttataagctgcatcatataagacatatgaatatgctaataactctgcacataatactaaacataatcctactcagtacaccatggactatctaagtaatgcatctaatgctactaattacactaaactcactgctccttataaaac

SEQ ID NO: 254349 - DNA, 419 bp, Glycine max
  unsure (1)..(419): unsure at all n locations
tcgaggaaattacactcttcacattgatgaaggaatggccattaaatgacctctctatgatgagcctgaccatatacctgtgcatactgaagataagatattttacactgaagacgatttccgtgattttctgacccgccggggttggatatgtctaagagaatttgacagctacagaaatattgacaacatggatgatcttcgacctggtgccatatatcgtggtgtgagttgaaagcaggtacatggtgtggtcaatgttcagctaccataaaatgtctggagaactgtggtggngactgttcagatctttgatgtatgtgcggcactaacctggaatngtatttgttttaagttttgataatgcttgttataagtttatataagaaaaggaactaggtcctttgcacaaattccgg

SEQ ID NO: 254350 - DNA, 286 bp, Glycine max
tgacaccaatagacatcatggaactaccggtgtctatggtatagacaccgataggcaacaacatgggactactggtggctatgccggtgacactggtaggcaacatgggaacatcggtggcccttactatggaaccaacaccgcagacaccggtactggtcccagaagtggaaccacgggcggcaccggttatggaggcactggtggcactgattatggaacaactggtggcactggttatggaaatggaactgggtatggagtcaacacttggggtgcgcacact

SEQ ID NO: 254351 - DNA, 387 bp, Glycine max
cccaattctaattctcttaatttcctttccccaaaaaacaaaggcaaaaacggaaacatggctctttctttcaattccctcacactctccccattattctcctcttcttccacttttgctcttcccaccaccgctgcttcaagagtacacgtgattctgcccccgaagcccttgaacggtgttcgattctccgcacccaaaaggaggactgacgcggtggtcgtctccgccgccgccgaggactcgatttcgccgccggttcctccggcggagagcgagaaagagaatgtttccgtggagaagcttccgttggagtcgaagttgaaggagagagaggagcagaagctgaggatgaagctggcgaaaaaaataaggttgagacggaaa

SEQ ID NO: 254352 - DNA, 307 bp, Glycine max
  unsure (1)..(307): unsure at all n locations
ttggtccttanacactcatcagtcatcaccatggccaagctagtgctttccctttgttttctgcttttcagtggctgctgcttcgctttcagttccagagagcaggctcagcaaaacgagtgccagatccaaaaactcaatgccctcaaaccggataaccgtatagagtcagaaggagggctcattgagacatggaaccctaacaacaagccattccagtgtgccggtgttgccctctctcgctgcaccctcaaccgcaacgcccttcgtagaccttcctacaccaacggtccccaggaaatctaca

SEQ ID NO: 254353 - DNA, 222 bp, Glycine max
atcctagtacaccgtattaaagaatttaagatatactatgatgggagcgcgggtcccattactgttgctgggagttgctatcctggcatcagtttctgactgatttggcattgcgtattgagaaaagcataaccccactcacaacaagtgcctacgaagttgcaatagccagaaagactcctacaggaaccaagcatgccacgctcgttgcaacctccttaa

SEQ ID NO: 254354 - DNA, 351 bp, Glycine max
acacaactacaagaaagaacttccttataaccaaaaccaacaacaactatggcaagttatcagaagcactacgatgatcagggtcgcaaggtcgacgagtatggcaatgttgagaggcaaactgacgaatatggcaacccggttcatgccactagtgtcacttatgtagccaccaaaagtgttggtggctacaatgatgacgctaataagcaacatgatattactggtgtctatcccgagaaagacaccggtagacatcattttggtcgtggttacgacggtgacactaacaagcaacatgatgctactggtgtttatcccggaatagacattggtagagatcatgggact

SEQ ID NO: 254355 - DNA, 286 bp, Glycine max
ctcaaaactcttgtctttcatcatgataattccgacactatggctgagcttcactaccaacaacaacaccaataccctcaccgataccctaatgatccatacgaacaacaaactagctactccactcaggtcgtcaaggcggccaccgtcgtcaccgaaggcggctccctcttgatcctcgcctagttgatccttgccggcaccatcatcgccctcaccatcgtcacaccaccgatcgtcatcttcagtccggttctcgtccccacggtgatcaccgtcgcgctgc

SEQ ID NO: 254356 - DNA, 374 bp, Glycine max
  unsure (1)..(374): unsure at all n locations
gcaccagtttcaccgcacgaatatcttgttgtttggagcgatcgcgagaaaagctctgtaaacatgttggtttaccaggacctccttacaggtgatgagcttctctctgactccttccgttacaaggaaattgagaatggaatgctgtgggaagttgaggggaagtgggttgttaaaggagcagttgatgtagacattggtgcaaacccttctgctgagggtggaggagaagatgagggagttgatgatgcacctgttaaggttgttgacattgttgacacattcagacttcaggagcaacccgcattcgataagaagcagtttgttaccttcatgaagaggtttatcaagaatttgactnccaagctcgatgc

SEQ ID NO: 254357 - DNA, 210 bp, Glycine max
ttagaattagaaacaaagaaccgaagaaagccaagaggacatcgatgacaacgcattacggaaagatagcggtatagtccattcaggaaacagctacaaacattgatgcttctgccaaggctggcatggacaagaccaaggccactgtccaagagaaggcagaaagaatgacagcacgtgatccggtgcaaaaggagttggcaacccaaa

SEQ ID NO: 254358 - DNA, 420 bp, Glycine max
  unsure (1)..(420): unsure at all n locations
caccgcattaaagaatttaagatatactatgatgagagcgcggtggccattactgttgctgggagttgttttcctggcatcagtttctgtctcatttggcattgcgtattgngaaaagcagaaccccagtcacaacaagtgcctccgaagttgcaatagcgagaaagactcctacaggaaccaagcatgccacgctcgttgcaacctccttaaggtggaggaagaagaagaatgcgaagaangtcaaattccacgaccacgaccacaacacccggagagggaacgtcagcaacacggtgagaaggaggaagacgaangtgagcagccacgtccattcccattcccacgcccacgccaacctcatcaagaggaagagcacgagcagaaggaggaacacgaatggcatcgcagggaggaaaa

SEQ ID NO: 254359 - DNA, 385 bp, Glycine max
  unsure (1)..(385): unsure at all n locations
agcacngttcccattactgttgctgggacttgttttcctggctggagtttctgtctcatttggcattgcttactgggaaaaagagaaccccaaacacaacaagtgtctccagagttgcaatagcgagagagactcgtacaggaaccaagcatgccacgctcgttgcaacctccttaaggtggagaaagaagaatgtgaagaaggtgaaattccacgaccacgaccacgaccacaacacccggagagggaacctcagcaacccggtgagaaggaggaagacgaagatgagcaaccacgtccaatcccattcccacgcccacaacctcgtcaagaagaagagcacgagcagagagaggaacaggaatggcctcgcaaggaggaaaaa

SEQ ID NO: 254360 - DNA, 545 bp, Glycine max
  unsure (1)..(545): unsure at all n locations
atgtgtcccccacctgncgacgatcnncgnagagacatctgcatgcctgcaggtcgactctagaggatcccctcggggaattccaattccacattttcaagaaataaggaggcaaaaatggtgatgatgaattggaattatttgttttcttattaggcctatcctgaagccaaaggaaatgagatcggaattcctcggggaattccaattccacattttcaagaaataaggaggcaaaaatgttcatatatgaattggaattatttgttttcttattaggcctatcctgaagccaaaggaaatgagatcggaattcctcggggaattccaattccacattttcaagaaataaggaggcaaaaatgttcatatatgaattggaattatttgttttcttattaagcctatcctgaagccaaaagaaatgagatcggaattcctcgggggtaccgagctcgaattccctatagtgagtcgtattaaattcgtaatcatgtcataacctgtttctgtgtgaaaattgtattcccttcacaattcacacn

SEQ ID NO: 254361 - DNA, 342 bp, Glycine max
caccgcattaaagaatttaacatatactatgatgagagcgcgggtgccattactgtagctgggagttgcaaacctaccctatgccaaatgtaaaaaaaccgaggtagaagaagaagaccctgagctcgtaacatgcaaacaccaatgccaacagccacagcaatacactgagggtgacaaagcggtatgcttgcaaagatgtgacaggtatcatcgtatgaagcaagagcgagagaaacaaatccaagaggaaactcgtgagaagaaagaggaggaaagccgtgaaagggaagaagaacaacaagagcaacatgaagaacaagatgaaaatccctacatttt

SEQ ID NO: 254362 - DNA, 494 bp, Glycine max
acaacgcacgcgcgcgtacgtctggacttaaagtccaggcctttacaacggcctttttgtggagataaacaaggttctctggggtgcagaggaggggcagcaacaagggcagtaaaggctgcaagagagtgtgattgtggaaatctcaaagaaacaaattcgggaactgagcaaacatgccaaatctagttcaaggaaaaccatttcttctgaagataaacctttcaacttgagaagccgcgaccccatctattccaacaagcttggcaagttgtttgagattaacccagagaaaaaccctcagcttcgggacttggatgtcttcctcagtgttgtggatatgaacgagggagctctttttctgccacacttcaattcaaaggccatagtggtactagtgattaatgaaggagaagcaaacattgaacttgttggcattaaagaacaacaacagaggcagcaacaggaagagcaaccttttgaagtgcggaaat

SEQ ID NO: 254363 - DNA, 428 bp, Glycine max
  unsure (1)..(428): unsure at all n locations
ttcactataacagtgctgttatagtgaaagatttaaatttnaagggaacgcatgttaatagtagagaagagggggaaccacggcaaattattaagattgaaggtcctatccacagctcaaatgtgatgctctactccaaagatcagaaggtagcaagccgtgtggggcataaagtccttgataatggtaaaaaagtccgctaccttataaaaactggtgaaataattgatagtgcacagaactggaagaaactgaaggaggctactaagcaaactgaagaagctactgctgctgctgcctagttttacctacgtaattcattcattcactactaatgtaactctagcagtacttgttgtgatctctcttccattttgttatctaatgtatatttttggtcttgctattgatctccatataatgaaacc

SEQ ID NO: 254364 - DNA, 363 bp, Glycine max
  unsure (1)..(363): unsure at all n locations
gtttnnatatattcatgaaaaagttgtattnaaattttcggaccggtatattttttacagcttggtcaactcaaatacntcctgcaacaactctgttggctgatgggtgcccatatttgtatgctatggtgcatgatagttcagtgtctacaataccacgtgattttgtcattggtgttaacttgacaaccataaacaatatgcgtgcatatggcctcaatcctgctatttcaggttctcgtcttttgggcaccattcctcagtccatttcacaccaaactgtttggaatcaaatggcaacagtgagaacaccatttaatctttattctaccacgcagagcttttctcaattctctattaatc

SEQ ID NO: 254365 - DNA, 450 bp, Glycine max
  unsure (1)..(450): unsure at all n locations
gaaaatttgaagagtttgtttattgtgaaaaaaagaaaaatgcaggcggcaaagaaagccatagagacctttaangaaaccgcagccaacattggcgcctctgccaagtctggcttggagaaaaccaaggccactatccaagagaagaatgagaagatgaatgcagaagatcaaactcaaatggatatggctaccaagaggaaagaagagaagatcaaccaggctgagatggagaagcagcaggcccgtaagtactacgccgctgcaaaacaatacgccatggctgagcacatggcaaagggcaaccacgacaccgccgggcctagaatcgagactgccacacacatcaccagtgggcccgggactgacaatgctatgtactctaacactgggcctgggactgagactgccacgtacaccactagtgggcttgggcatgacaatgctata

SEQ ID NO: 254366 - DNA, 190 bp, Glycine max
aagaatcaaagaaaggggtggtggctgcttcaaaagcttagtaagttttttatttccagaacatcatagttttcgcagcagcaaactaacaaattactcatatcatataataagatggcccgttctctctcgcaagccaaacgtattggtgtcctttgtgctcaatctatctccctaattcccgttcatc

SEQ ID NO: 254367 - DNA, 400 bp, Glycine max
  unsure (1)..(400): unsure at all n locations
actcnagcttcaaaacggtattacatactatatgtcaccaattataanagcagccgtctttttaataaaactagattcacctctaaaaaaaatatgccctctcactctattccaatcacccaattatctctataacacgattgcactattctttacatctccattacataccctttttatcgccaaacgctatcctttgagcattaactttggttcatttacacttataacgctgtgtgccaacattcctacttacttcgctattgtacaaatacattttctacaaacttttaaactttcttcacgcgatacaatataatctttctttaatattcaaatattttccccctaatacaatttctttaacctttatttcttttcacaacaacctttaaataac

SEQ ID NO: 254368 - DNA, 162 bp, Glycine max
  unsure (1)..(162): unsure at all n locations
aaaatatcagcagcagcagcaaggaggttcccaaagccagaaaggaaagcaacaagaagaagaaaacgaangaagcaacatattgagtggcttcgcccctgaattcttgaaaagaacgttcggcgtgaacatgcaaatagtgagaaacctacaaggtgagaa

SEQ ID NO: 254369 - DNA, 396 bp, Glycine max
gacgaaaacggcaccccaaaaccctcgtctcttgggcgcgccctggactggacccccatccacatttgggacaaagaaaccggtagcgttgccagcttcgccgcttccttcaacttcaccttctatgcccctgacacaaaaaggcttgcagatgggcttgccttctttctcgcaccaattgacactaagccacaaacacatgcaggttatcttggtcttttcaacgaaaacgagtctggtgatcaagtcgtcgctgttgagtttgacactttccggaactcttgggatccaccaaatccacacatcggaattaacgtcaattctatcagatccatcaaaacgacgtcttgtgatttggccaacaataaagtagccaaggttctcattacctatgat

SEQ ID NO: 254370 - DNA, 330 bp, Glycine max
tcggggaattgcaattccacattctcaagaaataaagaggcagaagcggtcatatgtgaacaggaattctaggttgacttattaggactatcctgaaaccaaacgaaatgagatcggaattcctgggggaaattcactgccccatttccaagaaatgacgcggcaaagctgttcatatatgaattggaattatttgaatccttattaggcctatcctggagccaagggaaatgagatcggaagtgcttatggaattacaattgcacattgtcaagaaataacgaagctaaaatgtgcatatatgaagtgggaatagttggtttcttatta

SEQ ID NO: 254371 - DNA, 298 bp, Glycine max
ccgtaatggaaggcctgatgctgaatatgttaaatggaggtggcggccaaatgggtgcataattccaagtttgaatgcaactgattttctggagaggttgcgtgggcagaggctagtttttgttggggattcactgaacaggaacatgtgggagtcacttgtatgcattctccgtcaaagcatcaataaaaagaaacgggtttttgaaatttctggaagaagggaatttaagaagaaaggtgtctatgcttttagatttgaggtgagttttctaatcacttctatgatgtttgtgtat

SEQ ID NO: 254372 - DNA, 367 bp, Glycine max
gaagggggtctttcttttccatgttgccaacttgctaataataagaggatcaagttgttttgttttgttgctttttgttcaagaaacgaggtcgcatgttcatgcacctggggaagaagagaaggtgatgtagcacagaatgccaaagattatgctcaaaagagcaaagattatgcgggtgatgctgtacagaatatcaaagattatgcaaatgatgcagcgcacaagagcaaagattatgctggtgatgcttctcacaagagcaaagaagcttctgattatgccagtgagacggctcagaagaccaaagactatgttggtgatgctgctcaaaaaagcaaagaggcttctgaatatgctaatgatg

SEQ ID NO: 254373 - DNA, 284 bp, Glycine max
ccgtaatggaaggcctgatgctgaatatgttaaatggaggtggcggccaaatgggtgcataattccaagtttgaatgcaactgattttctggagaggttgcgtgggcagaggctagtttttgttggggattcactgaacaggaacatgtgggagtcacttgtatgcattctccgtcaaagcatcaataaaaagaaacgggtttttgaaatttctggaagaagggaatttaagaagaaaggtgtctatgcttttagatttgaagtgagttttctaatcacttcta

SEQ ID NO: 254374 - DNA, 342 bp, Glycine max
ccgcagtgtatggactgatgctaaatatgttaaatggatgcggcggactgatggttacataattccaagatggaatgtaactgatgttctggagaggttgcgtgggcagaggctagtttttgttggggattcactgaacaggaacatgtgggagtcacttgtatgcattctccgtcaaagcatcaataaaaagaaacgggtttttgaaatttctggaagaagggaatttaagaagaaaggtgtctatgcttttagatttgaggtgagttttctaatcacttctatgatgtttgtgtatgtgtagtgtgaaaagtgaatcttgcatgggtatggggctgacta

SEQ ID NO: 254375 - DNA, 350 bp, Glycine max
tgggaatgcatcaatcaaaatgagtgattcgggcctcattggtacgggtgtgtgtaacaaacagcaacagtacagaccattttgatgcatgtaagtggacaaaatcagaaccacattcctgggaattgatcttcccaatagaggtatgtggtcctaataatggctttgaaatgtggagtcctgagtgggcaaatcaaacttcatgccatttgagtttccttaatgacaatcccaaacagtctacagtttttgatattatcttgcgaatctctcaacattttgaaattgctggtaatacttttatgccagctttttctgtttcacaagctacttgccaatattttgaaaat

SEQ ID NO: 254376 - DNA, 373 bp, Glycine max
  unsure (1)..(373): unsure at all n locations
gaaataattgatctttgaaaatgcanggaggaaagaaagctggagaggtccatcaaggaaacagctgcaaacattggtgcttctgccaaggctggcatggagaaaaccaaggccactgtccaggagaaggcagaaagaatgacggcacgtgatccgatgcaaaaggagttggcaacccagaagaaagaggcaaagatgagccaggcagagctggacaagcaggcggcgcgtcagcataacacggcggcgaagcaggctgccacggcagggcacatgggacaacccatggggacccatcagacgtcagctatgctccgtcatggaaccggacagcccacgggccatgtcaccgagggagtggtgggctcacacc

SEQ ID NO: 254377 - DNA, 220 bp, Glycine max
gcaacaggaagagcaacctttggaagtgcggaaatatagagctgaattgtctgaacaagatatatttgtaatcccagcaggttatccagctgtggtcaacgctacctcagatctgaatttctttgctgttggtatcaatgccgagaacaaccagaggaacttccttgcaggttcgaaagacaatgtgataagccagatacctagtcaagtgcaggagctt

SEQ ID NO: 254378 - DNA, 167 bp, Glycine max
aatcgaggcaacaggcagagcaacctttgtaagtgcggaaatatagagctgaattgtgtgaacaagatatatttgtaatcccagcaggttatccagttgtggtcaacgctacctcagatctgaatttctttgcttttggtatcaatgccgagaacaaccagaggaac

SEQ ID NO: 254379 - DNA, 340 bp, Glycine max
cttttggggaagaggtcgagtttcacagcagcaatggtgtacgtgaaggctgagaaatcaaaagcctacttcaagagatatcaagtcaagttcaagagaagaagagagggaaaaaccgattaccgtgccaggattcggttgattaatcaggacaagaacaaatataacactccgaaataccgatttgttgttcgctttagcaacaaggacattgttgcacaaataatatctgctagcattgctggcgatattgttcttgctgcagcatatgcacatgagctgccacaatatggtcttgaagtagggcttacaaattatgctgcagcttattgcactggtc

SEQ ID NO: 254380 - DNA, 373 bp, Glycine max
aaaagaaagcacgttgaagattgtaacttgtaacaacaactatggctagcgagggcagcgaagagttcaggctagtgtcaccggcgttcaaaaacggggggaagttaccgaggcactacaccgacgatggtcagggtacgaagaagaacatatcccctccattggagtggtataacctcccggaggggacgaagactcttgccctcgtggtggaggatattgatgcgaccgattctggtgggcccatggtgccatggactcactgggtcgtcgcaaacatcttggccacggtgaagggcttgccggagggattttccggcaagtcggccgagatggggggcgactacgcggcgatcaaggaggggaacaatga

SEQ ID NO: 254381 - DNA, 351 bp, Glycine max
  unsure (1)..(351): unsure at all n locations
cccagaaactacgtgtttagtcgccacgactccaatcgtagcgcgtcgggactctgtcgctttctgcgccgtctgccgatctnccgacaatggctgacccaaatgagcaagaagagaaagttcgtagctgatggagtgttcttcgctgaactgaacgaggttctgacacgagagttggccgaggacggttactccggcgtggaagttagggttacgccgatgcgcaccgaaatcataactagagccaccagaacccaagctgttctcggtgagaacgggagggagaatacgggaacttacctctgcggctcacaagaggttcaagtttcccgagaacagtgctgaacttta

SEQ ID NO: 254382 - DNA, 435 bp, Glycine max
  unsure (1)..(435): unsure at all n locations
cttgcaagaggctcatgatattggggaatcattgcaagagaaggttgagcttttgcctgagattgagcgtgcttttgttcatcttgattatgagtatagtcacaaacctgagcatgctcaagcacactcttagcagcaatcaggaaaagcaatgcctttgttgttcatttccttttccctttcatctcccgttagttgtatatgcgaaccatttctggttgttcggaatctgaacttaagggcaagtcactgagaagttggctatcaatcccaaatttctggcagccctgataatatcccaaatgtatatcacgataggtttatcaagcaagaccctttcangttccatttanggtaaatagaatcttactactntcttttccattccccctttntgtacagtgcactctttcggccttaattcatgatgtaagg

SEQ ID NO: 254383 - DNA, 315 bp, Glycine max
gtttggggtcaagcatggacttggatgttaccatttcaaaaagggagataggtatgctggaaagtactttggagataaaatacatggctatgatgattaccactttgccaatggtcactattaccaatgttcatggcacgaatgtcgtacgcaaggttatggcatgaatatgtttcgaaatggtgatggaagatgtggtgaatgggatgctggcaacctgaaactatatctaccaccacagaatgatgctatcatacgcacagttcaagctgctaggaaaacagctgataatgctataaatcttgcccggaagga

SEQ ID NO: 254384 - DNA, 280 bp, Glycine max
atctggtgttagaatggatagttcctctcatcagcgcctccccgtcaacgaaaacgacccagaagacatgcttctctatggcatcatcacttcatgccaagaaaaaaaagtgaccatcaaccaagagcaagtgaataagaagaggagcagcttccgcggcgtgcggaggcggccgtgggggaagttcgcggcggagataagagactccacgcggcatggcgtgagggtgtggcttgcgacattcgacaacctcaaggccgccgcgctggcttatgaccaa

SEQ ID NO: 254385 - DNA, 403 bp, Glycine max
ttcaaaggccatagtggtactagtgattaatgaaggagaagcagacattgaacttgttggcattaaagaacaacaacagaggcagcaacaggaagagcaacctttggaagtgcggaaatatagagctgaattgtctgaacaagatatatttgtaatcccagcaggttatccagttgtggtcaacgctacctcagatctgaatttctttgcttttggtatcaatgccgagaacaaccagaggaacttccttgcaggttcgaaagacaatgtgataagccagatacctagtcaagtgcaggagcttgcgttccctgggtctgcaaaagatattgagaacctaataaagagccaaagtgagtcctactttgtggatgctcagcctcagcagaaagaagaagggaac

SEQ ID NO: 254386 - DNA, 167 bp, Glycine max
tgaaattctgagttctaacgccactaaccctatgctgacgcgacttcttgagaacgtgtaagaggctcaaatatctggttgatgagtgtccttttgcatttgtgaactagtatgtaatattttattcacttaaataaagcgcattactatgtgcaatgagtgtgttt

SEQ ID NO: 254387 - DNA, 361 bp, Glycine max
gttatttgtaatagcatttttaatgagatgctcattagatatgggtatgaaaaattactgcgccaggctaaagctccaagtatgtttttacaatccttcaaaaattttgtttctttgtgtgtgtatggtgatgataacttaattagtgctcatgaatatgtcaagccttactttagtggttctaaattgaaaagctttctagctggtcataatatcaccattactgatggtattgacaaaactagtgcaactttgcaatttagaaagttagcagattgtgattttctcaagagaaactttaagcagatgtctaatgttctgtgggtggcttctgaagacaaggcgagtttatggtcacaac

SEQ ID NO: 254388 - DNA, 391 bp, Glycine max
ggtggatacctaggcacccagagacgaggaagggcgtagtaatgtacgaaatgcttcggggaggcatggtccgagtagtatgtggaagcagcaatgaagatgagacagaatgccaaaacatgaggtttaaggttaaggaaggtgatgcttttctggtgcctaggtttcatccaatggctcagatgtcattcaatgatggaccatttgtttttctcggcttcagcacttcagcaaagaaaaaccatcctcaatttttggcgggaaaggggtcagtgcttcatattctagacaaaaggatactggctacctctttcggtgtgagtaacataaccattgaccagcttctgcgttcttccgaggattccattatttttgggtgcagtttcctgtt

SEQ ID NO: 254389 - DNA, 405 bp, Glycine max
aaaaattacattgaacaatccaggttcaaaagcaggtgcatacggtttgaggagttaccctactactctgggaagaatgtttctgatttactcttcccgcaagagcagttttctcaacactatttttctgtttgtgggaatggggttgacaacactgttttgcaagatgtgacagatacaggtggtgacttccctcttgatgaatcatatggacaagatcctgataatgatattggaggatatccaaacaccagtgaaagccatctgccttgtacttcaacagaagatactaaatttgtcaatggattgaattctttagacacaccatgttcagacatcaatgttgaaaaaatagagtctgttaaaaatgacacatcaagcaacaatttctgtcaaaatgatgat

SEQ ID NO: 254390 - DNA, 327 bp, Glycine max
gaaagacaatgtgataagccatatacctagtcaagttcatgaggttgctttgcctagttctgcagaagatattgagaacctaataaagagccaaagtgagtcctactttgtggatgctcatcctcagcagaaagaggaggggaacaagggaagaaagggtcctttgtcttcaattttgagggctttttactgaataagtatgtactactaaaatgtatgctgtaatagctcatattgagcgaggaaagtatctttctatttaactataacttgagctccatctattaataaataaatcagcatatgatgcttttgttttgtgtaaaa

SEQ ID NO: 254391 - DNA, 150 bp, Glycine max
gggtttacaccgagcagccacacctcccgcagcagccatggttctcaaaacggaactatgccgattcagtggtgccaagatctacccaggaaagggcatcagatttgttcgtggtgattctcaggttttcctgtttgcaaactcaaaaat

SEQ ID NO: 254392 - DNA, 432 bp, Glycine max
  unsure (1)..(432): unsure at all n locations
gttgctgtacttgttggagtgccaaacaaagatgatgcattcggaactcatccagtgaatttcttgaacgagagaactctaaagggtaccttctacggaaactacaaaccccgcactgatcttccttctgttgtggagaagtacatgaatggggaattggaactggagaaattcatcactcacacagttccattctcagagattaacaaggcttttgattacatgctgaaaggggagtccatcagatgcatcattcgaatgggggagtaaatctatatcagaccaatgatgacatgacatggtccctgttggaggactgagttctctttctggttgtgaaaagaagaaaataaatttcatatatgatatatatccctttaggattatngaatttgtgaaaacttgggagtttgaatgtagagaatgataggg

SEQ ID NO: 254393 - DNA, 319 bp, Glycine max
gtcagtcttagtgaacaacagctccttgactgtgacaaccagggggacataacagaaaagacttcatgtgacaatgggtgtaatggaggtcttatgacaaatgcctacaattatttgctcgagtctggtgggttggaggaggagtcttcatatccctacactggggagagaggtgaatgcaagtttgatccagagaaaatagcagttaagatcacaaatttcaccaatatccctgctgatgagaaccaaatttgccgataattagtaaaaaatggtccacttgctatgggcgtgaatgcaattttcatgcaaacataca

SEQ ID NO: 254394 - DNA, 391 bp, Glycine max
accagctcgaccagatgcctaggagattctatcttgctgggaacgaatatcgagagtttctaaaatatcagcaagagcaaggaggtcatcaaagccagaaaggaaagcatcagcaagaagaagaaaacgaaggaggcagcatattgagtggcttcaccctggaattcttggaacatgcattcagcgtggacaagcagatagcgaaaaacctacaaggagagaacgaaggggaagacaagggagccattgtgacagtgaaaggaggtctgagcgtgataaaaccacccacggacgagcagcaacaaagaccccaggaagaggaagaagaagaagaggatgagaagccacagtgcaagggtaaagacaaacactgtcaacgcccccgaggaag

SEQ ID NO: 254395 - DNA, 377 bp, Glycine max
ggtcctgaattcccggatcgacccacgcgtccaaaaaaacgcacaggttgaaattgatgctctatccatacgtctcaacatcaatgggtgcaaagtgatcatatcccttggtttcagggctccagcatgtgtccgagtcgcaaatgaacttgcaagaggaagtgccaaagctgcaaagatctctattattgactcagtgctcacatcattggccatcgaattccttctgcttatattcttcttatcttttagagaaagacttgcatatatatctacctcaaataaagacgtcgcctttgctgttggggatttgacaccttcgacgtcggtctctatattactgaacagtgttcaacctgtactctcacgagtcgcta

SEQ ID NO: 254396 - DNA, 345 bp, Glycine max
caaacttattaacactttccttagttcaatatggggaagcccgtgttcactctctctctttcttccctttgcttgctactcttgtcgagtgcatgctttgctattacctccagcaagttcaacgagtgccaactcaacaacctcaacgcgttggaacccgaccaccgcgttgagtccgaaggtggtcttattgaaacatggaactctcaacaccctgagctgcaatgcgccggtgtcactgtttccaaacgcaccctcaaccgcaacggcctccacttgccatcttactcaccttatccccaaatgatcattgtcgttcaagggaagggagcaattggatttgca

SEQ ID NO: 254397 - DNA, 298 bp, Glycine max
agctggtcaaactaagggccgaactgaggaatagacgaaccatgggatgggcaatattggagagaaggctcaagctgcaaaggagaagacccaggaaatggcccaagctgcaaaggagaagacccaacaaacagcccaagctgccaaggacaagacttgcgacactatccaagcggcatacgagaagacccaacacaatacaggagctgctcaacaaaagacctcagagatgggccagtccacgaaggaatcggtccagtcagggaaggacaacacccaatggttcctgcagcaaaca

SEQ ID NO: 254398 - DNA, 78 bp, Glycine max
aaaaaaaaaaaagattaaaaaaaaataaaaaaaaagaaaaaaagaaaaaaataaaaaaaaaaaaaaaaaaaaaaaaaa

SEQ ID NO: 254399 - DNA, 351 bp, Glycine max
tgtatagagctctttcaatagcgcattcagggagatagcattatggaaaatgcgagacccaggatcgctgaatgcaaatgacacaacaatggtagatgtgccagttaatgatccatacagcatattgatgagctagacaaatgacatttgacgctgactgggacatatactatcaattggatcttggtctggatattgatgttcctgacattggcatcttcaccatttctctgtctcacaatggatagatcatgctaccaaccctatctaccatgttcagctaatcgcatgcacaaaacttaggataaaatgaatgcattgcacactccatgatcgatgtgcatgttttac

SEQ ID NO: 254400 - DNA, 394 bp, Glycine max
cctccactgctgcatctcagaatcgggacgccgtcgtcctcactacatcgtccctattagcacactagattttgccaaaaagatcaaattttgaagcaattgtttttgtgggcaacattcattctttcctatccctcgaaaaatcaattttcggcttcgggcatcggaaatggagaaggtgatgaacattctgaagccgaagccaaatccgcagcaactattgagggattggcagcgcaggcttcgccaagagtgtcgcaacattgagcgccaaattcgcgatatacagagagaagaaaaaaatgtgcagaaggctattagagaagctgcaaagaggaatgacatgggctctgcaaaggcacttgccaaggaacttgtgagatctaggcaaact

SEQ ID NO: 254401 - DNA, 397 bp, Glycine max
  unsure (1)..(397): unsure at all n locations
gaaagtcttccatagccccccaaaaatgaagagcacgatcttctgggctctctttctcttttgtgccttcaccacctcatacctaccttcagccatcgctgatttcgtgctcgataatgaaggtaaccctcttgaaaatggtggcacatattatatcttgtcagacataacagcatttggtggaataagagcagccccaacgggaaatgaaagatgccctctcactgtggtgcaatctcgcaatgagctcgacaaagggattggaacaatcatctcgtccccatatcgaatccgttttatcgccgaaggccatcctttgagccttaagttcgattcatttgcagttataatgctgtgtgttggaattcctaccgagtggtcntgtgtggaggatcta

SEQ ID NO: 254402 - DNA, 449 bp, Glycine max
cccaatcacgtaatatctccatattccaccaaaaatgaatatcagcatcttctggactctctaactgttatgttccttcaccacctcatacctaccttcatccatcacttatttaatactccataataaaaataaccctcttgaaaatgctgccacatattatatcttgtcagacataacatcatttgatggaataagatcaaccccaactttaaattaaatatgccctctcactgtgatacaatctctcaatgagctctacaaatggattgcaacaatcatctcgtccccatatcgaatccgttttatcgccgaatgccatcctttgagccttaagttcgattcatttccacttataatgctgtctgttggaattcctacctaatggtctcttttggaagatctaccacaaagacccttgctttgttttaaaaaaaatttttgtttta

SEQ ID NO: 254403 - DNA, 282 bp, Glycine max
ttagtattagaatcaaagaaaagaatatatgaaaggattgatggttgaaaatgcaaggaggaaagaaagcggcagagtccattaaggaaacagctacaaacattggtgcttctgccaaggctggcatggataagaccaaggccactgtccatgagaaggcagaaagaatgacagcacgtgatccggtgcaaaaggagttggcaacccaaaagaaagatgcaaagattaaccaggctgatctggacaagcatgcggctcgtcagcataacacggcagccaaac

SEQ ID NO: 254404 - DNA, 334 bp, Glycine max
aaatgaccaagttcacaatactgctgataggtctgaatttatgggtgacccagacttgcagagcgtccaaatggcagctccagcaagatacgatgtcgaagattggtacatgtggtcatagctgacgtcctgagagaaccacatcatggataagatacacgcgacaagaatctacaccatgatgatcatgacgacaacaattagattctcatgaccatgcggggaagactcaactacctaaggtggaactgcagacaagacgacgacgtaacacaagaaggacacatgccgaaatgatggacagacacgagcgacatgagaagcacaacatgcc

SEQ ID NO: 254405 - DNA, 86 bp, Glycine max
aaaaaaaaaaaaataaaaaaaaaaaaaaaaaaaaaaaaaaaaagggaaaaaaaaaaaaaaaaaaaaaaaaaaaaaaagaaaaaaaa

SEQ ID NO: 254406 - DNA, 318 bp, Glycine max
  unsure (1)..(318): unsure at all n locations
gtctttgaacactcatcaccatggccaagcttgttctttccctttgtttccttcttttcagnggctgcttcgctctgagagagcaagcacagcaaaatgagtgccagatccaaaagctgaatgccctcaaaccggataaccgtatagagtcggaaggtgggttcattgagacctggaaccctaacaacaagccattccagtgtgccggtgttgccctctctcgctgcacccttaaccgcaatgcccttcgtagaccttcctacaccaacggtccccaggaaatctacatacaacaagggtatggtatttttgcatgat

SEQ ID NO: 254407 - DNA, 474 bp, Glycine max
cgacccacgcgtccgcccacacattttaccaaatacttttataggttttatgcgtcccttctctctttgtcttgcgccatattttccaaccaaaataattattaaaaccaaacgtagctaggcaccacttctaggaatggcaagtgagatatttcttgcccttctgatcacaacctttgtggttgcagcctctgctggtaacttcaaccaagactttgagataacatggggtgatggtcgtgccaaaatcctcaatagtggggaacttctcaccttgtccctagacaagacctctgactctggatttcgttctaagaatgaatacttgtttggaaaaattgacatgcaactaaaactcgtgcctggtaactctgcaggcacaatcacagcttattatctatcttctcttggggatactcatgatgaaattgattttgaatttcttggtaacttgagtggtgatccttatattct

SEQ ID NO: 254408 - DNA, 547 bp, Glycine max
  unsure (1)..(547): unsure at all n locations
aaagaagaagctaaggctgaaaaacggatccncgccgaacactctagaagagctatgacgtcgcatgcacgcgtacgtaagctcggaattcggctcgagaaaaaaaaaaaaataaaaaaaaaaaaaaaaaaaaaaaaaaaaaagaaaaaaaaaaaaaaaaaaaaaaaaaaaaaaaaaaaaaaaaaaaaaaaaaaaaaaaaaaaaaaaaaaggggggggccgccgattagtgagctcgtcgacccggaatttaattccggaccggtccttgagggcgtcccagttttccttatagggggtcgttttaaagctgggcgtaataatggcaatagctgtttcctggggaaaattgttttccgttaacaattccacacaaaatacgagccggaagcataaagggtaaagcctggggtgcctaatgagggagctaactcactttaattgcgtggcgctaactgcccgttttccagtcggaaaacctgtcgggccagttgcattaatgaatcggcacacgcgcggggagagccggtttccttttgggccgccgg

SEQ ID NO: 254409 - DNA, 311 bp, Glycine max
aaaatttaaaaatttaaaaaaaaaaaaaaaaaaaagggaaaaggggaaaaaaaaaaaaaaaaaaaaaaaaaaaaaaaaaaaaaaaaaaaaaaaaaaaaaaaaaaaaaaaaaagggccgccccccaactagggaccccgtcaacccggaaataaattccgacccggaccctgcaggcgacccacctttccctataggaagtcgaataaaacctgggcgaaaaaatggaaaaacctgtttcctgtgaaaaattgttatcccttaacaatcccacacaaaatacaacccgaaaccataaagtgaaaaccctggg

SEQ ID NO: 254410 - DNA, 361 bp, Glycine max
gcaggccaagcgctaaaacgctcccgcatcaccacgaagaaacccggatccgcgaccgcaggcccacccatgtcgcgtgagcgccaagaacgtgagcgcctctacgaacaatgccttcaagccccaacccctctccgccacctcacccaaaaggagcgcgaacgcgaagcggagcgcgagaaattgggcctcatcagcaaggatcggcagcgagaaatcgacatgatgaagcgaaaagacgacaaatttaaggtttcggagaagcccacgattattgggacacctgggttggatacgtgagttaggtttggtgatgtggacaagtgccgaatatgatttgacggtggaggatggagaggtg

SEQ ID NO: 254411 - DNA, 362 bp, Glycine max
cgggactgtaactagccgcagcacgaggagcagcctcaggaggagaaggatgtctcacaggaagttcgagcacccaaggcacggttcactgggatttcttcccaggaagcgtgctgctcgtcacaggggaaaagtgaaggcattccccaaggatgacccatccaaggcacccaagctcactgcattcttgggttacaaggccggtatgactcacattgttagagaggtcgagaagccaggatcaaagcttcacaagaaggaaacttgtgagcctgttacaattattgagacccctccaatggttattgttggtgttgtgggttatgtgaaaactccacgtggtctccgaacattgaacactg

SEQ ID NO: 254412 - DNA, 445 bp, Glycine max
  unsure (1)..(445): unsure at all n locations
actagttcaatatcctagtataccttaataaataatttaagagactatgatgagagcacggttcccattactgttgctgggacttgttttcctggcttcagtttctgtctcatttggcattgcttactgggaaaaagagaaccccaaacacaacaagtgtctccagagttgcaatagcgagagagactcgtacaggaaccaagcatgccacgctcgttgcaacctccttaaggtggagaaagaagaatgtgaagaaggtgaaattccacgaccacgaccacgaccacaacacccggagagggaacctcagcaacccggtgagaaggaggaagacgaagatgagcaaccacgtccaatcccattcccacgcccacaacctcgtcaagaagaagagcacgagcagagagaggaacaggaatggcctcgcanggaggaaaaacgcgga

SEQ ID NO: 254413 - DNA, 347 bp, Glycine max
cacaacctggggtcacgtgtttgggtgttatgaatggaggaatgcaacctagagctgaaattaccttaggggcacgtcagttggaagagaacctggtggtgttcgatcttgcaaggtcaagggttgggtttagcacctcatcactgcactcgcatggagtcaaatgtgctgacctcttcaactttgccaatgcatgatgagccaagatcgcgagactttttataatatgcttatttataattaagcaagcatctactacatgttatggttaataaaagtaataatgtaagaataaagactttgaactaaataataatatgaacgattctctttcgttggtcaatgaa

SEQ ID NO: 254414 - DNA, 380 bp, Glycine max
  unsure (1)..(380): unsure at all n locations
agtcgatgcccaccctatccgagctatgaagttttctgtctcacctgttgttcgtgttgctgttcaatgtaaggttgcatcagatcttcccaagcttgttgaaggtcttaagcggttggctaagtcagatcctatggttgtttgtaccattgaggagtctggtgaacacattgttgctggtgcaggagagcttcatcttgagatctgtttgaaggacttgcaggatgatttcatgggtggagctgagattatcaaatctgaccctgttgtgtcattcagggagactgttttggagagatcatgccgcaccgtgatgagcaaatcacccaacatgcacaaccgtctgtacatggaagcaagaccattggangaagtcttgc

SEQ ID NO: 254415 - DNA, 294 bp, Glycine max
agttcagtgtgtcgtttaaaaatgtcgcagttgctggataaagccaagaacttcgtgtcggagaaagtaaatgatatggccaagccggaggcgagtgtcactgacgtggacttcaagcgcgtgagcaaagataatgtcgagtacttggccaaggtctctgttcgtaacccttattcaacttccatacccatttgtgagatcaactactctttcaaaagcgcatgcagggagatagcatcagggaaaattccagacccaggatcgttgaaggcaaaggacacaacaatggtggat

SEQ ID NO: 254416 - DNA, 447 bp, Glycine max
atagcatttggaaatttggctgatgacaccatcaattttgaggcttttccccacaagctggtgcagtttggagagattcaggaaaaagttgtattgaaattttcacaagaggaatttcttacagcttggtcaactcaggtgcgtcctgcaacaactctgttggctgatgggtgtccatatttgtatgctatggtgcatgatagttcagtgtctacaataccaggtgattttgtcattggtgttaagttgacaaccataaacaatatgtgtgcatatgggctcaatcctggtatttcacgttctcgtcttttgggcaccattcctcagtctatttcacagcaaactgtttggaatcaaatggcaacagtgagaacaccattgaattttgattctagcaagcagagcttttgtcaattttctattgaccttctcggtggaggaatttta

SEQ ID NO: 254417 - DNA, 408 bp, Glycine max
  unsure (1)..(408): unsure at all n locations
cttaattattaacacttccttagttcaatatggggaagcccttcactctctctctttcttccctttgcttgctactcttgtcgagtgcatgctttgctattagctccagcaagctcaacgagtgccaactcaacaacctcaacgcgttggaacccgaccaccgcgttgagtccgaaggtggtttgattcaaacatggaactctcaacaccctgagctgaaatgcgccggtgtcactgtttccaaactcaccctcaaccgcaatggcctccacttgccatcttactcaccttatccccggatgatcatcatcgcccaagggaaaggagcacttggagttgcaattccaggatgtcctgagacgtttgaggagccacangaacaatcaaacagaagaggctcaaggtcgc

SEQ ID NO: 254418 - DNA, 271 bp, Glycine max
aaaggccccagctcaattattaattctataccaccgcactactgacgggcatttgactaattgtcactgaagcctgagcttgctacacccgacaagaccatgactataccattcgctcccccctgcacaactagtgctaccctatcaccctcaaaccctggcaatcaccgcatacctgtccgtcttaatgccttcggaaagcaacatgctaccttatacatcatgctctaaaaatctcaggtctcactacgtccatacttacactctaccc

SEQ ID NO: 254419 - DNA, 379 bp, Glycine max
ctcgagccgaatcggctcgagcggctcgagaaatgaccaagttcacaatcctcctcatctctcttctcttctgcatcgcccacacttgcagcgcctccaaatggcagcaccagcaagatagctgccgcaagcagctccagggggtgaacctcacgccctgcgagaagcacatcatggagaagatccaaggccgcggcgatgacgatgatgatgatgacgacgacaatcacattctcaggaccatgcggggaagaatcaactacataaggaggaacgaaggaaaagacgaagacgaagaagaagaaggacacatgcagaagtgctgcacagaaatgagcgagctgaagagccccaaatgccagtgcaaaacgctgcagaa

SEQ ID NO: 254420 - DNA, 564 bp, Glycine max
agtattgcggtggttgattcagtgctcatggcacattccagaagagctatgacgtcgcatgcacgcgtacgtaagctcggaattcggctcgaggcggtggctgcaaaatcccagagcgataactttgagtatgtgtcattcaagaccaatgatagaccctcgatcggaaaccttgcaggggcaaactcattgttgaacgcattgccagaggaagtgattcagcacacttttaacctaaagagccagcaggccaggcaggtgaagaacaacaaccctttcagcttcctggttccacctcaggagtctcagaggagagctgtggcttagagagccctttttgcatgtgctaccacacttttgtccttttgggctctagctagtgctggtagcagtaaataagaatgaatccacagaatcaggggataacgcaggaaagaacatgttaaccaaaaggccagaaaaaggccagaaccctaaaaagggccccttggttgccgtttttcataagcttcggccccctgtacagcattacaaaaatcgacgcttaagtcagaagtggcgaaa

SEQ ID NO: 254421 - DNA, 415 bp, Glycine max
aggctcttcaaaagatacggcaaagttgatagagttgaaatgaaacctgttttctgtggaaacctggatttcgacgcgcgtcaatctgacgtggagaggctcttcagaagatacggcaaagttgatagagttgacatgaaatccgggtttgcttttgtctacatggaagatgaacgtgatgctgagtatgcaatcagaaggcttgatagaacagaatttggtagaaagggtcgccggattcgtgttgagtggactaagcaagaacgtgacagtagaagatcaggtggtgattccagaaaatcttcatctaattcaagaccatccaaaactttggttgttataaattttgatcctgttcatgccaggacaagggatctggaaagacattttgattcctatgggaaaatattaaata

SEQ ID NO: 254422 - DNA, 389 bp, Glycine max
tgctagttttgatggtttgattaccaagcaagttttgagcaaaatggcagaaatgataaacagtctttgtggtggtgatgcaaaattgatgcgtgaaaggacacacctgctgttggcttgttgttcaaggatggcaatttgtaagaaagatgtttggagagttgaatgtggaatcccttctggatttccgctcacagttatttgcaatagcatttttaatgagatgctcattagatatagctatgaaaaattactgcgccaggctagagctccaagcatgtttttacaatccttcaaaaattttgtttctttgtgtgtgtatggtgatgataacttaattagtgttcatgaatatgtcaagccttactttagtggttctaaattgaaaa

SEQ ID NO: 254423 - DNA, 427 bp, Glycine max
  unsure (1)..(427): unsure at all n locations
agttattatcaaataattaattaaattcctcgtggaatcttgttgaagccatgtctacagctggtcaggtcatcaagtgcagagctgcggtggcatgggaagcagggaagccactatcgatagaaaccatagaagtggcaccaccccagaaaggtgaagtgcgtttgaagatcctcttcaactccctttgccgtacagatgtttactggtgggatgctaagggccagactccgctgtttcctcgtatcttaagccacgaagcttcggggattgtggagagcgtgggcaagggtgtgacacatctgaaaccaggtgaccatgctctcccaatattcactggggagtgtggtgaatgcacctattgcaagtctgaagagagcaacctgtgtgagcttctcangatcaacactgacaaangagtgatgct

SEQ ID NO: 254424 - DNA, 424 bp, Glycine max
aaagcttaagcttttgaccaaagccttttcctggatgtaacatggaaagtccccactctgtgaacagtccaagaagaaccctcagcctatcgaaaaagcagagggcaactgtatccttttttgaccccgatgacataacctctggctttggattgtctggcgatcatggccctaagccttctgaagtttatggttttgtaggttctattaccactgttgatgctacagttattttcttggtatgggcatatgctccagaatcatggctacaatctgttggcatctcttactatcctagcagatattgcgctctagcagtaccaacttatgtgatggtgaccattgtattggtgctgggattctacattggccttaacttcatttcaacaccttcccctgcatctttaaacacttgtttcgatga

SEQ ID NO: 254425 - DNA, 230 bp, Glycine max
cacacaactactacaagtactttcttacaatcaaaaccaacaaccactatggcaaggtatcaaaaacacttccatgatcaaggtccccagggtgaccaattttgcaaccgttataagcaaaccgaccaataccggaacccctgttcatgctgctaagtgcacctatgtagccaccaaaactgctgctggtggttacagtgatgacattaataagcaacattgattccacc

SEQ ID NO: 254426 - DNA, 423 bp, Glycine max
gaatgcggacagatggagaaaccaagtttgtgttgcacaaaatagaagcgattgatgaggctaacttgggatatagctatagcgtacttgggggagatgggttgccagacacagtggagaagatcacattcgaatgcaaattggctgctggcgccaacggagggtctgctgggaagctaactgtcaaataccaaaccaaaggagatgctcagcccaaccaagacgacctcaaaattggcaaagccaagtctgatgctcttttcaaggccgttgaagcttaccttttggcccatcctgattacaactgatcctcttcatcactattcagtcagcaacgaccttgctgtatattatatacaagagttttcttgccttgtgtggagctttatccaatcactgtgtgtggtgtgtgcttaagtaaaa

SEQ ID NO: 254427 - DNA, 269 bp, Glycine max
gcaagtgttgatttgcagcgcactcatcgtattagaggaatgattaaaatggtggccacagttggtattcctgagaatacaggtatagcattggcctgtgctatgaatagttcttttagggggcgcgccagttctgatatttacaccatctgctctcaagactgtgaattgtggaatcctgcttgcacaaaagcaatgactatgtcatttaatccaaacccgtgttctgatgcatggagtttggaatttttgacgcgtaccggatttca

SEQ ID NO: 254428 - DNA, 396 bp, Glycine max
gcatgtgtacgatttgcagcgcactcatcgtatcagaggaatgggtgaaatggcggccacagatgggattcctgagaatacacgtatagcattggcctgtgctatgaatagttcttttaggaggcgcgccagctctgatatttacaccatctgctctcaagactgcgaattgtggaatcctgcttgcacaaaagcaatgactatgtcattgaatccaaacccgtgttctcatacatggagcttggaatttttgaagcgtaccacatctcattggaatatcattggtgtcagtgcgcggactgccaccctaatgcatgacgttcatgttacaattgattggtttattgcctctgaagaatgtgtacccaagacctattgtgttttaaatacacaaaa

SEQ ID NO: 254429 - DNA, 433 bp, Glycine max
  unsure (1)..(433): unsure at all n locations
gcacgttttgattttcagcgcactcatcgtattaggggaatgggtaaaatggtggccacagttggtattcctgacaatacacgtatagcattggcctgtgctatgaatacttcttttagggggcgcgccagttctgatatttacaccatctgctctcaagactgtgaattgtggaatcctgcttgcacaaaagcaatgactatgtcatttaatccaaacccgtgttctgatgcatggagtttgcaatttttgaagcgtaccggatttcattgtgatatcatttgtgtcactgggtgaactgccaccccaatgcangatgttcaggttacaattgattggtttatttcctctcacgaatgtgttcccaggacctattgtgttttaaatacacacaattcttttgtgttaaataggtggatgggaaaactgactt

SEQ ID NO: 254430 - DNA, 417 bp, Glycine max
  unsure (1)..(417): unsure at all n locations
gttgcagaccgagctagctagctagcaagcaagcacagagatggaggcaaagcgaggccatgccctcatgtgcttggcacgtgtttcactcttcctctgcgctctaaccctatccgctgctcacggaagcaccacggttcaagacatcgcgagaaagttgaaactcggggacaacgagcttctgcgcacggagaagaagttcaaggttttcatggagaattacgggaggagctactccacagaggaggagtatttgcgccgtttggggattttcgcccagaacatggtcagagcggcggagcatcaagcgctggaccccaccgccgtccacggcgtcacgcagttctccgatctcaccgaggacgagtttgagaagctctacacntgcgtcaatggcggcttcccgtcatcgaataa

SEQ ID NO: 254431 - DNA, 444 bp, Glycine max
gttttagaacatggtgggattgccactgatgatgattatccttacagagctaaagagggtagatgcaaagccaataagatacaagacaaggttacaattgacggatatgaaactctaataatgtcagatgagagtacagaatcagagacagagcaagcgttcttaagcgccatccttgagcaaccaattagtgtctccattgatgcaaaagattttcatttatacaccgggggaatttatgatggagaaaactgtacaagtccgtatgggattaatcactttgttttacttgtgggttatggttcagcggatggtgtagattactggatagcgaaaaattcatggggagaagattggggagaagatgggtacatttggatccaaagaaacacgggtaatttattaggagtgtgtgggatgaattatttcgcttcatacccaacc

SEQ ID NO: 254432 - DNA, 368 bp, Glycine max
cttctctgcatccaaaatgccaggtcttaccatcggagacactattcctgatcttcaagttgaaactaaccaaggcaaaatcaagcttcatcagttctgtgctgatggctggaccatccttttctctcacccaggtgatttcaccccggtttgtaccactgagcttggtaagatggctcagtatgctaaggagttttatcaacgaggagtgaagctcttaggtttatcttgtgatgatgtgcaatcccacaatgagtggatcaaggacattgaagcctacacttcaggtgcgaaagtgaataatccaataatggctgatccgaagagaggaaatattaaagcaacttaacatggttgaccctgatgag

SEQ ID NO: 254433 - DNA, 334 bp, Glycine max
  unsure (1)..(334): unsure at all n locations
cttaattattaacacttccttagttcaatatggggaagcccttcactctctctctttcttccctttgcttgctactcttgtcgagtgcatgctttgctattagctccagcaagctcaacgagtgccaactcaacaacctcaacgcgttggaacccgaccaccgcgttgagtccgaaggtggtttgattcaaacatggaactctcaacaccctgagctgaaatgcgccggtgtcactgtttccaaactcaccctcaaccgcaatggcctncacttgccatcttactcaccttatccccggatgatcatcatcgcccaaaggaaaagagcactttg

SEQ ID NO: 254434 - DNA, 387 bp, Glycine max
agaaacacaggagggacacatgtgattgttactactaggttgtgcaaagtaatgagctatgatactattcagcttcttcctttgccattatctgatgcaatgattctgatgataggaagaaaaatgaaagattatccagcagatgagatagacatccttgaaaaattcaatgagaaacttggaaggttgagctttggcttgtggatgattggttcattactgtctgaacttgcaataggcccttcttctctctttgaggccataaaccaggtgtcactcattgaagattcaaactcttgctatatgagcattgcagaagggcaatggtgcaagagcaacccttttctcatgaagaccctcctcttttgtttggagactttggaaaaa

SEQ ID NO: 254435 - DNA, 363 bp, Glycine max
ggatctagaaaccctagtagtgaaccctctctataaaacctcttccttctttcattcggtgcctattcccattttcttcctctaaaccctaaacaactctttctcttcttccttcgctcggtggttctccctcgcgtagatcgacaatggcggagacagagacgtttgctttccaggctgagatcaaccagctcctcagtctcatcatcaacaccttctactgcaacaaggagattttccttcgtgaactcatcagcaacgcctccgatcctttggacaagattcgatttgagagtttgacagataagagcaagctcgatgctcagccagagtgttcattcatattattcagacaagactaac

SEQ ID NO: 254436 - DNA, 442 bp, Glycine max
ggatctagaaactttagtagtgaaccctctctataaaacctctgccttctttcattcggtgcctattcccattttcttcctctaaaccctaaacaactctttctcttcttccttcgctcgttgttctccctcgcgtagatcgacaatggcggagacagagacgtttgctttccaggctgagatcaaccagctcctcagtctcatcatcaacaccttctactccaacaaggagattttccttcgtgaactcatcagcaacgcctccgatgctttggacaagattcgatttgagagtttgacagataagagcaagctcgatgctcagccagagttgttcattcatattattccagacaagactaacaatacactgaccattgttgacagtggtattggcatgaccaaagctgatttggtgaacaacttgggtacaattgctaga

SEQ ID NO: 254437 - DNA, 71 bp, Glycine max
aaaaaaaaaaaaaaaaataaaaaaaaaaaaaaaaaaaaaaaaaaaaaaaaggaaaaaaaaaaaaaaaaaaa

SEQ ID NO: 254438 - DNA, 225 bp, Glycine max
agctggcataagagtattaccagctttttctgttccacaggctactgccagatcttctgaaaatgcggaatcctctgcatgatctggaatttgtgttttctttcgcttgttcgtttgtttaattcaataaaggaaattaggcatgaccctcttgtgagtatgctcttgctatttgaaaatttcacacctctttaaattgcgtatgatgtggaaggtgtgtatttt

SEQ ID NO: 254439 - DNA, 392 bp, Glycine max
ctttctctccttcaaaatcgttgtcaatttcgcctctttctttctcaactcccttagattctctccatcgggtcttcaaaaatgcggatgagctgcaatggatgtcgagttctcagaaaaggttgcagtgaaaattgcagcatcagaccctgtttacaatggatcaaaagcccagaatctcaagccaatgctactgtgtttcttgccaagttctacggccgtgctggtctaatgaacctggttaacgcaggccccgaacatcttcgtccagcgatctttcgttcgttgttgtacgaggcatgcggtcggatattgaacccgatttacgggtctgtcgggttgttatggtccgggagctggcagctatgtcaagccgccgtgaaaacgtcttg

SEQ ID NO: 254440 - DNA, 319 bp, Glycine max
gaatttgcctaatgcctgtccttcaatgtggagggattgggttatagatctcgggtttgaagtttctaagatgacttctccctacattaaatgtacagtctctttcttcatagcatttggaaatttggctgatgacaccatcaattttgaggcttttccccacaagctggtgcagtttggagagattcaggaaaaagttgtattgaaattttcacaagaagaattttcttacaacttggtcaactcatgtgcgttcttccacaacctctgtggctgatgggtgtccataattggtatgctattggtgcattgatagttc

SEQ ID NO: 254441 - DNA, 242 bp, Glycine max
gaatatgccaaatgctgttctttcaatgtggagatattttgttggagatctcgtctttgaagtttctaagatgacttctccctacattaaatgtacagtctctttcttcatagcatttggaaatttggctgatgacaccatcaattttgaggcttttccccacaagctggtgcagtttgaaaagattcaggaaaaagttgaattgaaattttcacagaggaatttcttacagcttggtcaac

SEQ ID NO: 254442 - DNA, 176 bp, Glycine max
cactcttcgttttgctttttcaacttaaccttttctactggtaagggtaacaacttgctagaataagataaagaaagagtaaaagtgtgtgtgtgtgagagagagctatggctggcttgtgggcacgcctttctctgattgttctggctttgatttgctacgcgatgtttatatgc

SEQ ID NO: 254443 - DNA, 347 bp, Glycine max
cgtgatccgattcaaattgagttggcaacccagaagaaaggggcggagatgagccaggcagagctggacaagcaggcggcgcgtcagcataacacggcggcgaagcaggctgccacggcagggcacatgggacaacccatggggacccatcagacgtcagctatgcccggtcatggaaccggactagtcacggtccttttctcctatggagtggtgtgctcacaccctattggaaccaacagatgcccgggtgggactgctacggcccataatacccgttcggggggaaacccaaatgattatgggtatggaactgggggtacttacaattaaataatgatgaattt

SEQ ID NO: 254444 - DNA, 325 bp, Glycine max
gctagtctgcccgcaggacgcacgcatacgatcccttggatgaattccaaggccacattttcaagaaatagggatgcatatatgttcatatctgaattgcaatcatttgatggcttattaggcctatcctgaagccacaggaaatgagatcggaattcctgcgcgaattgcaagttcacattttcaagatataacgacgcacaaatggtcatatatgacttggaattatctgttcccttatcatgcctattctgtagccaaacgaaatgagatcggtattcctagcggaattacaattccacattgtcaagatacaaggatgcac

SEQ ID NO: 254445 - DNA, 409 bp, Glycine max
cgcattttggagttcaactccaaacccaacacccttcttctcccccaccatgctgacgctgattacctcatcgttatccttaacgggactgccattcttaccttggtgaacaacgacgaccgagactcttacaaccttcaatctggcgatgccctaagagtccctgcaggaaccacatactatgtggttaaccctgacaacgacgagaatctcagaatgataacactcgccatacccgttaacaaacccggtagatttgagagtttcttcctatctagcactcaagctcaacagtcctacttgcaagggttcagcaagaatattctagaggcctcatacgacaccaaattcgaggagataaacaaggttctgtttggtagagaggaggtgcagcaacaaggggaggaga

SEQ ID NO: 254446 - DNA, 328 bp, Glycine max
atcatttctttttaataccaactcgctctttattattttcagttactaatcctagttatttgatttatatactttttttatagtaaatacatgagatagaatattcaaaatggaatatttctattattttattcttcatccaatgactatacattcattatatttttgtgtaaatagaggaaaaactcgatggaaaaatggtggtttaattctatgttgtttaataggaagttagaatacaggtgtgaattaagtaaatcaatggatagtcttggtcctattgaaaataccagtctaagggaagaccctaaaattttaaccgatatag

SEQ ID NO: 254447 - DNA, 407 bp, Glycine max
taaatacctgaagccatctgttgctggttttcttttgcaaaaggaacttgattaccttgttggggcagtatcaaaccccaaaaggccatttgctgccattgttggtggttccaaagtctcatctaaaattggagtgattgagtcacttttagaaaaagttgacatccttcttcttggtggaggaatgatcttcacattttacaaggcacaaggtctttcagtgggttcatcccttgtagaagaagataagttggatcttgctacatcactacttgcaaaagccaaggaaaagggggtgtctctcttgttaccaagtgatgtggtgattgcagacaaatttgctcctgatgctaatagcaaagtcgtgccagcatctgccatccctgatggctggatgggattggata

SEQ ID NO: 254448 - DNA, 381 bp, Glycine max
  unsure (1)..(381): unsure at all n locations
ctcgagccggctcgagcaaaaaaagcttcatcatcatcttcttcttctctgcatcatcacaatggctgaagtacgttcacaacaacaacaaccccagcatgtgcaagtccacgcaaccacaacacacaccccacaacaccatggcggggaaggtggcagcggcattctgaacctcatcccggagatgtccctcacgggttcccaactcctagctctcctcgccggcgttccccttggtgcaatgctgctcctcctctccggcatctcgctcatcgccagcctcttggggctggcggtggcgacgccgctcttcatcttcttcagcccgctgctggtccccgccgncttcgccataggaatggcggtgaccgccgtgcttgc

SEQ ID NO: 254449 - DNA, 400 bp, Glycine max
gaaattttaagcacatttcacaatcagaccggcatagtcatgtgctcctacctcccaatgttcaccagctttaatagaacaaggggtggcttgattcaattgaaccatggcaggcctcagcctctccaatatgttgtcaatgcagcctttttggctgctctttacagtgattatctcgatgctgctgatacacctggatggtattgtggacccaatttcttctcgactgatgtccttcgagactttgcaaagacccagattgattacatccttgggaagaaccctcggaaaatgagctatattgtaggttttggtaatcattatccaaaacatgttcaccatagaggtgcgtctataccgaagaacaaggttaagtacaactgtaaaggaggatggaaat

SEQ ID NO: 254450 - DNA, 398 bp, Glycine max
cttcgcacccttctccctccatcgaagggagatggcaacatcagctggttcgtggaagggtctggagaggatgagcgtggagcagctgaaggcggtgaaagagcaaggcgatctggaagttaatcttctccaagaaagcctctccaacattcgcaccgccaccacccgcctggagatcgcctcctccgccctcaacgatctctctctccgcccccaaggcaaccaaatcctcgtccccctcaccgcctccctctacgtccccgccactctccacgactcccaacacgtcctcgtcgacgtcggcaccggctacttcatccagaagaccatgccccaaggcaaacattactgcgaccgcaaaatcaacttgctcaaatctaactttgatcaactcctcg

SEQ ID NO: 254451 - DNA, 412 bp, Glycine max
  unsure (1)..(412): unsure at all n locations
atccttttgtgttaaataggtggatgggaaaattgactttcccccagggcacttcccgaagtgttaagagaatgcctctttctatagggggaggagctggtgcaaagaatgctattctcatgaatatgccaaatgctgttctttcaatgtggagatattttgttggagatctcgtctttgaagtttctaagatgacttctccctacattaaatgtacagtctctttcttcatagcatttggaaatttggctgatgataccatcaattttgaggcttttccccacaagctggtgcagtttggagagattcaggaaaaagttgtattgaaattttcacaagaggaatttcttacagcttggtcaactcangtgcgtnctgcaacaactctgttggctgatgggtgttcatattt

SEQ ID NO: 254452 - DNA, 506 bp, Glycine max
  unsure (1)..(506): unsure at all n locations
agaggcggtggtagctccttggactanngcgtagcaataccattatgacttctcacgcacgcttacgtaagctcggaattcggctcgagatcctttcgtgttcaattagtcgatggcaaaatagacttggccccattgcacttcccgacgtgttaagagaatgcccctttctctctagggaggagctggtgcaaagaatgctattctcatgaatatgccaaatgctgttctttcaatgcggatatatcgctgcctgagatactgactctctactctctaacattactcttccgtgaacggtatcagctcactcaaaggcggtaatacggttatattcggctgatgatgccatcacattagaggccattttatccaaaggccagcaaaaggccatagaaccgttaaaaggccgcgttgctagcgtttttccatagaatttcttaccgcttggtccatctaagagatccctgcttaaactatatttgcttaaatccggccattatttt

SEQ ID NO: 254453 - DNA, 397 bp, Glycine max
attgaacttatctctcttctcacttctgttgttataagtaacttccctcatcattacaaaacaatcctccacaggtttcaaaatgctgaaatcgggcatgggaattgaggagagaaagcaagtgaagaagccagcacaagccagctcgagaaaagggtgtatgagagggaaaggaggtcccgagaatgctagttgcacctacaaaggtgtgaggcagagaacatggggaaaatgggttgctgaaatccgtgaacccaatcgaggtgctaggctctggctcgggacttttgagacctctcatgaagctgctttggcttatgatgctgctgcacgtaagctctatggctctgatgccaaactcaacttaccagagctctctatcaaatcacaatctcag

SEQ ID NO: 254454 - DNA, 407 bp, Glycine max
aaagattttcatttatacaccgggggaatttatgatggagaaaactgtacaagtccgtatgggattaatcactttgttttacttgtgggttatggttcagcggatggtgtagattactggatagcgaaaaattcatggggagaagattggggagaagatggttacatttggatccaaagaaacacgggtaatttattaggagtgtgtgggatgaattatttcgcttcatacccaaccaaagaggaatcagaaacactggtgtctgctcgcgttaaaggtcatcgaagagttgatcactctcctctttgagccgtaaaggttcaatacaacgagtgcttgttttcttagggacaagcattgtacttatgtatgattctgtgtaaccatgagtcttccacgttgtacta

SEQ ID NO: 254455 - DNA, 322 bp, Glycine max
aaaaaaaaaattaaaaaaaaaaaaaaaaaaaaaaaaaaaagaaaaaaaaaaaaaaaaaaaaagaaaaaaaaaaaaaaaaaaaaaaaaaaaaaaaaaaaaaaaaaaaaaaaggaaaaaaaaaaaaaaaaaaaaaaaaaaaaaaaaaaaaaaaaaaaaaaaaaaaaaaaaaaggggggggccccaaattggaaaagggtgtccccggaaaaatatgcgagacccgggacttagggggttccaagtgttaaataggggggggcttaaaagagctgacaaaaaaggggccgaaatcatttcctgggaaaaaaggggtaccccaaaa

SEQ ID NO: 254456 - DNA, 379 bp, Glycine max
catgcatgtgtgtggtggacactgtaaccgtgccgtcacttatgccgctctgcttggtggaaggatctgcgaacttagagcatatgactctcgggtatattaacttactatgttctatagtgcctgctctatagttgaggcttgtcactaacaacatgagaccacctgtgatgacatagtcaataaggcttggagcgattcactggcttgaacttaaaattgctttcacatttgggctcatatacacagcttatgctacttgtattgatcatcacacgggtagcgtcggctcaattatagcctgatctatcgcattctcggtcactgactacatgctctctggcggtccgcttgatcgagcatgcttaaatcactctaa

SEQ ID NO: 254457 - DNA, 271 bp, Glycine max
  unsure (1)..(271): unsure at all n locations
gttgcgtgagaagcagtgtggaggtggctgataacggggaatgtatttagctttgagagtctttaaattttctgtatttgttgtaatgttagtagttccttaaattggccagatggagtttatgtgtttgtaaatgcagggatgctaacggaataaaatggccacttgtattgctatcccttgtgctagcataatagaaagggttgaatcgcgctncaaagctctcacatttcgtctggtgtacacagactttgctactgctattgatcct

SEQ ID NO: 254458 - DNA, 271 bp, Glycine max
gtttggaatcaaatggcaacagtgagaacaccattgaattttgattctagcaagcagagcttttgtcaattttctattgaccttctcggtggaggaattttagtggacaaaactggagattggatcacacttatacaaaattctccaattagtaacttgttgagagttgctgcttggaagaaaggctgtttaatggttaagattgtgatgtctgggaatgcagcagtcaaaaggagtgattgggcctcattggtacaagtgtttttaaaca

SEQ ID NO: 254459 - DNA, 284 bp, Glycine max; identical to SEQ ID NO: 102818

SEQ ID NO: 254460 - DNA, 431 bp, Glycine max
  unsure (1)..(431): unsure at all n locations
ggacaagcttagttgccaagttggaatcaatccatactccatggaatggaccggtttggccaacagactactgagtaagggcaacgatattctgtgttgcgattatgctagttttgatggtttgattaccaagcaagttatgagcaagatggcagaaatgataaacagtctttgtggtggtgatgaaaaattgatgcgtgaaaggacgcacctgctgttggcttgttgttcaaggatggcaatttgtaaaaaagatgtttggagagttgaatgtggaataccttctggatttccgctcacagttatttgcaatagcatttttaatgagatgctcattagatatagctatgaaaaattactgcgtcaggctaaagctccaagtatgtttntacaatccttaaaaaatttgtttctttgagtgtgtatggtga

SEQ ID NO: 254461 - DNA, 315 bp, Glycine max
  unsure (1)..(315): unsure at all n locations
caagaagctaaaggagatgagccttgaagaacgtaaaaacactactccacgcacggtgatgattggaggaaaggcatttgcaacatacacaaatgctataaggatagtcaggttggtgaatgatgtcggtgctgttgtcaacagtgatcctgaggtcaacggctacttgaaggttgtgtttgtcccaaattacaatgtgtctgtggcagaagtgctgattccaggaagtgagctttctcagcatattagcactgcangcatggaagcaagtggcacaagcaacatgaaatttgctttaaatgggtgccttataat

SEQ ID NO: 254462 - DNA, 420 bp, Glycine max
cactctttgcctcgcaccttcaacttaaccttttctactcataatcttaacaacttgctagaagaagataaagaaagagaaaaagtgtgtgtgtgtgagagagagcaatggctggctcgtgggcacgccgttctctgattgttctggctatcatttccttcggatgtttatttgcaatttccattgctaaggaggaagccacaaaattggggacggtcatcgggattgatcttggaacgacctattcatgtgttggtgtttacaagaacggccatgttgaaatataacccatggatcaaggaaccggattaacccatcggggggtggtttcaacgaccgggagagactaattggagaggctggcaagaatcttgcagctggcaacccaaaaaggaccatctttgatggtaagagacttat

SEQ ID NO: 254463 - DNA, 413 bp, Glycine max
gtagagaggaagggcagcagcaaggggagcagaggctgcaagagagcgtgattgtggaaatctcgaaggaacagattcgggcactgagcaaacgtgccaaatctagttcaaggaaaaccatttcttctgaagataaaccttttaacttgagaagccgcgaccccatctactccaacaagcttggcaagttctttgagatcaccccagagaaaaacccccagcttcgggacttggatatcttcctcagtattgtggatatgaacgagggagctcttcttctaccacacttcaattcaaaggcgatagtgatactggtaattaatgaaggagatgcaaacattgaacttgttggcctaaaagaacaacaacaggagcagcaacaggaagagcaacctttggaagtgcggaaatat

SEQ ID NO: 254464 - DNA, 291 bp, Glycine max
cctagattcagccacagttggaaaaaaaaaaaaagttgttcgagatggcacgtacgaagcaaactgctcgtaagtccacaggaggaaaggcacctaggaagcagctcgcaaccaaggctgcacgtaagtctgcaccaactactggtggtgtgaagaagccacatcgttatcgtcctggtaccgttgctcttcgtgagattaggaaataccagaagagtaccgagcttttgatcaggaagctccccttccaaaagctggttcgtgaaattgctcaagacttcaagactgatc

SEQ ID NO: 254465 - DNA, 429 bp, Glycine max
  unsure (1)..(429): unsure at all n locations
cgtgatccgatgcaaaaggagttggcaacccagaagaaagaggcaaagatgagccaggcagagctggacaagcaggcggcgcgtcagcataacacggcggcgaagcaggctgccacggcagggcacatgggacaacccatggggacccatcagacgtcagctatgcccggtcatggaaccggacagcccacgggccatgtcaccgagggagtggtgggctcacaccctattggaaccaacagaggcccgggtgggactgctacggcccataatacccgtgcggggggaaacccaaatgattatgggtatggaactgggggtacttacaattaaataatgatgatttagaaaaagaaagctacgacccataaagaggtttagttaagagtatgacttttggtgtggntatcttctcgtttgggtatcttt

SEQ ID NO: 254466 - DNA, 371 bp, Glycine max
tgttggcagagttggcttaaacaatggttctggaaaatcaaaaagtctacagaacttgacaatgcaactcagaaaatgttgtaaccatccctacctctttgtgggtgactatgatatccataaacacaaggaggagattttcagagcatcaggaaagtttgaacttcttgaccgtttgcttccaaaacttcgtagagctggtcacagagtcctccttttttctcagatgactcggctcatggacattcttgaaatttatctgcgacttaatgattgtaaatgtcttagacttgatggctcaacaaaaacttgaggaagaggttccctactacgggaatttaatgcacctgattctgcatactttatgtttc

SEQ ID NO: 254467 - DNA, 323 bp, Glycine max
gttccacaggctactgccagatcttctgaaaatgcggaatcctctgcatgatctggaatttgtgttttcttttgcttgttcgtttgtttaattcaataaaggaaattaggcatgaccctcttgttgagtatgctctgcctatttgaaaatttgcacacctcttttaattatcgtaatgatgtgtgaagtgtgtgttaattgaaaaaaaataaactaacatatctatacatctaattatcttaaaccttaaaatgataaaacttggaatatcaaaaaaaaaaaacggggcgccccccatttaggggcctttccaccccggaatt

SEQ ID NO: 254468 - DNA, 398 bp, Glycine max
attttgtacaacaaaatcgtagtcgaacatgtgactttcaggttattaacacgacactctaaccaattaaactaacggtccaattatcttataaaatgaataatgttattatatataacactaagtttttttaatgtatatttaatgtgtatgtaaatttaaataataaattttttgacaattagttttgatataactcatacgaattatttaatctgtatactttttttataaataaaaaatatttactattaaaaaaataatttattaatttttttttaaaaaaaacttacggatcacgtaatccttatgagttaactcatacggattatgtgattcatatgagtcatacggattatgtgatccgtaaaaataaaaaacacttaagaatatttttg

SEQ ID NO: 254469 - DNA, 299 bp, Glycine max
cccgcctcggtgatgcaatccgccgcaaccgaaaacctccgcgccggcgtcgtgggccgccaagacatctccgacgtggcgaggaacgaaggcgtgagcgtgaccgaaaccaaagtgggctgccaccgcgtcatcacggagttcgtgggaagacacgtggtggggcagttcgtggagcccgacgtcccaatgaacacccaaggcaccgcgctggaccgtgacgccataaccatcggcaaggctttcgaggcatcggcgatagccgaagcaggcgacaagccgttggatgaaagcaaccc

SEQ ID NO: 254470 - DNA, 329 bp, Glycine max
ctcctcacgagtacccaattctgggtctcaacctgttgagattacttgtgcagaataggattgctgaattccatactgagttggaattgctttcatctgctgctcttgagaatccttgcattaagcatgctgtggagttggaacaatcttttatggaaggggcttacaatcgtgtcttgagtgcacgacaaacagtgccacatgatacatacgtttatttaatggatcttttggcaaaaactgtcaaagatgaaatacctggttgcagggagaaggcttatgactatttttaaataaaggttgttaaccaaatgtggctgtcctctttt

SEQ ID NO: 254471 - DNA, 311 bp, Glycine max
ttgagagcacaatttggctactagccaaagcttatgtcatcgtaaatgactcttgctaccatcaactcatgagccattggttaaatactcatgcggcgatggagccattcgtcatagcaacacaccgacatcttagcgtgcttcacccaatttacaagcttctgactcctcactatcgtaacaacatgaacatcaacgcacttgccaggcaatctttaataaatgctaatggcttaataaaaccaacctttttgccttaaaagatttttgggaaaatgttttcggcggttattaaaaatggggttttaatt

SEQ ID NO: 254472 - DNA, 132 bp, Glycine max
tggaatagaagtagattcaactggaaaagaaatatgccctctcactggtgtgcaatcacccaatgagctcgataaggggattggactagtctttacatctccattacatgccctttttatcgccgaaagcta

SEQ ID NO: 254473 - DNA, 407 bp, Glycine max
  unsure (1)..(407): unsure at all n locations
acggcactgagttattagtaattgtgttgtgttgtgttgagcagagagaaggatcaagaaaggataagaagaaagagggaatagggttagggttagggttagggttaggttgaggatgccgaagaacaagggaaagggaggtaagaacaggaagaggggaaagaacgaggcggacgacgagaagcgagagctggtgttcaaggaggacgggcaggagtacgcgcaggtgctccggatgctgggtaacgggcggtgcgaggcgatgtgcatcgacgggacgaagaggctctgccacatccgcgggaagatgcacaagaaggtgtggatcgccgccggagacatcatcctggttggactcagggactaccaggacgacanggctgacgtcatcctcaagtacatgcccg

SEQ ID NO: 254474 - DNA, 399 bp, Glycine max
tcggggaattccaattccacattttcaagaaataaggaggcaaaaatgttcatatatgaattggaattatttgttttcttattaggcctatcctgaagccaaaggaaatgagatcggaattcctcggggaattccaattccacattttcaagaaataaggaggcaaaaatgttcatatatgaattggaattatttgttttcttattaggcctatcctgaagccaaaggaaatgagatcggaattcctcggggaattccaattccacattgtcaagaaataaggacgcaaaaacgttcatatatgaattggaattatgtggtttcttattaagcctatcctgaaaccaaggaaatgagatcggaattcctcggggtaccgagctcgaattcctatagtga

SEQ ID NO: 254475 - DNA, 344 bp, Glycine max
caatatcctagtataccttaataaataatttaagatactatgatgagagcacggttcccattactgttgctgggacttgttttcctggcttcagtttctgtctcatttggcattgcttactgggaaaaagagaaccccaaacacaacaagtgtctccagagttgcaatagcgagagagactcgtacaggaaccaagcatgccacgctcgttgcaacctccttaaggtggagaaagaagaatgtgaagaaggtgaaattccacgaccacgaccacgaccacaacacccggagagggaacctcatcaacccggtgagaaggaggaagacgaagatgagcaaccacg

SEQ ID NO: 254476 - DNA, 262 bp, Glycine max
gcgtcccactatctccaacggatatggtcgtttaactgaagttggtcctgacgatgatgaaaagagttggcttcaaagactcaatctcatgcttacctttaccaacatcacccagagatctatgagtactattcactacaactcacatgcaacgaagatagcactggtgatcgatggcagagggcatcttcaaatatcatgtccacacatgtcatcaaggtcgtcacactcgaagcatgataagagtagcccttcataccat

SEQ ID NO: 254477 - DNA, 422 bp, Glycine max
  unsure (1)..(422): unsure at all n locations
aaaggatcaacttgggatgaaatagactatgaatttcttggaaatctgagtggtgatccatacatccttcacacaaacgttttcagccaaggcaagggggacagggaacaacaattctatctatggtttgacccaactgctgatttccacacttactccatcatgtggaacccccagaggattatattctcagttgatggcactcccattagagagttcaagaactcggaggctattggggttcccttcccaaagaatcagccaatgaggatatattctagtttgtggaatgctgatgactgngcaacangaggtggacttgtgaagacagattggacacaagctccgttcacagctttctacagaaacttcaatgctgangctngcatatggtcttcttgagcatcttcttgcgctaaaac

SEQ ID NO: 254478 - DNA, 525 bp, Glycine max
  unsure (1)..(525): unsure at all n locations
atggtaaagactgatgaacgtgaggcgctcaacnaaacggagagacaagcttgcatgcctgcaggtcgactctagaggatcccctcggggaattccaattccacattttcaagaaataaggaggcaaaaatgttcatatatgaattggaattatttgttttcttattaggcctatcctgaagccaaaggaaatgagatcggaattcctcggggaattccaattccacattttcaagaaataaggaggcaaaaatgttcatatatgaattggaattatttgttttcttattaggcctatcctgaagccaaaggaaatgagatcggaattcctcggggaattccaattccacattttcaagaaataaggaggcaaaaatgttcatatatgaattggaattatttgttttcttattaggcctatcctgaagccaaaggaaatgagatcggaaatcctcggnggtaccgagctcgaattctctatagtgagtcggatgaaattcgtaatcatgtcatagctgtttcctg

SEQ ID NO: 254479 - DNA, 384 bp, Glycine max
  unsure (1)..(384): unsure at all n locations
acctcatcaaaaggaagaggaaaagcacgaatggcaacacaagcaggaaaagcaccaaggaaaggaaagtgaagaagaagaagaagaccaagacgaggatgaggagcaagacaaagagagccaagaaagtgaaggttctgagtctcaaagagaaccacgaagacataagaataagaacccttttcacttcaactctaaaaggttccaaactctcttcaaaaaccaatatggccacgttcgcgtcctccagaggttcaacaaacgctcccaacagcttcagaatctgcgagactaccgcatgttggagttcaactccaaacccaaacacccttcttctcccccaccatgctgacgctgattacctcatcgntatccttaacggga

SEQ ID NO: 254480 - DNA, 398 bp, Glycine max
agcatttggaaatttggctgatgacaccatcaattttgaggcttttccccacaagctggtgcagtttggagagattcaggaaaaagttgtgttgaaattttcacaagaggaatttcttacagcttggtcaactcaggtgcgtcccgcaacgactctgttggctgatgggtgcccatatttgtatgctatggtgcatgatagttcagtgtctacaataccaggtgattttgtcattggtgttaagttgacaaccataaacaatatgtgtgcatatgggctcaatcctggtatttcaggttctcgtcttttgggcaccattcctcagtccatttcacagcaaacttgttggaatcaaatggcaacagtgagaacaccattgaattttgattctagcaagc

SEQ ID NO: 254481 - DNA, 104 bp, Glycine max
aaataaaaaaaataaaaaaaaaaaaaaaaaaaaaaaaaaaaaaaaaaaaaaaaaaaaaaaaaaaaaaaaaaaaaaaaaaaaaaaaaaaaaaaaaaaaaaaaaaa

SEQ ID NO: 254482 - DNA, 295 bp, Glycine max
atctccgagactaccgcattttggagttcaactccaaacccaacacccttcttctcccccaccatgctgacgctgattacctcatcgttatccttaacgggactgccattcttaccttggtgaacaacgacgaccgagactcttacaaccttcaatctggcgatgccctaagagtccctgcaggaaccacatactatgtggttaaccctgacaacgacgagaatctcagaatgataacactcgccatacccgttaacaaacccggtagattgagagttctttctatctagcactc

SEQ ID NO: 254483 - DNA, 328 bp, Glycine max
ttatcttttagacttccgcatattggcgttcaactccgaaccgggcaccctttttctgccttaccatgcttacgctgattaccttagcgttatacaaaacgggactgccattcttaccttggtgaacaacgacgactgagactcttacaacctttaatctgtcgatgccctaatagtccctgcatgaaccacatactatgtggttacccctagctacgacgagtttttcttaatgataacactcgtcatatcttttaacaaacccggtagatttgagagtttctttctatctatcactcaaactcaacatttctacatgcaagggttc

SEQ ID NO: 254484 - DNA, 389 bp, Glycine max
gtcccagtcttgcaccttaaaaccatccaatccaattgaattctccagagagaagaagaaacttaatcgatcatcacttcacttcactaatacatcatggcagacgagacccagaacaagtatgagagctctgaggttgaggtccaggatcgtggtgtttttgactttctcggtaagaaaaaggatgaagaagacaagcctcatcctcaggaggaggtcatcgccaccgagtttcaaaaagtcactgtctcagaccaaggagagaacaagcacagcctcttagaaaagcttcaccgatctgacagcagctctagctcttcaagtgaggaggaaggagaaaatggaaagaaaaggaggaggaggagaaaggaaaggaagggcttgaagaa

SEQ ID NO: 254485 - DNA, 336 bp, Glycine max
gcttggagaaccagcatcgccagatgcctatgagatgctatctagctgggaaccaagagcaagagatggtaaaatatcacccagagcaaggaggtcatcaaagccggagaggaacgcatcaccaggaagaagagaacgaaggaggcagcatattgagtggcttcaacctggaatactcggaacatgcagtcatcgtggacaagcagatagcgaaaaacgtacaaggagagagcgaaagcgaagacaagggagccattgagacagagaaaggaggcctgagcgtgattaaaccacccacggacgagcagcagctgagaccccaggaagaggaagaag

SEQ ID NO: 254486 - DNA, 398 bp, Glycine max
cggctcgagcggctcgagctcagcaaaaaacactgtagcttccaagctcggatacggcgacagcactgaaacaactcaaacaagccatcaagaacagaacacaggcaatgaaaaaccatcaacaatctcatcagcaacctctgcaatcactgataaagctgtaactgccaaaaatgttgtagcttcaaagctcggatatggcgacaacactgaaacaactcaaaccactctagcaaggaatcaagaagagaacacaggcaacgagaaaccctcaacaatctcatcagaaacctctgctttagctgataaagatgcctcggcaaaaaacagtgttgcctctaagcttggtttcggtgacacagcaggaacacatgaagagaagagaactaaccatgctg

SEQ ID NO: 254487 - DNA, 313 bp, Glycine max
ttaggttcttgcatgatcgtgctggtgaaggtgatggtgaactgcagagcattctgtcacgttctgttcaagatttgttggctgtcactgaacagatttatgccatcactgaccgcacaaaactcgtggatgccattaagtgcttaaaggctgctatgttaaatgctgttcctattgttagagcctctgatgttgatcaagatgatcacaagcagcacataaatgcaagtctagctcattaattctcgatcccttaattgttattccttcctaattttggtgtcacataccttacgtacggttttgcagggca

SEQ ID NO: 254488 - DNA, 559 bp, Glycine max
  unsure (1)..(559): unsure at all n locations
agcntntgggctaacgcctgatttcacgatacttcatcgaataaactgagagacaagcttgcatgcctgcaggtcgactctagaggatcccctcggggaattccaattccacattttcaagaaataaggaggcaaaaatgttcatatatgaattggaattatttgttttcttattaggcctatcctgaagccaaaggaaatgagatcggaattcctcggggaattccaattccacattttcaagaaataaggaggcaaaaatgttcatatatgaattggaattatttgttttcttattaggcctatcctgaagccaaaggaaatgagatcggaattcctcggggaattccaattccacattttcaagaaataaggaggcaaaaatgttcatatatgaattggaattatttgttttcttattaggcctatcctgaagccaaaggaaatgagatcggaattcctcgggggtaccgagctcgaattccctatagtgagtcgattaacattcgtaatcatgtcatagcttgtttctgtgtgaaaattgtatccgctcacaatt

SEQ ID NO: 254489 - DNA, 390 bp, Glycine max
  unsure (1)..(390): unsure at all n locations
ggaaggtggtgacattaacaaacagtacacaaacatcaccttcacaccaacacaggcagatcgctttgtcttggcattccgaaattggctgaggcgacatggcaatggccaaccagaatggtttggaaacagcagcgaccagccattgccatcaactgtgttatcaaaacgtcagatgttggatagatttgaacagcacactctcaagtgttcatcatgtaaagcagcatatgagggattccaaacatggcagaaagtcctaattggggcaacagttgtgttttgtgcaacatcagggatcccatcagatttccagttgcgtgtacttttggctggactcgcagntgtcagcgcagccatagcttttgccctataccactccaaaagaat

SEQ ID NO: 254490 - DNA, 249 bp, Glycine max
aaaaaaaaaaaaaaaaaaaaaaaaaaaaaaaaaaaaaaaaaaaaaaaggaaaaaaaaaaaaaaaaaaaaaaaaaaaaaaaaaaaaaaaaaaaaaaaaaaaaaaaaaagggggggccgccgactagggagctcgccaacccgggaataaattccggaccggtccctggaggggtaccagctttcccaaaagggaggcgtataaaagctgggggaaataagggccaaagcggttaccgggggaaaaaggta

SEQ ID NO: 254491 - DNA, 192 bp, Glycine max
tgaagaagaagaagaagaccaagacgaggatgaggagcaaggacaagggaggccagaaaggggaaggtctgagtcttaaagaggaccacgaagaccttagaattagaacccctttcacttcaactcttaaagggttccaactttttttaaaaacccatattggcaacgttggggtcttcaaaaggtcaacca

SEQ ID NO: 254492 - DNA, 213 bp, Glycine max
aaaaaaaaaaagaagaaaaaaaaaaaaaaaaaaaaaaaaaaaaaaggaaaaaaaacaaaaaaaaaaaaagaaaaaaaaaaaaaaaaaaaaaaaaaaaaggggggaaacaaaacaagagaacccagagaccagaaaaataaaatagggtgagaaacttgcaagcacaccatggcacacaaaagagagagactgatgccaacatagaccgaaaca

SEQ ID NO: 254493 - DNA, 381 bp, Glycine max
gacatattcatgaacactaattaagtggttctaaattgaaaagctttctagctggtcataatatcaccattactgatggtattgacaaaactagtgcaactttgcaatttagaaagttagcagattgtgattttctcaagagaaactttaagcagatgtctaatgttttgtgggtggctcctgaggacaaggcgagtttatggtcacaacttcattatgtttcgtgtaataatctggaaatgcaagaagcttatcttgtcaatctcgtaaatgtgttacgagaattgtatttgcacagtccagaggaagctcgccaattgagaaggaaagctctctctcgtattgaatggctgcaaaaagctgatgtgcctaccatagcac

SEQ ID NO: 254494 - DNA, 405 bp, Glycine max
tcggggaattccaattccacattttcaagaaataaggaggcaaaaatgttcatatatgaattggaattatttgctttcttattaggcctatcctgaagccaaaggaaatgagatcggaattcctcggggaattccaattccacattttcaagaaataaggaggcaaaaatgttcatatatgaattggaattatttgttttcttattaggcctatcctgaagccaaaggaaatgagatcggaattcctcggggaattccaattccacattttcaagaaataaggaggcaaaaatgttcatatatgaattggaattatttgctttcttattaggcctatcctgaagccaaaggaaatgagatcggaattcctcgggggtaccgaactcgaaattcctatagtgagtc

SEQ ID NO: 254495 - DNA, 535 bp, Glycine max
  unsure (1)..(535): unsure at all n locations
natcgaaanccccntttnnaaannagnccgnnncgnggnngnttttanacttagttacttcttcgcactaaccggagagacaagcttgcatgcctgcaggtcgactctagaggatcccctcggggaattccaattccacattttcaagaaataaggaggcaaaaatgttcatatatgaattggaattatttgttttcttattaggcctatcctgaagccaaaggaaatgagatcggaattcctcggggaattccaattccacattttcaagaaataaggaggcaaaaatgttcatatatgaattggaattatttgttttcttattaagcctatcctgaagccaaaggaaatgagatcggaattcctcggggaattccaattccacattttcaagaaataaggaggcaaaaatgttcatatatgaattggaattatttgttttcttattaagcctatcctgaagccaaaggaaatgagatcggaattcctcgggggtaccgagctcgaattccctatagtgagtcgtattaaattt

SEQ ID NO: 254496 - DNA, 303 bp, Glycine max
agaacagttggtgcaactaatgtttgaaacattcaatatatcaggattttatgcctcagaacaagcagtgttatcactctatgctgtgggacgtatctcaggctgcactgttgatattggacatggaaaaatagtggaaagaatcatgtacttaggctgctatattcggtaacataggttcctaggattaatttatcagcagtttcacagttccaccatgccagatattgcaccggtaattgagggtgctgttcaccacatcgcctcgagaagatttgagtttggaagtactgatctaactaa

SEQ ID NO: 254497 - DNA, 383 bp, Glycine max
  unsure (1)..(383): unsure at all n locations
cagccctccaataatgttgtcagtgatggcaagcatgataatgtgactggtaaatctttagcagactctaaagtttcccctaaaaaggatgcttttcaggtgaagtctggcgtctgggctgattcactaagccgtggactgattgatctcaatataactgctcctaaaaaagtatcccttgtggatgttggaattgtgggtggattgagtgatggatccgatgaaagggagaaaggccctccaccttcattttacatggggagagctatgggttcaggatctggtcttggaatgggtaggtctggattcactccttcacagccaatagctggagacgactttntctcaaaccttggaaaccaacaacaataaatttggtgggg

SEQ ID NO: 254498 - DNA, 271 bp, Glycine max
ggctcgaggaactattctgcgtagtgatctattggcaaattttctgacagagggcaattttagagcaagtgttgatttgcagcgcactcatcgtattaaaggaatgattaaaatggtggccacagttggtattcctgagaatacaggtatatcattggcctgtgctatgaatagatcttttagggggcgtgccagttctgatatttacaccatctgctctcaagactgtgaattatggaatcctgcttgcacaaaagccatgactatgtca

SEQ ID NO: 254499 - DNA, 548 bp, Glycine max
  unsure (1)..(548): unsure at all n locations
aggaggccgngntggttttcncactgannntncttttgnganagtncgngnagagnttttttnnncatgacgactcctgtcactaaccggagagacatgcttgcatgcctgcaggtcgactctagaggatcccctcggggaattccaattccacattttcaagaaataaggaggcaaaaatgttcatatatgaattggaattatttgttttcttattaggcctatcctgaagccaaaggaaatgagatcggaattcctcggggaattccaattccacattttcaagaaataaggaggcaaaaatgttcatatatgaattggaattatttgttttcttattaggcctatcctgaagccaaaggaaatgagatcggaattcctcggggaattccaattccacattttcaagaaataaggaggcaaaaatgttcatatatgaatcggaattatttgttttcttattaggcctatcctgaagccaaaggaaatgagatcggaattcctcggnggtaccgagctcgaattccctatagtgagtcgtattaaat

SEQ ID NO: 254500 - DNA, 405 bp, Glycine max
caataccaaaatgaccaagcttacaattctcctcatcgctcttctcttcatcgcccacacctgctgcgcctccaaatggcaacagcaccagcaagagagctgccgcgagcagctcaaggggatcaacctcaacccctgtgagcacatcatggagaagatccaagctggccgccgcggcgaggacggcagcgacgaagatcacattctcatcaggaccatgccgggaagaatcaactacatcaggaagaaggaaggaaaagaagaagaagaagaaggacacatgcagaagtgctgcagcgaaatgagcgagctgaaaagccccatatgccagtgcaaagcgctacagaagataatggataaccagagcgagcaactggaggggaaagagaagaagcagatggagag

SEQ ID NO: 254501 - DNA, 386 bp, Glycine max
attctctccattgtctttgaacactcatcaccatggccaagcttgttctttccctttgtttccttcttttcagtggctgcttcgctctgagagagcaggcacagcaaaatgagtgccagatccaaaagctgaatgccctcaaaccggataaccgtatagagtcggaaggtgggttcattgagacctggaaccctaacaacaagccattccagtgtgccggtgttgccctctctcgctgcacccttaaccgcaatgcccttcgtagaccttcctacaccaacggtccccaggaaatctacatacaacaaggtaatggtatttttggcatgatattcccgggttgtcctagcacttatcaagagccgcaagaatctcagcaacgagga

SEQ ID NO: 254502 - DNA, 226 bp, Glycine max
  unsure (1)..(226): unsure at all n locations
ataacaatgtcgttgattccaagtttcttcggcaccgggcgaagaaccaacgtcttcgaccccttctccctcgacgtgtgggacccattccatggcttccccggcaccaccgccctctccgctccgcgctccgagacggcggccttcgccaacacgcgcatcgactggaaggagacggcggaggcgcacgtgttcaaggcagacctgccggngctgaagaaggaag

SEQ ID NO: 254503 - DNA, 317 bp, Glycine max
caccaccagcacgctctcttccatttttccgcaaaacaaacacagttcacatacttttccctcactttctcggcggccaaacgccataaaaatggcgtcgaaggtggcgctgatggcgctgttctccgtctcgctcatgttctctccgtcgcaatccgcggacttcagcgtagatataggctacgaatccgtgaatgaggcggaggtgaacctgatgcccagccaatccctgatctccgtcatgagcaacgagatgtccaaacgcagatcgacggcgctgatctccttccatgacggcgaccgcatcctcagagagg

SEQ ID NO: 254504 - DNA, 407 bp, Glycine max
  unsure (1)..(407): unsure at all n locations
agttgtggtcaacgctacctcaaatctgaatttctttgctattggtattaatgccgagaacaaccagaggaacttcctcgcaggttcgcaagacaatgtgataagccagatacctagtcaagtgcaggagcttgcattccctgggtctgcacaagctgttgagaagctattaaagaaccaaagagaatcctactttgtggatgctcagcctaagaagaaagaggaggggaataagggaagaaagggtcctttgtcttcaattttgagggctttttactgaattagtatgacctaaaatgtatgctgtaataacttcataatgagccanggaaggattgggctatggtacctttgactaaaccttaacctttgattaattaaatgaccggctattaagcgcttggttt

SEQ ID NO: 254505 - DNA, 316 bp, Glycine max
catgattggtgtgcagcagtgagaaaactgttgaacctactgcttgatggaactgtaaatacaggagatcatccttccttgtatctcgcgctttcagagatgggtctccttcacaaagctgtaaggagaaacagcaagcagttagtggagtgtcttttgagatatgttcctgagaatatttctgataaactaggacctgaagacaaggcactggttgatggcgagaatcagaccttcttgtttagacctgatgttgttggtcctgctgggttgacaccactccatatagcagcccgggaaagatggttctgaggat

SEQ ID NO: 254506 - DNA, 389 bp, Glycine max
gatagttcagtgtctacaataccaggtgattttgtcattggtgttaagttgacaaccataaacaatatgtgtgcatatgggctcaatcctggtatttcagttctcgtcttttgggcaccattcctcagtctatttcacagcaaactgtttggaatcaaatggcaacagtgagaacaccattgaattttgatcctagcaagcaaagcttttgtcaattttctattgaccttcttggtggaggaattttagtggacaaaactggagattggatcacacttatacaaaattctccaattagtaacttgttgagagttgctgcttggaaaaaaagctgtttaatggttaagattgtgatgtctgggaatgcagcaatcaaaaagaatgattgg

SEQ ID NO: 254507 - DNA, 543 bp, Glycine max
  unsure (1)..(543): unsure at all n locations
gtaagggccgggtgattaccatgatnnccnctggnnnngncngnnngngngggttgngccacngctcatagaaacactctagaagagctatgacgtcgcatgcacgcgtacgtaagctcggaattcggctcgaggaaatatattgggttatctttttaaaaaaaaaaaaaaaaaaaagaaaaaaaaaaaaaaaaaaaaaaaaaaaaaaaaaaaaaaaaaaacaaacaaaaacaaaaaaaaaagaagaaacaccaaaaaaaaaaagactgaaagccagccaagaatgtagagccaagcagcaagcaaagtcattgagctccaccatcgccgctaccactttaacgcgcattttcacaaaaacgaagatggcctgattcaccaaacacgaaacggtctgatcagagacaccggcatactctgcaacatcgtataacgcaactagcttcacattcaccaccctgaattgactatcttacggccgctatcatgccataccacgaaaagtttcgcgccattcgaaggaatgaacctaaaggccgataa

SEQ ID NO: 254508 - DNA, 400 bp, Glycine max
gcagaaagagaagcattagcaaaagcaagaagaactagtctaagcagaaatggcctcttcagtgatggcatctgtggccctcaaacctgcccctttcactgttgagaagtcctcagttagaggccttccctccctctcaaggaactcctcttcattcagagttgtggccagtggtggcaagaagatcaagactgacaagccttatggaattaatggtggcatggctttgagggaaggagttgatgcatctggcaagaaaggaaagggaaagggcgtttaccagtttgtagacaaatacggtgctaatgtcgatggttacagtcctatctacgacaccaaggactggtctccaaccggtgatgtctacgctggcggtacgactggcttggctatctgggct

SEQ ID NO: 254509 - DNA, 439 bp, Glycine max
gtgattttctcaagagaaactttaagcagatgtctaatgttttgtgggtggctcctgaggacaaggcgagtttatggtcacaacttcattatgtttcgtgtaataatctggaaatgcaagaagcttatcttgtcaatctcgtaaatgtgttacgagaattgtatttgcacagtccagaggaagctcgccaattgagaaggaaagctctctctcgtattgaatggctgcaaaaagctgatgtgcctaccatagcacagattgaagagttccattcgatgcagaggatgatgaatgctcctgattcaaatgataatattgatttactggtgagcattgatttgttgggtttacaaggaacaggtaaagcttttccaaacaaaattggttttgatgataagcctgtggtggctaacacacaagaattctttgatggaaaatt

SEQ ID NO: 254510 - DNA, 339 bp, Glycine max
aaatggcaacagtgagaacaccattgaattttgattctagcaagcagagcttttgtcaattttctattgaccttctcggtggaggaattttagtggacaaaactggagattggatcacacttatacaaaattctccaattagtaacttgttgagagttgctgcttggaagaaaggttgtttaatggtcaagattgtgatgtctgggaatgcagcagtcaaaaggagtgattgggcctcattggtacaagtgtttttaacaaacagcaacagtacagagcattttgatgcatgtaagtggacaaaatcagaaccacattcctggggaataatcttcccaa

SEQ ID NO: 254511 - DNA, 355 bp, Glycine max
  unsure (1)..(355): unsure at all n locations
cgtgatccgatgcaaaaggagttggcaacccagaagaaagaggcaaagatgagccaggcagagctggacaagcaggcggcgcgtcagcataacacggcggcgaagcaggctgccacggcagggcacatgggacaacccatggggacccatcagacgtcagctatgcccggtcatggaaccggacagcccacgggccatgtcaccgagggagtggtgggctcacaccctattggaaccaacagaggcccgggtgggactgctacggcccataatacccgtgcggngggaaacccaaatgattatgggtatggaactgggggtacttacaattaaataatgatgatttagaaaagga

SEQ ID NO: 254512 - DNA, 100 bp, Glycine max
caactacgtagtcgaggttggaatattttgtactgaatatcctcatgttttcttcaagtttagttaaaaaataatagatactcagcatgtcatttctctg

SEQ ID NO: 254513 - DNA, 355 bp, Glycine max
  unsure (1)..(355): unsure at all n locations
attcaaaggccatagtggtactagtgattaatgaaggagaagcaaacattgaacttgttggcattaaagaacaacaacagaggcagcaacaggaagagcaacctttggaagtgcggaaatatagagctgaattgtctgaacaagatatatttgtaatcccagcaggttatccagttgtggtcaacgctacctcagatctgaatttctttgcttttggtatcaatgccgagaacaaccagaggaacttccttgcaggttcgaaagacaatgtgataagccagatacctagtcaagtgcangagcttgcgttccctgggtctgcaaaagatattgagaacctaataaagagccaaag

SEQ ID NO: 254514 - DNA, 396 bp, Glycine max
ctcaaaaaagagaagtgactgatgcaattgaaaagccaaacataaacgagtcaaatgctgttcaggataatgtttttcagcatcaccttcccttgcgtcaggaaattttggctcataaaaggaaggcagttactttgaaaagagaagggaaactaacagaagctaaggaggaacttccgcaggccaagctgttggagaagggcttggaggatggaaatatgctgccagacactgcctcttcctctgcctctgccactgtgaactatgcttcccatgcatcaaatgttgtacaaaagaaacaagaatcgtcaaatgttagtgcaaagccattgagtagtcgtgatcgatttaaattgcaacaggagtctctagggcacaaacgtcaagccctaaagc

SEQ ID NO: 254515 - DNA, 337 bp, Glycine max
cttggtgatgctcagcatgttgaagaggcagagaagataggactggactggatggatgtagaagccttgaaaaagctaaacaaaaataagaagttggtgaagaagctagctaaaaaataccatgcttttttagcatctgaagcagtcattaagcagattcctcgtcttttgggtcctggtctcaacaaagcaggaaagttccctacacttgttactcaccaggaaactcttgagtcaaaggttaatgagtctaaggccatggttaaatttcaacttaagaaagtgctctgcatgggagtagctgtgggcaatgttagtatggaggaaaagcaaatct

SEQ ID NO: 254516 - DNA, 309 bp, Glycine max
aaatttgtttaaattgtctcttgatgatgttgaaactcctaaaggttgcatgttggatcttaaaatttctcagtctaaaattgcactgtccaagaacacagttggaggaactattctgcgtagtgatctattggcaaattttctgacagagggcaattttagagcaagtgttgatttgcagcgcactcatcgtattaaaggaatgattaaaatggtggccacagttggtattcctgagaatacaggtatatcattggcctgtgctatgaatagttcttttagggggcgtgccaggtctgatatttacac

SEQ ID NO: 254517 - DNA, 327 bp, Glycine max
tcggggaattccaattccacattttcaagaaataaggaggcaaaaatgttcatatatgaattggaattatttgttttcttattaggcctatcctgaagccaaaggaaatgagatcggaattcctcggggaattccaattccacattttcaagaaataaggaggcaaaaatgttcatatatgaattggaattatttgttttcttattaggcctatcctgaagccaaaggaaatgagatcggaattcctcggggaattccaattccacatcttcaagagataacgaggcacatatgttcatatatgaattgaaattatctgtttcttat

SEQ ID NO: 254518 - DNA, 328 bp, Glycine max
tcggggaattccaattccacattttcaagaaataaggaggcaaaaatgttcatatatgaattggaattatttgttttcttattaagcctatcctgaagccaaaggaaatgagatcggaattcctcggggaattccaattccacattttcaagaaataaggaggcaaaaatgttcatatatgaattggaattatttgttttcttattaggcctatcctgaagccaaaggaaatgagatcggaatttcctcggggaattccaattccacattttcaagaaataaggaagcaaaaatgttcatatatgaattggaattatttggtttctta

SEQ ID NO: 254519 - DNA, 429 bp, Glycine max
tgactcgttcttcttcgtcgttatcttcttcttttgttgtttgtgtgtttgttttttctctcacctgaaaatgtcttgctgcggtggtaactgtggttgcggaagcgcctgcaagtgcggcaacggctgcggaggctgcaagatgtacccagacttgagctacaccgagtcaaccaccaccgagaccttggtcatgggagtggcaccagttaaggctcaattcgagagtgctgaaatgggtgttcccgctgagaacgatggctgcaaatgtggagctaactgcacctgcaacccctgcacttgcaagtgaggtgttggagagctaaagcttcaagcagaaatggcccttaggaaatatgataaaaactatatgtagtttcaaactttcaaaatattgtataaggaataatgtgcacttttgtggtttgg

SEQ ID NO: 254520 - DNA, 372 bp, Glycine max
atccttttatattactatagtttaagaaaggttcaccaattgtttcaggtgggttgaaatgatggctcctgttttctcaagagctgcttggcgttgcatttggtatatgatccaggtgcacccttctctcatttaatgttactgctgaagaattactataaacattgctttgctaagattactttatttattcaccattcatggtttactttattttacagaatgacttgatccatgcatggggtctagatatgcagctaggctactgtgctcaggcatgttaaaagctccttaatttctcgtttcagtttgatgagttccatttctacatgttgaatattcccctgatgccttaatcctcgttaatttttt

SEQ ID NO: 254521 - DNA, 305 bp, Glycine max
cgtcattatcctaaaaacttgcagattttcacatcccaaacaacatgaagggaaagttcatgtttctgtcggagctcctttgtgccacttttcatgtctgcttctctattatcgaccgattagttgccaacggcaactttgagttgggtccaaagcccttcggcctaaaaggaacagtggtggtgggcgggagccactcgatcccagaatgggagatctacggctttgtagagtacataaaatccggccaaaagcaaagtgacatgttgctcgtcgtcccagagggagcctacccggtgcgccta

SEQ ID NO: 254522 - DNA, 225 bp, Glycine max
aagaaataattgatctttgaaaatgcagggaggaaagaaagctggagagtccatcaaggaaacagctgcaaacattggtgcttctgccaaggctggcatggagaaaaccaaggccactgtccaggagaaggcagaaagaatgacggcacgtgatccgatgcaaaaggagttggcaacccagaggatagaggcaaagatgagccaggcagagctggacaagcaggc

SEQ ID NO: 254523 - DNA, 354 bp, Glycine max
gttattatcaaataattaattaaattcctcgtggaatcttgttgaagccatgtctacagctggtcaggtcatcaagtgcagagctgcggtggcatgggaagcacggaagccactatcgatagaaaccatagaagtggcaccaccccagaaaggtgaagtgcgtttgaagatcctcttcaactccctttgccgtacagatgtttactggtgggatgctaagggccagactccgctgtttcctcgtatcttaggccacgaagcttcggggattgtggagagcgtgggcaagggtgtgacacatctgaaaccaggtgaccatgctctgccaatattcactgtggagtgtggtgaatg

SEQ ID NO: 254524 - DNA, 383 bp, Glycine max
tccggtttggttaacggacgagaaaggcaacccggtgcacctcacggctgtggcaaccaatgcacacaaatctatgcttcagaatgacaccccacaagagcttcctcactccaagagttcaagctcgtctgaagatgaagggcatggagagaggatcaggaagggactgaaggataacatagaagaaaagttaccagctggagaaggagtagtgaaggagaataaacacaccaacaattgctgcttctacttctacaacagatactagtgatgctaatcaccacccaaccactgagcatgagaagaagagtatcatagacaagattaaagaaaaattccaataaatcagcagtgaatattaatatatattcacgaattgaagc

SEQ ID NO: 254525 - DNA, 366 bp, Glycine max
tcggggaattccaattccacattttcaagaaataaggaggcaaaaatgttcatatatgaattggaattatttgctttcttattaggcctatcctgaagccaaaggaaatgagatcggaattcctcggggaattccaattccacattttcaagaaataaggaggcaaaaatgttcatatatgaattggaattatttgttttcttattaggcctatcctgaagccaaaggaaatgagatcggaattcctcggggaattccaattccacattttcaagaaataaggaggcaaaaatgttcatatatgaattggaattatttggtttcttattaggcctatcctgaagccaaaagaaatgagatcggaat

SEQ ID NO: 254526 - DNA, 513 bp, Glycine max
ctggtaggtacactatagaagagctatgacgtcgcatgcacgcgtacgtaagctcggactgccgctcacgccgatcttgtcaactcatcgacaccaccacgctggcacccaggtgatcggcgcgagatttaatcgccgcgacaatttgcgacagcacgtgcaggaccagactgcaagatccacaacctgtaagcactgatggcggctcatcctatagtgttgcaaggcggctgtattgttacctagaaccgtaatagcaagctattacagtgtgccggtgttgccatctatcgctgcacccttaactcgcaatgcccttcgtagacctttctacagcaacggtcttcaggaaatctacatacaacatggtcatggtattattggcatgatattaacggattgtcctagcacttactaagagccgtacgaatctcagcaatgaggacgaagatcgaggccacatgaccggcaccataaagtacatcggctaatagagggttatctgatagcaaa

SEQ ID NO: 254527 - DNA, 329 bp, Glycine max
tgatccttctttttctccttgaactcaaacatggcagatgaggtggttctgctagatttctggccaagtccatttgggatgagggtcaggattgcacttgctgaaaagggtatcaaatatgagtacaaagaagaggacttgaggaacaagagtcctcttctcctccaaatgaacccggttcacaagaagattccggttctcatccacaatggcaaacccatttgtgaatccctcattgctgttcagtacattgaggaggttcggaatgacagaaatcccttgttgccttctgacccttaccagatagctcaggctagattctgggctga

SEQ ID NO: 254528 - DNA, 328 bp, Glycine max
ttgtctttgaacactcatcaccatggccaagcttgttctttccctttgtttccttcttttcagtggctgcttcgctctgagagagcaggcacagcaaaatgagtgccagatccaaaagctgaaggccctaaaaccggataaccgaatagagtcggaaggtgggttcattgagacctggaaccctaacaacaagccattccagtgtgccggtgttgccctctctcgctgcacccttaaccgcaatgcccttcgtagaccttcctacaccaacggtccccaggaaatctacatacaacaaggtaatggaatttttggcatgatattcccg

SEQ ID NO: 254529 - DNA, 357 bp, Glycine max
aaacaaagagaaaaaaaaacccttagccaacacaaccatcatggccacctctgctattcagcaatcagcattcactggtcaaactgctctgaagcagctcaatgaggtcggaccgcagaaccggggcgcccggcaagggtggacctaccaggcccggaaccgtcaaaagggctcctaaaagcattgggaagggcccggccggtccaaggtcctggggcccatgctcgaagcaaattccatcataccggacgggagattacctggggacctccggagggaacactgctgaattatcagtggacccggaaaccttggccaggaaccgggagctggaggtgattcacagcagatgggcaa

SEQ ID NO: 254530 - DNA, 188 bp, Glycine max
ggcagcggcattctgaacctcatcccggagatgtccctcacgggttcccaactcctagctctcctcgccggcgttccccttggtgcaatgctgctcctcctctccggcatctcgctcatcgccagcctcttggggctggcggtggcgacgccgctcttcatcttcttcagcccgctgctggtccccgc

SEQ ID NO: 254531 - DNA, 318 bp, Glycine max
gagattgcaaaattctcttccgtttcaggattacggtttcaccgttacagctgagaacatggcataaccacagcgaatctctctgcgtatctttgcgctgctcctcttgatttccacctcttcgtttcagcttctccgcgcttccgatgacgccgatgatgatgcgatcttctatgattcgttcgacgaggattttgaagaccgttgggttgcgtctccgaaagatgagtacagtggcgtctggaaacatgccaggagtgaggcacatgatgactatgggcttcttgtcagcgagacagcatggaaatatgctatagt

SEQ ID NO: 254532 - DNA, 333 bp, Glycine max
  unsure (1)..(333): unsure at all n locations
ggagacaagaaaaatgagccatggtggcctaagatgcaaactcgtgaagagctagttgaagcttgcgctatcatcatatggactgcttcagcacttcatgcagctgttaattntggacagtatccctatggaggtttaatcttaaaccgtccaactcttagtaggcgattcatgcctgagaaaggttctgctgagtatgangagctgangaagaatccccagaaggcttacttgaagactattacaccaaagtttcagacccttattgacctttctgttatagaaatcttgtcaaggcatgcatctgatgaggtgtaccttgnngagagggac

SEQ ID NO: 254533 - DNA, 404 bp, Glycine max
gagaagctagagagaaagaattgatcgatgaaaatgcacggaggaaagaaagcgggagagtccattaaggaaacagctacaaacattggtgcttctgccaaggctggcatggagaagaccaaggccactgtccaagagaaggcagaaagaatgacagcacgtgatccggtgcaaaaggagtcggcaacccaaaggaaagaggcaaagatgaaccaggcgaagctggacaagcaggcggagcgtaagcataacacggtggccaaacagtccgccaccacggatgtgcacatgggacatggacaccacaccaccgtaaccgtcactggaaccgacacgtattccaccaccggagaatatggtaaacccatggggagccaccagacgtcggcaatgcctggccatgg

SEQ ID NO: 254534 - DNA, 370 bp, Glycine max
  unsure (1)..(370): unsure at all n locations
gtgaagctagtgatgttgcacagaacacaaaagattatgctgctcagaagaccaaggactatgccagcggtggtgcgcagaagaccaaggattatgccagcggtggtgcgcagaagaccaaggactatgcaagtgatgctgcgcagaagaccaaggactatgcaagtgatggtgctcaaaagagcaaagaatatgcggttgatgtagcactgaatgccaaagattatgctcaaaaaagcaaagattacgcaggtgatgctgcacagaatgtcaaagattatgcacgtgatgcagtgcacaagagaaaagagtattctggtgatgcttctaacangagcaaagaggcttttgattatgccagtgagacggt

SEQ ID NO: 254535 - DNA, 425 bp, Glycine max
tggagaagtgagagtgatatatgatgccaaagaagccatttcaggtctcaaaactcctattatcaaggatgtggagagtgtgtggccaaccgaatcagcccttgtttggagtgagttgagccaagccattatgaacaaagattgggaaagagcaggagaagcaaagcatgacgtggaagaaagacagaggaatatgttgagagacagagccatgaaaggagaaaactacaaaggatgctaaaggaagagaaaaagcaggaaccaaaggtcaaacaaagaagggtggtggtgaggaacatggaaaaagaagagaagaaacatagaggagaaacaaagaagttgtccaagagggaaagtagaggcagagaaagcaagaccaatggaagaaacaaactggaactaaaggagagaaaaagctgaaacca

SEQ ID NO: 254536 - DNA, 355 bp, Glycine max
tgcaattctcacatgttcaagacatagccgaggcagccatgtgcagtatatgaattgcaattatcagtgttcttattaggcctatcctgaagccaaaggaaatgagatcggaattcctcgccgaattccaatgccacattatcacgaaataacgaggcaaacatgtccatacatgaattggagtcatacgattacttattaggcctatcctgaagccagaggaactgcgatcgatactcctcgaagagtcccagttcgaccttttcatgaaacaaggaggcaacattgttcatatctgagttgtaattatgagcttccttattgggcctctcctgaagccaacggaaatgagatc

SEQ ID NO: 254537 - DNA, 406 bp, Glycine max
cgacacacggaagcttcctatggacatgtaaagtgaacctacgagtgcacgaacttcagcctctgaccactcactactgctatctaccggctcaactcgtccgggactcaacggagacatagctcgcctctgaccctaagctttactagatgacaggcatacgaaccgtcagtgatcctggtgacagcacctccgatcgtctcagcaacgcgaccggcgcatcgtacatcgccgtctgctatgtcaaattcgatgaggccacaggcgcccgtgacgttacagtgatctataccgagcctccgtagaagcttgtcaggaagctcgactggtcaaatgacgttctctttactggtggatgggctaaaagtggtttatattatgaaactgtcacaaaaatatttaagaa

SEQ ID NO: 254538 - DNA, 428 bp, Glycine max
cttaattattaacacttccttagttcaatatggggaagccctgcactctctctctttcttccctttgcttgctactctcgtcgagtgcatgctttgctattagctccagcaagctcaacgagtgccaactcaacaacctcaacgcgttggaacccgaccaccgcgttgagtccgaaggtggtttgattcaaacatggaactctcaacaccctgagctgaaatgcgccggtgtcactgtttccaaactcaccctcaaccgcaatggcctccacttgccatcttactcaccttatccccggatgatcatcatcgcccaagggaaaggagcacttggagttgcaattccaggatgtcctgagacgtttgaggagccacatgaacaatcaaacagaagaggctcaaggtcgcagaagcagcagctacaggac

SEQ ID NO: 254539 - DNA, 268 bp, Glycine max
cttaattattaacacttccttagttcaatatggggaagccctggactctctctctttcttccttacgcttgctactcttgtcgagtgcatgctatgctattagctacagcaagctcaacgagtgccaactcaacaacctcaacgcgttggaacccgaccacctggttaagtccgaatggggattgattcaaacatggtactgtcaacaccctgagctgaaatgctccgatcggactgtttccaaacttacccttaaccgaaatggcct

SEQ ID NO: 254540 - DNA, 292 bp, Glycine max
gcaaaaatgaagctccctatggacttggaaagtgaaccaactagttcaggaaattcaaccactgagcagaaactacagccatcaaagagcaataattctcgtgtgttttatggcagcagagctttcttctgatctttagcttccctagttcatgggaatacgagcagtcactgtagattcttagaagaaaactgattttagtagtgaagtgaaataatcaatgtactatcctgagtggtttccccttctgcatttcataacatgttgattgaaccttacagggaatataact

SEQ ID NO: 254541 - DNA, 355 bp, Glycine max
agcaagcagcaagcgagacactgaacaccacaacacaaaccgcacaagagaaaagcgcacaggcaaagaatcttgcagcacaagcaaaggacgcaacgttagagaagggtcagcaaggctatgctgtgacaaaggacaccatttcaagtgcagcgaaaaccgcttcggagaaaactgcgccagtggcagagaaggccaaagactacactcttcaggctgcggagaaggccaagagtgcgggtggcacaacggcgagttacgtcggagagaaagcggtgcaggccaaggatgtcgccgtggagagtgtgaagagtgcggctgggtatgctgccaaggtggctgctgatttgaggga

SEQ ID NO: 254542 - DNA, 344 bp, Glycine max
cagcgtgaccgctcttagttggagttgagtgctaactgcttcgctggggtcagtttgggtctcattaaaggcgatagaggatgagacacaggcttactccttgaaatgctctaacgcatacgaacttaattcgcaaaccaaaagggacgcatttcctatcgcgcagagctccatcaaacgactggcacagctctacacccttgaggactaccggatggaccatgttcatcaaaagccaaacacaatctttctactcaagcatgctgccgccatttgcatgaggttggaccttagctggagagccatacttaccttgtggaacaacgacaactgagactactaca

SEQ ID NO: 254543 - DNA, 374 bp, Glycine max
tcagcacgaatgtccttcgaaggagttgatgggaactgttttcctggcgatcagtttgtgtctcattaaaggtgagagaggatgagaataaccctttctacttgagaagctctaacagcttccaaactctctttgagaaccaaaacggtcgcattcgtctcctccagagattcaacaaacgctccccacaactcgagaaccttcgagactaccggattgtccagtttcagtcaaaacccagcacaatccttttccccaaccatgctgacgccgatttcctcctcttagtccttagcgggagagccatacttaccttggtgaacaacgacgacagagactcctacaaccttaacccttgcgatgcccagagaatc

SEQ ID NO: 254544 - DNA, 352 bp, Glycine max
ctggtcaaaagatagccgctctccattgtctttgaacactcatgaccatggccaagcttgtactttccctttgtttccttcttttcagtggctgcttcgctctgagagagcaggcacagcaaaatgagtgccagatccaaaagctgaatgccctcaaaccggataaccgtatagagtcggaaggtgggttcattgagacctggaaccctaacaacatgccattccagtgtgccggtgttgccctgtctcgctgaacccttaaccgcaatgcccttcgtagaccttcgtacaccaacggtccccaggaaatctacatacaacatggcaatgtaatctttggcatgatattccc

SEQ ID NO: 254545 - DNA, 424 bp, Glycine max
aacttattaacactttccttagttcaatatggggaagcccttcttcactctctctctttcttccctttgcttgctactcttgtcgagtgcatgctttgctattacctccagcaagttcaacgagtgccaactcaacaacctcaacgcgttggaacccgaccaccgcgttgagtccgaaggtggtcttattgaaacatggaactctcaacaccctgagctgcaatgcgccggtgtcactgtttccaaacgcaccctcaaccgcaacggcctacactcgccatcgtactcaccttatccgcaaatgatcattgtcgttcaagggaagggagcaattggatttgcatttccgggatgtcctgagacgtttgagaagccacaacagcaatcaagcagaagaggctcaaggtcgcagcagcaactacaa

SEQ ID NO: 254546 - DNA, 422 bp, Glycine max
caaaaatgaagagcaccatcttctttgctctctttctcttttgtgccttcaccacctcatacctaccttcagccatcgctgatttcgtgctcgataatgaaggtaaccctcttgaaaatggtggcacatattatatcttgtcagacataacagcatttggtggaataagagcagccccaacgggaaatgaaagatgccctctcactgtggtgcaatctcgcaatgagctcgacaaagggattggaacaatcatctcgtccccatatcgaatccgttttatcgccgaaggccatcctttgagccttaagttcgattcatttgcagttataatgctgtgtgttggaattcctaccgagtggtctgttgtggaggatctaccagaaggacctgctgttaaaattggtgagaacaaagatgcaatg

SEQ ID NO: 254547 - DNA, 409 bp, Glycine max
gaaaaagaaaagcttgctcatccagcagcataggatcaaaaagagcaatgcagagaatcggccaactgttccaaggaagtttgataaggacaagcagttcacatcagaaagaatgggaaggcaactgtcatctttggggcttgatcccagtttggcaattaagagaatgcacagcagatctgtctctagaggtcggaaaagggatagatcgcctgaaacaagaagtgctgatggtatggatactgatggtgacacacctagcaaaaaacagcgtctgagtagatcactgtcacggtccaggtcagtgtcacgcccaccacatgaagttgtgcctggagaatgcttcaaggattctgctcaaaaggtcaaggcaatcaaacttgcaaagaaatctgtcaagaagagaaac

SEQ ID NO: 254548 - DNA, 353 bp, Glycine max
  unsure (1)..(353): unsure at all n locations
tgcggacattgtaagtaaatcttatgaagatggagatgataactgatgttaccgagtatgaggcaattgcaaaggaaaaattgccaaagatggcttatgactactatgcatcaggggcagaggatcagtggactgtgaaggagaaccgaaatgcattctcaaggattgtgctccagacgcgtattcttgttgatgtgagcangatagacttgactgccactgtattgtgctgcaaagtatcatgcctatcatgattgatccaacagccatgcatgagatggctcacgctgaaggacaattagctactgctagaagcacatgagcagctggcacaatcatgacactatgctcat

SEQ ID NO: 254549 - DNA, 276 bp, Glycine max
cggctcgaggtaggttgaaaaggcgtgcgtgctcatccctttagggtgagagaagaatggtgctttcggaggaggaaatcggtcgtctataccgaataaggaagacggtgatgcagatgctgagggacagaaattttctggttggtgacttcgagatcaacatgtccaagcacgagttcaagtccaagtacggcgaacacatgaagcgcgaggacctcgtcatcaacagatccaagaaggacaactccggcgaccagatctacgttttcttccccg

SEQ ID NO: 254550 - DNA, 268 bp, Glycine max
  unsure (1)..(268): unsure at all n locations
tgacattctcttgggaatttctcaagattttgaaattgctggtaatactcttatgccagctttttctgttccacaggctactgccagatcttctgaaaatccggaatcctctgcatgatctggaatttgtgttttctttcatttgtccgtttgtttaattcaataaaggaaattaggcatgaccctcttgttgagtatgctctgcctatttgaaaatttccacacctcttttaattgtcgtaatgatgtgtgaagtgtgtgttattnt

SEQ ID NO: 254551 - DNA, 404 bp, Glycine max
gtttatcagtttctcaatcgttagatctcatcttatactcaccggcgagtccatctcgcgccagcgtcgacgccgttccggccacggttccggccaccgcctttggttccttaactttctcgtccttcttcttctcagatagcagaaatatgccttctcagaaagttgaaacgggtcatcaagacacggtccatgatgttgcaatggattactatggtaagaggctggccacggcttcatcagatcacacaattaagataattggggtgagtaatacggcctctcagcatctcgcaacattgactggtcaccaaggacctgtttggcaagtggcgtgggctcaccctaagtttggttctctacttgcatcgtgttcctatgatggccgtgtcattgtttggaag

SEQ ID NO: 254552 - DNA, 363 bp, Glycine max
  unsure (1)..(363): unsure at all n locations
ctcgagccgaatcggctcgagcggctcgaggcaagcagagcttttgtcagttttctattgaccttctcggtggaggaatcttagtggacaaaactggagattggatcacacttatacaaaattctccaattagtaacttgttgagagttgctgcttggaagaaaggctgtttaatggtcaagattgtgatgtctgggaatgcagcagtcaaaaggagtgattgggcctcattggtacaagtgtttctaacanacagcaacagtacagagcattttgatgcatgtaagtggacataatcaggaccacattcctgggaaatgatcttgcaatagaggtatgtgggcctaataatggttttgaaat

SEQ ID NO: 254553 - DNA, 399 bp, Glycine max
tctcggtgaattccaattccacattttcaagaaatatggaggcaaaaatggtgatatatgaattggaattatttgttttcttattaggcctatcctgaagccaaaggaaatgagatcggaattcctcggggaattccaattccacattttcaagaaataaggaggcaaaaatgttcatatatgaattggaattatttgttttcttattaggcctatcctgaagccaaaggaaatgagatcggaattcctcggggaattccaattccacattttcaagaaataatgaggcacaaatgttcatatatgaattggaattatatggttgctcattaggcctatcctgaagccataggatatgtgatcggatttcctcgagggtacctagctcgaatgccctat

SEQ ID NO: 254554 - DNA, 385 bp, Glycine max
ccgggttggtatatcagcaaggctaaccctaaatcgctcttactctgggcggtcgttcaggggaagagatccagcacccctgttgtacgtcaagctcacaaatcaaaagcctactttaagagatatgaagtcaagttcatgagaagaagagagggaaaaaccgattaccgtgccaggattcggttgattaatcaggacaagaacaaatataacactccgaaataccgatttgtggttcgctttagcaacaaggacattgttgcacaaataatatctgctagcattgccggcgatttagttcttgctacagcatattcacatgagctgccacgatatggtcttgaagtacgacttacaaattatgcagcatcttattgcactggtc

SEQ ID NO: 254555 - DNA, 512 bp, Glycine max
  unsure (1)..(512): unsure at all n locations
agggtnnttagtggattgcaattaggtgacactatagaagagctatgacgtcgcatgcacgcgtacgctcggaattcggctcgaggaagcttcctggaggacacagtgacaagtagatgcatcgtgcatgcatgcatatagtatatatataatattgttgtctttgaataaatttgctgcatatgtacttggaggatatagcatatggttatagtatattatatagaggaatacaagatgtatgcctgtaatgtacgggttctcatatacatgggtgaaatatcaagcatactacacgcgttgatgttgtgccaatactttgcgacggcgcgttcaagggcggactgcaactagtgagctcgttgacccgcgaatgaattcccgaccggtacctgcaggcgtaccagctttccctatagagagtcgtattagagcttggcgcaatcatgggcatagctgcatactgtgtgaaattgttattcgctcacaattccacacgacatacgagccgg

SEQ ID NO: 254556 - DNA, 407 bp, Glycine max
tgaaattttcacaagaggaatttcttacagcttggtcaacccaggtccgtactgcaacaactctgttggctgatgggtgtccatatttgtatgctatggtgcatgatagttcagtgtctacaataccaggtgattatgtcattggtgttaagttgacaaccataaacaatatgtgtgcatatgggctcaatcctggtatttcaggttctcgtcttttgggcaccattcctcagtccatttcacagcaaactgtttggaatcaaatggcaacagtgagaacaccattgaattttgattctagcaagcagagcttttgtcaattttctattgaccttctcggtggaggaattttagtggacaaaactggagattggatcacacttatacaaaattctccaattagtaac

SEQ ID NO: 254557 - DNA, 379 bp, Glycine max
acccaatcatgccatatttgaggcgaataaatgcaacctccacaaaggcttatgctaccagaaccatccttttcctgaaaaatgacggaactttaaggccacttgccatagagttgagtttgccacatcctcagggagatcaatctggtgcttttagtcaagtttttctgcctgcagatgaaggtgttgaaagttctatttggctgctagcaaaggcttatgtagttgtgaatgactcgtgctatcatcaacttgtcagccattggttaaacactcatgcagttgttgagccattcatcatagcaacaaacaggcatctcagtgttgttcaccctatttataaactccttcaccctcactatcgtgacaccatgaacat

SEQ ID NO: 254558 - DNA, 378 bp, Glycine max
acccaatcatgccatatttgaggcgaataaatgcaacctgggcaaaggcttatgctaccagaaccatccttttcctgaaaaatgacggaactttaaggccacttgccatagagttgagtttgccacatcctcagggagatcaatctggtgcttttagtcaagtttttctgcctgcagatgaaggtgttgaaagtcctatttggctgctagcacaggcttatgtagttgtgaatgactcgtgctatcatgaacttgttagccattggttaaacactcatgcaattgttgggccattcatcatagcatcaaacaggcatctcattgatgttgacactatttataagctcctttacgctcactatcgtgacattatgaaca

SEQ ID NO: 254559 - DNA, 359 bp, Glycine max
tatatactatgatgagagtgcggtttcctttgttggtgttgctgggaactgttttcctggcatcagtttgtgtctcattaaaggtgagagaggatgagaataaccctttctacttgagaagctctaacagcttccaaactctctttgagaaccaaaacggtcgcattcgtctcctccagagattcaacaaacgctccccacaacttgagaaccttctagactaccggattgtccagtttcagtcaaaacccatcacaatccttctccccaaccatgctgacgccgatttcctcctctttgtccttaccgggagagccatacttaccttggtgaacaacgacaactgagactcctacaac

SEQ ID NO: 254560 - DNA, 245 bp, Glycine max
tctatactatgatgcgagtgcagctcccttctgtgacggagctgatcactgctagactgacttcactctacagtttattaaaggtcctacatgaccagactggccgtggctactccagtaactatatactgttttacactctcttggagaaccacgccggtcgcaatctaattcatctagagacatcacaaactctactttcatcttcagaacctacaaacgtacctgtccttcagcttcactca

SEQ ID NO: 254561 - DNA, 401 bp, Glycine max
ccattacgccaaacttgttctaccatcaacaccacgatgcttcctctctggtgggaggctctgtttcttgctcttgcacaatatagccatgtccatgcatgctacctgagggagattattgggaagctgttcggccagaacactcccattcccactggactgggagagcttataaagcctctccctgcaggtgttgaaatcgatgaactccctaagcaaattgatgatacacagtacccaaaaacattcttctataaagaagaccttcatccaggcaaaacaatgaaagtacaattcaccaagcgtccctatgcacaaccttatggtgtatatacatgggtaacggatattaaagacacctctaaagaaggatatagttttgaagagatatgcatcaagaa

SEQ ID NO: 254562 - DNA, 499 bp, Glycine max
tgttatagattgcgtgacactatactatagaagagctatgacgtgccatggacgcgtagctcagcattcgactcgagaccgattgctagaatggaatttcgatgctcagtcatctctgttacgggtctctctctcttgctcttgcatgaaaaagccatgtccatgcatcctacctgaggaagattattgggaagctgtttggccaaacactcccattcccactgcactgcgagagcttctaaagcctctccctgcaggtgttgaaatcgatgaactccctaagcaaattgatgatacacagtacccaaaaacattcttctataaagaagacctttatccaggcaaaacaatgaaagtacaattcaccaagcgtccctatgcacaaccttatggtgtatatacatgggtaacggatattaaagacacctctaaagaaggatataggtttggagagatatgcatcaagaaaagagcgttttgacggagaagagaacttttg

SEQ ID NO: 254563 - DNA, 494 bp, Glycine max
tggtgacacagctgtaacgcagagacaagcttgcatgcctgcagggggactctagaggatcccctcggggaattccaattccacattttcaagaaataaggaggcaaaaatgttcatagatgaattgaattatttgttttcttattaggcctatcctgaagccaaagaaatgagatcggaattcctcggggaattccaattccacattttcaagaaataaggaggcaaaaatgttcatatatgaattggaattatttgttttcttattaggcctatcctgaagccaaaggaaatgagatcggaattcctcggggaattccaattccacattttcaagaaataaggaggcaaaaatgttcatatatgaattggaattatttgttttcttattaggcctatcctgaagccaaaggaaatgagatcggaattcctcgggggtaccgagctcgaattccctatagtgagtcgtataaattcgtaatcatgtcatagct

SEQ ID NO: 254564 - DNA, 409 bp, Glycine max
  unsure (1)..(409): unsure at all n locations
gagaagaagaagagagagtgatggagtgcgtattcggattggtgggtaatgggtttgcgatcgtggtggctgattcatcggcggtgcacagcatcctcgtccacaagtccaacgaggacaagatcatgctcctcgattcccacaaactcattgccgctagcggcgagcccggagacagggttcagttcacagagtacattcagaagaacgtcgccttgtatcagttccgtaacggcatccctcttaccaccgtcgncgccgccaatttcacgcgtggcgaactcgccactgctctccgcaagaacccatactctgtgaacatccttcttgctggttatgacaaagagacgggccctgaactatactatattgactacattgcaacgcttcacaagcttgaaaagggggc

SEQ ID NO: 254565 - DNA, 295 bp, Glycine max
tccatgtcgtgccctcacgtgagcggcttagccgcgctgatcaagtcggctcaccctgattggagcccagccgcggtccgatcggctcttatgacaacggcttacacagtttacaaaaccggtgagaagctgcaagacagcgcaacgggaaagcccttcacgccgttcgatcacggttccggacacgtggaccccgtcgctggcctcaatccaggactcgtctacgatctaacggtggatgattatttagggtttctctgggcgttaaactactcagctttcgagatcaacacat

SEQ ID NO: 254566 - DNA, 413 bp, Glycine max
  unsure (1)..(413): unsure at all n locations
tgagggagttgatgatgcagctgttaaggttgttgacattggtgacacattcagacttcaggagcaacccgcattcgataagaagcagtttgttaccttcatgaagaggtttatcaagaatttgactcccaagctcgatgcagagcaacaggagttgtttaagaagcacatcgagggagcaactaaatacctgctctctaagattaaagatttccaattttttgttggtgagagcatgggtgatgatgcttgcttggtctttgcctactacaaggacggcgctgctgatccaacattcctgtactttgcatatgccttaaaggaggtcaagtgctaagtgacttaatgtaccgagctatctactcattgtatctangttttttttacgttctgtcctaagctacttgaaactt

SEQ ID NO: 254567 - DNA, 316 bp, Glycine max
gctaacttcaacacctttaattttctaaaagtaattcatcgggtgggtaccaccggagaagatgagtcaggagcaaccactgcgtcccaaagccaaaaccccatcaaatacggcgacgtttttgtcgtcttcggcgaccttgcacataatcccgtagcaccggaagatgctgccatgatgcaaagcgcggtaactcgagtgctcggacaaacccaacccggcggagcagcttccgccatgcaatctgccgccaccagtaatgaacaggctggccttgtggtgcaccggaacgtcaccgactttaccggcgaccgtg

SEQ ID NO: 254568 - DNA, 341 bp, Glycine max
gtttggagagattcaggaaaaagttgtattgaaattttcacgggaggaatttctacagcttggtcaacccatgtgcgtcctgcaacaactctgtggctgatgggtgtccatatttgtatgctatggtgcatgatagttcagtgtctacaataccaggtgattttgtcattggtgttaagttgacaaccataaacaatatgtgtgcatatgggctcaatcctggtatttcaggttctcgtcttttgggcaccattcctcagtccatttcacagcaaactgtttggaatcaaatggcaacagtgagaacaccattgaattgtgattctagcaagcagagcttt

SEQ ID NO: 254569 - DNA, 331 bp, Glycine max
gctaacttcaacacctttaattttctaaaagtaattcatcggctgagtaccaacggagaagatgagtcaggagcagccacggcgttccaaatgcaaaaccccatcaaatacggcgacgtttttgtcgtctgcggcgaccttgcacagaagcccgttgcaccggaagatgctgccatgatgcaaagcgcggaaactcgagtgctcggacaaacccaacccggcggagcatcttccggcatgcaatctgacgccaccagtaatgaacaagctggccttgtcggtcaccgggacgttaccgacgttaccggcgaccgtggcgtcacagtcacag

SEQ ID NO: 254570 - DNA, 409 bp, Glycine max
gagaagaagaagagagagtgatggagtgcgtattcggatgggtgggtaatgggtttgcgatcggggtggctgattcatcggcggtgcacagcattctcgtacacaagtccaacgaggacaagatcatgctcctagattcccacaaactcattgccgctagcggcgagcccggagacagggttcagttcacagagtacattcagaagaacgtatgcttgtatcagttccgtaacggcatgcctgttaccaccgacggcgtcggcaatttcacgcgtggcgaactcgtcactgttctcccgaagaacccattactttgtgaacatacttcttgctgttgatgactaagagacgggccctgaactatactatttggactacagtgctacgctttatcagcttttataagggg

SEQ ID NO: 254571 - DNA, 354 bp, Glycine max
gctaacttcaacacctttaattttctaaaagtaattcagcggctgaataccaagcggagaagatgagtcaggagcagccacggcgtcccaaaggccaaaaccccatcaaatacggcgacgtttttgtcgtctccggcgaccttgcacagaagcccgtcgcaccggaagatgctgccatgatgcaaagcgcggaaactcgagtgctcggacaaacccaacccggcggagcagcttccgtcatgcaatctgccgccaccaggaatgaacaggctggccttgtcggtcaccgggacgtcaccgacgttaccggcgaccgtggcgtcacagtcacagaaactaaagtccctggaagac

SEQ ID NO: 254572 - DNA, 310 bp, Glycine max
gctaacttcaacacctttaattttctaaaagtaattcaccggggggataccaagcggagaagatgagtcaggagcagccacggcgtcccaaaggccaaaaccccatcaaatacggcgacgtttatgtcggctccggcgaccttgcacatgatcgcgtctcaccgtaagatgctgccatgatgcaaagcgcggaaactcgagtgctcggacaaacccaaccctgcggagcagctttccgtcatgcaatctgccggcaccaggaatgaacaggcttggccttgtcagtcaccggtactttaccgacgttacc

SEQ ID NO: 254573 - DNA, 407 bp, Glycine max
  unsure (1)..(407): unsure at all n locations
aaatttctttgcagccttggaatgctttcaggcctgatggagtaattatcttctcggacatccttacaccacttcctgcgtttggagttgattttgacatagaagaagtaaggggacctgttatacattcgcccattcgttctgaggaaggattaaaggttttacatccaattgacctggacaggcttaaatttgttggagattcactaaagatactgcgccaagaggttggtggtcatgcagctgttttgggttttgtgggagcaccttggacaatagcaacatatatagtggaagggggcaatagctgattacgttattttccaagtggagtctngggctcattgcatacaaatatttgattcatggngtggacaactaccacctgaaatgtgggaacgctggtc

SEQ ID NO: 254574 - DNA, 196 bp, Glycine max
tccatgtcgtgccctcacgtgagcggcttagccgcgctgatgaagtcggctcccctgattggagcccagccgcggtccgatcggctcttatgcaacggcttacacagtttacaaaaccggtgagaagctgcaagacagcgcaacgggaaagccctccacgccgttcgatcacggttccggacacgtggaccccgtc

SEQ ID NO: 254575 - DNA, 425 bp, Glycine max
tctagggtttacagagaagctaagaggcgcagccgtagcaaaagctcgtggaattgctagcaatggcgaggatcaaggtttacgagctgaggcagaagacgaaggctgatctgctgaatcaactgaaggacctgaaggcggagcttgccttgcttcgtgttgctaaggtcaccggtggtgcccctaacaagctttccaagataaaggtggtgaggttgaacattgcccaggttttgacggtgatttctcagaagcagaaggctgcgttgagggatgcctacaagaataagaagtacttgcctctcgatctccgccctaagaagaccagggctattcgcaggaggcttactaagcaccaggcatcattgaagacagagagggagaagaagaaagagttatatttcccactaaggaaatatgctatc

SEQ ID NO: 254576 - DNA, 305 bp, Glycine max
caattttctattgaccttctcggtggaggaattttagtgggcaaaactggagattggatcacacttttacaaaattctccaattagtaacttgttgaaagttgctgcttggaagaaaggctgtttaatggttaagattgtgatgtctgggaatgcagcagtcaaaaggagtgattgggcctcattggtacaagtgtttttaacaaacagcaacagtacatagcatttggatgcattaagtggacaaaatcggaaccacatttctgggaattgatcttcccaatagaggtatgtggtcctaataat

SEQ ID NO: 254577 - DNA, 297 bp, Glycine max
tatatactatgatgagagtgcggtttcctttgttggtgttgctgggaactgttttcctggcatcagtttgtgtctcattaaaggtgagagaggatgagaataaccctttctacttgagaagctctaacagcttccaaactctctttgagaaccaaaacggtcgcattcgtctcctccagagattcaacaaacgctcccaacaacttgagaaccttcgagactaccggattgtccagtttaagtcaaaacccaacacattccttctcccccaccatgctgacgccgatttcctcctct

SEQ ID NO: 254578 - DNA, 424 bp, Glycine max
agaaaagaagaaaggaaagaattgatcgttgaaaatgcagggaggaaagaaagcgggagagtccattaaggaaacagctacaaacattggtgcttctgccaaggctggcatggagaagaccaaggccactgtccaagagaaggcagaaagaatgacagcacgtgatccggtgcaaaaggagttggcaacccaaaagaaagaggcaaagatgaaccaggcggagctggacaagcaggcggcgcgtcagcataacacggcggccaaacagtccgacaccacggctgggcacatgggacatggccaccacaccaccggaaccgggactggaaccgtcacgtattccaccaccggcgaatatggtcagcccatgtgggcccaccagacgtcggcaatgcctggccatgaaaccgggcagcccacgggc

SEQ ID NO: 254579 - DNA, 378 bp, Glycine max
acccaatcatgccatatttgaggcgaataaatgcaacctcgacaaaggcttatgctaccagaaccatccttttcctgaaaaatgacggaactttaaggccacttgccatagagttgagtttgccacatcctcagggagatcaatctggtgcttttagtcaagtttttctgcctgcagatgaaggtgttgaaagttctatttggctgctagcacaggcttatgtagttgagaatgactcgtgctatcatcaacttgtcagccattggttaaacactcatgcagttgatgagccattcatcatagcaacaaacaggcatctcagtgttgttgacactatttataaactccttgactctgactatcgtgacaccatgaaca

SEQ ID NO: 254580 - DNA, 235 bp, Glycine max
  unsure (1)..(235): unsure at all n locations
gaagcttcctggaggacacagtgacaagtagatgcatcgtgcatgcatgcatatgtatatatataatattgttgtctttgaataaatttgctgatatgtccttggaggatatagcatatggttatagtatattatatagaggaataaaaaatgtatccctgtaatgtaagggttctcatatacatggctgaaatataaagcataatanaggcattgatgttgtgccaatacataa

SEQ ID NO: 254581 - DNA, 281 bp, Glycine max
tattgaacttatctctcttctcacttctgttgttataagtaacttccctcatcattacaaaacaatcctccacaggtttcaaaatgctgaaatcgggcatgggaattgaggagagaaagcaagtgaagaagccagcacaagccagctcgagaaaagggtgtatgagagggaaaggaggtcccgagaatgctagttgcacctacaaaggtgtgaggcagagaacatggggaaaatgggttgctgaaatccgtgaacccaatcgaggtgctaggctctggctc

SEQ ID NO: 254582 - DNA, 358 bp, Glycine max
  unsure (1)..(358): unsure at all n locations
atactatgatgagagtgcggtttcctttgttggtgttgctgggaactgttttcctggcatcagtttgtgtctcattaaaggtgagagaggatgagaataaccctttctacttgagaagctctaacagcttccaaactctctttgagaaccaaaacggtcgcattcgtctcctgcagagattcaacatacgctccccacaacttgagaaccttcgagactaccggattgtccagtttcagtcaaaacccaacacaatccttctgccgcaccatgctgacgccgatttnctgctttttgtccttagcgggagagccatacttaacttggtgaacaacgacgacagagactcctacaacct

SEQ ID NO: 254583 - DNA, 374 bp, Glycine max
tcggggaattccaattccacattttcaagaaataaggaggcaaaaatgtgcgatatatgaattggaattatttgttttcttattaggcctatcctgaagccaaaggaaatgagatcggaattcctcggggaattccaattccacattttcaagaaataaggaggcaaaaatgttcatatatgaattggaattatttgttttcttattaggcctatcctgaagccaaaggaaatgagatcggaattcctcggggaattccaattccacattttcaagaaataaggaggcaaaaatgttcatatatgaattggaattatttggtttcttattaggcctatcctgaagccaaaggatatgagatcggaattcctcgg

SEQ ID NO: 254584 - DNA, 375 bp, Glycine max
  unsure (1)..(375): unsure at all n locations
atacatatatacgagagagtgagtaatcgagaaagagaagaggcatatatatcaaaatggctgcagagatcggaaaggagtcattgataactggaactactaatgcacagttactggacagagaagggtagaaatgacttaaaaaaatttttaccaaaacatacttgccaagagcattgaagctcctgatacgggtcacccaaatggacagcaggccacaggcaccacaacttatctgttcttcagcagcattgtgcttttttgatcaagatgccaatggaatcatttacccttgggaaacttacatggggctgcgttctattggatttaatgttgntgcatctggtattatggctattggtatcaatgttggat

SEQ ID NO: 254585 - DNA, 279 bp, Glycine max
tctcctgtcttgataaataaaacaaaaaaaaaaaaaaaaaaaaaaaaaaaaaaaaaaaaaaaaaaaaaaaaaaaaaaaaaaaaaaaaaaaaaaaaaaaaaaaaaaaaaaaaaaaaaaaaagggggcggcccccaactattgacctcttcaacccggaatttatttccggcccggtccctgaaggcttccaacctttccttatagggagtcgttttaaacctgggcgtaacaagggccatagctgttccctgtgaaaaattgttttccgttaaaatttcc

SEQ ID NO: 254586 - DNA, 238 bp, Glycine max
aacttactaacactatccttagagcaatatggggaagcccggggggactctgtatcatgcttgcctttgcttgctactctagtcgagtgcatgctttgctatgaccttcagcaagttcaacgagtgccaactcaacaacctcaacgcgttggaacccgaccaccgcgtttagtcccaaggtggtcttattggaacattggaactatcaacaccatcagctgcaaaacgccggtgtcac

SEQ ID NO: 254587 - DNA, 339 bp, Glycine max
aggttccatgttagatcttaaaatttctcaatctaaaattgcacttcccaaaaacacagttggaggaaccattctgcgtagtgatctattggcaaatttttggacagagggcaattttagagcaagtgttgatttgcagcgcaacgcatcgtattaaaggaatgattaaaatggtggccacagttggtattcctgagattcaggtatagcattggcctgtgctatgaataagtcttttggggggcgtcccagttctgatatttacaccatctgctctcaagactggtgattatggaatcctgcttgcacaaaagcaatgactatgtcatttaatccaaa

SEQ ID NO: 254588 - DNA, 180 bp, Glycine max
aggttccatgttagatcttaaaatttctcaatctaaaaggggacttcccaaaaacacagttggaggaaccattctgcgtagtgatctattggcaaattttttgacagagggcatttttagagcaagtgttgatttgcagggcacgcttcgtattaaaggaatgattaaaatgttggccac

SEQ ID NO: 254589 - DNA, 508 bp, Glycine max
  unsure (1)..(508): unsure at all n locations
agtgnattgcaagcttccctgatactatgagagacatgctagcatgcctgcacgtctactctagaggatcccctcggtgaattccaattccacattttcaagaaataaggaggcaaaaatgtgcatatatgaattggaattatttgttttcttattaggcctatcctgaagccaaaggaaatgagatcggaattcctcggggaattccaattccacattttcaagacatatggaggcaaacatgttcatatatgaattggatttacttgttttcttattatgcctatcctgaagccaaagganatgagatcggaattcctcngggaattccaattccacattttcaagacataaggaggcananatggtcatatatgaattgtaattaattgttctcttattaggcctatcctgaagccaaaggaaatgagatcggaattgcctcggggtaccgagctcgaattccctataatgagtcgtattagattcgtaatcatgtcatagctgn

SEQ ID NO: 254590 - DNA, 135 bp, Glycine max
ggctcgagaaggaaataattgatctttgaaaatgcagggaggaaagaaagctggagagtccatcaaggaaacagctgcaaacattggtgcttctgccaaggctggcatggagaaaaccaaggccactgtccagga

SEQ ID NO: 254591 - DNA, 210 bp, Glycine max
acttggagatcgagacgatcactccctcttgctgtctgtgctcctcttcctctcggaacgactttggaagttctttgagatcacccctgagaaaaacccacagcttcggacttggatatcttcctcagttctgtggatatcaacgaaggagctcttcttctaccacacttcaattcaaaggccatagtgatactagtgattaatgaagga

SEQ ID NO: 254592 - DNA, 338 bp, Glycine max
tcattcacgagattgaggcggcggttgatttggaagaaacccagctaaggtaacatcatttctgtgatggtgtacttggctccggtgccaacgttttaccggatatacaaaaagaaatgcacggacggtttccactcgctgccatacttgttgtcattaatgagttctatgctttggttatactacgccttcctcaaaattcatgacggcgttgttccccttattacgatcaactcgatcggatgtgtcatagagctcatctacattctcacctacattaaatatgcgcacaaggatgcaaggaacttaacctataccctatttgcggcgatgaatat

SEQ ID NO: 254593 - DNA, 289 bp, Glycine max
tcattcacgagattgaggcgggggttgatttggaagaaacccagctaaggtaacatcatttctgtgatggtgtacttggctccggtgccaacgttttaccggatttccaaaaggaatggcacggacggtttcaactcgctgccttcctggtggtcattaatgagttctatgctttggttatactacgccttcctaaaaattcatgacggcgttgttccccttattccgatcaactcgatcggatgtgtcatagagctcatctacattctcacctacattaaatatgcgc

SEQ ID NO: 254594 - DNA, 319 bp, Glycine max
cgctgctggaggcacatcaatgaccctgaatggggtctgtgcaagtacaggggttgcaatacacagttgcttgactgttgctgaccaatacgatttccagattaacatacataccgacaccctaaatgaagctggatttgtcgaacatagcattgcagcatttaaaggaagaactattcatacttaccacagtgaaggtgcaggtggtggtcatgctccagatttgatcaaagtttgtggtttgaagaatgtattgccttcataaccaaaccgaacacgccctttaacactcattactatatatgagcatcttgacatg

SEQ ID NO: 254595 - DNA, 252 bp, Glycine max
ggagaagggaaggtgagtagtaatggtcatggatgttgcggatcagggccaggctatgcttccccactggaagccatttctggtcccagagagtctctcatttatgtaacctctgtctacacagggaccggaatagagaagccagactatttggcgacagtggatgtggatccaaactctccaacttattccaaagtcatccataggcttcctgttccttatttacgtgacgaattgcatcacacaggctgg

SEQ ID NO: 254596 - DNA, 287 bp, Glycine max
cgatctagggacaagggaaggtgagtagtaatggtcatggatgttgcgaatcatggccaggctatgcttgcccactggaagccatttctggtcccagagagtctctcatgtatgcaacctgcctctacacagggaccagcctagagaagccagactatttggcgacagccgatgtggatccaaactctacaacttattccaaagtcatccataagcttactgttgcttatccaggtgaggactttcatgacacaagctgttatccatgcaaatctcgccatggagac

SEQ ID NO: 254597 - DNA, 270 bp, Glycine max
  unsure (1)..(270): unsure at all n locations
gtcgacctctgtcaatcagcatgggaaatgcaattagggtgtctcaaaagtcggatagccaagctacctttgaccttgtctgaatcagaagcaaaagcttctctcgagtcagatattgagtgttttataagtgaaaagattatacttgccaacaaggtgatagtgaagcatgctgtcaccaaaataagagatggtgatgttcttctaacttttgggtcttcatctgctggtgaaatgatactatngcatgcacatgagttgggaagacag

SEQ ID NO: 254598 - DNA, 200 bp, Glycine max
gtagcagaccaagctagctagctagcacgcaagcacagaggtggaggcaaagcgaggccatgccctcatgtgcttggcacgtgtttcactcttcctctgcgctctaaccctatccgctgctcacggaagcaccacggttcaagacatcgcgagaaagttgaaactcggggacaacgagcttctgcgcacggagaagaagt

SEQ ID NO: 254599 - DNA, 326 bp, Glycine max
  unsure (1)..(326): unsure at all n locations
caaataattaattaaattcctcgtggaatcttgttgaagccatgtctacagcggtcaggtcatcaagtgcagagctgcggtggcatgggaacagggaagccactatcgatagaaaccatagaagtggcaccaccccagaaaggtgaagtgcgtttgaagatcctcttcaactccctntgccgtacagatgtttactggtgggatgctaagggccagactccgctgtttcctcgtatcttatgccacgaagcttcngngattgtggagagcgtgggcaaaggtgtgacacatctgaaaccaggtgaccatgctctcccaatattcac

SEQ ID NO: 254600 - DNA, 303 bp, Glycine max
gtggtagtggacgtggtggtttacccaccactgcttgagttagttctgcagttaacaatcgctcctcagatatcaacaaaaagattcgcacagcacttgggaaaggtaagaaaattgtttttcttaccagagttgatccttttccagtagctttactggctgttctttttggcgttaagaatgaaattctgagttctaacgccactaaccctatgctgacgcgacttcttgagaactgtaagagtctcaaatatctggttgatgagtgtccctttgcatttgtgaactagtatggtaatattt

SEQ ID NO: 254601 - DNA, 259 bp, Glycine max
gtctggtcagagacatcatgaaataacggctgatcatactagagttcatcgttttccagtatctttactggctgttctttttggcgttaagaatgaaattctgagttctaacgccactaaccctatgctgacgcgacttcttgagaactgtaagagtctcaaatatctggttgatgagtgtccttttgcatttgtgaactagtatgtaatattttattcacttaaataaagcgcattactatgtgcaatgagtgtgttt

SEQ ID NO: 254602 - DNA, 219 bp, Glycine max
cacaatggcttaactagcagctcggccgattgatcacatgcattgaataaccctaaacttgagctccttccttgaccgctcaagtgccacctcacagtgtccatgtccacacaacatcacaccgctacgaagctggcgtcgtcccccccggagcccgtttcgaaccgccgcgttatgaagccgtcgtcaaagcgccctccatttaccattccgagagag

SEQ ID NO: 254603 - DNA, 166 bp, Glycine max
ttaaggaatacgcccgtgtcactgttttcaaacacaccctcaagcggaacggctccacttgccatcttactcaccttatccccaaatgatcatgtcgttcaagggaagggagcaattggatttgcatttccgggatgtcctgagacgtttgagaagccacaacagc

SEQ ID NO: 254604 - DNA, 288 bp, Glycine max
cacaagggtcgacccaacaacttggcccattggtcacaggcccacaattcctcttttcttgtgcaccttccttccttgttcaaaagggtcttcctagaaacactcaaggtgtggctgggttaggccatgcaccaatttctcttccaaaccaactcgcttcccactttggcctacaacgccaattcaccacttgcctttctcgctaccctacttcaaagggtgctataatattcggggatgcacctaacaccatgcgacagtttcaaaaccaagatattttccacgatt

SEQ ID NO: 254605 - DNA, 312 bp, Glycine max
acttgtgattgatgataacacaaattccctcagaactgggcatgtctattaggtgtgaaaacaacaccacgcatacagcaagatggccacttccgacagtaacatgctactaaattatgttccagtttatgtgatgctcccactcggagttgtcaatgttgacaatgtttttgaagacccaaatggccttaaagaacagctcttgcagcttcgagctgcggctgttgacggcgttatggttgatgtgtggtgggggatcatagaactgaaggggcctaagcagtatgattggagagcctacaggagtttgtt

SEQ ID NO: 254606 - DNA, 256 bp, Glycine max
  unsure (1)..(256): unsure at all n locations
ctctagcctgatggaatctgaatctcttcatccgacctagacatattaataatacgagctggcaatccagtatgggtcaacgctacctgacatctgaagtgctttgcttttggtatcaatgcctcgaacagccagaggaactcccttgcgngctcgaaagacaccgtgataagccagatacctagtcaagtgcaggagcttgacgtccctgcgtctgcataagatattgagaacctcataaagagccatggtgagt

SEQ ID NO: 254607 - DNA, 248 bp, Glycine max
ctcatggcgggaggcatctacactgtcttgttgcaacctggtcatggttatctattgtgttggactgctgtcatggggggaaataaaccggctcatattgggacttacctctcatagagaaccaacgatgagaaactgagaaaccgttgtggaccagctcaaatgcctaatgctctgctcttgccttctagtaaggaaggattaactttcagaggaattccaaactagttccctatctgaagaggttg

SEQ ID NO: 254608 - DNA, 249 bp, Glycine max
actagcgatagctgataagagagataccaacaggactggggaaatatgataagttgagattccctttgaagaaaagatggcatcccataggcaaagctatgaagctggtcaaactaagggccgaactgagacgaaccagacgatgggcaatattggagagaaggctcaaggctgcaaaggagaagacccaggaaatggcccaagctgcaaaggagaagacccaaccaaacagcccaagctgccaaggac

SEQ ID NO: 254609 - DNA, 397 bp, Glycine max
  unsure (1)..(397): unsure at all n locations
atactaagagctatgacgtcncatgcacgcgcgcgtacgctagcaattcaactcgagtccatgccgtgccctcacgtgagcggcttacccgctctgggggaggcggctcccctgattggagcccatcctcggtccgatcggctcttatgcaacggcttacacagtttacaaaaccggtgagaagctgcaagacagcgcaacgggaaagccctccacgccgttcgatcacggttccggacacgtggaccccgtcgctgtcctcaatccaggactcgtctacgatctaacgggggatgattatttaggttttctctgcgcgttaaactactcagcttccgagatcaacacattggccaagagaaaatttcagtgcgacgcgggcaagcagtacagtgtg

SEQ ID NO: 254610 - DNA, 244 bp, Glycine max
acaattccttcacttgcagcactgttgcatcatcatcttcattgcaaaacctaaacttcaccttcaaccatgaccacacaagtaccacacacagtgtccaagtccacacaacaacacaccgctacgaagctggcgtcgtcccccccggagcccgtttcgaaccgccgcgttatgaagccggcgtcaaagcgccctccatttaccattccgagagaggtccaacgacttcccaggtcctcgccgt

SEQ ID NO: 254611 - DNA, 313 bp, Glycine max
cgagcttaattattaacacttccttagttcaatatggggaaggccttcactctctctctttcttccctttgcttgctactcttgtcgagtgcatgctttgctattagctccagcaagctcaacgagtgccaactcaacaacctcaacgcgttggaacccgaccaccgcgttgagtccgaaggtggtttgattcaaacatggaactctcaacaccctgagctgaaatgcgccggtgtcactgtttccaaactcaccttcaaccgcaatggccttcacttgccatcttactaaccttatccccggatgatcatca

SEQ ID NO: 254612 - DNA, 267 bp, Glycine max
acgtggccatccattacaccatccaaaatctcagattaggaacactcgccatacccgttaacaagcctggtagatttgagagtttcttcctatctagcactgaagctcaacaatcctacttgcaaggattcagcaggaaccattttagaggcctcctaccattcccaaattcgaggagataaacaaggttctgtttagtagagaggaagggcagcagcaaggggagcagaggctgcaagagagcgtgattgtggaaatctcgaagga

SEQ ID NO: 254613 - DNA, 218 bp, Glycine max
agagcttaactattaacacttcattagttcaatatggtgaagggattcactcctggtctacctcacctctcatgaatcgttttgatacgagacatccttgttctcaagctcatacagtatcagccagggcttacccaacaccctcatcactttgtaacctgaccaccgtttcaagccctaacgtggattgattcaaacctataactctcaacaacctg

SEQ ID NO: 254614 - DNA, 186 bp, Glycine max
acctggctatacacgacaccatccacacactaagatgaagaacggtttccatactccactacttgctagccctatctcttacttgctctcttcttatcttcttatccgactcattcacccgtacggaacccaataaaccttgttgttctacccgttcaaaatggatgggttccacagggggctcca

SEQ ID NO: 254615 - DNA, 225 bp, Glycine max
gggattttgtcaccagttggtcctcgtggaaggctcttgaggagattgctttcttggataggacttattccacctatgccagaaacaccttttgaggttcacaatgataataacgctccttgaaccattcctaaggcctacttttttatcaaggatatcactaagtgatatatggagacctgcatcaaggaaatactgcagaaatgatacttggaaaatgttgaa

SEQ ID NO: 254616 - DNA, 247 bp, Glycine max
aagaaacataccgaaggagaacatcatggtggtgctaaagcggtgtcaggtgctactgttgctcgtggtgggagcttctcgcaccgacctgagcgctgagcaaacgtgaccatgctcataggaagggatcatgatgagcacccaaaaccatgctgagacctcatgaatgtgctctcgctaatggcctcataaaagcactggcgaagttatacggcgaaattcatgcaatctacattgtaaaagctgt

SEQ ID NO: 254617 - DNA, 228 bp, Glycine max
aagaaacataccgaatgagagcatcaaactcttcttcggggatttccattgcgaagcgttactttttcttcttctttctcttcattttcttcgctcttcgatcttccgtccggggactgctccgaataccaccaccaccactcgccgatggccacgatcggaggcttacacgactcccaaggctctcaaaacagcgtcgaaaccgaagccctagctcgattcgccgta

SEQ ID NO: 254618 - DNA, 260 bp, Glycine max
aacgatgagtatgaagaacatcatcgtggtgctcaaggggggttagttgcttcttttccttgtgggggttacagctgcacgcatggaactgagctgcttcaaaagggatcagtcattaagttacgatgatgatgagcatccaaaaccttgctgtgatctctgcatgtgctctcgctcaatgcctcctcaatgcacttgtgaagatattaggctgaattcatgccactcagattgtaagagctgtttgtgcacacgctcac

SEQ ID NO: 254619 - DNA, 216 bp, Glycine max
gaagaagatgggtttgaagaacaacatggtggtgctaaaggtgtgtttggtgctacttttccttgtggggggtactactagtgccaacttgaggctgagtaagcttggcctgctcatgaaaagtgatcatcatcaacactcaaatgatgatgagtcttcaaaaccatgctgtgatcaatgcgcatgcacaaagtcaaaccctcctcaatgccgctg

SEQ ID NO: 254620 - DNA, 265 bp, Glycine max
atggcctccacttgccatcttactcaccttatccccggatgatcatcatgcccaagggaaaggagcacttggagttgcaattccaggattcctgagacgtttgaggagccacatgaacaatcaaacagaagaggctcaaggtcgcagaagcagcagctacaggacagtcaccagaagattcgtcacttcaatgaaggagacgtactcgtgattcctcctggtgttccttactggacctataacactggcgatgaacccagtgttg

SEQ ID NO: 254621 - DNA, 269 bp, Glycine max
caccttttcttttcccacacaagtacgtttgctctagatgcaacatattacattggaaccatttgctttcttatgaggcctatcctgaatccaatggaaatgacatcggaattccttggggaattccaattccacattttcaagaaataaggaggcaaaaatgttcatatatgaattggaattattggttttcttattaggcctatcctgatgccaaaggaaatgagatcggaattcctcggggaattccaattccaaattttcaagaa

SEQ ID NO: 254622 - DNA, 273 bp, Glycine max
gccaccttttatcaccaccgtttgttgccaatgtcacgggcgagcaattacccaaggctcgtggaggaagtgggcgtgccttcgtgacctttcttgctgggaacggtgattacgtaaagggtgtcgtgggtttggccaaaggactgagaaaggccaaaagcatgtaccctttggtggttgctgtgttaccagatgttcctgaagaacatcgtgagattctcaaatcccaaggttgcattgtcagggagattgaacctgtgtaccttcctgaga

SEQ ID NO: 254623 - DNA, 181 bp, Glycine max
caagcatatatgaaggtgtggtgaggccatcttatatgaaggaatatcaaatatattttgtgtaataataaaactatggcctatgtattaccaccctccgacccagcctatgttaatatctgagtggcgtagtacctttgaatcgccttaataaaaggtcagtcgttcaagtttggtcttt

SEQ ID NO: 254624 - DNA, 165 bp, Glycine max
taaaattcttccaccaagttatgggtttccttgtgttgctggttttctcctcttaggtctctcttctagttccagcatatcaactcatgttccatattggaccttgacctaaccaagtttaccacacagaaacaggtgtcttcactgttccaactatggaagagt

SEQ ID NO: 254625 - DNA, 300 bp, Glycine max
ctaaatccgtgcttatactaaccgatcattgtatgagcaggatagcagaaatgattatcagtctttgtggtggtgatgaaaaattgatgcttgaaaggacacacctgctgttggcttgttgttcaaggatggcaatttgtaagaaagatgtttggagagttgaatgtggaatcccttctggatttccgttcacagttatttgtattagcatttttaatgagatgctcattagatatagctatgaaaaattactgcgccaggctaaagctccaagtatgtttttacaatccttcaaaaatt

SEQ ID NO: 254626 - DNA, 240 bp, Glycine max
ggacgaaggtatttcacccaaatataaatagcaatggaggcatttgccttgacatattgaaggagcagtggagccctgcgctaactatttcaaaggtgttgctctcaatttgttccctgttgacggaccctaatcctgacgatcctttggtccctgaaattgccaacatgtccaggacagccaggaccacgtccaagtcaactgccagaagctggacccagaattttgcattgggttaag

SEQ ID NO: 254627 - DNA, 415 bp, Glycine max
gaaaaaggaggatcgaactcgaacccgattgtggtcggggcagaacagagaggagaggacaacacacacaatcacagggttgagttgagttgagccgtgagaaaagaaaaaataaatggccattgctatgaaggccacgcctatcacggcttcgggcttcgtttcaacaagaaattccacactttcaccctttaaatcatcatttctcagataccgctcaggagcattggaagttcctggcatgcgggtaacctactcagatagattgaaatgtaattgtcatggtggcggtgcccttggcactcaaatgaatctttttagcagatttgctagagttatcaagtcatatgctaatgccattataagctcctttgagaccctgagaagatattagacaagctgtgctggatatgaa

SEQ ID NO: 254628 - DNA, 144 bp, Glycine max
tggagacaagaaaaatgagccatggcggcctaagatgcaaactcgtgaaagctagttgaagcttgcgctatcatcatatggactgcttagcacttcatgcagctgttaattttggacagtatccctatggaggtttaatcttaa

SEQ ID NO: 254629 - DNA, 416 bp, Glycine max
gtcacaacttcattatgtttcgtgtaataatctgaaaatgcaagaagcttatcttgtcaatgtcgtacatgtgttacgcgagctgtatctgcacagtccataggaagctcgccaactgcgaaggaaagctctctctcgtattgaatggctgcaaaaaggtgatgtgcctaccatagcacagattgaagagttccattcgatgcaaagaatgatgaatgctcctgattcacatgataatattgatctactgatgagcattgatttgttgggtttacaaggagcacttaaagctttttcaaaatagaatgtttttgatgataagcttgtgtcggctaacacacaagaattcttttatggaaaatttccagaggatgcttggttaccaatctttgtgaattgtctttattctttaagtc

SEQ ID NO: 254630 - DNA, 420 bp, Glycine max
gttggactaaaagaacaacaacaggagcagcaacaggaagagcaacctttgcaagtgcggaaatatagagccgaattgtctgaacaagatatatttgtaatcccagcaggttatccagttgtggtcaacgctacctcaaatctgaatttctttgctattggtattaatgccgagaacaaccagaggaacttactcgcaggttcgcaagacaatgtgataagccagatacctagtcaagtgcaggagcttgcattccctgggtctgcacaagctgttgagaagctattaaagaaccaaagagaatcctacttttgggatgctcagcctaagaagaaagaggaagggaataaaggaagaaaaggtcctttgtcttcaattttgacggctttttactgaataagtatgtactaaaatgtatgc

SEQ ID NO: 254631 - DNA, 403 bp, Glycine max
acagtacacacactagaagaataatggcttccatcctccactactttttagccctctctctttcttgctcttttcttttcttcttatccgactcagtcacccctacaaaaccaataaaccttgttgttctacccgttcaaaatgatggttccacagggctccattgggccaacctccaaaaaagaacccctctaatgcaagtaccagtcctggtggacctcaatggaaatcacttgtgggttaactgtgagcagcagtactcatccaaaacgtaccaagcacccttctgccactccacccaatgctctagagccaacacccaccaatgcctcagttgccccgcggcatcaaggccagggtgccacataaacacgtgtggcctcatgtccactaatcccatcac

SEQ ID NO: 254632 - DNA, 405 bp, Glycine max
cgtcctactagtgaaacagtgatgtatccctactactctaagtggataaggggacatcgtgacttgcctttgaaacttaatcagtggtgcaatgttgtaagatgggagttcagcaaccccactccattcatcaggagtcgcgagtttctttggcaagaagggcacactgcttttgcaacaaaggatgaagcagatgcagaggttcttgagattctggaattatataggcgtatatacgaagagtatttggcagttcctgtcataaagggtaagaaaagtgagcttgagaagtttgctggtggactctacactaccagtgttgaggcatttattccaaacactggtcgtggtatccaaggtgcaacttctcattgtttgggccaaaattttgctaaaatgtttgag

SEQ ID NO: 254633 - DNA, 402 bp, Glycine max
atcataaaattcttccaccaagttatgggtttccttgtgttgcttcttttctccctcttaggtctctcttctagttccagcatatcaactcatcgttccatattggaccttgacctaaccaagtttaccacacagaaacaggtgtcttcactgttccaactatggaagagtgagcatggacgtgtctaccataaccacgaagaagaggcaaagagacttgagattttcaagaataacttgaactatatcagggacatgaatgcaaacagaaaatcaccccattctcatcgtttaggattgaacaagtttgctgacatcactcctcaagagttcagcaaaaagtacttgcaagctcccaaggatgtgtcgcagcaaatcaaaatggccaacaagaaaatgaag

SEQ ID NO: 254634 - DNA, 452 bp, Glycine max
tcactatagctataactatgacatgcactccacccttacctcagcattgcattccggtagagctcacaacacatctaaacacataatcaacaacaatggcttacgctacgcttgctcctatggctgtcttcttgcttgccacttgcacacataatgataccaacgcacatcgatacagcacgattgtcatggtgcatgttcacctttcgagatgccatcggacctatcacgtgattgtcgctgtgtacctataggactagttgctggcttgtgtatacattcaactggactatcatctgatgcgaaaacgatctacgagcatcccaacttatgtcaatctcatgatgaatgcatgaataaaggaagtagccctttttgagctcgttaccctaataagtatatcgattatggatggcgttttgactctgattctgaagcactgaaaggcttct

SEQ ID NO: 254635 - DNA, 393 bp, Glycine max
ctcgagccgattcggctcgaggacaaaacggggaagatcgtcgatgctcgcttcaaaaccttcggttgtggatccgccattgcttcttcctccgtcgctactgaatgggtgaagggaaagcaaatggaggaagttttgaccattaaaaacactgaaattgcaaagcatctttcacttccaccagtcaagcttcactgcagcatgcttgctgaggatgctataaaagcagctgttaaagattatgaagctaagcgtgcctcagcatctgctggtggacaggcaacaactggagagaaagctgtcactgcttgagtacttcatttctagaatgatgatgaaaacaaccaatagtgtggttttctgacaggactcgatggacactgtatgaacatc

SEQ ID NO: 254636 - DNA, 381 bp, Glycine max
gagggaacgtaggagatatagttaacatcccaattccccagtgggtgcttgacattggagaatcaaatcatgatatcttctacaccaaccgctcaggaacccggaacaaggaatatctaactgttggtgtggacaacgagcctatattccatggaagaacagccattgagatatacagtgactacatgaagagtttcagagaaaacatgtcagattttttagaatctggacttattatagacattgaagttgggcttggcccagcaggagagctcagatacccctcttatccacaaagccaaggatgggaatttcctggtattggcgaatttcagtgctatgacaaatatttgaaggcagatttcatagcagctgtagcaa

SEQ ID NO: 254637 - DNA, 497 bp, Glycine max
atcgaatggcaagactattccttactaaagggagagacaagcttgcatgcctgcaggtcgactctagaggatcccttcggcgaattccaattccacattttcaagaaataacgaggcaaacatgttcatatatgaattggaattatttgttttcttattaggcctatcctgaagccaaaggacatgagatcggaattcctcggggaattccaattccacattttcaagacataaggaggcaaaaatgttcatatctgaattggaattatttgttctcttattacgcctatcctgaagccaaaggaaatgagatcggaattcctcggggaattccaatttcacattttcaagaaataaggaggcaaatatgttcatatctgaattggaattatttgatctcttattaggcctatcctgaagccaaaggaaatgagatcggaattcctctggggtaccgagctcgaattccctatagtgagtcgtattcaattcgtaat

SEQ ID NO: 254638 - DNA, 405 bp, Glycine max
cggctcgagctcgagccgaatcggctcgagcggctcgagcggctcgagcagggtcgcaaggttgacgagtatggcaacgttgagaagcaaaccgacgaatactgcaaccctgttcatgctgctagtgtcacctatgtagccaccagaactgctgctggtggttacagtgatgacattaataagcaacatgataccaccaatgcctactgcgtatacactggtagacagcattctagtggtggctacgatggtgacactaataaacatcatggaactactggtggctataatgatgacaccaatagacattatggaactaccggtgtctatggtatagacaccgataggcgacaacatgggactactggtggctatgccggggacactggtaagcacatgggaaca

SEQ ID NO: 254639 - DNA, 407 bp, Glycine max
attggtccttaaacactcatcagtcatcaccatggccaagctagttttttccctttgttttctgcttttcagtggctgctgcttcgctttcagttccagagagcagcctcagcaaaacgagtgccagatccaaaaactcaatgccctcaaaccggataaccgtatagagtcagaaggagggctcattgagacatggaaccctaacaacaagccattccagtgtgccggtgttgccctctctcgctgcaccctcaaccgcaacgcccttcgtagaccttcctacaccaacggtccccaggaaatctacatccaacaaggtaagggtatttttggcatgatatacccgggttgtcctagcacatttgaagagcctcaacaacctcaacaaagaggacaaagcagcagac

SEQ ID NO: 254640 - DNA, 405 bp, Glycine max
ctcgagccgaatcggctcgaggctatgaaaacatacttggagctttagcctggcgcagtaatttttacaatccttcaaaaattttgtttctttgtgtgtgtatggtgatgataacttaattagtgttcatgaatacgtcaagccttactttagtggttctaaattgaaaagctttctagctggtcataatatcaccattactgatggtattgacaagactagtgcaactttgcaatttagaaagttagcagattgtgattttctcaagagaaactttaagcagatgtctaatgttttgtgggtagctcctgaggacaaggcgagtttatggtcacaacttcattatgtttcgtgtaataatctggaaatgcaagaagcttatcttgtcaatctcgtaaatgtgtt

SEQ ID NO: 254641 - DNA, 395 bp, Glycine max
tctgttcctgcaagagtttgagtcacaaattttccactcttcctcaccgattgctagaatggaatttcgatgctcagtcatctcttttaccattctcttctctcttgctctagcatgatagagccatgtccatgcatcgctacctgaggaagattattgacaagctgtctgtccaaacactcccattcccactgcactgctagagcttctaaagcctttcactgcatgtgttgaaatccatgaactgcctaagcaaattgatgattcacagtacccatagacattctgctatcaagaatacctttattcaggctaaacaatgaaagtacaattcaccaagcgttcctatgcacaacctttacgtgtatatacatggttaacggattttaaagaca

SEQ ID NO: 254642 - DNA, 405 bp, Glycine max
atctgaatgagggagagacttctaaggaaaccagtgatatccattgggaagactgcaaggatcaaattgatgtagttgcacttgcatccaaggagcccatacttttctatgatgaggtggtgttatatgaggatgaactcgctgataatggagtatcacttcttactataaaagtgagagttatgcctagctcttggtttcttctgttgcgtttctggcttagagttgatggagtgttgattagactgagagaaacacgtatgcattgtgtatttggtggaagtacaaatcccattatacttcgagagagttgctggagagaatctacatttcaagctttgtctgcaaaagggcacccttttgattctggtgcgtatggtgatccgagtttcatcagccagaagc

SEQ ID NO: 254643 - DNA, 404 bp, Glycine max
cagggactggtgcgacccttcatcaccattcactgatttgtgggaccctcgtcgtgtcggtgacgctgatgatatcacctcctctctcgcccatgctcacgttgactggcgtgagactgataaagctcatatcttccgtgctgatcttccaggggtgaagaaagaggatctgaaggtgcaggtggaggagaataagatcctgcagataagcggtgagagggtgaaggagaaggaggaccagaacgacaagtggcaccgcgtcgagaggcagtgcggaagcttcctccgccgcttccggctgccggaggatgccaaccccaaccagatcagctgcacgctcgaaaactgcgtgctgaacgtcaccgtgcccaaggtggagaagaagccggagaacaagaacgtga

SEQ ID NO: 254644 - DNA, 212 bp, Glycine max
gtcaggcggggctacccgctgagtttaagcatatcaataagggaagaaagggtcctttgtcttcaattttgagggctttttactgaataagtatgtactaaaatgtatgctgtaatagctcatagtgagcgaggaaagtatcgggctatgtaactatgactagagcttcaactatgaataaataaatcgacagcatatgatgcttttgtttt

SEQ ID NO: 254645 - DNA, 99 bp, Glycine max
aaattaggcatgaccctcttgttgagtatgctctgcctatttgaaaatttccacacctcttttaattgtcgtaatgatgtgtgaagtgtgtgttatttt

SEQ ID NO: 254646 - DNA, 401 bp, Glycine max
gaagaagaaaagaagaacaaagatgcaatcctcaaaggagaagatgaaaaacatggcaagtgctgccaaggaacaagtcgacatctataaagccaaaatagacgagaaggcagagaaagcaacggcaagaacagaagaggagagggtgatagcccatgagcacgcaaaggcaaaggaagctggagcaaagatggagctgcatgaagctaaagcaaggcatgcagcagagaagctaagcgccaaccaatcacattatggtctccaccatggccacaacaaccctcccttagtaggaacaactcagactcactaccagcaagggcaccagcaccagccacttggggcagttcctatgcctggaaccacttatccatcttatccactaggaggaaaccctaacc

SEQ ID NO: 254647 - DNA, 333 bp, Glycine max
aaaaaaaaaaaaaaaaaaaaaaaaaaaaaaaaaaaaaaaaagggaaaaaaaaaaaaaaaaaaagggaaaaaaaaaaaataaaaaaaaaaaaaaaaaaaaaaaaaaaaaaaaaaaaaaaaaaaaaaaaaaaaaggggcggcccccatttaggggccttttaaccccgggaataaatccgggcccggtccctgtgggggtccaaattttccttatagggggccgttttaaaccttggcaaaacaagggcaaaaactgttccctggggaaaatggttttccgttaaaaattcccaaaaatttccaacccggaaccttaaggtttaaacccgggggg

SEQ ID NO: 254648 - DNA, 412 bp, Glycine max
  unsure (1)..(412): unsure at all n locations
cccagcagcagattatcatgctgcagctcgtgcaattggtggatgtcctatttatgttagtgacaagccaggcaatcacaattttgatcttcttaagaagctggttctcccggatggttcggttctccgtgctcagttacctggcaggccaactcgtgattctctatttgtggatccagccagagataggactagcttgctcaaaatatggaacctgaacaaatgctctggagttgttggtgtatttaactgccaaggtgctggatggtgcaagatagagaagaaaacccgcatccatgatacatctcctggtacactcaccgnctctgtctgcgcctctgatgttgacctcatcacacaagtagcaggtgctgaatggcttggagatacaattgtttatgcttacagatca

SEQ ID NO: 254649 - DNA, 392 bp, Glycine max
aagcttttcatgaaaaatagaattatgtattttaacatataaatcaatcaaatcaaaataattttttttgttaatttattatgcaaataaaagatatttctatttttaaaaaaattttaaattcttttctattgatatcaacttttttttactcaatttacatatcaacttatttaattattgatatatatagttaccccaaattaaattatcttcgaagatacattcttttgtcattttttgtttccttgatcgccttctattatccaactctctttgaatcataaactagagaggataaaatacaaacacttctttacaattaattgttatttttcgtttgttgtagttgctttttttttttatatttaaaataaatttgcaacaccgac

SEQ ID NO: 254650 - DNA, 386 bp, Glycine max
ctcgagccgctcgagccgattcggctcgagcccaattcgtgcattcaggaagaacctttcaagcagcagcagtgcttctaagccaccaccacctcctgagtctcaggctgagcagcagcacaacaaggttgctggtaaaaaacctgttgacaactatgctaataataaaggtttgtttgtcaagatcaacatggatggtgttccaatagggagaaaagtggacctcaatgcttacgacagctatgaaaacctctcttctgctgtggacgagctattcagaggtcttcttgctgctcaaagagattcctctgctggtggggttcacaacaagcaagaggaagagaaagcaattacggggttattggatggaagtggagagtttactc

SEQ ID NO: 254651 - DNA, 188 bp, Glycine max
aaaaaaaaattaaaaaaaaaaaaaaaaaaaaaaaaaaggaaaaaaaaaaaaaaaaggaagaaaaaaaaaaaaaaaaaaaaaaaaaaaaaaaaaaaaaaaaaaaaaaaaaaaaaaaaaaaaaaaaaaaaaaaaaaaaaaaaaaaaaaaaaaaaaaaaaataaaaaaaaaataaaaaaaaataaaaaaaa

SEQ ID NO: 254652 - DNA, 401 bp, Glycine max
ctctcatttagcttctccaaaagcttgttttagtttatgcataagctaattttaactcacaggagaaccttaattcattttaccttattttcttctcctataagttcttattgaaaaatttatccaaacaggaccgaatgttcaagtctaaattggattggtgggattatgtaggtgacatgtttaccgaggaacagaatgagttaattgaatcagcagccgaaatgctttatggactgattcatgcccggtacatattgacaagcaaaggaatggctgcaatgctcgacaagtacaagaactatgattttggcagatgcccacgagtttactgctctggacaaccttgtattccagttggtcagtcagacatccctaggtctagtactgtgaaaatatac

SEQ ID NO: 254653 - DNA, 403 bp, Glycine max
tatatactatgatgagagtgcggtttcctttgttggtgttgctgggaactgttttcctggcatcagtttgtgtctcattaaaggtgagagaggatgagaataaccctttctacttgagaagctctaacagcttccaaactctctttgagaaccaaaacggtcgcattcgtctcctccagagattcaacaaacgctccccacaacttgagaaccttcgagactaccggattgtccagtttcagtcaaaacccaacacaatccttctcccccaccatgctgacgccgatttcctcctctttgtccttagcgggagagccatacttaccttggtgaacaacgacgacagagactcctacaaccttcaccctggcgatgcccagagaatcccagctggaaccactta

SEQ ID NO: 254654 - DNA, 399 bp, Glycine max
tcggggaattccaattccacattttcaagaaataaggaggcaaaaatgttcatatatgaattggaattatttgttttcttattaggcctatcctgaagccaaaggaaatgagatcggaattcctcggggaattccaattccacattttcaagaaataaggaggcaaaaatgttcatatatgaattggaattatttgttttcttattaggcctatcctgaagccaaaggaaatgagatcggaattcctcggggaattccaattccacattttcaagaaataaggaggcaaaaatgttcatatatgaattggaattatttgttttcttattaggcctatcctgaagccaaaggaaatgagatcggaattcctcggggaattccaattccacattttcaaga

SEQ ID NO: 254655 - DNA, 352 bp, Glycine max
aagaaagtcttccatagccccccaaaaatgaagagcaccatcttctttgctctctttctcttttgtgccttcaccacctcatacctaccttcagccatcgcgatttcgtgctcgataatgaaggtaaccctcttgaaaatggtggcacatattatatcttgtcagacataacagcatttggtggaataagagcagccccaacgggaaatgaaagatgccctctcactgtggtgcaatctcgcaatgagctcgacaaagggattggaacaatcatctcgtccccatatcgaatcccgtttatcgccgaaggccatcctttgagccttaagttcgattcatttgcagttataat

SEQ ID NO: 254656 - DNA, 316 bp, Glycine max
gttcaatatcctagtacaccgtattaaagaatttaagatatactatgatgagagcgcggttcccattactgttgctgggagttgttttcctggcacagtttctgtctcatttggcattgcgtattgggaaaagcagaaccccagtcacaacaagtgcctccgaagttgcaatagcgagaaagactcctacaggaaccaagcatgccacgctcgttgcaacctccttaaggtggaggaagaagaagaatgcgaagaaggtcaaattccacgaccacgaccacaacacctcgagagggaacgtcagcaacacggtgag

SEQ ID NO: 254657 - DNA, 419 bp, Glycine max
  unsure (1)..(419): unsure at all n locations
caaaaagataaagggtgaataattagcagctccttctagttccggtgtcggtgtgggtgtttgaatctggtgaaggatgtcaattgttcaatcaaccagggtgatgccaacggctccaaccccttcgcttcgtggggtcaattcgtggattttcctctccctccttccatctccggcttcttccccggcttggaattcggattcggattcggatcatccgtgaacacacgtgtggactggagggagactcccagagcgcacgtgtggaagctggtgcttcccggcttctccaacgaggacgtgctggttgagctccaagacgagagggtgctccaagtcagcgtggagagcggcaacttcgtcacgaggtttaaggtccccgacaacggtaacctaaaacaactcannagccacatgcg

SEQ ID NO: 254658 - DNA, 372 bp, Glycine max
tagtgacactataaaagcttacgtccatgccgcgtcgtagctcggattcgctcgagaaagaaatacacattacattactaagtctttgttcatttgagtagtagtgatggctagcctcaaggttgcatgtgtggttgctgtgatgtgcatggttgggtggccatgagtgctgcacccatggcacaggccgcaatcacgtgcgggcaggtcgccggcgacatgtctccgtgcttcagttatcttcgaagcggcggaaaaccgtcgcaggcctgctgcaacggagtgaagtccctcagcagcgcggcgaagaccaccgcggaccgccagggggcgtgcagttgcctgaaaaaccttgccaataatatgggacag

SEQ ID NO: 254659 - DNA, 406 bp, Glycine max
  unsure (1)..(406): unsure at all n locations
ctagttcaatatcctagtataccttaataaataatttaagatactatgatgagagcacggttcccattactgttgctgggacttgttttcctggcttcatttctgtctcatttggcattgcttactgggaaaaagagaaccccaaacacaacaagtgtctccagagttgcaatagcgagagagactcgtacaggaaccaagcatgccacgctcgttgcaacctccttaaggtggagaaagaagaatgtgaagaaggtgaaattccacgaccacgaccacgaccacaacacccggagagggaacctcagcaacccggtgagaaggaggaagacgaanatgagcaaccacgttcaatcccattcccacgcccacaacctcgtcaaagagaagagcacgagcagagaga

SEQ ID NO: 254660 - DNA, 371 bp, Glycine max
ctcgcccttcacgcgctgacttctacaaccctaaagctggtcgcattagtaccctcaacagcctcaccctcccagccctccgccaatttcaactcagtcccaatatgttgtcctctacaagaatggaatttactctccacattggaatctgaatgcaaacagtgtgatctatgtgactcgaggacaaggaaaggttagagttgtgaactgccaagggaatgcagtgttcgacggtgagcttaggaggggacaattgctggtggtaccacagaacttcgtggtggcggagcaagccggagaacaaggattcgaatacatagtattcaagacacaccacaacgcagtcactagctacttgaaggatgtgttta

SEQ ID NO: 254661 - DNA, 361 bp, Glycine max
gacgaaaggaaagaagaagaagaagcgttctttcggagagttcgaagatgtcgggcgttaccaacaacaacgaggaagacaagaagccaaccgacagggagcacacatcaaccttaaggttaaggggcaggatgggaatgaagtttttttcaggatcaagagaagcactcaattgaagaagcttatgaatgcttactgtgaccgacagtcggtggatttcaactccattgcttttctgtttgatggacgccgcctccgagctgagcagactccagatgagttggaaatggaggacggggacgagattgatgccatgcttcaccagacaggaggttctgttgtctgaaggatgtgattactt

SEQ ID NO: 254662 - DNA, 350 bp, Glycine max
gattaatgaaggagaagcaaacattgaacttgttggcattaaagaacaacaacagaggcagcaacaggaagagcaacctttggaagtgcggaaattagagctgaattgtctgaacaagatatatttgtaatcccagcaggttatccagttgtggtcaacgctacctcagatctgaatttctttgcttttggtatcaatgccgagaacaaccagaggaacttccttgcaggttcgaaagacaatgtgataagccagatacctagtcaagtgcaagagcttgcgttccctgggtctgcaaaagatattgagaacctaataaagagccaaagtgagtcctactttgtggatgc

SEQ ID NO: 254663 - DNA, 306 bp, Glycine max
  unsure (1)..(306): unsure at all n locations
ggctgaggaatttgtgcccccatcactaaccaatactcatggctacctacctggacctggtgccggtgctggtgccgggtttggttaccctaaaattttatactgctcaataactttggtgatgctaacggtcaaactaacagaaggaggaagaatggctataatcatgggaagcgaagagtgaatcataaaatggatatggagaagagagaagagatgattaggaggactgtttatgtgtcagacattgatcaactggttactgaagagcagttggcggngctctttcttaactgtggccaggtc

SEQ ID NO: 254664 - DNA, 371 bp, Glycine max
gtcttccatagccccccaaaaatgaagagcaccatcttctttgctctctttctcttttgtgccttcaccacctcatacctaccttcagcatcgctgatttcgtgctcgataatgaaggtaaccctcttgaaaatggtggcacatattatatcttgtcagacataacagcatttggtggaataagagcagccccaacgggaaatgaaagatgccctctcactgtggtgcaatctcgcaatgagctcgacaaagggattggaacaatcatctcgtccccatatcgaatccgttttatcgccgaaggccatcctttgagccttaagttcgattcatttgcagttataatgctgtgtgttggaatttctaccgag

SEQ ID NO: 254665 - DNA, 364 bp, Glycine max
gtggattcttggttaccaatttttgtgaattgtctttatcctgtgagtcaattaccttcagaagctgtcgttgtaaatgtcacatgtggtagggacgtggtggtttacccaccactgcttggattagttctgcagttaacaatcgctcctcagatagtaacaaaaggattcgcacagcacttgggaaaggtaagaaaattgtttttcttactagagttgatccttttccagtagctttactggctgttctttttggtgttaagaatgaaactcttagttgtaacgccactaatcctatgctgacgcgacttcttgaaaactgtaagagtctcaaatatttggttgatgagtgttcttttgcatt

SEQ ID NO: 254666 - DNA, 421 bp, Glycine max
gtggcgaagggaatatattggggcagatggcttctggaatgccacaagcagtaactgtcacccctgaggagcgccaagcaattgaacgtcttaagcaatgggttttgatcgtgcaatcgtattggaggtgtacttcgcttgcaacaaaaatgaggaattggctgccaactaccttttagatcacatgcatgagttcgaggaacaatagatctacttttgaatttgccaaattatttcttgtcatctttttctctcgatgggtctttgttacactctatgtttaatgaggtaatgcttgataatgtcaaatctcaagtggataagggatgttttagtctcctccatattattgcccttgtatttatcatttccagcccgtcgagggtttcttagtattcatatacatagttggttgccttgc

SEQ ID NO: 254667 - DNA, 427 bp, Glycine max
  unsure (1)..(427): unsure at all n locations
gtcctccatggcttcctccaccgctttcttcacacccctccatgatttcactcaagccagaacaaccccatcaccccctttgcctttcatcaatcctcctttgcttcctccaagtcaaccttttttcaccctgccctttccctacaaacctcttccaactttcccaggctttttggaaagcctaagtttttctctgttcatgcaagggctgccacagaaaaaaccatttatgattttactgtcaaggatattgacagaaaggatgtttctcttagcaagtttaaggggaaggttctattgattgtcaatgttgcttcacgatgtggtttgacatcatcaaattanctcgagctgtcacgcttgtatgaaaaatataagaatcaaggtttggagattttagctttcccctgcaatcaatttggtatgc

SEQ ID NO: 254668 - DNA, 440 bp, Glycine max
  unsure (1)..(440): unsure at all n locations
cctaagtgagaaacaaagaaaggaaataattgatctttgaaaatgcagggaggaaagaaagctggagagtccatcaaggaaacagctcaaacattggtgcttctgccaaggctggcatggagaaaaccaaggccactgtccaggagaaggcagaaagaatgacggcacgtgatccgatgcaaaaggagttggcaacccagaagaaagaggcaaagatgagccaggcagagctggacaagcaggcggcgcgtcagcataacacggcggcgaagcaggctgccacggcagggcacatgggacaacccatggggacccatcagacgtcagctatgcccggtcatggaaccggacagcccacgggccatgtcaccgagggagtggtgggctcacaccctattggaaccaacagnaggcccggtgggactgctacggcccataat

SEQ ID NO: 254669 - DNA, 352 bp, Glycine max
ctcaccgattgctagaatggaatttcgatgctcagtcatctcttttaccattctcttctctcttgctcttgcaagagagagccatgtccatgcatcgtacctgaggaagattattgggaagctgtttggccaaacactcccatttccactgcactgcgagagcttctaaagcctctccctgcaagtgttgaaatcgatgaactccctaagcaaattgatgatacacagtacccaaaaacattcttctataaagaagaccttcatccaggcaaaacaatgaaagtacaattcaccaagcgtccctatgcacaaccttatggtgtatatacatggttaacggatattaaagaca

SEQ ID NO: 254670 - DNA, 396 bp, Glycine max
gaaatgtctgctgtagtttacaaggattgggtttttacagatcaagcattgcctgctgatcttataaaaagaggaatggcaattgaggatccatcggccctcatggcattcgccttgtgatagaggactacccttatgctgttgatggacttgagatatgggatgctatcaagacatgggtccatgaatacgttttcttgtactacaaatcagatgacacacttagagaagatcctgaactccaagcctgctggaaagaactcgtagaggtgggtcatggagacaagaaaaatgagccatggtggcctaagatgcaaactcgtgaagagctagttgaagcttgcgctatcatcatatggactgcttcagcactttatgcagctgttaattttggac

SEQ ID NO: 254671 - DNA, 381 bp, Glycine max
aggaaatcttccgaactgatggtgaacaggcccttaagtttcctcctcctaaagtaattcaagtgagtaagtctgcatggatgactgatgaaaatttgcaagagaaatgcttgctggtgtaaatccaaacttgattcgttgtcttaaggatttccctccacgaagcaagctagatagccaagtctatggtgatcatactagtcaaataaccaaagaacacctagagcccaacttagaagggctcactgtagatgaggcaattcaaaacaagagattgttcctactagatcatcatgacccaatcatgccatatttgaggcgaataaatgcaacctccacaaaagcttatgctaccagaaccatccttttcctgaaaaatga

SEQ ID NO: 254672 - DNA, 397 bp, Glycine max
ggaaaaagttgtattgaaattttcacaagaggaatttcttacagcttggtcaactcaggtgcgtcctgcaacaactctgttggctgatgggttccatatttgtatgctatggtgcatgatagttcagtgtctacaataccaggtgattttgtcattggtgttaagttgacaaccataaacaatatgtgtgcatatgggctcaatcctggtatttcaggttctcgtcttttgggcaccattcctcagtctatttcacagcaaactgtttggaatcaaatggcaacagtgagaacaccattgaattttgatcctagcaagcagagcttttgtcaattttctattgaccttcttggtggaggaattttagtggacaaaactggagattggatcacactta

SEQ ID NO: 254673 - DNA, 382 bp, Glycine max
gcttcattgataccatatgttgagccagttgtgcaagctcaaagtgctgaagtttactttgacttcttccctgtggaggttgatagtcaagaggagttgctcacattggtgaattgaaatctggtgtctatgttccactgcctacaaaaactaatttggtggaaactcccaaggaatggcaactggatctaccttgtgacaaaattcctagtgtcttgaccacaactgatgagagattggtaggcacagaacatgagggatatgatccttttcttggtggaattcaaaaatatgccactcccatgatgcccctagatgaagaaattctttctaaggttgcacaagatatagttgaggaatggtttgattgtgttgatgagga

SEQ ID NO: 254674 - DNA, 384 bp, Glycine max
ctcagacaggagcttgcctgcgttgagagaattgggtcacacccttttgggactaaacatccagcactgcaatgcaatcaacagcagtacggtgacacacttgtggagcttctctggaggtgtgacatcctctcctgagctgaaagaaaaactaatctcactgcaatttaggccaggatcacatcagcaggaagcttgttatgctcagtgttgcacagtagttttttaggtccttaacaggtcttcatcgtccagtgactcggttcctttttaccggagtgtgcagtcatttagccctcatttttgcaggttccttcaatgggaagcctgttctttttggcatccattttgcccccttttaaatggctgcatatctgagaacat

SEQ ID NO: 254675 - DNA, 395 bp, Glycine max
ttttgttcctcactgaccaagccatggcgatgagaaccaaactttctttagctatctttttcttttttcttttagccttattttcaacctagcctttggcaaatgtaaagaaaccgaggtagaagaagaagaccctgagctcgtaacatgcaaacaccaatgccaacagccacagcaatacactgagggtgacaagcgggtatgcttgcaaagatgtgacaggtatcatcgtatgaagcaagagcgagagaaacaaatccaagaggaaactcgtgagaagaaagaggaggaaagccgtgaaagggaagaagaacaacaagagcagcatgaggaacaagatgaaaatccctacatttttgaggaagataaggattttgagaccagagtcgaaactg

SEQ ID NO: 254676 - DNA, 115 bp, Glycine max
gaaatgtctgcttttgtttacaaggattggctttttacaaagcgagcgttgcctgctgatttttagaaaagaggattggcaattgaggatccatctgccctcatggcattcgcct

SEQ ID NO: 254677 - DNA, 414 bp, Glycine max
cgggatgcttaataaccccctaatattattggcgaatttataggctggcaaattaaggatagaggttcgttttcgtaaagcatgaaaaaagctattgattaactgaacaggcgggtacaaaaggagttcaagtacaaattgcaggacgtatcgacggaaaagaaattgcacgtgttgaatggatcagagaaggtagagttcctctacaaaccattcgagcgaaaatcgattattgttgctatacagttcgaactatttatggggttttagggatcaaagtttggatattttctaaataaagaaaaatatattattctttatcttaaatgtgctatattttatcttaaatgtgctatatttttttttagaaaacaaaaaatgaaaaattactcgatttttatttctccaaaatga

SEQ ID NO: 254678 - DNA, 412 bp, Glycine max
aatgcttataaacaccctattattattgcagaatttatatctgggcgagggaagaatagagtttcgtttcgtaaaacaatgaaaaaagctattgaattactgaacaggcgggtacaaaaggagttcaagtacaaattgcatgacgtatcgacggaaaagaaattgcacgtgttgaatggatcaaagaaaggagagttcctttatcaaccattctagcgaaaatcgattattgttgctatacagctcgaactatttatgggggtttagggatcaaagtatggatattttctaaattaaaaaaaatatattattctttatcttaaaagtgctatattttaatttaaatgtgcatatttttttttagaaaacactaaaatggaaaaaatattcgattttttttttcttccaaatg

SEQ ID NO: 254679 - DNA, 401 bp, Glycine max
cggctcgagccttatgctgttgatgggctagagatatgggctgcaattaagacatgggtccaagaatatgtgtccttgtactatgcagagatgatgatgtcaaacctgattctgaactccaacagtggtggaaagaagctgtagagaaaggtcatggtgatctgaaagacaagccatggtggcctaagttgcaaacaattgaagagcttgttgaaatttgcaccattatcatatggactgcttcagccctccatgcagccgttaactttggtcaatatccatatggaggtttcattctgaatcgcccaacttcttctagaaggttgcttcctgagaaaggcaccccagaatatgaagaaatggtgaaaagtcatcaaaaggcttatttgagaactattaca

SEQ ID NO: 254680 - DNA, 396 bp, Glycine max
  unsure (1)..(396): unsure at all n locations
aaaattcttccaccaagttatgggtttccttgtgttgcttcttttctccctcttaggtctctcttctagttccagcatatcaactctcgttccatattggaccttgacctaaccaagtttaccacacagaaacaggtgtcttcactgttccaactatggaagagtgagcatggacgtgtctaccataaccacgaagaagaggcaaagagacttgagattttcaagaataacttgaactatatcagggacatgaatgcaaacagaaaatcaccccattctcatcgtttaggattgaacaagtttgctgacatcactcctcaagagttcagcaaaaagtacttgcaagctcccaaggatgtgtcgcagcaaatcaaaatggccaacangaaaatgaag

SEQ ID NO: 254681 - DNA, 385 bp, Glycine max
cttttaacttgagaagccgcgaccccatctactccaacaagcttggcaagttctttgagatcaccccagagaaaaacccccagcttcgggattggatatcttcctcagtattgtggatatgaacgagggagctcttcttctaccacacttcaattcaaaggcgatagtgatactggtaattaatgaaggagatgcaaacattgaacttgttggcctaaaagaacaacaacaggagcagcaacaggaagagcaacctttggaagtgcggaaatatagagccgaattgtctgaacaagatatatttgtaatcccagcaagttatccagttgtggtcaacgctacctcaaatctgaatttctttgctattggtattaatgccgagaac

SEQ ID NO: 254682 - DNA, 447 bp, Glycine max
tggactgacaactgaagtcaagtctgtggagatgcaccatgaatctcttacagaggcacatcctggtgacaatgtgggattcaatgttaaaatgttgctgttaaggatttgaagcgtggttatgttgcctcaaactcaaaggatgaccctgcaaaggaggctgctaacttcacagcccaagtcatcatcatgaaccaccctggtcagattggaaatggctatgcccctgtcctcgactgccacacttctcacattgctgtcaagtttgctgaactcatgaccaagattgacaggcgatccggcaaagagcttgagaaggagcccaagtttttgaagaacggtgatgctggttttgttaagatgattccaaccaaacccatggttgttgaaactttctccgagtatcctccacttggtaggtttgcttgtagggacatgcgtcaaact

SEQ ID NO: 254683 - DNA, 424 bp, Glycine max
gtttggatgcttgctacttggctcttcctgccagtactaccaaaggatctgcgttgctatataatgtcatggattgccatttacacgtgagattgaggctcatcgttcaccattagctgcaatggttctttcttctaatggaatgtacatagctacagcatccgagcaagggaccataatcagagtccatttggtgtcagatgcaacaaagtcatatagctttagaagggggacatatccgtctactatattttctctttcatttggaccatcaaagcagcttccagatattcttgcagcctcaagttcttctggttctattcatctttttactctcggatttgcttcacatccaagcaggagcaagagatcaagtggttttcttggatcaataattcctggtgctgtgaatgatgttgctgat

SEQ ID NO: 254684 - DNA, 417 bp, Glycine max
gcaaaatgaccaagttcacaatcctcctcatctctcttctcttctgcatcgcccacacttgcagcgcctccaaatggcagcaccagcaagatgctgccgcaagcagctccagggggtgaacctcacgccctgcgagaagcacatcatggagaagatccaaggccgcggcgatgacgatgatgatgatgacgacgacaatcacattctcaggaccatgcggggaagaatcaactacataaggaggaacgaaggaaaagacgaagacgaagaagaagaaggacacatgcagaagtgctgcacagaaatgagcgagctgagaagccccaaatgccagtgcaaagcgctgcagaagataatggagaaccagagcgaggaactggaggagaagcagaagaagaaaatggagaaggagctcat

SEQ ID NO: 254685 - DNA, 538 bp, Glycine max
  unsure (1)..(538): unsure at all n locations
tggggggggtnnntttgaattgacantaggtgacactatagaagagctatgacgtccatgcaccgtcgtagctcggaatcgctcgagggtagggttctttcttcctcaaacaccatcgcagattcttcgctcctttccattgattcaaaacatggctaccaccaccactcctgctagatttttctccaagtcgccgctacagaggaggccgcgccgcctctcagagtcgttcagattgaaggactggttattctgaagataattaagcattgtaaggaccactcgccttctttagtcactggacaacttcttgggttggatgttggcagtgttcttgaagttaccaactgcttcccctttccaatgagggaagaggatgaggaaattgaagctgatggtgctaattatcagcttgaaatgatgaggtgcctgagggaggttaatgttgacaacaacaccgnntggtggtaccagtctacaatgcttgggctccttcagactgtggagctnatttgaaaccnttattgactaccangaa

SEQ ID NO: 254686 - DNA, 368 bp, Glycine max
ctacacaaaagtgttccacttgagtgaaaagtagtgtgttaagaactaaacaatttttcaatggcgtccaagaaacaagaggagcgactgaggcagctgcgaaagttgctgccaaagaactcgaacaagtcaacagagaaagaagagaccgtgatttcggtgttgttgctgaacaacaacaacaacatcatcaggaagatcaacaaaaacgtggtgtaatcgggtccatgtttaaggcggtgcaagacacctacgagaacgccaaggaagctgtcgttggcaagaaagaagctactaataacgcgtacagtaatacagaggttattcacgatgttaacattcagcccgatgacgtgtcggcaacgggg

SEQ ID NO: 254687 - DNA, 318 bp, Glycine max
cgtcgccatgggccttgttatcttttgacagaggaagggctccgggtaagaatgtttcgctcacatgaaggaccgtaaaggcgctgctcgcctgcgcgccttggatttcgctgagcggcacggctacatcaaggtcattgtcaaggacatcatccactatctcttccgtggcgcgcccttcgccaaggtggtcttccgggatccgtatcggtttaagaagcgtacggagctgttcattgccgtctagggcattcacacgggccagtttgtgtattgctttaagaatgcccatctcaacattggcaatgtgcttcctgt

SEQ ID NO: 254688 - DNA, 292 bp, Glycine max
aaaaatcaaatctctaatataaggacgggttttaattaaaaggtgggctggccaatattccatgcattatgttcgagtgactgacgggcctatatcactgttgtgataaaccctatttcaccccgttacgttttatttacacatacacatactgtacttatttataatacattattaactctctcttctccttgaattttaacatccatataggtttatctctactatatcatttcccatttattaatcaaatgtactcacataaccctaacactgtcttttatatttatat

SEQ ID NO: 254689 - DNA, 309 bp, Glycine max
gacagcaaaaacaattaataaagatgagtgtgaagaacaacatggtggtgctaaaggtgtgtttgttgcttcttttccttgtgggggttacagctgcacgcatggaactgagcttcttcaaaagtgatcagtcatcaagttatgatgatgatgagtattcaaaaccatgctgtgatctctgcatgtgcacacgctcaatgcctcctcaatgcagctgtgaagatattaggctgaattcatgccactcagatttgtagagctgtatgtgcacacgctcacagccaggacagtggtcgtgtcttgacacca

SEQ ID NO: 254690 - DNA, 292 bp, Glycine max
acaggacctgacaccctaccgaccttacacttactccgcacgcctctttgcctccgtgcggggttcctacccatgtccggtggttctacctccatacttgctgtcctctggccagtattacatgtacccgcctccgctcttccctgaccacgttcactacacccactatagcgaccagctcgacaacccctattactatcatagtcaccaggggactccttccacctacgtggaacacatcccgtctcaattccagcaccatatccatcacgaatgcataccaccaacaacc

SEQ ID NO: 254691 - DNA, 373 bp, Glycine max
tcctgaattcccgggtcgacccagcgcgtccggcaccatctgccacgggatcgtggaggtggatcctttgctcaccccacaagagcctcacctgaacgagatgcagaaccatgggtatgagaaccccacctacaaatacctggagcagatgcacatttaagtggcacggagcgcggcatccctggcagaggcatgcacgaagtccggaagatcccacgattccaatcgactgtcaagcagcagcagctgtcacgggctgcgtctgacatcctgaccttctggactgtaggactatataaagtactactgcataactgcaatttccattcttttaaatgtgtgaaaaatggtgatataacaatatatgatatat

SEQ ID NO: 254692 - DNA, 213 bp, Glycine max
gactgcaacaacaattaatcaagatgagtgtgagggaacaacatggtgctgctaacggtgtgtttgttgcttcttttccttgtggaggttacacatgcacccatgaacctgagcttctctacaagtgatcagtcttcaagatatgccgacgatcagtgttcaaagaccatcccatgatctcttatgtgtaccccactcaaagcctcctcaatg

SEQ ID NO: 254693 - DNA, 341 bp, Glycine max
gacacatccagtgcagacacaacttactcgtagactcatctcattacaaccctttgtacccgtaggtttccttacctaccgagagtgttccacaaattcatcaaaatgaccaactattacgcttaacacaccatcattaatgatactcctggatatttcaactatccatttgtgaccattgttccaagtgtcaaaaacaagcctctattcttttacgacaaactttacaaatccaagaaaattgctgtcacacatgactaatactctcaccaggatcatgctatacctcactgacattgacctagctaacatccatatggaattcattgacaaaccataca

SEQ ID NO: 254694 - DNA, 251 bp, Glycine max
ctcaataacccaagcatattacatacattgagagaggcatgattcattggtcccatatatgatacccaccttgttattcacaacagacctgactaaatactaatacattatatatccaacatgtcccacttccattcaaactcacaccttgaatataaatgttctcaatcctaaccactattccaaacattaatctctacttgataattcactatcttatcattcttaacattactttctccaaataatat

SEQ ID NO: 254695 - DNA, 281 bp, Glycine max
gaccgacgcgtacggtgaacatgacccttcgccatgggccttgttatccttgaacagaggaaaggcgccgtctagatgttcttgacacacttgaagcaccataaaggcactgttttctttttttccattcatttctctgatcttcacttctacatcttgttcatcgtcaacgacatcatccaccacccgggccgctgctctcccctctccaaggtggtcttccgggatccgtatcggttcaataagcggacagatctattcattgtcttcgatggcattca

SEQ ID NO: 254696 - DNA, 257 bp, Glycine max
atccgcacaggttcaaccatacttctcttcttccctttacatccgcactgattcctctcctagaacgataacttttcacattctgacggacaatggcagactggaacgcatggacgagatcatcatggaccatttgtaccccatttcaaagcaagtgttggggatctggttggatcattgtgcttgtgccaagcgacaagctggagaagcagaaagagcttatcttaagaaaagggatggtctcattagaaacaaga

SEQ ID NO: 254697 - DNA, 400 bp, Glycine max
gagggtttggttattagggttttcgctcaccggtgggcagtctagcccccgaagaaaaagcgaaaatgccgtcgcacaagacattcagaatcaagaagaagttggcgaagaagatgaggcagaacaggcctatcccctactggatccgcatgaggaccgacaacaccatcaggtacaacgcgaagcgccgtcactggcgtcgcaccaagcttggattctgaagtgcttgctttgcctcggttctggttatccaattaattagtggtttattttcttgagccaaaaacaatgctttggagattttaatattttgcattttgctccaagactatattgtgtaaggaacttattgtagttcagactaatggtggtgttggtcacctttttttaaaaagtaaaa

SEQ ID NO: 254698 - DNA, 275 bp, Glycine max
gattcacacaactaactaagaaagtcttccatagcgccccaaaaatgaagagcaccatcttctttgctctctttctcttttgtgccttcaccacctcatacctaccttcagccatcgctgatttcgtgctcgataatgaaggtaaccctcttgaaaatggtggcacatattatatcttgtcagacataacagcatttggtggaataagagcagccccaacgggaaatgaaagatgccctctcactgtggtgcaatctcgcaatgagctcgacaaa

SEQ ID NO: 254699 - DNA, 417 bp, Glycine max
gattcacacaactaactaagaaagtcttccgtgagcgccccaaaaatgaagagcaccatcttctttgctctctttctcttttgtgccttcaccacctcatacctaccttcagccatcgctgatttcgtgctcgataatgaaggtaaccctcttgaaaatggtggcacatattatatcttgtcagacataacagcatttggtggaataagagcagccccaacgggaaatgaaagatgccctctcactgtggtgcaacctcgcaatgagctcgacaaaaggattggaacaatcatctcgtccccatatcgaatccgttttatcgccgaaggccatcctttgagccttaagttcgattcatttgcagttataatgctgtgtgttggaattcctaccgagtggtctgttgtggaggatcta

SEQ ID NO: 254700 - DNA, 235 bp, Glycine max
gggggtcaaagacttcactgacaggcagctttctcaagtgggctggcacgaatactatgattgttagctgtgccttcatcacctcatccctaccttcatccatcgatcatttcgtgctcgataatgaaggtagccttattgaaaatggtgtcacatattatatcttgtcagacataacatcatgtgctggaataagatcatccccaacttgaaatgaaagatgctctctcactgt

SEQ ID NO: 254701 - DNA, 347 bp, Glycine max
acagaaggggacagcaaaaacaattaataaagatgagtttgaagaacaacatggtggtgctagaggtgtgtttgttgcttcttttccttgtgggggttacagctgcacgcatggaactgagcttcttcaaaagtgatcagtcatcaagttatgatgatgatgagtattcaaaaccatgctgtgatctctgcatgtgcacacgctcaatgcctgctcaatgcagctgtgaagatattaggctgaattcatgccactcagattgtaagagctgtatgtgcacacgctcacagccaggacagtgtcggtgtcttgacacccacgacttctgctacaaacctttcaagtcc

SEQ ID NO: 254702 - DNA, 388 bp, Glycine max
gacagcaaaaacaattaataaagatgagtttggagggcaacatggtggtgctaaaggtgtgtttgttgcttcttttccttgtgggggttacagctgcacgcatggaactgagcttcttcaaaagtgatcagtcatcaagttatgatgatgatgagtattcaaaaccatgctgtgatctctgcatgtgcacacgctcaatgcctcctcaatgcagctgtgaagatattaggctgaattcatgccactcagattgtaagagctgtatgtgcacacgctcacagccaggacagtgtcgttgtcttgacaccaacgacttttgctacaaaccttgcaagtccagagatgactagaaaaactaatagctctcttaaatggacgaagccccttt

SEQ ID NO: 254703 - DNA, 228 bp, Glycine max
acatcctagggcgacatcacaaccaattattacttctaaaacaattaatcaacatgactgggcaagacaactttgtaatgctaaagggccatttgatgcttacattccttctcatgattacaactgcacgcataaaactgaacttattcaaaaatgatcattcatcaaattatcatcattattagtattcaaaaccatactcacatctcttcatgtgcacacactcaa

SEQ ID NO: 254704 - DNA, 361 bp, Glycine max
gacagcaaaaacaattaataaagatgagtttgaagagcaacatggtggtgctaaaggtgtgtttgttgcttcttttccttgtgggggttacagctgcacgcatggaactgagcttcttcaaaagtgatcagtcatcaagttatgatgatgatgagtattcaaaaccatgctgtgatctctgcatgtgcacacgctcaatgcctcctcaatgcagctgtgaagatattaggctgaattcatgccactcagattgtaagagctgtatgtgcacacgctcacagccaggacagtgtccgtgtcttgacaccaacgacttctgctacaaaccttgcaagtccaaagatgactagaaaaactaata

SEQ ID NO: 254705 - DNA, 404 bp, Glycine max
ggctgagaggagcttcgtgaactgcaaacgcagtgtggcatagaagcagtttcttcccaaaggtaacggttagcgtccaccgcaagttggtgaaatttcgaagcttctcattaaccaccacttgctcctctcttccacctccggatttgccgcgtttggcaaaaacggctcaaatttcacttaccccaaacgaggttgaagaaattgctcccaaaattcaacaagttatagaatggtttggacagcttcagggtgttgatcttgaaagtgttgaaccctcgatcagagcagctgagaatgcgtggttagtgtgtttgttttatgccaatccgtttccagaggcacattaaatgtcaatcccatgctcgctcatggattattagcattcaatgtgagcaaacaaa

SEQ ID NO: 254706 - DNA, 411 bp, Glycine max
gacagacagacacacactcggtggtgccttcacaaaaaaattatcgagatcccctttttctcctaagaaaagccatggctaagggtcccggtctctactctgacatcggcaagaaagccagggatctgctgttcaaggactaccacagtgaccagaagttcaccatcaccacctactcacccactggagttgctataacagcatcaggaaccaggaaaagtgaactgtttgtggctgatgtcaacacccagttgaagaacaaaaacatcactactgatatcaaagttgatacagattctaatctcttcacaactatcactgttaatgaacctgctcctggtctgaaggctatttttagcttcaaagttcctgaccaaaagtctggaaaggtggaagttcagtacttgcatg

SEQ ID NO: 254707 - DNA, 225 bp, Glycine max
ggttctagtgtgtgattgtttggggttgtaactcgttcttcttcttttgttgttctgtgtttgtgtttgttttttctctcacctgaaaatgtcttgctgcggtggtaactgtggttgcggaagctcctgcaagtgcggcaacggctgcggaggctgcaagatgtgcccagacttgagctacactgagtcaaccaccaccgagaccttggtcattggagtggcacc

SEQ ID NO: 254708 - DNA, 361 bp, Glycine max
ttattcacacaactaactaagaaagtcttccagagcgccccaaaaatgaagagcaccatcttctttgctctctttctcttttgtgccttcaccacctcatacctaccttcagccatcgctgatttcgtgctcgataatgaaggtaaccctcttgaaaatggtggcacatattatatcttgtcagacataacagcatttggtggaataagagcagccccaacgggaaatgaaagatgccctctcacttgtgtgccaatctccaattgattccaccaaaggattggaaccatcatcttgttcccataatcaatcccttttatcgcccaaagccattcttttagccttaagttccaatcatttt

SEQ ID NO: 254709 - DNA, 348 bp, Glycine max
  unsure (1)..(348): unsure at all n locations
cggttccagtttacccctaaagggtccggttgccaaaaggcggccgggggggacagccaaaacgcttaatataaataagattgagaagcaccacatggtggctctaaaggtgtgtgtggcgcttctttcccttgtggggttcacatctgcacacatggaactgctcttcttcaaaagtgatcagtcatcaagttatgatgatgatgagtattaaaaactatgctgtgatctctgcatgtgcacactctaaacgcctcctcagtgcagctgagaagatatgaggctgaattcacgccactcagattgtaacagctgtatgtgcacactctcacagncagaacagtgtcg

SEQ ID NO: 254710 - DNA, 387 bp, Glycine max
gattcacacaactaactaagaaagtcttgcatagccccccaaaaatgaagagcaccatcttctttgctctctttctcttttgtgccttcaccacctcatacctaccttcagccatcgctgatttcgtgctcgataatgaaggtaaccctcttgaaaatggtggcacatattatatcttgtcagacataacagcatttggtggaataagagcagccccaacgggaaatgaaagatgccctctcactgtggtgcaatctcgcaatgagctcgacaaagggattggaacaatcatctcgtccccatatcgaatccgttttatcgcccaaagccatcctttgagccctaagttcgattcatttacagttataatgctttgtgttggaattc

SEQ ID NO: 254711 - DNA, 240 bp, Glycine max
  unsure (1)..(240): unsure at all n locations
gagcgccaatgttttttcagaggagtttcatcttggaatcaaaagagtttatcttatagtaagaaatcgatgtcttactccattttaaggaacaaaacaagagaacaatagcctgacaaagggtttagccataaaatcgaatccatcattgatttgagatattgataaggtgaatactcatttctcgtcaatgctaggcataantgcggtatagggtacctaaaaaagatnanntctttc

SEQ ID NO: 254712 - DNA, 408 bp, Glycine max
gacagcaaaaacaattaataaagatgagtgggaagaacaacatggtggtgctaaaggtgtgtttgttgcttcttttccttgtgggggttacagctgcacgcatggaactgagcttcttcaaaagtgatcagtcatcaagttatgatgatgatgagtattcaaaaccatgctgtgatctctgcatgtgcacacgctcaatgcctcctcaatgcagctgtgaagatattaggctgaattcatgccactcagattgtaagagctgtatgtgcacacgctcacagccaggacagtgtcgttgtcttgacaccaacgacttctgctacaaaccttgcaagtccagagatgactagaaaaactaatagctctctcaaatggacgaagcccctttagggctttgttggtatgtta

SEQ ID NO: 254713 - DNA, 434 bp, Glycine max
  unsure (1)..(434): unsure at all n locations
gaagacgacagaaggggattcacgcaactaaataagaaatgaagagtactatcttcggtgctctctttctagtttgtgccttcaccatctcatacctgccttcagccaccgctcagttcgtgctcgacactgatgatgatcctcttcaaaacggtggcacatactatatgttgccagttatgagaggaaagggcggtggaatagaagtagattcaactggaaaagaaatatgccctctcactgttgtgcaatcacccaatgagctcgataaggggattggactagtctttacatctccattacatgccctttttatcgccgaaggctatcctttgagcattaagtntggttcatttgcagttataacgctgtgtgcccgcatgcctactgagtgggctatngtggagagagagggtctacaagctgntaaactt

SEQ ID NO: 254714 - DNA, 385 bp, Glycine max
gacggatacaatagagaccagcttttgcttctttgtgaacatggagatgaggaaatcatgtggcttcttcttcttgctcctcctccttgtctttgcttcccaggtggtggtacagacggagggaagagtgtgtgagtcacaaagccacgggttccatggtttgtgtaatagagaccacaactgtgctttggtctgcaggaacgaaggtttctccggtggcaggtgcaaaggcttccgccgccgctgcttttgcaccaggatttgttgagatctcatcaaacactactcttgccatgcaaattaataaatcatagctaggccaaataaattgcatctactctttatccatttgggagctagctaccacaaccaactcatacttggt

SEQ ID NO: 254715 - DNA, 387 bp, Glycine max
gatgcaactgaataattaagaaaagccatgggcatagcagcctaagaaaatgaagagcactagcttgttcgctatctttctactttgcgccttcacctcatacctaccttccgccaccgcccaggacgtgctcgacgtggatggcgatccgattcggaacggtttcatatactacgttttgccggcaataagaggaaacggtggcggaatagaacgagccgcactcgggaaagacacttgcactatcactgtagtgcaatctcccaatccaaactctaaggggttagaaattaagtttgaatctgcataccccgcctattacataaacgaaaccctaattttgcaaataaagttcagttacccacagcagtgtgaaagaaagaatcc

SEQ ID NO: 254716 - DNA, 388 bp, Glycine max
gacagcaaaaacaattaataaagatgagtgtgaagaacaacatggtggtgctaaaggtgtgtttgttgcttcttttccttgtgggggttacagctgcacgcatggaactgagcttcttcaaaagtgatcagtcatcaagttatgatgatgatgagtattcaaaaccatgctgtgatctctgcatgtgcacacgctcaatgcctcctcaatgcagctgtgaagatattaggctgaattcatgccactcagattgtaagagctgtatgtgcacacgctcacagccaggacagtgtcgttgtcttgacaccaacgacttctgctacaaaccttgcaagtccagagatgactagaaaaactaatagctctctcaaatggacgaagccccttt

SEQ ID NO: 254717 - DNA, 292 bp, Glycine max
gacggcaaaaacaattaatagagatgagtttgaagaacaacatggtggtgctaaaggtgtgtttgttgcttcttttccttgtgggggttacagctgcacgcatggaactgagcttcttcaaaagtgatcagtcatcaagttatgatgatgatgagtattcaaaaccatgctgtgatctctgcatgtgcacacgctcaatgcctcctcaatgcagctgtgaagatattaggctgaattcatgccactcagattgtaagagctgtatgtgcacacgctcacagccaggacagtg

SEQ ID NO: 254718 - DNA, 399 bp, Glycine max
gataccaaaaacaaaacacaagccaagtgagggtgagaaaaaataaaaatcaaagagcataatgtcagggatcattcacaagattggggagacccttcatgtgggagggcacaagaaggaggaggagcataagggtgagcaccatgctggagaatacaaaggggagcaccatggtgaacacagtagtgagtacaaaggagagcatcatggtgaacacaaagctggagagtaccatggtgagcacaagccagagcacaaagaggggttcctagacaaagtcaaggacaagatccatggtgagggcggcgccgccgagggcgagaagaagaagaaggagaagaagaagaaggagcatggccatgagcatggccatgacagcagcagcagcagtgacagtga

SEQ ID NO: 254719 - DNA, 387 bp, Glycine max
  unsure (1)..(387): unsure at all n locations
ggtggccaatggtgcacgaggcagtagtggaccctacaaaggagcccttcgagagggcaaatggggagccagcatatggatactatctgaagcacccagagatgaatgacctaatggtgagggccatgtcaggggtgtcagtgcccttcattagggccatgttggagggctatgatggctttcaaggcgtggagaagcttgtggatgtgggtggtagtggcggtgattgccttcgtatgatcttggaaaaacaccccaccatcaaagaagggatcaactttgacctacctgaagttgtggccaaagccccacanatcccatttgtaacccatgtgggtggtgacatgttcaagtttattccccaaggagatgctatcttcatgaagt

SEQ ID NO: 254720 - DNA, 157 bp, Glycine max
tgtgacagtacaaacattttatcaagatgagtttgaagaacaacatggtggtgctaaaggtgtgtatgatgcttcttttccttgtgggggttacagctgcacgcatggaactgaacttcttaaaagtgatcagtcgtcaagttatgatgatgatgag

SEQ ID NO: 254721 - DNA, 397 bp, Glycine max
gaccttcacccatcggtacgcaaaatgaccaagcttacaattctcctcatcgctcttctcttcatcgcccacacctgctgcgcctccaaatggcaacagcaccagcaagagagctgccgcgagcagctcaaggggatcaacctcaacccctgtgagcacatcatggagaagatccaagctggccgccgcggcgaggacggcagcgacgaagatcacattctcatcaggaccatgccgggaagaatcaactacatcaggaagaaggaaggaaaagaagaagaagaagaaggacacatgcagaagtgctgcagcgaaatgagcgagctgaaaagccccatatgccagtgcaaagcgctacagaagataatggataaccagagcgagcaactggagggga

SEQ ID NO: 254722 - DNA, 192 bp, Glycine max
gacagcaaaaacaattaataaagatgagtttgaagaacaacatggtggtgctaaaggtgtgtttgttgcttcttttccttgtgggggttacagctgcacgcatggaactgagcttcttcaaaagtgataagtcatcaagttatgatgatgatgagtattcaaaaccatgctgtgatctctgcatgtgcacac

SEQ ID NO: 254723 - DNA, 396 bp, Glycine max
gactcactcatacaatagagaccagcttttgctgctttgtgaacatggagatgaggaaatcatgtggcttcttcttcttgctcctcctccttgtctttgcttcccaggtggtggtgcagacggagggaagagtgtgtgagtcacaaagccacgggttccatggtttgtgtaatagagaccacaactgtgctttggtctgcaggaacgaaggtttctccagtggcaggtgcaaaggcttccgccgccgctgcttttgcaccaggatttgttgagatctcatcaaacactactcttgccatgcaaattaataaatcatagctaggccaaataaattgcatctactctttatccatttgggagctagctaccacaaccaactcatactttgtcattgga

SEQ ID NO: 254724 - DNA, 258 bp, Glycine max
taatttgggaattattgctcccatcgccagggggttcattgtcggcgctaacattttgttgggtggggccttctctggagcggtcatgaaccccgctgtgacatttgggcctgctgtcgtgagctggacctggaccaaccactggatctactgggccgggcctctcatcggtggtggaatcgctggccttgtttacgaggttgtctttatcagccacacccacgagcagcttcccaccactgactactagagggggac

SEQ ID NO: 254725 - DNA, 369 bp, Glycine max
cgggatgcaactgaataattaagaaaagccatttgcatagcagcctaagaaaatgaagagcactagcttgatcgctatcttcctactttgcgccttcacctcatacctaccttccgtcaccgtccaggacgtgctcgacgtggatggcgatccgattcagaacggattcatatactacgttttgccggcaataagaggaaacggtggcggaatagaacgagccgcactcgggaaagacacttgccctatcactgtagtgcaatctcccaatccaaactctaaggggttagaaattaagtttgaatctgcataccccgtctattacataaacgaaaccctaattttgcaaataaagttcagttacccaca

SEQ ID NO: 254726 - DNA, 400 bp, Glycine max
  unsure (1)..(400): unsure at all n locations
gaatacagagtgagttgttgctccttcgcgacaactctctgccaacatgggtatctccagagattctatgcacaagaggcgtgccactggtggcaagaagaaggcctggaggaaaaagagaaagtatgagcttggtcgccagcctgctaacactaagctgtcaagcaacaagacagtcaggaggatccgtgttagaggtggaaatgtgaaatggagggcattgagattggatactggaaattactcctggggaagtgaagctgtaattcgcaagactcgtgtactagatgtggtttacaatgcctcaaacaatgagcttgtgcgtactcagactctngtcaaaagagctatcgntcangttgatgctgctccattcaaacagtggtatcttcagcactat

SEQ ID NO: 254727 - DNA, 383 bp, Glycine max
gacacaagtaacttctctgcatccaaaatgcgcaggtcttaccatcggagacactattcctgatcttcaagttgaaactaaccaagacaaaatcaagcttcatcagttctgtgctgatggctggaccatccttttctctcacccaggtgatttcaccccggtttgtaccactgagcttggtaaggtggctcagtatgctaaggagttttatcaacgaggagtgaagctcttaggtttatcttgtgatgatgtgcaatcccacaatgagtggatcaaagacattgaagcctacactccaggtgcgaaagtgaattatccaataattgctgatccgaagagagaaatcatcaagcaactcaacatggttgaccctgatgagaaag

SEQ ID NO: 254728 - DNA, 372 bp, Glycine max
aatgaataaaaaaatcaaataataattaatgaaaagaaaaaagtgtaaatcaaatagaaatttataaaatctatggtcctagagtagttccctagacaaaatagaagtaagttcacaaacaagattcaagaataagattctctgatgaaaggagagaaatatgtctgaggatccgctgggtataaggagtgaaagaggggatcatttgtttcttgaacagttcttttaaaaaaattttctatcggatttttgagtcataggggattttatgatttatgacttggaggatttttaagaatagaaaggaataactacattgagttcatcgatttgccctagatatcaatagactcataaattattttttattcg

SEQ ID NO: 254729 - DNA, 396 bp, Glycine max
gattcacacaactaactaagaaagtcttccatagccccccaaaaatgaagagcaccatcttctttgctctctttctcttttgtgccttcaccacctcatacctaccttcagccatcgctgatttcgtgctcgataatgaaggtaaccctcttgaaaatggtggcacatattatatcttgtcagacataacagcatttggtggaataagagcagccccaacgggaaatgaaagatgccctctcactgtggtgcaatctcgcaatgagctcgacaaagggattggaacaatcatctcgtccccatatcgaatccgttttatcgccgaaggccatcctttgagccttaagttcgattcatttgcagttataatgctgtgtgttggaattcctaccgagt

SEQ ID NO: 254730 - DNA, 390 bp, Glycine max
gaacaaaagcacttgttcaccaattaagctttcaagagacaaactgctttgaaaaatgggatccaaggttgttgcatccgttgcccttctcctctccatcaacattcttttcatttccatggttagctccagcagccactacgatccacagccccaaccttctcacgtcactgctcttattacacgacctagttgtccggatctgagtatttgcctcaatattttaggcgggtctctaggaaccgtggatgattgttgtgccctcatcggtggtcttggtgacattgaagccattgtgtgcctttgcatccaactcagggccctcggaatattaaaccttaaccgtaatttgcagttaatattaaactcctgtggacgaagctacccgtc

SEQ ID NO: 254731 - DNA, 408 bp, Glycine max
gacagcaaaaacaattaataaagatgagtgggaggaacaacatggtggtgctaaaggtgtgtttgttgcttcttttccttgtgggggttacagctgcacgcatggaactgagcttcttcaaaagtgatcagtcatcaagttatgatgatgatgagtattcaaaaccatgctgtgatctctgcatgtgcacacgctcaatgcctcctcaatgcagctgtgaagatattaggctgaattcatgccactcagattgtaagagctgtatgtgcacacgctcacagccaggacagtgtcgttgtcttgacaccaacgacttctgctacaaaccttgcaagtccagagatgactagaaaaactaatagctctctcaaatggacgaagcccctttaggctttgtttgttatgtta

SEQ ID NO: 254732 - DNA, 293 bp, Glycine max
  unsure (1)..(293): unsure at all n locations
gacagcaaaaacagttagtaaagatgagtttgaagaacaacatggtggtgctaaaggtgtgtttgttgcttcttttccttgtgggggttacagctgcacgcatggaactgagcttcttcaaaagtgatcagtcatcaagttatgatgatgatgagtattcaaaaccatgctgtgatctctacatgtgcacacgctcaatgcctnctcaatgcagctgtgaagatattaggctgaattcatgccactcagattgtaagagctgtatgtgcacacgctcacaaccaggacagtgt

SEQ ID NO: 254733 - DNA, 386 bp, Glycine max
gacagcactaactattaatgaagatgagtgtgaagaacaacatggtggtgctaaaggtgtggctgtcgcttcttttccttgttggggttactgatgcacacatggaactgaacttgatcaaaagcgatctgtcatcaggttatgatgatgatgaggattcacatccatgctgtgatctctgcttgtacacacgctcaatgtctgatcaatgcagatgtgaagatattaagctgaattcattccagtgagattgtaagatctgcatgtgcacacgcttacagccatgacagtgtccttgtattgactccaacgacttgtgctacgaactttgctagtccataaatgactagaataactaatagctatgctaaatggacgaatccctt

SEQ ID NO: 254734 - DNA, 388 bp, Glycine max
gacagcaaaaacaattaataaagatgagttggaagaacaacatggtggtgctaaaggtgtgtttgttgcttcttttccttgtgggggttacagctgcacgcatggaactgagcttcttcaaaagtgatcagtcatcaagttatgatgatgatgagtattcaaaaccatgctgtgatctctgcatgtgcacacgctcaatgcctcctcaatgcagctgtgaagatattaggctgaattcatgccactcagattgtaagagcagtatgtgcacacgctcacagccaggacagtgtcgttgtcttgacaccaacgacttctgctacaaaccttgcaagtccagagatgactagaaaaactaatagctctctcaaatggacgaagccccttt

SEQ ID NO: 254735 - DNA, 362 bp, Glycine max
gatcatttgtaagagaagggaaaagcgggagaagagaaaaaacagagggttttgtttctcttttgcagttgcactcttgcgttgcaggcaggggcatctgcttcccgttctgctccgagcgatcaagtgagtgagtgagtgagtgtcatatatatacatagtgcgttcgagaaatgcagcagcacctgatgcagatgcagcccatgatggctgcctactaccccaacaacgtcaccaccgatcacattcaacagtacctggatgagaacaagtccttgattctgaagattgttgaaagccagaattctggcaagcttaacgagtgtgccgagaaccaatcaaggctgcagagaaatctcatg

SEQ ID NO: 254736 - DNA, 406 bp, Glycine max
gattcacacgactaactaagaaagtcttccgtagccccccaaaaatgaagagcaccatcttctttgctctctttctcttttgtgccttcaccacctcatacctaccttcagccatcgctgatttcgtgctcgataatgaaggtaaccctcttgaaaatggtggcacatattatatcttgtcagacataacagcatttggtggaataagagcagccccaacgggaaatgaaagatgccctctcactgtggtgcaatctcgcaatgagctcgacaaagggattggaacaatcatctcgtccccatatcgaatccgctttatcgccgaaggccatcctttgagccttaagttcgattcatttgcagttataatgctgtgtgttggaattcctaccgagtggtctgttgt

SEQ ID NO: 254737 - DNA, 402 bp, Glycine max
gattcacacaactaactaagaaagtctgccgtagccccccaaaaatgaagagcaccatcttctttgctctctttctcttttgtgccttcaccacctcatacctaccttcagccatcgctgatttcgtgctcgataatgaaggtaaccctcttgaaaatggtggcacatattatatcttgtcagacataacagcatttggtggaataagatcagtcccaacgggaaatgaaagatgccctctcactgtggagcaatctcgcaatgagctcgacaaagggattggaacaatcatctcgtccccatatcgaatccgttttatcgccgaaggccatcctttgagccttaagttcgattcatttgcagttataatgctgtgtgttggaattcctaccgagtggtctg

SEQ ID NO: 254738 - DNA, 251 bp, Glycine max
gagttggattccaatatattccattctctctgtgtatttccctacctctcccttcaagatgcagatcttcgtcaagaccctcaccggcaagaccatcacccttgaggtggaaagctctgacaccatcgacaacgtcaaggccaagatccaagacaaggaaggaatccccccggaccagcaacgtctcattttcgccggaaagcaacttgaggacgggcgtacccttgctgactacaacattcagaaggaga

SEQ ID NO: 254739 - DNA, 362 bp, Glycine max
ggcacaccaacaccaaagcaaacccactaagatggcttcctttgtatccttcctagtgctgcttcttgcagcccttatcctcatgcctcaagggcttgctacttactacaaaccaattaagaagccaccagtgtacaagcctccagtgtacaagccaccagtgtacaaaccaccggtttataagccaaaaccaccggtttacaagccgaaaccaccggtttacaagccaccatataagaagccaccatacaagaaaccaccttatggaaagtatcctccagtagaggacaacacccatgcctaaagcaagcaatgaggtctattatctacttaataaataagaggaactgctttggggtttc

SEQ ID NO: 254740 - DNA, 317 bp, Glycine max
gacagcaaaaacaattaataaagatgagtgtgaagaacaacatggtggtgctaaaggtgtgtttgttgcttcttttccttgtgggggttacagctgcacgcatggaactgagcttcttcaaaagtgatcagtcatcaagttatgatgatgatgagtattcaaaaccatgctgtgatctctgcatgtgcacacgctcaatgccttctcaatgcagctgtgaagatattaggctgaattcatgccgctcagattgtaagagcttgatgtgcacacgctcacagccaggacagtgtcgttgtcttgacaccaacgacttc

SEQ ID NO: 254741 - DNA, 411 bp, Glycine max
gacagcaaaaacaattaataaagatgagtgtgaagaacaacatggtggtgctaaaggtgtgtttgttgcttcttttccttgtgggggttacagctgcacgcatggaactgagcttcttcaaaagtgatcagtcatcaagttgtgatgatgatgagtattcaaaaccatgctgtgatctctgcatgtgcacacgctcaatgcctcctcaatgcagctgtgaagatattaggctgaattcatgccactcagattgtaagagctgtatgtgcacacgctcacagccaggacagtgtcgttgtcttgacaccaacgacttctgctacaaaccttgcaagtccagagatgactatgaaaactaatagctctctcaaatggacgaagccccttttaggctttgttgtatgttagggg

SEQ ID NO: 254742 - DNA, 401 bp, Glycine max
  unsure (1)..(401): unsure at all n locations
gcttcacagcaaaaacagttagtaaagatgagtttgaagaacaacatggtggtgctaaaggtgtgtttgttgcttcttttccttgtgggggttacagctgcacgcatggaactgagcttcttcaaaagtgatcagtcatcaagttatgatgatgatgagtattcaaaaccatgctgtgatctctgcatgtgcacacgctcaatgccttctcaatgcagctgtgaagatattaggctgaattcatgccactcagattgtaagagctgtatgtgcacacgctcacagccaggacagtgtcgttgccttgacaccaacgacttctgctacaaaccttgcaagtccagagatgactagaanaactaatagctctctcaaatggacgaagcccctttaggctttgt

SEQ ID NO: 254743 - DNA, 384 bp, Glycine max
gggtagccgctgcatctcaacgaaacagagggagctagagagagagagagagagaaagagaagagagagaagcagcgattcatcacaatgggtaaggttcacggatctctcgcacgtgcgggtaaagtgagaggacaaactcccaaagtggcgaagcaagacaagaagaaaaagccacgcggacgcgctcacaagagaatgcaatacaaccgccgattcgtcaccgccgtggtgggattcggaaagaagcgtggaccaaactcctcggagaagtgagggaggcgtgttgaaaatcatggtttttcttagtttgggaaatgtatcacttgccttgatttgattgatgaactcaaacttttatgatagttcttattatgggtcaat

SEQ ID NO: 254744 - DNA, 388 bp, Glycine max
gacagcaaaaacaattaataaagatgagtgggaagaacaacatggtggtgctaaaggtgtgtttgttgcttcttttccttgtgggggttacagctgcacgcatggaactgagcttcttcaaaagtgatcagtcatcaagttatgatgatgatgagtattcaaaaccatgctgtgatctctgcatgtgcacacgctcaatgcctcctcaatgcagctgtgaagatattaggctgaattcatgccactcagattgtaagagctgtatgtgcacacgctcacagccaggacagtgtcgttgtcttgacaccaacgacttctgctacaaaccttgcaagtccagagatgactagaaaaactaatagctctctcaaatggacgaagccccttt

SEQ ID NO: 254745 - DNA, 391 bp, Glycine max
gattcacacaactaactaagaaagtcttccgtagccccccaaaaatgaagagcaccatcttctttgctctctttctcttttgtgccttcaccacctcatacctaccttcagccatcgctgatttcgtgctcgataatgaaggtaaccctcttgaaaatggtggcacatattatatcttgtcagacataacagcatttggtggaataagagcagccccaacgggaaatgaaagatgccctctcactgtggtgcaatctcgcaatgagctcgacaaagggattggaacaatcatctcgtccccatatcgaatcccgtttatcgccgaaggccatcctttgagccttaagttcgattcatttgcagttataatgctgtgtgttggaatttctac

SEQ ID NO: 254746 - DNA, 315 bp, Glycine max
gacagcataaacaattaataaagatgagtgtgaagaacaacatggtggtgctaaaggtgtgtttgttgcttcttttccttgtgggggttacagctgcacgcatggaactgagcttcttcaaaagtgatcagtcatcaagttatgatgatgatgagtattcaaaaccatgctgtgatctctgcatgtgcacacgctcaatgccttctcaatgcagctgtgaagatattaggctgaattcatgccactcagattgtaagagctgtatgtgcacacgctcacagccaagacagtgtcgctgtcttgacaccaacgact

SEQ ID NO: 254747 - DNA, 432 bp, Glycine max
atcggataggaagacgacagaatgggacgccaaagccctctcttatttccagacgcggcggcttcttcttccgtttttgtctattggcgtgaacaatggcgacttacgctgcgatgaagcccacaaagcccggcttggaggagccccatgagcagatccacaagataaggatcaccctttccttcaagcacgtcaaaaacctcgagaaggtttgtgcggacttggttcgcggtgcataggacaagcgcctcagggttaagggacctgtcaggatgcccactaaggttcttctcatcactaccaggaagtccccttgtggtgaaggtaccaacacatgggacagatttgaacttcgtgtgcacaagagagtgatggacctctacagttccccagatgtagttaagcagattacctctatcacgattgaacctg

SEQ ID NO: 254748 - DNA, 368 bp, Glycine max
  unsure (1)..(368): unsure at all n locations
gggatggagatgagtgctaaacggaagaagaagcgcgtgatgacgttgaagaggaagcgccgaaagatgagacaaagatctaagtaggtgcttgaacaaggagtggagatgatgtgcttttccatctgctaccagcttcatgacattttatgctgtcatggctcttatgatgatcttgaggtctagtggcgaggggagcttccatcttgactttagtttagctttactggtctaaagattgctgttttagtgtgggttaagttatgatattgagagttttgtgttatctaattatgtactggtacgttttgtatactttttggnttatcttaatagcttaaatattagtattttgagacgtgcatgat

SEQ ID NO: 254749 - DNA, 318 bp, Glycine max
ggcgacaagtgagtttgttgatcgagataactagaaacagtgtgatgaaaatgaaggtccttgttttcttcgttgctacaattttggtagcatggcaatgccatgcgtacgatatgttccctctccgaatgaacactggctatggtgcccgtactccggaggtgaaatgcgcaagttggaggcttgctgtggaagcacacaacatctttggctttgagaccattcctgaagagtgcgttgaagcaacaaaggaatacattcatggcgaacaatatagatcagactccaaaacagttaaccaacaagcttacttttatg

SEQ ID NO: 254750 - DNA, 395 bp, Glycine max
  unsure (1)..(395): unsure at all n locations
gcgcacacacgggcagagtgagtgcagagagatggcttgcagacagttgtgggctgcgagagctgcttcctacctgaggatctccgtgtttcacagaagcttctctaacgttttgaatgatctgaagtatgctgattctcatgagtgggtgaaggttgatggaaattctgcaactgttggcataactgatcatgcccaagatcatttgggtgaggttgtgtatgttgaattgcctgaagtgggagccaccgtgacacaaggagaaggttttggtgcagctgaaagtgtgaaggcaactagtgatattaactcttctgtttcaggaaaagtggtcgaagttaatgaaaaacttactagttctnctgcttttgtcaacacaagcccttacaaagatg

SEQ ID NO: 254751 - DNA, 399 bp, Glycine max
gacaacacaaacattctctccattgtgttggaacactcatcaccatggccaagcttgttctttccctttgtttccttcttttcagtggctgcttcgctctgagagagcaggcacagcaaaatgagtgccagatccaaaagctgaatgccctcaaaccggataaccgtatagagtcggaaggtgggttcattgagacctggaaccctaacaacaagccattccagtgtgccggtgttgccctctctcgctgcacccttaaccgcaatgcccttcgtagaccttcctacaccaacggtccccaggaaatctacatacaacaaggtaatggtatttctggcatgatattcccgggttgtcctagcacttatcaagagccgcaagaatctcagcaacgaggac

SEQ ID NO: 254752 - DNA, 412 bp, Glycine max
gaatctcttcacagaagaaaaaagagaagaggatgggtttgaagaacaacatggtggtgctaaaggtgtgtttggtgctacttttccttgtggggggtactactagtgccagcctgaggctgagtgagcttggcctgctcatgaaaagtgatcatcatcaacactcaaatgatgatgactcttcaaaaccatgctgtgatcaatgcgcatgcacaaagtcaaacccttctcaatgccgctgttcagatatgaggctgaattcgtgccattcagcctgcaaatcttgtatttgcgcattatcgtatcctgcacagtgtttttgtgttgacataacggatttctgctatgaaccttgcaagcccagtgaggatgacaaggaaaactactaatgaacaagtgttatgcatgtaag

SEQ ID NO: 254753 - DNA, 364 bp, Glycine max
  unsure (1)..(364): unsure at all n locations
ggtgagacgagggtaaggtcgcgttgtgttgggtcgtgtcgtgcgctgttcctctgtctgtcgtttttgttttcagaccaaaccctagctccgcatcgcaaccatgtcgaccaagcaaggtggaaaagttaagcctttgaagaaacccaagtctgataagaaggattacgacgaggttgacatggctaacattcagaagaaaaaggaagaggagaaggcgctaaaggagttgaaagccaaggcgcaacagaagggaagctttggaggttctgggctcaagaaaagtggaaagaaataagggctctntatcatgattgtatacatccaatattgagccctgtaagttattaccatgataacttct

SEQ ID NO: 254754 - DNA, 405 bp, Glycine max
aggggacagcagaaacaattaataaagatgagtttgaagaacaacatggtggtgctaaaggtgtgtttgttgcatcttttccttgtgggggttacagctgcacgcatggaactgagcttcttcaaaagtgatcaatcatcaggttatgatgatgatgagtattcaaaaccatgctgtgatcgctgcatgtgcacacgctcaatgcctcctcaatgcagctgtgaagatattaggctgaattcatgccactcagactgtaagagctgtaagtgcacacgctcacagccaggacagtgtcgttgtcttgacaccatcgacgtctgctacaaaccttgcaagtccacagatgactacaagaactaatagctctctcaaatggacgaagcgcctttaagctttgtttgt

SEQ ID NO: 254755 - DNA, 394 bp, Glycine max
gacacaccgtttgttctattcttaactcaacttctgctacccactctcttcttccaagtccaaccacgcttttctctacagtcatgggcaaggtcaagatcggaatcaacggatttggaagaattggccgtttggttgccagagtcgctctgcaaagagacgatgtggagctcgttgccgttaacgaccctttcattaccaccgattacatgacatacatgtttaaatacgacagtgttcacggacactggaagcatcacgatgtcaccgttaaggacgagaagacccttttcttcggtgacaagccagtcaccgtttttggacacaggaaccctgaagagatccatgggggtcaactggagctgataacattgttgagttcaccggagttttc

SEQ ID NO: 254756 - DNA, 399 bp, Glycine max
gatcgttgggtgtgatcggtgtgagtctaatatttgcagtgctgaaaatgtcgcagttgttggacaaagccaaaaactatgttgcggagaaagtcacgaacatgcccaagcccgaggcgagtgtcaccgacgcggatttcaagcgcgtgagccgcgacagcgtcgagtacttggctaaggtctctgtttccaacccttattccactcccattcccatttgtgagatcaagtactccctcaaaagtgctggcaaggagatagcatcagggacaatacctgacccagggtcactgaaggcaagtgacacaacaatgctggatgtgccagtgaaggtgcctcatagcatattactgagcttggcaaaggacattggtgcagattgggacattgattaccaat

SEQ ID NO: 254757 - DNA, 372 bp, Glycine max
gacgatgagtcgatttgataactaagatattgttattcgtgatattgatccaatttgatatcatcgaaatccaatttataccattgtgtgaattaattatcgatgaaagatttatcatctctatgggattaaatcccgaattttttattggaaatttaagagaaataaaacataataaagattatggaagtaaatattcttgcatttattgctactgcactgtttattctagttcctactgcttttttacttataatttacgtaaaaacggtaagtcaaagtgactaatttcactgaaatctgacgtcttcatttttatcaatgtaatcaatgattaaaagaaatgaaaaaggttttcaatttttggtcgta

SEQ ID NO: 254758 - DNA, 356 bp, Glycine max
gatcgaaattctagacacacaacacataaaagatttccttgttctttttactgcttaaccgttcggctatctcatatatgaacaacagcatgttaggaatgaagagacggagagatgataatgaagggtccttggatttggcaaaatgtcttatgctgttttcttgtccaatagaaagcaacaagacacaacagaaaagttttggttctgtggaatttgagtgcaagacgtgcaaccgcaagttctcttcttttcaagcactgggagggcacagggcaagccacaagaggcagaagctggaaggggaagaactgaaagaacaggccaaaagttttagcttgtggaacaaaaccaaa

SEQ ID NO: 254759 - DNA, 377 bp, Glycine max
gacagcaaaagcaattaataaagatgagtttgaagaacaacatggtggtgctaaaggtgtgtttgttgcttcttttccttgtgggggttacagctgcacgcatggaactgagcttcttcaaaagtgatcagtcatcaagttatgatgatgatgagtattcaaaaccatgctgtgatctctgcatgtgcacacgctcaatgcctcctcaatgcagctgtgaagatattacgctgaattcatgccactcagattgtaagagctgtatgtgcacacgctcacagccaggacagtgtcgttgtcttgacagcaacgacttctgctacaaaccttgcaagtccagacatgactagacaaacaaataggtctctcaaaatgga

SEQ ID NO: 254760 - DNA, 303 bp, Glycine max
agggacacaactaactaagaaagtcttccatagccccccaaaaatggagagcaccatcttctttgctctctttctcttttgtgccttcaggagctcatacctaccttcagccatcgctgatttcgtgctcgataatgaaggtaaccctcttgaaaatggtggcacatattatatcttgtcagacataacagcatttggtggaataagagcagccccaaccggaaatgaaagatgccctctcactgtggtgcaatctcgcaatgagctcgacaaatggattggaacaatcatctcgttcccata

SEQ ID NO: 254761 - DNA, 349 bp, Glycine max
gacagcaaaaacaattaataaagatgagtttgaagaacaacatggtggtgctaaaggtgtgtttgttgcttcttttccttgtgggggtgacagctgcacgcatggaactgagcttcttcaaaagtgatcagtcatcaagttatgatgatgatgagtattcaaaaccatgctgtgatctctgcatgtgcacacgctcaatgcctcctcaatgcagctgtgaagatattaggctgaattcatgccactcagattgtacgagctgtatgtgcacacgctcacagccaggacagtgtcgttgtcttgacaccaacgacttctgccacaaacctttcaagtccagagatgacta

SEQ ID NO: 254762 - DNA, 269 bp, Glycine max
gattcacacaactaactaagaaagtcttccatagccccccaaaaatgaagagcaccatcttctttgctctctttctcttttgtgccttgaggaggtcagacctaccttcagccatcgctgatttcgtgctcgataatgaaggtaaccctcttgaaaatggtggcacatattagacctggtcagacataacagcatttggtggaataagagcagccccaacgggaaatgaaagatgccctctcactgtggggcaatctgccatgagcccg

SEQ ID NO: 254763 - DNA, 388 bp, Glycine max
ggatccaaagtcgcatcttttgcttcactctacgcagatcacagcaaaccagagattgaactccgacgatgcctcccgtcgctcctcgatccggcgatgccatattcgccaacgtcgaacgcgtcaatgcggagctgtttactttgacgtatggcgcaattgtgcgtcaattgctcacggatctggaagaggttgaggaggttaacgagcagcttgatcaaatgggttacaatattggaatccgattgattgatgagtttttagctaagtctaatgtctcaagatgcaccgatttcagagagactactgatgtaattgcaaaggttggttttaaaatgttccctggggttgctgcatctgtgaccaagtgggatcctgatggaacatg

SEQ ID NO: 254764 - DNA, 391 bp, Glycine max
gacacaactaactaagaaagtcttccatagccccccaaaaatgaagagcaccatcttctttgctctctttctcttttgtgccttcacgggctcagacctaccttcagccatcgctgatttcgtgctcgataatgaaggtaaccctcttgaaaatggtggcacatattatatcttgtcagacataacagcatttggtggaataagagcagccccaacgggaaatgaaagatgccctctcactgtggtgcaatctcgcaatgagctcgacaaagggattggaacaatcatctcgtccccatatcgaatccgttttatcgccgaaggccatcctttgagccttaagttcgattcatttgcagttataatgctgtgtgttggaattcctaccgag

SEQ ID NO: 254765 - DNA, 223 bp, Glycine max
ggaaagagagtgaagagagaagaagatggcgtcgagcggagcggtgccgttttggagggcagcggggatgacatacatcacatactcgggagatatgcgcgaatctggtcaggaattgcctcacggaaccctacaaggctgaagccatctctcgtgagaacgtccattttgctctctccaaacgggtcgacgccaagcctgaaactcctactattccttcaga

SEQ ID NO: 254766 - DNA, 375 bp, Glycine max
ggggggaatcattgattgtggcatgccatcgcgcaagcctaacgagagcgaaaccctcttgaccatcagcttcttggatagagcagccatcgttgtctggggacaatttccaagctcgtagtgcccaataatcggtaacattatcgttgtcaaagcaatgacttcctcatcgagcgtgaacagcgaatgccaatgtagaaaggccaaacacaaaattgaagtataggtcgacaattgtctcgagttttgccctctgaggattctgagctcctaacttgttaccaacatgtgtggacattttgaaactcaaagaagaccaaaaaatgtatatcaaagttgttgtttgaatcaaaacccccattgatgcacaagaag

SEQ ID NO: 254767 - DNA, 423 bp, Glycine max
  unsure (1)..(423): unsure at all n locations
ngacagcaagaaacaattaataagagatgaagtttganagaacaacatnggtggtgctaacaggtgtgtttngttgcttctgtttccttcgtgggggttaccacgctgcacgcatgcgaaactgagcttcttcaaagagtgattcagtcgatcaagttatgactgatgaatgagtattcaaaaccactgctgttgattctctgcatgtgcacacgctcgaatgcctcctcacatgtacgctgtgcaagatatctacgctgagattcatgccactccagattgtaaggagctgttatgtgcacaccgctcacgagccagggacagtgtcgtttgtcttgacaccaacgggcttccgctacaaaccttgcaagtccagagatgactagaataactaatagctctcttaaatggacgacacccctt

SEQ ID NO: 254768 - DNA, 315 bp, Glycine max
gacagaagaaaaaagagaagaagatgggtttgaagaacaacatggtggtgctaaaggtgtgtttggtgctacttttccttgtggggggtaccactagtgccaacttgaggctgagtaagcttggcctgctcatgaacagtgatcatcatctacactcacatgatgatgagtcttcaaaaccatgctgtgatcaatgcgcatgcacaaagtcaaatcctcctcaatgccgctgttcacatatgaggctgaattcgtgccattcagcttgcacatcttgtacttgcccattatcgtaccctgcacaatgttcttgtg

SEQ ID NO: 254769 - DNA, 330 bp, Glycine max
gacacttactagtagtaagcatggagtcctcagggatctatgcttacctcttcctctgcatgatctttctctcttccgccactcccattctcggttgtggctactgtggcaaaccccccataaagcacaagcctggtaaaacaccaaagacacccaaaacacccgttgttaagccaccagtcaccatccctcccattaatgttcctcccgttgttcttccaccaacagtgaagcccccaggtattctccctccaattccaattattaaccctacaaccacaccagggaagggacggaacactccatgcccaccaccaacgtctcctgcgc

SEQ ID NO: 254770 - DNA, 323 bp, Glycine max
gacagcaaaaacaattaataaagatgagtttgaagaacaacatggtggtgctaaaggtgtgtttgttgcttcttttccttgtgggggttacagctgcacgcatggaactgagcttcttcaaaagtgatcagtcatcaagttatgatgatgatgagtattcaaaaccatgctgtgatctctgcatgtgcacacgctcaatgcctcctcaatgcagctgtgaagatattaggctgaattcatgccactcagattgtaagagctgtatgtgcacacgctcacagccaggacagtgtcgttgtcttgacaccaacgacttctgctac

SEQ ID NO: 254771 - DNA, 222 bp, Glycine max
gacccatcaatagcaaaatgaccaagttcacaatcctcctcatctctcttctcttctgcatcgcccacacttgcagcgcctcgaaatggcagcaccagcaagatagctgccgcaagcagctccagggggtgaacctcacgccctgcgagaagcacatcatggagaagatccaaggccgcggcgatgacgatgatgatgatgacgacgacaatcacattctca

SEQ ID NO: 254772 - DNA, 355 bp, Glycine max
ggttggaaggatcagcacgacactgagcatcagcaatggcaagcgcaagtgttggtaaagaactgacgcggtattcgtattggaggagctcttgttcccagcgagtccgaatcgctctcaacctcaaagggcttaaatacgaatacaagcccgtcaatctgctcaagggagaacaatctcgccctgagtttctccagctcaatcctgttggttgtgtccccgttccagtggatgaccacgttgttctctatgactctttccccattactatgtatttggaagataagtatcctcacaatccgttgctccctcatgatatttacctgagaggaatcaatttccacgctgcctagtg

SEQ ID NO: 254773 - DNA, 121 bp, Glycine max
gacagcacaaacaactaatacagatgagtttgaagaacaacatggtggtgctaaaggtgtgtttgttgcttcttttccttgtgggggttacagctgcacgaatgaaactaaccttcttcaa

SEQ ID NO: 254774 - DNA, 408 bp, Glycine max
gaatacagagtgagttgttgctccttcgccacaactctctgccaacatgggtatctccagagattctatgcacaagaggcgtgccactggtggcaagaagaaggcctggaggaaaaagagaaagtatgagcttggtcgccagcctgctaacactaagctgtcaagcaacaagacagtcaggaggatccgtgttagaggtggaaatgtgaaatggagggcattgagattggatactggaaattactcctggggaagtgaagctgtaactcgcaagactcgtgtactagatgtggtttacaatgcctcaaacaatgagcttgtgcgtactcagactcttgtcaaaagtgctatcgttcaggttgatgctgctccattcaaacagtggtatcttcagcattatggtgttga

SEQ ID NO: 254775 - DNA, 389 bp, Glycine max
ggcagccagagaaaagaaaatcctcaattttctgagcagctagacactctctctctgtctctcgaaaattctcagtttgcagagaaaatctgaatcatgtcgtggcaagcgtatgtcgacgatcagcttctgtgtgacatcgaaggtaaccacctcactcacgctgctatcatcaggcaagacggcagcgtttgggctcagagtaccgacatccctcagttcagacttgaggagataactgccatcttgaatgattttaaggagcctggatcacttgctccaactggattgtatctcggtggcaccaaatatatggttatccagggtgaacccggtgctgtcaatcgagggaatgaaggtcctgctggtgttactgtgaagaataccgg

SEQ ID NO: 254776 - DNA, 360 bp, Glycine max
gattcatgcaactgaataattaagaaaagccatttccatagcagcctaagaaaatgaagagcactagcttgttcgctatctttctacgttgcgccttcacctcatacctaccttccgccaccgcccaggacgtgctcgacgtggatggcgatccgattcggaacggtttcatatactacgttttgccggcaataagaggaaacggtggcggaatagaacgagccgcactcgggaaagacacttgccctatcactgtagtgcaatctcccaatccaaactctaaggggttagaaattaagtttgaatctgcataccccgcctattacataaacgaaaccctaattttgcaaataaagttca

SEQ ID NO: 254777 - DNA, 144 bp, Glycine max
gacagccaacacaattagtaaagatgagttcgaagagcaacacggtgctgcgataggtctgtttgttgcttcttttccctattcgtgtggcaacggtacccgtggatctgaccttcttcagatttgatgagtcatccagtgttg

SEQ ID NO: 254778 - DNA, 117 bp, Glycine max
cgggacagcacaaccaactactaaagatgagtttgaagaacaacatggtggtgctaaaggtgtgtttgttgcctcctttccttgtggggttacagctgcacgcatggaactgagctt

SEQ ID NO: 254779 - DNA, 357 bp, Glycine max
gattcacacaactaactaagaaagtcttccatagccccccaaaaatgaagagcaccatcttctttgctctctttctcttttgtgccttcacgacctcatacctaccttcagccatcgctgatttcgtgctcgataatgaaggtaaccctcttgaaaatggtggcacatattatatcttgtcagacataacagcatttggtggaataagagcagtctcaacgggaaatgaaagatgccctctcactgtggtgcaatctcgcaatgagctcgacaaagggattggaacaatcatctcgtcgccatatcgaatccgttttatcgccgaagggcatcctttgagccttaagtttcaatcat

SEQ ID NO: 254780 - DNA, 311 bp, Glycine max
gattcatgcacctgaattattgatgaagttcgatttccatcacagcggtgcaaaatgtatatcagtagcttgttcgccatctttcgagggtacgcgctcacctgaaactgagcttccgccaacgctcatgatctgctcgacatggatagcgatactattcggaacggttccataatctacgttttgccggccacacaaggactcggtggcggaacagtgcgaaccgcacgcgggaatgacacttgcccgatcgttgtagtggtatctcccaatccacacaccaaggggtgtgtcattaactttgaatctgc

SEQ ID NO: 254781 - DNA, 402 bp, Glycine max
gattcacacaactaactaagaaagtcttccatagccccccaaaaatgaagagcaccatcttctttgctctctttctcttttgtgccttgaccagctcatacctaccttcagccatcgctgatttcgtgctcgataatgaaggtaaccctcttgaaaatggtggcacatattatatcttgtcagacataacagcatttggtggaataagagcagccccaacgggaaatgaaagatgccctctcactgtggtgcaatctcgcaatgagctcgacaaagggattggaacaatcatctcgtccccatatcgaatccgttttatcgccgaaggccatcctttgagccttaagttcgattcatttgcagttataatgctgtgtgtttgaattccctacgagtggtctg

SEQ ID NO: 254782 - DNA, 376 bp, Glycine max
gacagcaaaaacaattaataaagatgagtttgaagaacaacatggtggtgctaaaggtgtgtttgttgcttcttttccttgtgggggttacagctgcacgcatggaactgagcttcttcaaaagtgatcagtcatcaagttatgatgatgatgagtattcaaaaccatgctgtgatctctgcatgtgcacacgctcaatgcctcctcaatgcagctgtgaagatattaggctgaattcatgccactcagattgtaagagctgtatgtgcacacgctcacagccaggacagtgtcgttgtcttgacaccaacgacttctgctacaaaccttgcaagtccagagatgactagaaaaactaatagctctctcaaatgga

SEQ ID NO: 254783 - DNA, 302 bp, Glycine max
ggccgaggaaaagaaagaaagaaaaaaaaaacagcgccctagatttgctcttctttgcttcggaagaaagagaaaaacaaataacaatggcgttcgcttctttcctcggcagagttctcttcgcttccgtcttcatactctctgcttaccaagaatttaacgaatttggagttgatgggggacctgcagcaaaagcactcagacctaagtttgatgcctttacacatcgaatgcattctcaagttggctttcaacttcctgagattgatctgaaatttttaatttctggggctattgctctg

SEQ ID NO: 254784 - DNA, 373 bp, Glycine max
gacagcaaaaacaattaataaagatgagtttgaagaacaacatggtggtgctaaaggtgtgtttgttgcttcttttccttgtgggggttacagctgcacgcatggaactgagcttcttcaaaagtgatcagtcatcaagttatgatgatgatgagtattcaaaaccatgctgtgatctctgcatgtgcacacgctcaatgcctcctcaatgcagctgtgaagatattaggctgaattcatgccactcagattgtaagagctgtatgtgcacacgctcacagccaggacagtgtcgttgtcttgacaccaacgacttctgctacaaaccttgcaagtccagagatgactagaaaaactaatagctctctcaaat

SEQ ID NO: 254785 - DNA, 439 bp, Glycine max
ggccttccggatggtgggatattgatgagtggatgtcagaccgaccaaacttctgccgatgcaagtcctgcaggaagcgctgccagtgcttatggagcttttagcaatgcaatacaggctataattgaggagactgacggtgcaatcacaaaccaagaacttgttcaaagggcaagagagaagctgaagaactccggtttcactcaaaaaccgggactctattgcagtgatcatcatgttgatgctccttttgtgtgttgatctgttctcatctgatgcagagaaagagagaataatatgtgttgtttatagtctgcttgtgtattgctgtatagttggagactcaaaatgaagttaatgttttcatccagttatcatatgcctgctctattatcacgaattatattccttcaacattttaccccttggtgtgtccttg

SEQ ID NO: 254786 - DNA, 288 bp, Glycine max
gatgcttcgggggaaaaggagggtgaagaggagactgtagacacagctgctgcaaagaagaagaagaagagggaggaaaaggagaaggagaagaaggcagctgcggcggcagcagcagcagcagcagcagtagcaggaactgtaccagaaaatgaaacagcagaagataaagctgaggtaattgaaccaaagaagaatgattcaaaggctaaaaaagcagctgataagaaagtgccaaagcatgttagggagatgcaagaggcactagctcgaagacaagacgctgaa

SEQ ID NO: 254787 - DNA, 320 bp, Glycine max
ggcagccaaagaaaagaaaatcctcaattttctgagcagccaaacactctctctctgtctctcgaaaatgcgcagtttgcagagaagatctgaatcatgtcgtggcaagcgtatgtcgacgatcaccttctgtgtgacatcgaaggtaaccacctcactcacgctgctatcatcggccaagacggcagcgtttgggctcagagtaccgacttccctcagttcaaacctgaggagataactgccatcatgaatgactttaatgagcctggatcacttgctccaactggattgtatcccggttgcaccaaatatatggtcat

SEQ ID NO: 254788 - DNA, 419 bp, Glycine max
  unsure (1)..(419): unsure at all n locations
gacagcanaaacaattaataaagatgagtttgaagaacaacatggtggtgctaaaggtgtgtttgttgcttcttttccttgtgggggttacagctgcacgcatggaactgagcttcttcaaaagtgatcagtcatcaagttatgatgatgatgagtattcaaaaccatgctgtgatctctgcatgtgcacacgctcaatgcctcctcaatgcagctgtgaagatattaggctgaattcatgccactcagattgtaagagctgtatgtgcacacgctcacagccaggacagtgtcgttgtcttgacaccaacgacttctgctacaaaccttgcaagtccagagatgactagaaaaactaatagctctctcaaatggacgaagctcctttagactttgtttgttatgttaggggagacaaa

SEQ ID NO: 254789 - DNA, 401 bp, Glycine max
gacagcaaaaacaattaataaagatgagtttgaagaacaacatggtggtgctaaaggtgtgtttgttgcttcttttccttgtgggggttacagctgcacgcatggaactgagcttcttcaaaagtgatcagtcatcaagttatgatgatgatgagtattcaaaaccatgctgtgatctctgcatgtgcacacgctcaatgcctcctcaatgcagctgtgaagatattaggctgaattcatgccactcagattgtaagagctgtatgtgcacacgctcacagccaggacagtgtcgttgtcttgacaccaacgacttctgctacaaaccttgcaagttcagagattactacaaaaactaatagctctctcaaatggaccaagcccctttaggctttgtttgt

SEQ ID NO: 254790 - DNA, 385 bp, Glycine max
gactcctcatcacattattctatatcaattttggttaagagtcttgaaaaagcaagagaaaaaaaaataccaaccatggcaaccatttctgatcaacctagagggtcctactcctatggaacctcatatggagcaccctatggaaccacgtatgagaccaacaccagcattaacaacccaccttcacgccaaacagtgaagttcataactgctgccactattggcatcacactcttgctcctgtctgggttgaccctcacaggcactgtcataggtttgatcattgcaacccctcttcttgttatcttcagccccatccttgtccctgctgcctttgtgctgttcctagttgcttccggctttttgttctctgggggctgtggtg

SEQ ID NO: 254791 - DNA, 390 bp, Glycine max
gatagcagcatcatacaaagcattgaattcaaaaacttaagttcattccttgtgttttgctttcttcctcaaaaccaaacatgtcgaacacatgcggcaactgcgactgcgctgacaagactagctgcaccaagggaaacagctatggtgttattgtagagactgagaagagttacatcgagactgttgtcatggatgttccagcagctgagcatgatgggaagtgcaagtgtggcactaactgcacttgcacggactgcacctgtggccattaaggaatatgtatgaaaatgtaattgccatgtgtttggcaatacacatatccaaatcatgtaaccctcgtacgaatacaagtgtgtgctgttatcctacttcaagtctgtgtagtca

SEQ ID NO: 254792 - DNA, 379 bp, Glycine max
gacagcaaaaacaattaataaagatgagtttgaagaacaacatggtggtgctaaaggtgtatttgttgcttcttttccttgtgggggttacagctgcacgcatggaactgagcttcttcaaaagtgatcagtcatcaagttatgatgatgatgagtattcaaaaccatgctgtgatctctgcatgtgcacacgcccaatgcctcctcaatgcagctgtgaagatattaggctgaattcatgccactcagattgtaagagctgtatgtgcacacgctcacagccaggacagtgtcgttgtcttgacaccaacgacctctgctacaaatcttgcaagtccagagatgactagaccaactaatagctctctcaaatggacga

SEQ ID NO: 254793 - DNA, 419 bp, Glycine max
gacagcaaaaacaattaataaagatgagtttgaagaacaacatggtggtgctaaaggtgtgtttgttgcttcttttccttgtgggggttacagctgcacgcatggaactgagcttcttcaaaagtgatcagtcatcaagttatgatgatgatgagtattcaaaaccatgctgtgatctctgcatgtgcacacgctcaatgcctcctcaatgcagctgtgaagatattaggctgaattcatgccactcagattgtaagagctgtatgtgcacacgctcacagccaggacagtgtcgttgtcttgacaccaacgacttctgctacaaaccttgcaagtccagagatgactagaaaaactaatagctctctcagatggactaagcccctttaggctttgtctgttatgttacgggagacaaa

SEQ ID NO: 254794 - DNA, 367 bp, Glycine max
gactgcaactttgctctctgtgaggcttcaatttctaattagggtttcgcttagagtaaccaataaccatgggagtcttcagctttgtcgtccgcaaatccggcagcgaatggagcgccaagcaacattccggcgacatcgaggcctccgccgattccaccttcgatctccaacggaagctcgtgcaagccgctctcgccgttgattcctccggtggagttcagtcctctttctctcccgtgtctcctacctccgctgtgttccaggtgatagtgggtggtgcagtattcgttggacgtggtggtggtgctgtcgcagctgcacctgcacgtggtgctgccgcagctgatgctgcccagctgctgac

SEQ ID NO: 254795 - DNA, 419 bp, Glycine max
ggtcgtggtcgtgtcgcagcaaaaccaggccacccactaacttgtttggtccaagacatggctctgatcctgcatgctaggaaaacaaacaagaatgccttcaagactctgattgcggcagagtacagtggcgtccaagtggaattggcccctaatttcgagatgggtgtctctaacaaaactcctgaatttctcaagatgaatcctattggaaaggttcctgttttggaaacgcccgatggtccagtctttgagagcaatgcaatcgctcgttacgttgctcgactaaagggtgacaacgctttgttctcatcttctgccattgataatgcccacattgaccagtggattgatttttcatccttggagatcgatgctaatcccatgaaattgctcctaccaagacttggatttgcccc

SEQ ID NO: 254796 - DNA, 362 bp, Glycine max
gacaatagagactagagaagagagaggtgttggtgccctaatcgtgagaagaaaggaaagggaaaagaggaaaatggtgtgcataaggaaggcgacggtgaaggaccttctggcgatgcaggcgtgcaacctgttctgcctccctgagaactaccagatgaagtactacctctatcacatcctctcctggccccagctcctctacgtcgccgaagactacaacggccgcatcgtcggctacgtcctcgccaagatggaggaagaaaccaccgactgccacggccacatcacctccctcgccgtcctccgcacccaccgcaagctcggcctcgccaccaagctcatgaccgcagctcagaacg

SEQ ID NO: 254797 - DNA, 332 bp, Glycine max
gacagcaaaaacaattaataaagatgagtttgaagaacaacatggtggtgctaaaggtgtgtttgttgcttcttttccttgtgggggttacagctgcacgcatggaactgagcttcttcaaaagtgatcagtcatcaagttatgatgatgatgagtattcaaaaccatgctgtgatctctgcatgtgcacacgctcaatgcctcctcaatgcagctgtgaagatattacgctgaattcatgccactcagattgtaagagctgtatgtgcacacgctcacagccaggacagtctccttgtcttgacacccacgacttcctgcacaaaccttgc

SEQ ID NO: 254798 - DNA, 431 bp, Glycine max
gagaagaaaaaagagaagaagatgggtttgaagaacaacatggtggtgctaaaggtgtgtttggtgctacttttccttgtggggggtactactagcgccaacttgaggctgagtaagcttggcctgctcatgaaaagtgatcatcatcaacactcagatgatgatgagtcttcaaaaccatgctgtgatcaatgcgcatgcacaaagtcaaaccctcctcaatgccgctgttcagatatgaggctgaattcgtgccattcagcttgcaaatcttgtatttgcgcattatcgtatcctgcacagtgtttttgtgttgacataaccgatttctgctatgaaccttgcaaacccagtgaggatgacaaggaaaactactaatgaacaagtgttatgcatgtaagctctctctccaacggacaaagcccccttta

SEQ ID NO: 254799 - DNA, 324 bp, Glycine max
cgggacagcagaaacaattaataaagatgagtttaaagaacaacatggtggtgctaaaggtgtgtttgttgcttcatttccttgtgggggtgacagctgcacgcatggaactgagcttcttcaaaagtgatcagtcatcatgttatgatgatgatgagtattcataaccatgctgtgatctctgcatgtgcacacgctcaatgcctcctcaatgcagctgtgaagatattaggctgaattcatgccacgcagattgtaagagctgtatgttgcacacgctcacagccaggacagtgtcgttgtcttgacaccaacgacttcctg

SEQ ID NO: 254800 - DNA, 308 bp, Glycine max
gctcgaagcatttgagactaactcttagagagaaaaaaaaatggctgatacaggtggaggagatgcagtgagaccagtggtaatatgtgataacaagtgtggctgcacacttccatgcactggtggttccacttgcaggtgcacaagtgctggcattgccacaggacggggtgatcacgtgacatgctcgtgcggagagcactgtggttgcaatccatgcgcaggtcccaagattgcggctgctggaagtggttgcagatgtggcacagattgtgcatgtgcctcccgccgcacttagtcatcacacc

SEQ ID NO: 254801 - DNA, 356 bp, Glycine max
agggaagagaagcattagcaaaagcaagaagaactagtctaagcagaaatggcctcttcagtgatagcatctgtggccctcaaacctgccccttccactgttgagaagtcctcagttagaggccttccctccctctcaaggaactcctcttcattcagagttgtggccagtggtggcaagaagatcaagactgacaagccttatggaattaatggtggcatggctttgagggaaggagttgatgcatctggcaggaaaggaaagggaaggggcgtttaccagtttgtagacaaatacggtgctaatgtcgatggttacagtcctatctacgacaccaacgactggtctccaaccgg

SEQ ID NO: 254802 - DNA, 350 bp, Glycine max
gattgcacaaaaaatggagttctacacaaggccaaataggagtgacatccacctctcagcagaggaagaagccaccatagaggcaaagaccagagactactttgatggggttgcaccacaacgccacacaaagcctcaacgaagtgagtattcagctcaatatgtggatgctttctccaatgcccatcactcttcttcttcttcttctataccagaattcatgcaattccaacgcctcgagaatgatccccaagagaagaaattggagtacaatggaagtcaagtaccggaagaatttgtggaaacagagtattaccaagatctcaacagcgtggaccaacaccaccata

SEQ ID NO: 254803 - DNA, 368 bp, Glycine max
agaaggggatagcgaaacagagagtggtttcagtgagtgatcggtgttcacttgatgcttcataagtcgtcatcatcatcatcatcatcagcgttgagtgaagaagatgccgatcagaaacatcgccatcggaaggcctgaagaggctactcaccccgacacgttgaaggcggggttggctgagttcatctccaccttgatcttcgtgttcgccggttcaggttccggcatcgcctacaacaagctcaccgacaacggcgccgccactcccgccggcctcatctccgcttccatcgcccatgctttcgccctcctcgtcgccgtctccgtcggcgccaacatctccggcgggcacgtcaaccccgccg

SEQ ID NO: 254804 - DNA, 373 bp, Glycine max
ggttagttgcctgcaacagagtaagagggcaaaaccctagctttagtgtcttcccgcccatctcttgcaatctcatagattttagcagccatggcgagtaccaaagttcagagggttatgacccaacctattaacttgattttcaggtttcttcagagcaaagcgcgcatccagatttggctctttgagcaaaagaatttgaggattgaaggccgaatcattggttttgatgaatacatgaatttggttcttgatgatactgaagaagtgaacgtcaagaagaaaagcagaaagacattatggacgatccttcttaaaggagacaacataaccttgatgatgaacacggggaaatgatgaacaacgctggcac

SEQ ID NO: 254805 - DNA, 354 bp, Glycine max
acgcgtccgtacaaacgtccgtacgcgagaagacgacagagaggacagagacccggaaagggtgggaatcgcttttggaaatccattgggcttggatttaagactcccagggaagccatcgaaggagtctacattgacaacaagtaccccttcactggcaatgtttctatctgtggccgtaacttggctggaacatgtcacagtgctaacattaataggactattattgttaggacgaattatctccattttatcaataagtaccagaggtacaagaaaaggcactccaacattcctgctcatatatcacctgccttccgtgtgaaagaatgacatcaccttaatactggtcaa

SEQ ID NO: 254806 - DNA, 316 bp, Glycine max
gagaacagaaacacttaataggtatgagtttcaagaagaacatggtggtgctaaaagtgtgtatgttgcttcatttccttgtgggggttacagctgcacgcatgtaactcagcttcgtcaaaattgatcagtctgcacgttacgatgatgaagagtattcaagtccatgcagtgatctcagcatgcgcacacgcacaatgcctcctcaatgcagctgtgaatatcataggctgaattcatggcactcagattgtcatacccgtatgtccacaggctcacatccaggagagtgtcattgtcttgataccggtgactt

SEQ ID NO: 254807 - DNA, 214 bp, Glycine max
gactcatacaatagagaccagcttttgcttctttgtgaacatggagatgaggacatcatgtggcttcttcttcgtgctcgtcgtcattgtctttgcttctcatgtggtggtgcaaacggacggaacagtgtgtgagtcacaaaaccaccggttcgcatggtttgtgtaatagacaccacaagcgtgtgttggtccgcacgaatcagtgtttctc

SEQ ID NO: 254808 - DNA, 161 bp, Glycine max
gattcacgcagctacgtaagacttgaatagtactatcgtctttgctctctttccaatctgtgccatcatcagcgcagtgggggcttcagccaccgctcagttcgtgctcgacactgatgatgatcctcttcacataccgtcgcacacaccatactgttgcc

SEQ ID NO: 254809 - DNA, 187 bp, Glycine max
gacggcaaaaacaattaataaagatgagtttgaagaacaacatggtcgtgctgggggtgtgtttgttgcttcttttccttgtgggggttacagctgcacgcatggaactgagcttcttcactagtgatcagtcctcaccttcttatcatgaccagtattcctaaccctgctgtcatctctgcatctc

SEQ ID NO: 254810 - DNA, 394 bp, Glycine max
gtccccattcccaaatttctcattctcccatttcctctcagaaccctcgatcactcccacgcgctcctatatcctcttcggcaccgtcgctctctccaacgatcacaacaacatcgtcatcccatggcaaacgccgcatctggtatggcagtccatgatgactgcaagttaaggtttttggagctgaagacaaagaggacacaccgtttcatagtttttaagattgaggagcagcagaagcaggtcattgtggagaagcttggtgagccagcccaaggctatgaagatttcactgccagccttcctgctgatgagtgccgttatgctgtttatgattttgagtatctgactgaagggaatgtccctaaaagcagaatttttttcattgcatggt

SEQ ID NO: 254811 - DNA, 383 bp, Glycine max
gacagcaaaaacaattaataaagatgagtttgaagaacaacatggtggtgctaaaggtgtgtttgttgcttcttttccttgtgggggttacagctgcacgcatggaactgagcttctccaaaagtgatcagtcatcaagttatgatgatgatgagtattcaaaaccatgctgtgatctctgcatgtgcacacgctcaatgcctcctcaatgcagctgtgaagatattaggctgaattcatgccactcagattgtaagagctgtatgtgcacacgctcacagccaggacagtgtcgttgtcctgacaccaacgacttctgctacaaaccttgcaagtccagagatgactagaaaaactaatagctcctctaaatggacgaagcc

SEQ ID NO: 254812 - DNA, 368 bp, Glycine max
ggcggcgggatcatcacgagattgcaaaatgaagttcaacattgcaaatcccaccactgggtgccagaagaagctggaaatcgatgacgacctgaagcttcgggcattttgggacaagaggatctcccaggaggtccttggtgacgccctgggtgaggagtttaaaggatatgttttcaaaaccactggtgggtgtgacaaacaaggattcccaatgaagcacggagtgttgacccctggtcgtgttcgactcttgctccatagaggaactccttgtttccgtggatatggaaggcgcactggagagcgtagaacgacatctgttcgtgggtgcattgtcagcccagacctctctgttttgaacctgg

SEQ ID NO: 254813 - DNA, 328 bp, Glycine max
tgatcaattttataagattgaatcgactataaaatgaaatgaatcatttcatattgatagtattgctatgcttagtgtgcgactcgttagttttttagaacggttccaatttaacaaatttataaaccggttcatcgtattaatgaattagataagaactaataaccaacgcatcgcttcggattatctagatctaaagaactagtcaaggcgtgacacaatatgagaacagatatattacagcatctgaactattgtgaagcataaaagaacatagctcttatttagttgttacgcaatacaaatatacagagcgatgaagacgccg

SEQ ID NO: 254814 - DNA, 282 bp, Glycine max
gacacaactaactaacaaagtcttcgataggccgccgaaaatgaagagcaggatcttctttgcgctctttctgttttgtgccttcaccacctcatacgtaccttcggccatccctgatgttgtgctcgataatgaaggtaacgctcttgaaaatggtggcacatatgacatcttgtcagacataacagcagttggtggaataagatcagccccggcgggaactgacatatgccctcttaatgtcgtggaatctcgcaatgatctcggacaaatggattggaa

SEQ ID NO: 254815 - DNA, 398 bp, Glycine max
gagataatgtaatggataatcaaattaccttaaaaagaagaatcctggtcgcatgatttgacagtgattagcacaaaatgcatctggcttccgctcataaatccaacttcaaattttccattacgctcaagccgcacaaccactacctctttcattttcaaccatagaacaagataatcacagtccaagtgcattaggagccaccagtccacagtatagcagaggtggactcttcagggcatgacaactctcgtcactggtggtactcgcggaattgggcacgccattgtggaggaattgacggggtttggagccagactgcatacctgtgccaggaatgaacatcatctcatcaagtgcctcacgaactggaatgattccggttttgatgtcactgg

SEQ ID NO: 254816 - DNA, 403 bp, Glycine max
gatacttagatcttcttccttcactcaatcaagttttgactttatttggagtttctccaaaatgagccggccaatggaggaagatactgtgggtaagaatgaggaagaggagttcaacactggaccgctgtccgtactcatgatgagtgttaaaaataatactcaggtactgataaattgtcggaacaacaaaaagcttctgggtcgtgtaagggcttttgataggcactgcaacatggttcttgaaaatgtgagggagatgtggactgaggtgccaaaaactggtaaaggaaagaaaaaggcccagccagtcaacaaggatagattcatcagcaagatgttcctccgtggagattccatcatcattgttcttaagaatcccaaatgagattccatcatcaat

SEQ ID NO: 254817 - DNA, 400 bp, Glycine max
gacagcaaaaacaattaataaagatgagtttgaagaacaacatggtggtgctaaaggtgtgtttgttgcttcttttccttgtgggggttacagctgcacgcatggaactgagcttcttcaaaagtgatcagtcatcaagttatgatgatgatgagtattcaaaaccatgctgtgatctctgcatgtgcacacgctcaatgcctcctcaatgcagctgtgaagatattaggctgaattcatgccactcagattgtaagagctgtatgtgcgcacgctcacagccaggacagtgtcgttgtcttgacaccaacgacttctgctacagaccttgcaagtccagagatgactagaacaactaatagctctctcaaatggacgaagcccctttaggctttgtttg

SEQ ID NO: 254818 - DNA, 394 bp, Glycine max
gacaacacaaacattctctccattgtctttgaacactcatcaccatggccaagcttgttctttcgctttgtttccttcttttcagtggctgcttcgctctgagagagcaggcacagcaaaatgagtgccagatccaaaagctgaatgccctcaaaccggataaccgtatagagtcggaaggtgggttcattgagacctggaaccctaacaacaagccattccagtgtgccggtgttgccctctctcgctgcaaccttaaccgcaatgcccttcgtagaccttcctacaccaacggtccccaggaaatccacatacaacaaggtaatggtacttttggcatgatattcccgggttgtcctagcacttatcaagagccgcaagaatctcagcaacg

SEQ ID NO: 254819 - DNA, 314 bp, Glycine max
cgggatacttactgagtgcttgcagttgctgcgtcgcaaggtaccggcggcgacggagcgctatcttctcaatttccgatcactgcgttggttctgttgacgatggttgtgttctacttgacttgcatacttgatggcgtcaaagttgctgaagttgcagtccgcagcatgtcaagcatctcaatttgtatccagtcttggaactaattactacacgcaattgctggaccataccaagctgcacattcatgagcctcctacagtagagaaatgcatcctgctggcaaagcaactgtcttacacccgacctgcta

SEQ ID NO: 254820 - DNA, 188 bp, Glycine max
ggttctagtgtgtgattgtttgttgttgtaactcgttcttcttcttttgttgttctgtgtttgtgtttgttttttctctcaggtgaaggtctcgtgctgctgtggtaactgtggttgcggaggctcccgcaagtgcggcaactgctgctgaggctgcaagatgtacccagacttcagctacactgagt

SEQ ID NO: 254821 - DNA, 415 bp, Glycine max
  unsure (1)..(415): unsure at all n locations
gacagcanaaacaattaataaagatgagtttgaagaacaacatggtggtgctaaaggtgtgtttgttgcttcttttccttgtgggggttacagctgcacgcatggaactgagcttcttcaaaagtgatcagtcaccaagttatgatgatgatgagtattcaaaaccatgctgtgatctctgcatgtgcacacgctcaatgcctcctcaatgcagctgtgaagatattaggctgaattcatgccactcagattgtaagagctgtatgtgcacacgctcacagccaggacagtgtccttgtcttgacaccaacgacttctgctacaaaccttgcaagtccagagatgactagaagaactaataactctctcaaatggacgaagcccctttacgctttgtctgttatgttaggggaga

SEQ ID NO: 254822 - DNA, 339 bp, Glycine max
gatgcaactgaataattaagaaaagccatttccatagcagcctaagaaaatgaagagcactagcttgttcgctatctttctactttgcgccttcagctcatacctaccttccgccaccgcccaggacgtgctcgacgtggatggcgatccgattcggaacggtttcatatactacgttttgccggcaataagaggaaacggtggcggaatagaacgagccgcactcgggaaagacacttgccctatcactgtagtgcaatctcccaatccaaactctaaggggttagaaattaagtttgaatctgcataccccgcctattacatatacgacaccctaaa

SEQ ID NO: 254823 - DNA, 330 bp, Glycine max
gacagcaaaaacaattaataaagatgagtttgaagaacaacatggtggtgctaaaggtgtgtttgttgcttcttttccttgtgggggttacagctgcacgcatggaactgagcttcttcaaaagtgatcagtcatcaagttatgatgatgatgagtattcaaaaccatgctgtgatctctgcatgtgcacacgctcaatgcctcctcaatgcagctgtgaagatattacgctgaattcatgccactcatattgtaagagctgtatgtgcacacgctcacagcctggacagtgtcgttgtcctgacaccaacgatctctgccacaaacctt

SEQ ID NO: 254824 - DNA, 218 bp, Glycine max
gtggagtgaactgatacagcatacagtatggcttcgacggcagcgtaccttgctcggcgcgcggcgcagaaggagagggttcggatcctctaccgccgcgccctcagagacactctcaactgggccgtacattgacacctcttctactatgacccttcaaacctccgccaaaggttcgaggacaacacacacctgcaacaccctcatacgattgacgc

SEQ ID NO: 254825 - DNA, 325 bp, Glycine max
gatccaaagcttcttcagttattcatctgcttactaaaatttcttccattcttagctttgttcaatcaaagttttttaagatggcccagagaaatgttactgctaattcttcttttgaaaggactagcttgccttccctagatcaaaagttggccatggccaagcgctgctctcatgagggtgtgatggcaggagcaaaagcagctgttgttgctactattgctactgccgtaccaactctggctagtgtaaggatgcttccttgggcaagagccaatctcaatcactctgctcaagctctcataatttccacagtggcgggagc

SEQ ID NO: 254826 - DNA, 278 bp, Glycine max
gatccaaagcttcttcagttattcatctgcttagcaacatttcttcgattcttagctttgttcactcaaagttttttaacatggcccataggggtgttactgctaattcttcttttgagaggactagcttgccttccctagatcaaaagttggtcatggccaatcgctgctctcatgacggtgtgatggcaggagcaaaatcacctgttgttgctactattgctactgccgtaccaactctcgctagtgtacggatgcttccttgggcaagacccatt

SEQ ID NO: 254827 - DNA, 408 bp, Glycine max
  unsure (1)..(408): unsure at all n locations
ggacccacagcaacaagacaactacatgaagcgaaagccttccaattccaatgttctcgtcctcgccgccctcgtgcctttcggcgtctctcttctcatcctcgtcggcctcaccctctccgccaccgtcatcagcctcaccgtcgtcaccccactcttcgtcattttcagccccgtcttgctcnccgcggccctattcatcgctctcgccgtcgccggcttcctcacatccggagtcttcggcatcacctccatctcttcctttgcttggttagccaccaatctccgccgctcacactcaccggaacacccgcaacgtcctcgggacgacgcggaccgcgtggcccagaaaaccgatgaagccgtgcgtcaggcccaggaaacagcccatcaggcccaaaaagagac

SEQ ID NO: 254828 - DNA, 418 bp, Glycine max
  unsure (1)..(418): unsure at all n locations
ggacctctgactcaaaagcattacaagcctttcaaaaatttggaaacaagctcaaagaaattgaggaaaaacttgcaaggaagaacaatgatcaaagtctctccaatcgacttgggccggttcaactgccatacactttgctccatcctaacagtggggaagggttgacttgcagggggattcctaatagcatctctatctaagggagcatgtggtctactttaattacagtactgtacctaccttccaataaaaaagatgcaaggctagagatccaataaatcttgcatcctatctaatgtttcaattatcttgtgttttaatgctgtaatggagcctacaatttgcaaattaattaagagcaccgagcactattagtttgcgtttgaaaaaaaaaaaaaaaanaaaaaaagaaaaa

SEQ ID NO: 254829 - DNA, 358 bp, Glycine max
gacacaactaactaagaaagtcttccatagccccccaaaagtgaagagcaccatcttctttgctctctttctcttttgtgccttcaccacctcatacctagcttcagccatcgctgatttcgtgctcgataataaaggtaaccctcttgaaaatggtggcacatattatatcttgtcagacataacagcatttggtggaataagagcagccccaacgggaaatgaaagatgccctctcactgtggtgcaatctcgcaatgagctcgacaaagggattggcataatcatctcgtccccatatcgaatccgttttatcgccgaacgccatcctttgagccttaagttcgattcatttgca

SEQ ID NO: 254830 - DNA, 344 bp, Glycine max
gattcacacaactaactaagaaagtcttccatagccccccaaaaatgaagagcaccatcttctttgctctctttctcttttgtgccctcaccacctcatacctaccttcagccatcgctgatttcgtgctcgataatgaaggtaaccctcttgaaaatggtggcacatattatatcttgtcagacataacagcatttggtggaataagagcagccccaacgggaaatgaaagatgccctctcactgtggtgcaatctcacaatgagctcgacaaagggattggaacattcatctcttccccaaatcaatccctttttaccgccgaaggccatcctttgagcctt

SEQ ID NO: 254831 - DNA, 422 bp, Glycine max
ggagagaagttattagggtttttgagtgcggtggtccaaacactcttctctgcagcttttgcctacaactcccttcaccatggctgaacaaaccgagaaagcttttctgaagcaaccaaaagtgtttctcagcacaaagaagactgggaagggaaagaggcctggaaaaggtgggaaccgcttttggaagtccattgggcttggatttaagactcccagggaagccatcgaaggaacctatattgacaagaagtgccccttcactggcaatgtttccatccgtggccgtatcttggctggaacatgtcacagtgctaagatgaacaggactgttattgttagaaggaattatctccattttatcaagaagtaccagaggtacgagaagaggcactcaaatattcctgctcatatatcacctg

SEQ ID NO: 254832 - DNA, 389 bp, Glycine max
  unsure (1)..(389): unsure at all n locations
ggcagtgatagagataagaaaatgtggcttgtgcagctctcaaccccatttctgaacggacatggtcattccaacaacccttcccccaaagcaaagttcggcggtaactcagaccaactgggcccaaccgagcttcctgcctcaaatcaatgcgatgaagacaatgcaggggagagtggtgtgctccaccagcgacaagacggtggcagtggaggtggtgcggctggcccctcacccaaagtacangaggcgcttgaggaagaagaggaagtaccaggcccacgaccccgataaccaattcaaagtcggcgacatcgtccagctccagaagaccaggcccatcagcaagaccaaggcctttctcgcactccccgttcccaaaaggccct

SEQ ID NO: 254833 - DNA, 387 bp, Glycine max
gacagcaaaaacaattaataaagatgagtttgaagaacaacatggtggtgctaaaggtgtgttcgttgcttcttttccttgtgggggttacagctgcacgcatggaactgagcttcttcaaaagtgatcagtcatcaagttatgatgatgatgagtattcaaaaccatgctgtgatctctgcatgtgcacacgctcaatgcctcctcaatgcagctgtgaagatattaggctgaattcatgccactcagattgtaagagctgtatgtgcacacgctcacagccaggacagtgtcgttgtcttgacaccaacgacttctgctacaaaccttgcaagtccagagatgactagaaaaactaatagctctctcaaatggacgaagcccctt

SEQ ID NO: 254834 - DNA, 408 bp, Glycine max
ggttctagtgtatgtgattgttgtgactcgttcttcttcgtcgttatcttcttcttttgttgtttgtgtgtttgttttttctctcacctgaaaatgtcttgctgcggtggcaactgtggttgcggaagcgcctgcaagtgcggcaacggtcgcggaggctgcaagatgtacccagacttgagctacaccgagtcaaccaccaccgagaccttggtcatgggagtggcaccagttaacgctcaattcgagagtgctgaaatgggtgttcccgctgagaacgatggctgcaaatgtggagctaactgcaactgcaacccctgcacttgcaagtggggtgttggagaactaaagcttcaagcaaaaatgggacttagaaaataatgataaaactatatgtaatttcaaaac

SEQ ID NO: 254835 - DNA, 419 bp, Glycine max
gatgcaactgaataattaagaaaagccatttccatagcagcctaagaaaatgaagagcactagcttgttcgctatctttctactttgcgccttcacctcatacctaccttccgccaccgcccaggacgtgctcgacgtggatggcgatccgattcggaacggtttcatatactacgttttgccggcaataagaggaaacggtggcggaatagaacgagccgcactcgggaaagacacttgccctatcactgtagtgcaatctcccaatccaaactctaaggggttagaaattaagtttgaatctgcataccccgcctattacataaacgaaaccctaattttgcaaataaagttcagttacccacagcagtgtgaaagaaagaatccttggtgggccatttctaaggatatatctgaag

SEQ ID NO: 254836 - DNA, 312 bp, Glycine max
  unsure (1)..(312): unsure at all n locations
gacagcanaaacaattaataaagatgagtttgaagaacaacatggtggtgctaaaggtgtgtttgttgcttcctttccttgtgggggttacagctgcacgcatggaactgagcttcttcaaaagtgatcagtcatcaagttatgatgatgatgagtattcacaaccatgctgtgatctctgcatgtgcacacgctcaatgcctccccaatgcagctgtgaagatattaggctgaattcatgccactcacattgtaagagctgtatgtgcacacgctcacaagcaggacactgtccttgtcctgacaccaaac

SEQ ID NO: 254837 - DNA, 317 bp, Glycine max
gattcacacaactaactaagaaagtcttccatagccccccaaaaatgaagagcaccatcttctttgctctctttctcttttgtgccttcaccacctcatacctaccttcagccatcgctgatttcgtgctcgataatgaaggtaaccctcttgaaaatggtggcacatattatatcttgtcagacataacagcatttggtggaataagagcagccccaacgggaaatgaaagatgccctctcactgtggtgcaatctcgcaatgagctcgacaaagggattggaacaatcatctcgtccccatatcgaatccgtttt

SEQ ID NO: 254838 - DNA, 373 bp, Glycine max
gacagcaaaaacaattaataaagatgagtttgaagaacaacatggtggtgctaaaggtgtgtttgttgcttcttttccttgtgggggttacagctgcacgcatggaactgagcttcttcaaaagtgatcagtcatcaagttatgatgatgatgagtattcaaaaccatgctgtgatctctgcatgtgcacacgctcaatgcctcctcaatgcagctgtgaagatattaggctgaattcatgccactcagattgtaagagctgtatgtgcacacgctcacagccaggacagtgtcgttgtcttgacaccaacgacttctgctacaaaccttgcaagtccagagatgactagaacaactaatagctctctcaaat

SEQ ID NO: 254839 - DNA, 384 bp, Glycine max
  unsure (1)..(384): unsure at all n locations
gatgcaactgaataattaagaaaagccatttccatagcagcctaagaaaatgaagagcactagcttgttcgctatctttctactctgcgccttcacctcatacctaccttccgccaccgcccaggacgtgctcgacgtggatggcgatccgattcggaacggtttcatatactacgttttgccggcaataagaggaaacggtggcggaatagaacgagccgcactcgggaaagacacttgccctatcactgtagtgcaatctcncaatccaaactctaaggggttagaaattaagttttgaatctgcatacccgcctattacattaacgaaaccctaattttgcaaataaagttcagtttaccacagcagtgtgaaagaaagaa

SEQ ID NO: 254840 - DNA, 339 bp, Glycine max
gcactcactcatacaatagagaccagcctttgcttctttgtgaacatggagatgaggaaatcatgtggcttcttcttcttgctcctcctccttgtctttgcttcccaggtggtggtgcagacggagggaagagtgtgtgagtcacaaagccacgggttccatggtttgtgtaatagagaccacaactgtgctttggtctgcaggaacgaaggtttctccggtggcaggtgcaaaggcttccgccgccgctgcttttgcaccaggatttgttgagatctcatcaaacactactcttgccatgcaaattaataaaccatagctaggccaaataaattgcat

SEQ ID NO: 254841 - DNA, 412 bp, Glycine max
gacagcaaaaacaattaataaagatgagtttgaagaacaacatggtggtgctaaaggtgtgtttgttgcttcttttccttgtgggggttacagctgcacgcatggaactgagcttcttcaaaagtgatcagtcatcaagttatgatgatgatgagtattcaaaaccatgctgtgatctctgcatgtgcacacgctcaatgcctcctcaatgcagctgtgaagatattaggctgaattcatgccactcagattgtaagagctgtatgtgcacacgctcacagccaggacagtgtcgttgtcttgacaccaacgacttctgctacaaaccttgcaagtccagagatgactagaaaaactaatagctctctcaaatggacgaagcccctttaagctttgtttgttatgttaaggg

SEQ ID NO: 254842 - DNA, 333 bp, Glycine max
gacagcaaaaacaattaataaagatgagtttgaagaacaacatggtggtgctaaaggtgtgtttgttgcttcttttccttgtgggggttacagctgcacgcatggaactgagcttcttcaaaagtgatcagtcatcaagttatgatgatgatgagtattcaaaaccatgctgtgatctctgcatgtgcacacgctcaatgcctcctcaatgcagctgtgaagatattaggctgaattcatgccactcagattgtaagagctgtatgtgcacacgctcacagccaggacagtgtcgttgtcttgacaccaacgacttctgctacaaaccttgca

SEQ ID NO: 254843 - DNA, 272 bp, Glycine max
gctccaccgtgcacctaatttctctcccaagggatttcaacaagttcaggtccatgcacatgtatgacatagttgtcaagaacaagaactacttcgaagttagggatatgtaataaggatttgtggaaaaaactatgcatggcccaaattgggcatggtatgtataaccttcttgatgtgtctcactcgatttgtgtcaaccctacaaaatttaattcttgggagagcaattttctctcttaattttttcttctgatttttatatctacatg

SEQ ID NO: 254844 - DNA, 372 bp, Glycine max
gacagcaaaaacaattaataaagatgagtttgaagaacaacatggtggtgctaaaggtgtgtttgttgcttcttttccttgtgggggttacagctgcgcgcatggaactgagcttcttcaaaagtgatcagtcatcaagttatgatgatgatgagtattcaaaaccatgctgtgatctctgcatgtgcacacgctcaatgcctcctcaatgcagctgtgaagatattaggctgaattcatgccactcagattgtaagagctgtatgtgcacacgctcacagccaggacagtgtcgttgtcttgacaccaacgacttctgctacaaaccttgcaagtccagagatgactagaaaaactaatagctctctcaaa

SEQ ID NO: 254845 - DNA, 415 bp, Glycine max
  unsure (1)..(415): unsure at all n locations
gactttgagttcgaactaaacaattcaattcaatctgcctcgatcatggagaggaaaacatttgggtttttgttcttgctcctccttgtcttagcttctgatgtgacggtgaagagagcagaggcgaaagattgcttgacaaggaggcacgggttccagggtagatgcttattcgacaggcaatgtgcacatgtgtgcaggagcgatggtttcatcggtggtcagtgccgaggccctcttcgcaaatgcttttgcagcaggccatgttgatcgaaattactactgccaaagaggccatgaaataaacaaacaaacaaataaataaatagctctaaccgacacatatgtacgtagtgtcggggttctagctagctaggtaggtacgtgtgtcntttgttatcgatcctagtttggt

SEQ ID NO: 254846 - DNA, 390 bp, Glycine max
  unsure (1)..(390): unsure at all n locations
gacacttgacaggaaaaacagtaaagatgggtttgaagaacaacatggtggtgctaaaggtgtgtttcttggttcttttccttgtgggggttactaatgcacgcatggaactgaacctcttcaaaagtgatcactcatcaagtgatgatgagtcttcaaaaccatgctgtgatctctgcatgtgcacagcctcaatgccacctcaatgccattgtgcagatattncgttgaattcatgtcactcagcttgtgatcgctgtgcgtgcaaacgctcaatgccaggccagtgtcattgccttgacaccaccgacttctgctaaaaaccttgcaagttcagtgatgaagataatgactaggaattaatcaacaaaagctctctcaaatgaacaa

SEQ ID NO: 254847 - DNA, 420 bp, Glycine max
gagcgccaatgtttttttcagaggagtttcatcttgtaatcaaaagagtttatcttatagtaagaaatcgatgtcttactccattttaaggaacaaaacaagagaacaatagcctgacaaagggtttagccataaaatcgaatccatcattgatttgagatattgataaggtgaatactcatttctcgtcaatgctaggcataatgcgggtatagggacctaaaaaagattatcttttcttcctatcttatgaactttaaggtgtatgaagtgtcatttcctatcttagattttaattttagtaggtagataaagagtccatttaacttaagttgatctaggccagaagcagacctacgtcaagataatccttctttgaaacactttggtagtgctcttagattgtaatccaaataaaaa

SEQ ID NO: 254848 - DNA, 424 bp, Glycine max
gacagcaaaaacaattaataaagatgagtttgaagaacaacatggtggtgctaaaggtgtgtttgttgcttcttttccttgtgggggttacagctgcacgcatggaactgagcttcttcaaaagtgatcagtcatcaagttatgatgatgatgagtattcaaaaccatgctgtgatcactgcatgtgcacacgctcaatgcctcctcaatgcatctgtgaagatattaggctgaattcatgccactcagattgtaagagctgtatgtgcacacgctcacagccaggacagtgtcattgtcttgacaccaacgacttctgctacaaaccttgcaagtccagagatgactagaaaaactaatagctctctcaaatggacgaagcccctttaggctttgtttgttaagttacgggagaccaataaaa

SEQ ID NO: 254849 - DNA, 408 bp, Glycine max
  unsure (1)..(408): unsure at all n locations
gcttcacagcaaaaacaattaataaagatgagtttgaagaacaacatggtggtgctaaaggtgtgtttgttgcttcttttccttgtgggggttacagctgcacgcatggaactgagcttcttcaaaagtgatcagtcatcaagttatgatgatgatgagtattcaaaaccatgctgtgatctctgcatgtgcgcacgctcaatgcctcctcaatgcagctgtgaagatattaggctgaattcatgccactcagattgtaagagctgtatgtgcacacgctcacagccaggacagtgtcgttgtcttgacaccaacgacttctactacaaaccttgcaagtccggagatgactagaaaaactaatagctctctcaaatggacgaagcccctttaggctttgtntgttat

SEQ ID NO: 254850 - DNA, 416 bp, Glycine max
ggacatggtgctggtgactcactactttgacaacacgacagagattggcgcatcttcaaagtccacagctgttttcataccacatggtcctggcgcagttaatgatattgccatgcagattcgggatggtctgcttcaggccaccacttcacagaattaagctttcctgaagttgtaactaacacatagtaccgtgccagattttttttgagtaaatgcttttcttgtttgggcttaaaatgtcggaatctttactcttatattggatagattcatggcagtgtcgatgtttatgcatgtagatactgatattcacttttgacatacttgtatgaggatagtcttaatgtcaagttgcatgggaatcatactaattgtggggttgttatgtaagaattacttcccacatgatgtgc

SEQ ID NO: 254851 - DNA, 373 bp, Glycine max
  unsure (1)..(373): unsure at all n locations
agggacagcacanacaattaatacagatgagtttgaagaacaacatggtggtgctaaaggtgtgcttgttgcttcctttccttgtgggggttacagctgcacgcatggaactgagcttcttcanaagtgatcagtcatcaagttatgatgatgatgagtattcaaaaccatgctgtgatctctgcatgtgcacacgctcaatgcctcctcaatgcagctgtgaagatattaggctgaattcatgccactcagattgtaagagctgtatgtgcacacgctcacagccaggacagtgtcgttgtcctgacaccaacgacttctgctacaaaccttgcaagtccagagatgactagaaaaactaatagctctctca

SEQ ID NO: 254852 - DNA, 379 bp, Glycine max
gatgcaactgaataattaagaaaagccatttccatagcagcctaagaaaatgaagagcactagcttgttcgctatctttctactttgcgccttcacctcatacctaccttccgccaccgcccaggacgtgctcgacgtggatggcgatccgattcggaacggtttcatatactacgttttgccggcaataagaggaaacggtggcggaatagaacgagccgcactcgggaaagacacttgccctatcactgtagtgcaatctcccaatccaaactctaaggggttagaaattaagtttgaatctgcataccccgcctattacataaacgaaaccctaattttgcaaataaagttcagttacccacagcagtgtgaaaga

SEQ ID NO: 254853 - DNA, 402 bp, Glycine max
gacagcaaaaacaattaataaagatgagtttgaagaacaacatggtggtgctaaaggtgtgtttgttgcttcttttccttgtgggggttacagctgcacgcatggaactgagcttcttcaaaagtgatcagtcatcaagtcatgatgatgatgagtattcaaaaccatgctgtgatctctgcatgtgcacacgctcaatgcctcctcaatgcagctgtgaagatattaggctgaattcatgccactcagattgtaagagctgtatgtgcacacgctcacagccaggacagtgtcgttgtcttgacaccaacgacttctgctacaaaccttgcaagtccagagatgactagaaaaactaatagctctctcaaatggacgaaacccctttaagctttgtttgtt

SEQ ID NO: 254854 - DNA, 331 bp, Glycine max
gagtcgcaaccctaataagaagaaccacagcttcaagcgagtgacatccaccagccatgggtcgtatgcacagccgcggtaagggtatatcctcttctgctttgccctacaaaaggacaccccctagctggctcaagatctcttcgcaagatgtggaagaaaatatctgcaagtttgcgaagaagggtttgaccccgtctcagattggtgtcattcttcgagattctcacggtattgctcaggtcaacagcgtcactggcagcaaaatccttcgcatcctcaaagctcacgggcttgcgcctgaaattccagaggatctttaccatttgat

SEQ ID NO: 254855 - DNA, 396 bp, Glycine max
ggcgtaggcaaagagagagagagaaaagcgtgaatcatgtcggacgaagagcatcacttcgattctcaggcggatgcgggagcgtccaagacgtatcctcagcaggctggtaccattcgcaagaatggctacatcgtcatcaaatccaggccttgcaaggttgtagaggtctctacgtcaaagacaggcaagcatggacatgcaaagtgtcactttgttgcaattgatatttttaatgggaaaaagcttgaagatattgttccatcatcccacaactgtgatgttccacatgtgaatcgcactgactatcagcttattgatatctctgaagacggctttgtgagtctgttgactgataatggaaataccaaggatgatctgaagcttcctactgat

SEQ ID NO: 254856 - DNA, 383 bp, Glycine max
  unsure (1)..(383): unsure at all n locations
gaatcctctgttgtttctcagccgcctcggctagggttcggaaacgaagaagggttctgttttcttttcgcgatgagggccaagtggaagaagaagcgtatgaggaggctgaagaggaagcgccgaaagatgagacagagatccaagtagtgcgttaaacctagtttgtttccgttgcttttacaattgcttatgttgtcaaataggacacccagttgttagtggcactggtctctcctttttgatgttttgatacattttgttggattttatttcgtcttatgttcttagctgaaaacaatgctgttactgtgtttgcgaatcaacaggatatcttggttgtaaaaaaaaaaaanaanataaaaaaaaaaagcgggcgctct

SEQ ID NO: 254857 - DNA, 400 bp, Glycine max
gacagcaaaaacaattaataaagatgagtttgaagaacaacatggtggtgctaaaggtgtgtttgttgcttcttttccttgtgggggttacagctgcacgcatggaactgagcttcttcaaaagtgatcagtcatcaagttatgatgatgatgagtattcaaaaccatgctgtgatctctgcatgtgcacacgctcaatgcctcctcaatgcagctgtgaagatattaggctgaattcatgccactcagattgtaagagctgtatgtgcacacgctcacagccaggacagtgtcgttgtcttgacaccagcgacttctgctacaaaccttgcaagtccagagatgactagaaaaactaatagctctctcaaatggacgaagcccctttaggctttgtttg

SEQ ID NO: 254858 - DNA, 359 bp, Glycine max
ggaagcttcaataagtaagtatcaatggcttccgaagaatcccagaacaagccccccagcgagcagtccactaccgaactcatcacgagcgcgaagctggtggcggaggcggcgcagtcggctctgaagagcgacagcgacaaagtggacaaggccaaggtggctgacgctgccggcgatcttctcgacgcggcggggaagtatggaaaacttgatgacaaacaaggcatagggcaatatgttgacaaggctgctgattatctgcataattaccagggtgataataccactgctccttcacagcctgcaaagtctaagtgtgaagaaagtggtggtgggttaggtggtcttgcaaactt

SEQ ID NO: 254859 - DNA, 362 bp, Glycine max
ggccctttcgcctacgcactgcggagagagaaattgagtttccgagataaccagttttctctttgattcatcaatggcaactgcgagggccgtgaaggatgtttcgcctcacgatttcgtgaaggcttatgcttcccacctcaagcgttccggcaagatggagcttcctgagtggaccgatattgtaaaaacagcaaaatttaaggagttggctccatatgatcctgactggtactacattagggctgcctcaatggcaagaaagatctatttgagaggtggtcttggtgttggtgctttccagaggatctatggtggaagcaaaagaaatggaagccgtcccccacatttctgcaagagca

SEQ ID NO: 254860 - DNA, 402 bp, Glycine max
ggttctagtgtatgtgattgttgtgactcgttcttcttcgtcgttatcttcttcttttgttgtttgtgtgtttgttttttctctcacctgaaaatgtcttgctgcggtggtaactgtggttgcggaagcgcctgcaagtgcggcaacggctgcggaggctgcaagatgtacccagacttgagctacaccgagtcaaccaccaccgagaccttggtcatgggagtggcaccagttaaggctcaattcgagagtgctgaaatgggtgttcccgcagagaacgatggctgcaaatgtggagctaactgcacctgcaacccctgcacttgcaagtgaagtgttggagagctaaagcttcaagcagaaatggcccttagaaatactgataaaaactatatgtagttt

SEQ ID NO: 254861 - DNA, 377 bp, Glycine max
gattcacacaactaactaagaaagtcttccatagccccccaaaaatgaagagcaccatcttctttgctctctttctcttttgtgccttcaccacctcatacctaccttcagccatcgctgatttcgtgctcgataatgaaggtaaccctcttgaaaatggtggcacatattatatcttgtcagacataacagcatttggtggaataagagcagccccaacgggaaatgaaagatgccctctcactgtggtgcaatctcgcaatgagctcgacaaagggattggaacaatcatctcgtccccatatcgaatccgttttatcgccgaaggccatcctttgagccttaagttcgattcatttgcagttataatgctgtgt

SEQ ID NO: 254862 - DNA, 369 bp, Glycine max
gacatcaaacatatacacaaaagagcactgaccaaaccattttattttatttttgaatcaagggtgagggccttccatggcttccgcttgtgcttcctctgcaattacagctgttgccatctctacgccgagttccgggcagaagaatggatcaggaggttgttttcttagtggaaggaaattgagggtgaaaaaggagagagcagcaattggaggacgatcgatgggcactacagtgtgcgcagttgctgagcctgacagacctctatggttcccaggcagcaaccctcctccatagcttgatggcactctacctggagacttcggctttgaccctcttggtcttggatctgacccgggagagtctga

SEQ ID NO: 254863 - DNA, 400 bp, Glycine max
  unsure (1)..(400): unsure at all n locations
gacagcanaaacaattaataaagatgggtttgaagaacaacatggtggtgctaaaggtgtgtttgttgcttcttttccttgtgggggttacagctgcacgcatggaactgagcttcttcaaaagtgatcagtcatcaagttatgatgatgatgagtattcaaaaccatgctgtgatctctgcatgtgcacacgctcaatgcctcctcaatgcagctgtgaagatattaggctgaattcatgccactcagattgtaagagctgtatgtgcacacgctcacagccaggacagtgtcgttgtcttgacaccaacgacttctgctacaaaccttgcaagtccagagatgactagaaaaactaatagctctctcaaatggacgaagcccctttaggctttgtttg

SEQ ID NO: 254864 - DNA, 415 bp, Glycine max
gggaaggggaagctggccatgacggtggaggtattcgaggtggcgccggaggtcgcggtggtcgagttctccaagtccgccggagacacgcttgaataccttaatttctgtgaggaccaagtcagaccttcgctcagggatattgtgtggagttggcaaggggacgctaattgccaccagtaactagtcaattcaatttagattattgcagcatgcaataaatatctggagtttgggatgttgattgaacataataagaattaagaatcatcttgattgacccttcttagttcttattatttcctcctcttaagcttatgactttctgttgtatttctttttaagattaagagttaagacagaggacatcccgttaatctgtatgatgtcagaatttgttctatgctagactact

SEQ ID NO: 254865 - DNA, 370 bp, Glycine max
gactttgagttcgaactaaacaattcaattcaatctgcctcgatcatggagaggaaaacatttgggtttttgttcttgctcctccttgtcttagcttctggtgtgacggtgaagagagcagaggcgaaagattgcttgacaaggaggtacgggttccagggtagatgcttattcgacaggcaatgtgcacatgtgtgcaggagcgatggtttcatcggtggtcagtgccgaggccctcttcgcaaatgcttttgcagcaggccatgttgatcgaaattactactgccaaagaggccatgaaataaacaaacaaacaaataaataaatagctctaaccgacacatatgtacgtagtgtcggggttctagct

SEQ ID NO: 254866 - DNA, 416 bp, Glycine max
gatgcaactgaataattaagaaaagccatttccatagcagcctaagaaaatgaagagcactagcttgttcgctatctttctactttgcgccttcacctcatacctaccttccgccaccgcccaggacgtgctcgacgtggatggcgatccgattcggaacggtttcatatactacgttttgccggcaataagaggaaacggtggcggaatagaacgagccgcactcgggaaagacacttgccctatcactgtagtgcaatctcccaatccaaactctaaggggttagaaattaagtttgaatctgcgtaccccgcctattacataaacgaaaccctaattttgcaaataaagttcagttacccacagtagtgtgaaagaaagaatccttggtgggccatttctaaggatatatctg

SEQ ID NO: 254867 - DNA, 364 bp, Glycine max
gacagcaaaaacaattaataaagatgggtttgaagaacaacatggtggtgctaaaggtgtgtttgttgcttcttttccttgtgggggttacagctgcacgcatggaactgagcttcttcaaaagtgatcagtcatcaagttatgatgatgatgagtattcaaaaccatgctgtgatctctgcatgtgcacacgctcaatgcctcctcaatgcagctgtgaagatattaggctgaattcatgccactcagattgtaagagctgtgtgtgcacacgctcacagccaggacagtgtcgttgtcttgacaccaacgacttctgctacaaaccttgcaagtccagaaatgactaaaaaaactaatagct

SEQ ID NO: 254868 - DNA, 396 bp, Glycine max
gacagcaaaaacaattaataaagatgagtttgaagaacaacatggtggtgctaaaggtgtgtttgttgcttcttttccttgtgggggttacagctgcacgcatggaactgagcttcttcaaaagtgatcagtcatcaagttatgatgatgatgagtattcaaaaccatgctgtgatctctgcatgtgcacacgctcaatgcctcctcaatgcagctgtggagatattaggctgaattcatgccactcagattgtaagagctgtatgtgcacacgctcacagccaggacagtgtcgttgtcttggcaccaacgacttctgctacaaaccttgcaagtccagagatgactagaaaaactaatagctctctcaaatggacgaagcccctttaggctttg

SEQ ID NO: 254869 - DNA, 379 bp, Glycine max
gattcacacaactaactaagaaagtcttccatagccccccaaaaatgaagagcaccatcttctttgctctctttctcttttgtgccttcaccacctcatacctaccttcagccatcgctgatttcgtgctcgataatgaaggtaaccctcttgaaaatggtggcacatattatatcttgtcagacataacagcatttggtggaataagagcagccccaacgggaaatgaaagatgccctctcactgtggtgcaatctcgcaatgagctcgacaaagggattgggacaatcatctcgtccccatatcgaatccgttttatcgccgaaaggcatcctttgagccttaagttcgattcatttgcagttaaaatgctgtgtgt

SEQ ID NO: 254870 - DNA, 332 bp, Glycine max
gacagcaaaaacaattaataaagatgagtttgaagaacaacatggtggtgctaaaggtgtgtttgttgcttcttttccttgtgggggttacagctgcacgcatggaactgagcttcttcaaaagtgatcagtcatcaagttatgatgatgatgactattcaaaaccatgctgtgatctctgcatgtgcacacgctcaatgcctcctcaatgcagctgtgaagatattacgctgaattcatgccactcagattgtaagagctgtatgtgcacacgctcacagccaggacagtgtctttgtcttgacactaacgatttctgctacaaaccttgc

SEQ ID NO: 254871 - DNA, 76 bp, Glycine max
gatagcagcatcatacaaagcattgaattcaaaaacttaagttcattccttgtgttttgctttcttcctcaaaacc

SEQ ID NO: 254872 - DNA, 404 bp, Glycine max
ggagttcgaactaaacaattcaattcaatctgcctcgatcatggagaggaaaacatttgggtttttgttcttgctcctccttgtcttagcttctgatgtgacggtgaagagagcagaggcgaaagattgcttgacaaggaggcacgggttccagggtagatgcttattcgacaggcaatatgcacatgtgtgcaggagcgatggtttcatcggtggtcagtgccgaggccctcttcgcaaatgcttttgcagcaggccatgttgatcgaaattactactgccaaagaggccatgaaataaacaaacaaacaaataaataaatagctctaaccgacacatatgtacgtagtgtcggggttctagctagctaggtaggtacgtgtgtcttttgttatcgattctag

SEQ ID NO: 254873 - DNA, 376 bp, Glycine max
gacacaactaactaagaaagtcttccatagccccccaaaaatgaagagcaccatcttctttgctctctttctcttttgtgccttcaccacctcatacctaccttcagccatcgctgatttcgtgctcgataatgaaggtaaccctcttgaaaatggtggcacatattatatcttgtcagacataacagcatttggtggaataagagcagccccaacgggaaatgaaagatgccctctcactgtggtgcaatctcgcaatgagctcgacaaggggattggaacaatcatctcgtccccatatcgaatccgttttatcgccgaaggccatcctttgagccttaagttcgattcatttgcagttataatgctgtgtgtt

SEQ ID NO: 254874 - DNA, 425 bp, Glycine max
gagcgccaagccaaagaaaagataatactaatactaacaataacaacccacgaagcttaggccttgcaaagtaagttcatttgactctcacaaaccttgcatccatccacacatggctggcatgaactctagcgtattggcctgtagctatgccatatctggtgcagcatgctccgagctcaatgggaaggtcacttccgtggcctctgttgcatcctctggctacaagttgccattgatcaaatgtgaggccagagttcccaaagccaaagaatctgaaggaaggagaggtgcccttgttctcttggcaactacccttttcatctctgcagcctccaattcttctgccaatgctgggatcattgatgattaccttgagaggagcaaggctaacaaggaattgaatgacaagaagaggttagcta

SEQ ID NO: 254875 - DNA, 307 bp, Glycine max
gggtatgaagtgattgactttttttcttcttctattctcacacatacccatctactccttccctcatggctgaacaatcttccaactccatttacgatttcactgtcaaggacatcagtggaaatgatgtgagtctgaatgattacaacgggaacgttctactgattgtgaatgtcgcctctcaatgtggtttgacacagacaaattacaaacaattgaatgtattgtacgagaagtacaagaatcaacgatttgaaatcttggcatttccgtgcaaccagtttgctggacaggaaccaagaaaaca

SEQ ID NO: 254876 - DNA, 373 bp, Glycine max
gacacaactaactaagaaagtcttccatagccccccaaaatgaagagcaccatcttctttgctctctttctcttttgtgccttcaccacctcatgcctaccttcagccatcgctgatttcgtgctcgataatgaaggtaaccctcttgaaaatggtggcacatattatatcttgtcagacatagcagcatttggtggaataagagcagccccaacgggaaatgaaagatgccctctcactgttgtgcaatctcgcaatgagctcgacaaagggattggaacaatcatctcgtcgccatatcgaatccgtgttatcgccgaaggccatcctttgagccttaagttcgattcatttgcagttaaaatgctgtgtg

SEQ ID NO: 254877 - DNA, 404 bp, Glycine max
gacagcaaaaacaattaataaagatgagtttgaagaacaacatggtggtgctaaaggtgtgtttgttgcttcttttccttgtgggggttacagctgcacgcatggaactgagcttcttcaaaagtgatcagtcatcaagttatgatgatgatgagtattcaaaaccatgctgtgatctctgcatgtgcacacgctcaatgcctcctcaatgcagctgtgaagatattaggctgaattcatgccactcagattgtaagagctgtatgtgcacacgctcacagccaggacagtgtcgttgtcttgacaccaacgacttctgctacaaaccttgcaagtccagagatgactagaaaaactaatagctctctcaaatggacgaagcccctttaagctttgtttgttat

SEQ ID NO: 254878 - DNA, 374 bp, Glycine max
gacacaactaactaagaaagtcttccatagccccccaaaaatgaagagcaccatcttctttgctctctttctcttttgtgccttcaccacctcatacctaccttcagccatcgctgatttcgtgctcgataatgaaggtaaccctcttgaaaatggtggcacatattatatcttgtcagacatagcagcatttggtggaataagagcagccccaacgggaaatgaaagatgccctctcactgtggtgcaatctcgcaatgagctcgacaaagggattggaacaatcatctcgtccccatatcgaatccgttttatcgccgaaggccatcctttgagccttaagttcgattcatttgcagttataatgctgtgtg

SEQ ID NO: 254879 - DNA, 315 bp, Glycine max
gacagcaaaaacaattaataaagatgagtttgaagaacaacatggtggtgctaaaggtgtgtttgttgcttcttttccttgtgggggttacagctgcacgcatggaactgagcttcttcaaaagtgatcagtcatcaagttatgatgatgatgagtattcaaaaccatgctgtgatctctgcatgtgcacacgctcaatgcctcctcaatacagctgtgaagatattaggctgaattcatgccactcagattgtaagagctgtatgtgcacacgctcacagccaggacagtgtcgttgtcttgacaccaacgact

SEQ ID NO: 254880 - DNA, 393 bp, Glycine max
gactcaccaagtgaaccaatatagcccaagccctatacaaccaaaccctaacacacacccatttgattcagtttccatggctagcctcaaggttgcatttttggctgcagtgctctgcatggttgtggtgagtgcacccatggcacatgcagctatcacgtgcgggcaggtgacgaatagcctgatcaattgcatcggttacctccagaacggaggaacgccgccgtcgggatgctacaacggagtgaagagcctcaatgccgccgccaagaccaccgccgaccgccagacggcatgcaactgcctcaagtcggccgccagccaaatctccggcttcaaagccaacaacgccgcctcgctccccggcaaatgcggagtctccatcccctacaa

SEQ ID NO: 254881 - DNA, 388 bp, Glycine max
ggaactgagcttcttcaaaagtgatcagtcatcaagttatgatgatgatgagtattcaaaaccatgctgtgatctctgcatgtgcacacgctcaatgcctcctcaatgcagctgtgaagatattaggctgaattcatgccactcagattgtaagagctgtatgtgcacacgctcacagccaggacagtgtcgttgtcttgacaccaacgacttctgctacaaaccttgcaagtccagagatgactagaaaaactaatagctctctcaaatggacgaagcccctttaggctttgtttgttatgttaggggagacatataacacaagaaataaaagctcagtggccagtaatttgcttttagcaaatttggtcatttttattaagaaaaa

SEQ ID NO: 254882 - DNA, 397 bp, Glycine max
gggagttgagttgagaaggaaaggctgaagaacacatagagagagagagagaagtgcagaaaaaatgagactgttcgatccatggcctgttttcttcaagagagaatggaagcggaattggcccttcttggttggattcgccatcaccggaactctcatcaccaaactttcccttggtctctctgaggaggaagccaaaaagtcgaaattcgtccaggcacacaagaggtgactttagaatggaagatttgcagtggctttgcacattgtattagatgtgtgaagagagcttttgtttgtaataaatgaagagagatgttgtatacactccatgttcctatttccattttggttgtttactttaatgtgattgagaaattcatactaagcagttctg

SEQ ID NO: 254883 - DNA, 391 bp, Glycine max
  unsure (1)..(391): unsure at all n locations
gacagcanaaacaattaataaagatgagtttgaagaacaacatggtggtgctaaaagtgtgtttgctgcttcttttccttgtgggggttacagctgcacgcatggaactgagcttcttcaaaagtgatcagtcatcaagttatgatgatgatgagtattcaaaaccatgctgtgatctctgcatgtgcacacgctcaatgcctcctcaatgcagctgtgaagatattacgctgaattcatgccactcagattgtaagagctgtatgtgcacacgctcacagccaggacagtgtcgttgtcctgacaacaacgacttctgctacaaaccttgcaagtccagagatgactagaaaaactaatagctctctcaaatgtgacaaacccctttaag

SEQ ID NO: 254884 - DNA, 401 bp, Glycine max
gacagcaaaaacaattaataaagatgagtttgaagaacaacatggtggtgctaaaggtgtgtttgttgcttcttttccttgtgggggttacagctgcacgcatggaactgagcttcttcaaaagtgatcagtcatcaagttatgatgatgatgagtattcaaaaccatgctgtgatctctgcatgtgcacacgctcaatgcctcctcaatgcagctgtgaagatattaggctgaattcatgccactcagattgtaagagctgtatgtgcacacgctcacagccaggacagtgtcgttgtcttgacaccaacgacttctgctacaaaccttgcaagtccagagatgactagaaaaactaatagctctctcaaatggacgaagcccctttaagctttgtttgt

SEQ ID NO: 254885 - DNA, 411 bp, Glycine max
gacagcaaaaacaattaataaagatgagtttgaagaacaacatggtggtgctaaaggtgtgtttgttgcttcttttccttgtgggggttacagctgcacgcatggaactgagcttcttcaaaagtgatcagtcatcaagttatgatgatgatgagtattcaaaaccatgctgtgatctctgcatgtgcacacgctcaatgcctcctcaatgcagctgtgaagatattaggctgaattcatgccactcagattgtaagagctgtatgtgcacacgctcacagccaggacagtgtcgttgtcttgacaccaacgacttctgctacaaaccttgcaagttcagagatgactagaaaaactaatagctctctcaaatggacgaacccctttaagctttgtttgttatgttggggg

SEQ ID NO: 254886 - DNA, 414 bp, Glycine max
gacgaacttctataataataagctccgacgacagcagatcataagcgcagttcgttccacgttgttgtccgctctgtggctctctacatttcatcactcatcggaaaaatggctctcgaggttgctgttaaggctgctgttggtgctccaaatgttctcggagattgtccattttcccaaagggtcctcttaactttagaggagaagaaaatcccttacaaactccacctcatcgatctcagtagtaaacccgaacggtttttgggtgtgaatcccgaagggaaggtgccagtggttctttttgatggcaaatgggtggctgattctgatgtgattgtggggatactcgaggaaaagtacccagaaccctctctcgtcactcctcctgaatttgcctccgtgggattaaagata

SEQ ID NO: 254887 - DNA, 362 bp, Glycine max
ggagcaaacaaaccgaaacacattcaccacgatggcgaccaaaacgatggaggtggtgaagggtctggacgtgaaacggtacatgggtcggtggtacgagattgcgtgtttcccgtcgaggtttcagcccagtgacggcgtcaacaccagagccacctacgctctcagagatgacggcaccgtcaacgttctcaatgagacttggagtggcggcaaaagaagcttcattgagggcactgcttataaggccgatcccaacagtgacgaggccaagttgaaggtcaggttctgggtgcctccgttcttacccctttttcccgttactggggattactgggttttgtacattgaccaagattatc

SEQ ID NO: 254888 - DNA, 397 bp, Glycine max
gcacacaactaactaagaaagtcttccatagccccccaaaaatgaagagcaccatcttctttgctctctttctcttttgtgccttcaccacctcatacctaccttcagccatcgctgatttcgtgctcgataatgaaggtaaccctcttgaaaatggtggcacatattatatcttgtcagacataacagcatttggtggaataagagtagccccaacgggaaatgaaagatgccctctcactgtggtgcaatctcgcaatgagctcgacaaagggattggaacaatcatctcgtccccatatcgaatccgttttatcgccgaaggccatcctttgagccttaagttcgattcatttgcagtttatatgctgtgtgttggaattcctaccgagtggtc

SEQ ID NO: 254889 - DNA, 417 bp, Glycine max
gacagcaaaaacaattaataaagatgagtttgaagaacaacatggtggtgctaaaggtgtgtttgttgcttcttttccttgtgggggttacagctgcacgcatggaactgagcttcttcaaaagcgatcagtcatcaagttatgatgatgatgagtattcaaaaccatgctgtgatctctgcatgtgcacacgctcaatgcctcctcaatgcagctgtgaagatattaggctgaattcatgccactcagattgtaagagctgtatgtgcacacgctcacagccaggacagtgtcgttgtcttgacaccaacgacttctgctacaaaccttgcaagtccagagatgactagaaaaactaatagctctctcaaatggacgaagcccctttaggctttgtttgttatgttaggggagaca

SEQ ID NO: 254890 - DNA, 343 bp, Glycine max
ggcgagagaagttattagggtttttgagtgcggcggtccaaacactcttctctgcagcttttgcctacaactcccttcaccatggctgaacaaaccgagaaagcttttctgaagcaaccaaaagtgtttctcagcacaaagaagactgggaagggaaagagacctggaaaaggtgggaaccgcttttggaagtccattgggcttggatttaagactcccagggaagccatcgaaggaacctatattgacaagaagtgccccttcactggcaatgtttccatccgtggccgtatcttggctggaacatgtcacagtgctaagatgaacaggactattattgtta

SEQ ID NO: 254891 - DNA, 328 bp, Glycine max
ggagacgagggtaaggtcgcgttgtgttgcgtcgtgtcgtgcgctgttcctctgtctgtcgtttttgttttcagaccaaaccctagctccgcatcgcaaccatgtcgaccaagcaaggtggaaaagctaagcctttgaagaaacccaagtctgataagaaggattacgacgaggttgacatggctaacattcagaagaaaaaggaagaggagaaggcgctaaaggagttgaaagccaaggcgcaacagaagggaagctttggaggttctgggctcaagaaaagtggaaagaaataagggctctttatcatgattgtatacatccaata

SEQ ID NO: 254892 - DNA, 400 bp, Glycine max
gactcactcatacaatagagaccagcttttgcttctttgtgaacatggagatgaggaaatcatgtggcttcttcttcttgctcctcctccttgtctttgcttcccaggtggtggtgcagacggagggaagagtgtgtgagtcacaaagccacgggttccatggtttgtgtaatagagaccacaactgtgctttggtctgcagggacgaaggtttctccggtggcaggtgcaaaggcttccgccgccgctgcttttgcaccaggatttgttgagatctcatcaaacactactcttgccatgcaaattaataaatcatagctaggccaaataaattgcatctactctttatccatttgggagctagctaccacaaccaactcatacttggtcattggattgc

SEQ ID NO: 254893 - DNA, 396 bp, Glycine max
gacacttgacaggaaaaacagtaaagatgggtttgaagaacaacatggtggtgctaaaggtgtgtttcttggttcttttccttgtgggggttactaatgcacgcatggaactgaacctcttcaaaagtgatcactcatcaagtgatgatgagtcttcaaaaccatgctgtgatctctgcatgtgcacagcctcaatgccacctcaatgccattgtgcagatattaggttgaattcatgtcactcagcttgtgatcgctgtgcgtgcacacgctcgatgccaggccagtgtcgttgccttgacaccaccgacttctgctacaaaccttgcaagtccagtgatgaagatgatgactaagaattaatcaacaaaagctctctcaaatgaacaaagccct

SEQ ID NO: 254894 - DNA, 400 bp, Glycine max
gacagcaaaaacaattaataaagatgagtttgaagaacaacatggtggtgctaaaggtgtgtttgttgcttcttttccttgtgggggttacagctgcacgcatggaactgagcttcttcaaaagtgatcagtcatcaagttatgatgatgatgagtattcaaaaccatgctgtgatctctgcatgtgcacacgctcaatgcctcctcaatgcagctgtgaagatattaggctgaattcatgccactcagattgtaagagctgtatgtgcacacgctcacagccaggacagtgtcgttgtcttgacaccaacgacttctgctacaaaccttgcaagtccagagatgactagaaaaactaatagctctctcaaatggacgaagcccctttaagctttgtttg

SEQ ID NO: 254895 - DNA, 341 bp, Glycine max
tgggaagcaaggacggaagaaataaaccgaatgagagcattaacctcgtcttcatccacgttcattccaaagcgttattccttcatcgtcttcctctcgattctcttcgctcttcgatcctcgtcagggggctgctccgaataccaccaccatcacgcgccgatggccactataggatgcttacacgactcgcaaggctctcaggacagcgtccagagtgaggcccacgctcagttcgcacgtcgatgaatacatgaagaagcacaactcacttctggagttctcaacggtggtgatgacacatgaacacgttgttgcgggaaccctgcatcaccgtactc

SEQ ID NO: 254896 - DNA, 406 bp, Glycine max
gacagcaaaaacaattaataaagatgagtttgaagaacaacatggtggtgctaaaagtgtgtttgttgcttcttttccatgtgggggttacagctgcacacatggaactgaacttcttcaaaagtgatcagtcatcaagttatgatgatgatgagtattcaaaaccatgcatgtgatctctgcatgtgcacacgctcaatgcctcctcaatgcagctgtgaacatattatgctgaattcatgccactcacactgtaagagcagtatatgcacacgctcatagccaggacagtgtcgttgtcttgacaacagcgacttctgctacaaaccttgcaagtccagagatgactagaaaaactaatatctctctcaaatggacgtaaccccttgaggttatgtatgttatg

SEQ ID NO: 254897 - DNA, 401 bp, Glycine max
gacgcaactaaataagaaatgaagagtactatcttctttgctctctttctagtttgtgccttcaccatctcatacctgccttcagccaccgctcagttcgtgctcgacactgatgatgatcctcttcaaaacggtggcacatactatatgttgccagttatgagaggaaagggcggtggaatagaagtagattcaactggaaaagaaatatgccctctcactgttgtgcaatcacccaatgagctcgataaggggattggactagtctttacatctccattacatgccctttttatcgccgaaggctatcctttgagcattaagtttggttcatttgcagttataacgctgtgtgccggcatgcctactgagtgggctattgtggagagagagggtctaca

SEQ ID NO: 254898 - DNA, 309 bp, Glycine max
gacagcaaaaacaattaataaagatgagtttgaagaacaacatggtggtgctaaaggtgtgtttgttgcttcttttccttgtgggggttacagctgcacgcatggaactgagcttcttcaaaagtgatcagtcatcaagttatgatgatgatgagtattcaaaaccatgctgtgatctctgcatgtgcacacgctcaatgcctcctcaatgcagctgtgaagatattaggctgaattcatgccactcagattgtaagagctgtatgtgcacacgctcacagccaggacagtgtcgttgtcttgacacca

SEQ ID NO: 254899 - DNA, 405 bp, Glycine max
gattcacacaactaactaagaaagtcttccatagccccccaaaaatgaagagcaccatcttctttgctctctttctcttttgtgccttcaccacctcatacctaccttcagccatcgctgatttcgtgctcgataatgaaggtaaccctcttgaaaatggtggcacatattatatcttgtcagacataacagcatttggtggaataagagcagccccaacgggaaatgaaagatgccctctcactgtggtgcaatctcgcaatgagctcgacaaagggattggaacaatcatctcgtccccatatcgaatccgttttatcgccgaaggccatcctttgagccttaagttcgattcatttgcagttataatgctgtgtgttggaattcctaccgagtggtctgttg

SEQ ID NO: 254900 - DNA, 412 bp, Glycine max
gacagcaaaaacaattaataaagatgagtttgaagaacaacatggtggtgctaaaggtgtgtttgttgcttcttttccttgtgggggttacagctgcacgcatggaactgagcttcttcaaaagtgatcagtcatcaagttatgatgatgatgagtattcaaaaccatgctgtgatctctgcatgtgcacacgctcaatgcctcctcaatgcagctgtgaagatattaggctgaattcatgccactcagattgtaagagctgtatgtgcacacgctcacagccaggacagtgtcgttgtcttgacaccaacgacttctgctacaaaccttgcaagtccagagatgactagaaaaactaatagctctctcaaatggacgaagcccctttaggctttgtttgttatgttagggg

SEQ ID NO: 254901 - DNA, 410 bp, Glycine max
gattcacgcaactaaataagaaatgaagagtactatcttctttgctctctttctagtttgtgccttcaccatctcatacctgccttcagccaccgctcagttcgtgctcgacactgatgatgatcctcttcaaaacggtggcacatactatatgttgccagttatgagaggaaagggcggtggaatagaagtagattcaactggaaaagaaatatgctctctcactgttgtgcaatcacccaatgagctcgataaggggattggactagtctttacatctccattacatgccctttttatcgccgaaggctatcctttgagcattaagtttggttcatttgcagttataacgctgtgtgccggcatgcctactgagtgggctattgtggagagagagggtctacaagctg

SEQ ID NO: 254902 - DNA, 432 bp, Glycine max
gacagcaaaaacaattaataaagatgagtttgaagaacaacatggtggtgctaaaggtgtgtttgttgcttcttttccttgtgggggttacagctgcacgcatggaactgagcttcttcaaaagtgatcagtcatcaagttatgatgatgatgagtattcaaaaccatgctgtgatctctgcatgcgcacacgctcaatgcctcctcaatgcagctgtgaagatattaggctgaattcatgccactcagattgtaagagctgtatgtgcacacgctcacagccaggacagtgtcgttgtcttgacaccaacgacttctgctacaaaccttgcaagtccagagatgactagaaaaactaatagctctctcaaatggacgaacccctttaagctttgtttgttatgttacgggagacaaatacaacaagaaata

SEQ ID NO: 254903 - DNA, 334 bp, Glycine max
tgggacagcaaaaacaattaataaagatgagtttgaagaacatcatggtggtgctaaaggtgtgtttgttgcttcttttccttgtgggggttacagctgcacgcatggaactgagcttcttcacaagtgatcagtcatcaagttatgatgatgatgagtattcaaatccatgctgtgatcactgcatgtgcacacgctcaatgcctcctcaatgcagctgtgaaaatactacgctgaattcatgccactcagattgtaagaactgtatgtgcacacgctcacagccatgacagtgtccttgtcatgacaccaaacacttctgctacaatgcttg

SEQ ID NO: 254904 - DNA, 346 bp, Glycine max
gacaggtgtttgcaatactagcgatagctgataagagagataccaacaagaaaagaaaaaaagaagagttgagattccctttgaagaaaagatggcatcccataggcaaagctatgaagctggtcaaactaagggccgaactgaggaaaagacgaaccagacgatgggcaatattggagagaaggctcaagctgcaaaggagaagacccaggaaatggcccaagctgcaaaggagaagacccaacaaacagcccaagctgccaaggacaagacttgcgacacttcccaagcggcaaaggagaagacccaacagaatacaggagctgctcaacaaaagacctcagag

SEQ ID NO: 254905 - DNA, 405 bp, Glycine max
gacagcaaaaacaattaataaagatgagtttgaagaacaacatggtggtgctaaaggtgtgtttgttgcttcttttccttgtgggggttacagctgcatgcatggaactgagcttcttcaaaagtgatcagtcatcaagttatgatgatgatgagtattcaaaaccatgctgtgatctctgcatgtgcacacgctcaatgcctcctcaatgcagctgtgaagatattaggctgaattcatgccactcagattgtaagagctgtatgtgcacacgctcacagccagggcagtgtcgttgtcttgacaccaacgacttctgctacaaaccttgcaagtccagagatgactagaaaaactaatagctctctcaaatggacgaagcccctttaagctttgtttgttatg

SEQ ID NO: 254906 - DNA, 413 bp, Glycine max
gagagcgaaagagatgtcgttggtttcaagcatgttcgggtgtggagtggtgatggcggcgtcgcaagcaatgggaattggaaggagaagcgatggtggattgacgatagtgtgttcgtctaggccgcagaagaaagcgacggcgcatcacatgaagactcggcctcggaagacgcaggcatgggatagaaaccgcaagcccaccgtctacgatccactccctcctcttcctcctgattggaccctcgttattcccgctgacgcttcttctgctcccgttacgcctccgcctccaactccctctgcctagtcactctctcggtactctctctcgttttcatgtagtcttatctttaattccagcagcttttctttcatgttttcatctcaaatcaaaccttcatcatttgttt

SEQ ID NO: 254907 - DNA, 375 bp, Glycine max
gacgatgagtcgatttgataactaagatattgttattcgtgatattgatccaatttgatatcatcgaaatccaatttataccattgttgaattaattatcgatgaaagatttatcatctctatgggattaaatcccgaattttttattggaaatttaagagaaataaaacataataaagattatggaagtaaatattcttgcatttattgctactgcactgtttattctagttcctactgcttttttacttataatttacgtaaaaacggtaagtcgaagtgactaatttcactgaaatctgacttcttcatttttatcaatgtaatcaatgattaaaaaaaatgaaaaaggttttcaatttttggtcttagtcc

SEQ ID NO: 254908 - DNA, 412 bp, Glycine max
ggcagatagtgattgagaattgggaattgcgatggatgggagaaacggaagcggaagcaggaggagtggggaagcaggaggaatggggaaggcgataatcgcgttggtaattgggagtcttgtgtactatcactgtgcctaccgcaattctacccttgtctctcttttttccgatgtcttcatcgtccttctctgctccctcgccattctcggtcttctattccgacaaatgggcatccagagagtgcgaacgcgatcgtggcatggttggccaatacgattggtggcgccgagtcagtgttcagggtggcggctactgggcacgacaagaggctgtttctgaaggtcattctttccctatatctcttctctgctcttggaagactcgccagagggattacagttgcctatg

SEQ ID NO: 254909 - DNA, 401 bp, Glycine max; identical to SEQ ID NO: 254884

SEQ ID NO: 254910 - DNA, 373 bp, Glycine max
agaaggggaacacaatactatgcattccctatgggcatagctttgagcagcaattgtgatcttatcagctatggcggagaaacacaaccttaagaatccagccgtgaagcggattctccaagagcacaaggagatgcaatcaaacccatccgatgactacctgagcctccctcttgaggaaaatatatttgaatggcaatttgctataagggggcctcgtgatgctgaatttgaaggtggtatttatcacggacggattcagctgccttcagaatatcccttcaaacctccttcgtttatgttgctcacacctagtggccgttttgagaaccaaaccaagatttgcttgagcatatcaaatcatcaccctgag

SEQ ID NO: 254911 - DNA, 304 bp, Glycine max
gacccacagggaggcgaacagagaaactcagagacccgaaggcagatttcaagatgaagttcaacattgcgaatcccaccaccggttgtcagaagaagctggagatcgatgatgacctgaagctgcgagcattttgggacaagaggatctcacaagaggttgttggtgatgctctgggtgaggaattcaaaggttatgtcttcaaaattactggaggttgcgacaagcaaggatttccaatgaagcaaggagtgttgacccctggtcgtgttcgcctcttgctgcatacaggaactccttgttt

SEQ ID NO: 254912 - DNA, 455 bp, Glycine max
  unsure (1)..(455): unsure at all n locations
ggcactacaaatcagttttttacttgaattttcttcatccttctctgttctcctagaacttgattacttgaacattccctatgacagatgaggtggttcttctggatttctggccaagtccatttgggatgagggtcaggattgcacttgctgaaaagggtatcgaatatgagtacaaagaagaggacttgaggaacaagagtcctcttctcttacaaatgaacccggttcacaagaagattccggttctcatccacaatggcaaacccatttccgaatccctcattgctgttcagtacattgangacgtttggaatgacagaaatcccttgttgccttcagacccttaccagagggctcaagctagattctgggctgattatgttgacattaagatacatgatcttggaaagaagatttggacatcaaaggagaagaaaagaagctgccaagaa
